United States Patent Application Publication US 2015/0240253 A1 - sequence listing, part 5

SEQ ID NO: 18449 - DNA, 545 bp, Zea Mays
caaacggggacatcttcgaactggcctggtagctattattgtgagagaactccgcatagggcgaactcttatcccaactaccaccatgtttaagagcacaagctcttcacatatcttccaatactttgttggttctctcggtctgcccatcagtttgaggatggtaggccgagctgaagttcagtcttgtatccaagcactcatgcaacttttgccaaaactgagaagtaaactgagatcctcgatccgatacgatcttcttaggcacaccgtgtaaacaaactattcgtgccatgtacaactctgctagcctggctcttgaatatgtggtcttcattaggataaagtgggctaccttagttagcctgtccacaatcacccaaatagagtcatacccagtagacgtgcggggtagaccttcaatgaagtccatgccaatctcttcccacttccactcaggtatcttaagcgggtgcagcaaaccggcagacctttgatgttcagctttcaccctctagcaaacatgacataatgctacatgtgaa

SEQ ID NO: 18450 - DNA, 475 bp, Zea Mays
gtcgccctgtccacgatgaaccgcgcggtcagggatgcagatcgacggtggcatcgtacaacgacacttccttggcgacggacatgccaaagctctacccgctcaccccgtcagactccgcctggcctcctgcgcacgccacgcgccccaatcggctgatcccaaatctctagccacaccctttctctttctctctccagtcgacagctttaatggaggcaaatactagcacgacgtaaaacctccaagcgcagggtggtgaaaggcggcggccgggttatatcctggtgcccaggaccctgcaaacacgcagctggggaacggatccacgcaggaggcggtgaaatctgttcacgccgcgctatttccatggagaagaagaccggaaggtgagagggggccactgacagcggcagtagtggagttgaagcacgggcccgaggtgttagtggcataggttgccactcagctcgtg

SEQ ID NO: 18451 - DNA, 650 bp, Zea Mays
caagcaggggctctgatctcgatgagtgctacagggaatctcgatgtcatcacacgctaggacgatgacgcaccgcataagcagcctttggaccataccccggcgctgttacaaccactacagcatgggcggcctccccctcgagagctcgggcgtacagatgacccctcagtctcggctctctatgggaagtcagtaggcacgaacctactgcacagtacgccgtcgcgtcaggcgccaagcaactcttcttcgaatacaagacaaaacttcactaaggacgcccccttggcatataaatagggtaggggaccctccatggatgagggatccacagatcgacatcaacgccacacgcccacaacacacgtagacgaactctcactctctcattctgtcttagatattggcacttgcctcaatcatctctagggacttggggacttcccctctcccgttgtgcttgtaatcccctactacaggcaccatggtgtgagtaatataagcctcatcttctctgctagaattagggccttgagtagcccaaaccaggataattgcttgtgtctcctcgcacaccatctagagtcggccacgcgacacatttactggttggttaaggacccacggtccaaacaccgacagatgcc

SEQ ID NO: 18452 - DNA, 363 bp, Zea Mays
caactggttctcgtgtcacggtgtcagtatttgatgccgtttctggtgatgcgttcgtgtgggtggcacttgcggcttgctactctctctcttgaaaatgacgtgctaggataccaactgtcttcagggaactcgcattgaaactcggaagcaccgagtcattccatttacgtgtgccacctgcaccgccttcaacccagaaaaactaacctgcgtgtcttttcgcgtacgaatgatatattttcctaattccccaaacggatgtcgatattggaaggtatggaattgaatgagagaatctgatatttgccatcatcacaaaacacgttcgtaaaattgccatctgacccacattttatatac

SEQ ID NO: 18453 - DNA, 523 bp, Zea Mays
gaaagggtgcacagatgataaagctacagtcaattggagaaaaggaaacatatataaaacttagaaacacaaacctaaaattgtcagatgaacagccacacgagtagttctctattttgtaaaccaagtctgtttgtgtttcagagaggtgtggtgttcagatttgagcgctcagagaggtgtcttccatctcatactcgagcatcgcaagatctgggcggggctggcgcgtagaatgagaagtactcgagcatcggaagatccgggcggggctggcgcgtagaatgggaagaatgagatggcgaggtggtcctgcacttgcgatgggatgcgggccgatggccatggcagcgaggcgtggattgcgtttagggcgcggaggatatgggcggggcatccgcggtgcatgggaagaaagcgatgggtggtcctgcgcgtcgttggcactaagattcctgcgtgttggattgctgtgaggcgtggatagtagcgaagggacgggtttccttctgtggcagtaacg

SEQ ID NO: 18454 - DNA, 344 bp, Zea Mays
ctaatacactattcatggatgaaatctccaatggtctggacagcgccactgcctatcagatcgtcaactctctaaggcagtcggtccacatccttggtgccactgcactcatctcattgcttcagcctgcacctgaaatatatgagctatttgatgacattgttctccttgctgagggccagatcgtgtaccagggtcctcgagaaaatgtcctcgagttttttgaggccatgggtttcagatgtcctgataggaaaggtgttgcagatttcctgcaagaagtgagtgatctgggagaatgcgatttactgtacacgtccagaatttctagaatccaatttgat

SEQ ID NO: 18455 - DNA, 709 bp, Zea Mays
gagagagtctgagtcaaacgacaaccatctgccagtgtgctcactgcaagaacatgaaaggccatgaagacgccacggtgctatctcatttgatcaggtttggttttgtcaaggactacatagtctggactttccacggcgagagagcagatgctactgtaggtggttcgtctggtggatgaaactcgtcgacgacgacgaatgcagaccaggcaccgtcatcatcatcggcaggtgggcctagcaccaccgttgctggctacaatgatgctgatcatcgtgattacgtcatagtggatgatttgttcggtgacgatgctggcgacaggggcggcgatgaggatgttggtgctacattgctagaacctgaggatgtggagctttttgagaacatagctaaccgccttgacgaagatgatgttctgtttgggaacccaaggtggctagaaaatttcaaagagatgaagctgtcggcaattgatccgctctatgagaagggtgattgtccgaagcatatgacggcgctgcgttttaatcttatgttgctgatggtgaaggcccgtcatgctttctcggacactagcttcaatgagcaataaggtgtacttgctgaagcttttcctgagggtaacaaagtgcccgtgaatacctatcgggcgaagaagatgatccccccagtggcaatgaaacttaagaagttcgacgcctg

SEQ ID NO: 18456 - DNA, 514 bp, Zea Mays
gacattttctggctatgtgaccagattcaccgcacacaaagcaagttaggtctgcaaggtttttcttcttcttcttaaaatcagtgttctgcttggcctttggtttccagttcgtcttgtttttgtttttgccaccagatttgccttcaaccacgttggcattagaggtaccactatccattggaccaaaacggggcacatccttagatctcgccttctcctcaacatcaagagtagcaattagactttcaacagtcattgcctccttcttgtgtttgagagccatggcaaaattcctccaagtaggaggtaatttggcaatgatgccaccaaccacgaacttgttaggcaagacacagtcaaagtgtgcaagttcccccatcaaaagctggatttcatgagactgttccacgacagaatggtcatcgaccgtcctatattcatggtactgctcattaacataaaattcacgtccagcatctgattcagtatacatccggtccagggtctccca

SEQ ID NO: 18457 - DNA, 964 bp, Zea Mays
gttccacattatttcccagccggatctgtcctatctccagtattgtcaacaacttctgggcataggtctgttagatctttttcctcgccgatgttggagtctgcgcagaaacgaaaagatcgacggccttggaagggacgcattccagcgcctcgagtgtcgccgtgtttaacaatgggagatgcaatcagcagggccaaaatcatacagaaaaaagcaaactcttgaccacgatctgggattactaagatgcattcttctttggatcagcgacagccatcaaccgtaattaggaaagaatttcaaaattcttctaatgggcgtattctcaggcgtaatgctgggtgcgttgatggtccagtgtcctctgtttcacgtacaatgaaattgggccctcgtatgccgtataggcccacagttggccttgtctccctgtttgcacgaacgggcaccaatattggggtgtctagggctcctattgcacgtgagcactctgaaaacaaatcttccgtcgcccctctgtctttcgctgcttcctacgctcaggtggcggctcggtccatggagggggggaatcgccaaggagcggctgggcggggaggtgcacaggaaagccacggtggtcgctcttctggccaagggcagttcgcggggcgctatgggtacaggaggccgctcggttctttcaatggccatcgtggcggcttcgatcaggctgggagaggccgatccaattccaacctggttggtttttctgctggttcgcgtggtcgcttttctggaactggaacttcatcgcatctggggggcagtatccggggtggcaggggcctcaatcagccggtctctttgccatcagtttcagatgcgcagaaattggctggggtagctgctccctccactgaccttttggctcaagcagtggcgctgttgagccaggctattaacccaccgacgcctcaga

SEQ ID NO: 18458 - DNA, 557 bp, Zea Mays
cttagggattcaaattcatgtggaagatttgctcaagggctatgaggttgatgagaatcagcggggcattctcttgaaagtaatagaagacgaagttgggtctagtgaaatcaagctcatggaaaaattgaagaagattgttgcgaatcgttccttctttatattttatgatgagatcaaaaacagggcccaaattaaagacaaagaaagaatacaacagatggagaagaatcttgtagttgatattgaagatgtgacgatttcagaggctgtatttgttaagaccttcaaaccatatggtcgcttgcatacttcgatcattgaaactctgattcgcatatggaataaatcatgggatgacaggattatgctttcacttcttgctgtagtaagtgccaattagcaattttactactactttcaatgaatttatgttgtttagcaatttcaccatgctttttttcctaggagcaaatactcggtaagagaaaagattatctcgaaagagaacttaaagactatgacaaagagaaaaagcacacggtttgtaccttttc

SEQ ID NO: 18459 - DNA, 596 bp, Zea Mays
gacaaatatgaatttgaattaaagcaatcaacagttaatctcgacaagttaactcaaatcttaatcacaagatgacaagataacaagataacaattaatgaaaataaaaaaagaccaagtaagtaccttgttactggctggtgtgtttgtgtctgacgacctgggtgatgatcttgcagagccgggttcttgcggatggcagattctgatgtttttcatgctataaaaaaactcgttgcgcacacggttaagagacactagtacatggaaaggctaacatgcatagaacaaactaattaaactacatgggccgtcggtcagaggttgtgttctcgtgtgtgacctgccgatgacgccgaagatcttcttgaggttgtttctcgtggaatcctgcggcaagttctcggcgatggggcacggcgaggaggcaggcacagcgagggcccgggcgcggcgaggggcggcgcggcgatggggcacggcgaggaggcgggcacggcgagggcccgggcgtgccgaggggcggcgcggcgatggggcacggtgaggaggtaggcacggcgagggccgggcgcgccgaggggcggcgcggcgat

SEQ ID NO: 18460 - DNA, 778 bp, Zea Mays
tgcccgctcgatcgtcggttgcaccagaaatggcacacccacccacccacccaccctatcccaacaacacggtgacgagatcaaatcgggggtcgagacgaaaggcgggggcgatcagcttcagcaggcccgtcgtcgattcggaagcgatcggcagtaggtgcgcgtagatccgattgggtaacgaactccgcctgctcgtgctaaaatgcaagttccactcactcccgcccgacccgaggccattattcacacagtgccgctcaccgctctcgcttgctctgttgccttcggcttttataggccgtgtagcgttaggcctctgtctcgtctcgtcccgtccctccctgtgctgtttcgtttctggtcctacaaggttcagggcttcaggctggtcatgcagcaggtcaactttgtgtgtttctgccgctggtttaggcttgttgactattgaacattgtcaacggacaaccccaataacaaaaaaaaaatggacaagaggtggttcacgaacagttcacgccgaacttgcctaggcatcgatcaatcaggtcggcgtggtttttgattcgagttcaagcagaaaacgtacctatagtgatggccgcgccagagatgctctgaaccgcgctgaggaacaagcatggaagcgggcaggtggctggctccaggtcagtctaatctcgacaaacaaagtagcgtgcatgtttgtgtggaatgacgtcgcgcccaccatctatcaactcactcaccatggctcgctgcagctgcaaaatat

SEQ ID NO: 18461 - DNA, 723 bp, Zea Mays
gcagggtatagtggtcaccctaagttaagtaagcatgtagattgataataagtagttcgagagcttttgagaacgaagcctttttattgatgatgtacttttccaattacaaaatacaatgttgccccgatagcttttgaaatctagctaggggtaaaacttcctgagatgctctatattccatgaattccctatttctgtgtcatccatttgagtaagtcgatatgatcctggccgagtgacttctgctaccatgaatggcccttcccatagtggtgacaatttgtgtcgtccttcccccgttagaattcggcggaggacaagatctcccactgcgaaggatcgatgtcgtatggctttatcatgatagcgcctcagagtttgttggtacctggctgactgaatcactgtattcaattgttcttcttccagtatatcaacatcctctagtctagtggcttcagcttcagctatgttttcgaagatcagccttggtgccccaaacctgagatcatcaggtagtactgcctccgaaccatagaccatgaagaagggagtatttccatgcaaagctcggctaggttgagttcttaagctccagaccacatatggcaactctctgatccacttccctgcgaacttttcattcttgtcgaagactttcttcctgagtgcttccaatatcattccattagccctttctacctgaccgttggctcttgg

SEQ ID NO: 18462 - DNA, 469 bp, Zea Mays
gcggcatagatgctggaggcaaggcaggccagggttctaggggtgttggggtggtctgggtaggccaaggaggttagggagggccttgcgagcattatggcgaagcttgggtcgtgaggacggggccgatgcgggcagacgacggaggagggtctcgggtggactgaagaacactacggcgagccatacccaccgtgatgggggacaatccagtgcaccaaggccggcatgagcttcggtgaggggggtaggagtactctacgcctaggtttgggcactgggagggactgtactggccgaacaccgtgaaggcacgacggcccgacgaggagtggctccgacgagaccaaattcctcacgaggagacaaaattaacgcacaagaagggcagggggaggttccttacctagaggcggcgctcgggtcagcttggcacgacgcgtggggacttcggttggccggacgaaga

SEQ ID NO: 18463 - DNA, 651 bp, Zea Mays
atcaattcaagcaccgccgcctctggaatctataaattgagcccaccgttatctccgcaacctcatcacgcaccacaccgtctagtatcgctcccaatcttgcaaccgtgagctccaatttcatgttttccccaattctgttctgaaacaccgcatggtcgagctcaccgcggccagcccaattcaggtcggctcatcctctccgctctcttgtttaagtgtgctcatgtgcctatgatactcgtcgacccgcccaattgaattaggagcccactagtcgccgggaacgcgttcatccacccgcaacatccacggtcgccatagccagagcaaaccgggtagctattcatgaaattgtttgaggggaaaccctcgttaggtctcagatttgatctctaccaaagattagcgccggtccttgcgtaaatcgaccggtgtgtgagctcgccggagctctgcagcgccgctcgacgacgaggacttcaccctgcgaataaatagaaaccgagggacttcactgcaaacggtcagcgacacaagaaacagtaaacgaacttgtatccagttagtctataacccgagggcccttctgcaagaatcccaccgcgggcgcgggcgcgcacgtatctttcccctctggactgggccgac

SEQ ID NO: 18464 - DNA, 1247 bp, Zea Mays
ctggcactttcgtccatacaatgcttcgaacggtgacatcttgatactggcctgatggctgttgttatatgagaattcggcatacggcaaactggactcccagtttctgtcgaatgtcaacacacaggctcttaataaatcctcgagaaccttgttgacccttttcgtctgaccatctgactgggggtgataggcagtgctgaaatctaacttggtgcccatagcttgctaaaggctcttccaaaattttgaagtgaactgtgtccccctgtctgacactatcttccgagggataccatggagtctgactatctctttaagatatatccgggcaagggtggctcctccaaaggtggtttttactgggatgaagtgggctaccttgggaagacggtctattattacccagatagagtcattgcctttttgcgtccggggcagtccggttacaaaatccatgcctatttcctcccacttccattcgggcactgggaggggttgcaataggcctgcaggtttctggtgctcggcttttgttcgttggcaagtgtcacaccgggccacatactgtgctatctctttcttcatccctctccactagtatctggttttgaggtctaggtacatcttggtggttcctgggtggatggagtaggctaagttgtgagcttcattgagcaggacttcccgtgcctctccttttggtacacacagacggttcttgaaccaaaggactccttgttcatctgtcctgaggttcggaagttgttcattgagagcttttgccataagtcttgttgtctctgtgtccaggcgttgagctttgcatatgaggtcttctagcattggcttgacttctaggctaccgttgtttcccagacatgcattcagctgagctgattccttcttccaatcttccaagaagttggttcccttcatcttgaaaggtttttggctgagggcgtctgctaccacgttggcctttccagggtggtaatggatctcaaggtcataatctttgatcagttccagccatcatctctgacggaggttgagatctggctgagtgaagatatacttcggactcttgtgatcggtgaagatgtggcatttgttcccaattaggtagtgcctccatattttcagggcatgcactatggctgccaattccaaattgtgggtgggataattctgctcatgtggcttgagtaagcgtgatgcataagcaataactttctcattttgca

SEQ ID NO: 18465 - DNA, 406 bp, Zea Mays
tcagagaaaggttacatccagccaagcacctcgccttgggccacccctgtcctatttgtggagaagaaagatggcactagaaggatgtgtatcgattatcgagctctgaatgaggtcaccatcaagaacaagtaccccttgcccagaatagaagacttgttcgaccagttgagaggagccagcgtgttctcaaagatagatctgaggtcaggttatcatcagctcaagatccgaccttcagacattccgaagacgacattcattaccaagtatgggttgtatgagttcactgtgatgtctttcggtctaaccaatgcaccggccttcttcatgaacttgatgaatagtgtattcatggattatcttgacaagtttgtggtggtattcattgatgacattctgatat

SEQ ID NO: 18466 - DNA, 500 bp, Zea Mays
catgaatttgggttggcgcgctggcggccggagaggaagaaggtcactggcgtaagtgattcgtggcctttgccgtggctaagcctccggtgatgaacgaattcactgcaatgattcaccgcgacgtgttaaggctactaaatacgtggcgcacggtcaataggcggccaacgccggcgagggccatttcagccgaccgcagcccaagtgggtacgacgaactcaccgttgatcgggtccgagcctatctggtgccaagatctttactccgccgtgattatctccttaccagagggcacaaatcgtggcgacgacgcggatcacggcgcaacggtcgccgacgatgaggggtgatgtacctgaagatcttcttcagtttattgtaccatggcgatcaccatcagagagtctaacagagcaagtttcagggcccagatcttaaatttttatgtgataacttgtgtatcctcctgtgacaaagttattggcctataatccag

SEQ ID NO: 18467 - DNA, 1032 bp, Zea Mays
ctgggagctagatgatcgaagcagtgggtgctcaaggaacaccgcactagattgcaatttgtcaggtgaaagttcagtcagatccatggataagttcttgtctgttccatgtgttagcttcggacaaagtgaacacaaaacagatggcgctaaaagcagtggtgagtgtgctcaagtctgcttgcgcaattgctcctgcactgcatattccttcagcaacgatacatgccttgtttggcatcaagaattgctaaacataaggcaaattcaatgtggtgccgcagcagattcaaactgaggaactcttaaccttcgtcttgcagcgaaagatatccaaagtttagagaaaagcaaaagagtacttgctattagagctgctatcggtactagtgctgctgctgctgttttatgtttgtttgcactcatcatgctgataatgacgtggagaaacagaaggaagagctcttacgggatgtcacaagttgcccaaggttgcaatggcatcatcacatcgtttcgatacatcgatttacaacgcgcaactaagaatttctcagaaaagctaggtcaaggtggttttggttcagtattcaaggggttcttgagttgctcaacagcagtggcagtgaagaggcttaaccatgctcatcatggagagaagcaattcagagctgaagttaagtcaattggaataatccaacacattaatttagtcagattagttggtttttgctgccagggtgctagaaggttgcttgtttatgaacacatgccaaatggctctcttgatattcatcttttccggagccatactacactattgaagtggagcactaggtatcaaatagcattgggagttgccagaggactgacctacttgcatgaggggtgtcgcgactgcatcatacattgcgatattaaaccagaaaatattctcctttccgattcgtttgccccgaaaattgcagatttcgggatggccaagatcttggggagggacgctagccgagccttaactacattcaggggaac

SEQ ID NO: 18468 - DNA, 632 bp, Zea Mays
aggattacccaaatcaaaagggtataactctattttggttatggtggatagattttcgaaatatgcacatttttcccactcaaacatacctttactacaaccaaagtggctcaagtgtttttggacaatattgtgaagttgcatggtaccggcccctaggtctctggtatctgacagagataaggtgttcactagcaatttttggaaggcacttttttcctcagtcaacaccaaattatctcttaccacaacttatcatccccagtctgatggccaaagtgaaagagttaatcagtgtttagagatgtatttgaggtgtgccatttctgattctccaacacagtggaagaagtggcttcctttggctgaattctggtacaattcctcataccattcagctctgaagtgttcacctttcaaagctttatatgggtatgaacctgtgtttgatgctgctcctgaggtggctaaagaaggggatcagttggtggatgagtggttggcagaaaggcaagcttatactgctttacttaagcaaaagttggcttctgctcagaacagaatgaaaatacaggctgataagaagaggactgatagagaattccaagttggtgaatttgtgtttgtaaaac

SEQ ID NO: 18469 - DNA, 659 bp, Zea Mays
cgcggttgttgaagccctcaaccacgcgctcaccgccagggaggaggccaacaccgcgatccatgtccaggcgagcggggtcatgaacatcaaggtcctcatgatcgtgaccctgaacaaatcagccaacaactacggtcgctggcgctccatgttcctcatcgtcctcggcaaatacaacctcaagtaccacgtcctctccgatgaatcataccccacgtgatccgcttgggcgcagatggactattgcgtcctcacatgggtgtactgcaccgtctccaacgatcttcagcaggcactcatgatccgcgatcctaccgcccgcgatgcatagctgtacctagaggaggagttcctcaggcagcgcgagtctcgcaccctgctgatggaggctaagttccgctccttcaagcagggtgccctatccatcatagactaatggcgtagtctcgagacgatggccgcctctctcaaggagttcggcgacccgatcagcgaccagcaactcgtcctcaccctactttgtggcctcaacggcatgtaccggcacatggtgtccaacctcaagatgcagtgtccgttccccaccttcatggaggcccgcaccctgctgctcctcgaggaactcgacatcaacgacatctgtgacgacgctcctt

SEQ ID NO: 18470 - DNA, 392 bp, Zea Mays
gggggatatatacgtgcatacagccctggtacaacttttactactcatcatgatatcatgcactattcatgtgactggccgttgtcaggctggagagcgagagaacaggtgaaaaggcagctagctgcatggagtcagtgtactacaaagctgatttttacgccgcccgtgaatcctagcgtgtgtgtatgcatgcgatggcaaaagggactctctctactctctagccttccaatcttgtccgccaccacaccatgcactccccaccctgtcctttagccccgggacgggacgggttttggccggcaaaatggtcatcatggcagcaggtcatatgagccctggcccctgggattgcttcctgcacatgcatcagccagtcaccatgttcg

SEQ ID NO: 18471 - DNA, 543 bp, Zea Mays
gttcaatcagaggggtcgaacagcattaggaggtcttaaggaggctagaacaaaccatcagagagcttgaactaacctggagcaagctggccacggtgaggatgctttcacggcggcagaaaccgaattggggagaatgggaaattggagagttctaggggatgattcgaggcaagcgtgggtgctatggatgcgtaattatcctacggagctcgcagtacgctcaatttatagagcctgtgagcggtggccggtgaattggatgaagacgcacggtggccggagataactgggttactggcgcaagcgcttagtggctttcaccgtggcggtccctccagcgatcaccagataagcctaacacgactaaccgcgacgtggtaaggcgcctgggcacgtggcaaacgatcggcaggctgccaacgccggtgagcttatctgcgccggccgcaagataagggggtacgctggccagccaccggagttatccccaagcgaagatctttttacctaggagcattatccgatcgtcggtgagcacga

SEQ ID NO: 18472 - DNA, 796 bp, Zea Mays
atcaaacatttcaaacaacaccatcacatggttgttattattaatagtgtaataatagaaaagtgttcttcgtctaccgcggaaactaacttattacaacataaatgaaaaatctagagcagcctggtgatggatcctggttctttatagcggatcctcttgcggggaggggataacgccatagcggggacttgaacttcagggggattccttccatcaagatgagcttccagggctacgatccttgcatgtgcatcctctagctccaagtgtaccctagagaggtccagggtagcattatccaggtcggtgttaagacctgcaccacaccagctagggtgttgaggcgatcttcatttgctccacctagaacaatgctggtctggttctctccacgaatacgtagaggaagatgcttgtactttgtattgtgcagctgttgccggtaggtgtggctgagagaccacatagttcgcctagcagcatcgctgaccgaagcaacgtatgtggatagcggcatcagagactcatgtgctgacagagtcctgaaccctctatcatctgcatcccttaccctgacatgaatgcgagtgatgtagtagcaagcccgaggtggctcgtacactcgcctggtctcgtacaggggtcggacgtaggttcccaatgcatgcagtacatcctacaacaggttagggaagagccctgtctcgaacattgaggtgtaatgttcagcgacaggccataaccccacgtagtggtcctgctattcttcgttggcttcctcgttgaggttttc

SEQ ID NO: 18473 - DNA, 738 bp, Zea Mays
tcgacaactttccctgtagaagcgggatccaaggtttcggttgtttctagcacatccagtacatttaccattctcctcctcttaggagttacgacagaacccatttgtaccttcggtactgttgcttttactggagggctcaaaacctctggcatcttcattgtttcttcagtttttggcttattagccttatcaatcttcgtttcaactaccttgattaaaggcaccttcggcattatagccggctcttcagtcctctgcacgggagcaatagtttcttttattttggcagccgaggaggtcccttcgccaaattcaggtatcgcggccagttcgatgtatcgtggccggtgagttaggacattcaacttttttcccttcggcacacgtttgtctggggtggccgaagtagcagctttcctctttttcccttgcccccgcagcgggtaacggtagtcggggtaaacaaagccaatggcatcaaaaactctgttcaatcttttttccccgacctccgaatgttgcggatagtgcattatcttcggccttggaatatgctccaagcagttcatcacttgtagcttcgatgcatttcagccagtcatcgtttggttcatcgaatttatccccatacttgaatgtataattcagccggaccagatcaccctcgctggacttggtgatggtctccttcggcatttcccagctttctacaagtggccatactctgaatgttat

SEQ ID NO: 18474 - DNA, 553 bp, Zea Mays
tgttaagcaaatagaattccgcgacacgtgtgtcgcgttttcggtgaaattccacaacagctagtttcatcaccacgattcctatgatcctatcacaaaaaacgaaataaaaaaatcgtgcaaaccccccggaaaaaactaacatccacctacaccaaacaaaaggtataacatggacgaaactttgccgaagaaggagaacgtaagaaagccaaaaccgagattatagaaccctgaaactgtctcaccgcgcaggtaggtccagtcgtagggcttgagcgagaggcggccctgcccgtagctggacaccaccacagcctccccctgcgcagcgcatccgcggggacccggcgccaaccccgcgcccatcaccaacgccagcaccagcaccagcaccgcggcctgccgccgcgccgcggccatcagagtccaacgaccgaagcacccgcgaaatccgcgaagctctgactaaacccacgcgctcgcagtcacactgcaccagcacactgtttattcaggtaccggggaatgggggagagaggcgaggagctgt

SEQ ID NO: 18475 - DNA, 291 bp, Zea Mays
cggggagttcgtgttgttcacctcctacatctcctacgggttggcgctgccgatctcgcccttcttcttgctgctgctggaggagttcgggcttcagcttcagcacctcacgccccactccgtcctcgaggcggccatcttcatccacctctgcgagatgttcgtaggtgtggccccctgtacttccctcttccgctacttcttcgtgctggtcaagtccgggaagactagggaccacatcggtgcctactacttctagacgaggccagatccaaccgtcgtctacatccc

SEQ ID NO: 18476 - DNA, 476 bp, Zea Mays
tagtagaacgtgttaacatggttgctgatgagtatggtttatgtgataaaatgtttgctattactcttgacaatgcttcctctaatcaaactgctatgtattatcttaaaccattgttttctggttatcttggagctctaactgatgttgatgatgatgaattgtcttccattcttttgcatcaacgttgtgcatgtcacattattaatctaatagtaaagtcaggtttgaaaagagtaaaacattatcttatggactttagaactgccataaaatttttgaattcatcaaaccaaagaattgctgcatacaagagttactgtttaagtatgggtatttgtcctagaaagtttggtgtggatatggatgttaggtggaactcaacttttttaatgctgaaacaccttatgccacacagaagcacattttctgtcttcatccaaactaattatactttggcatctgatggtacccct

SEQ ID NO: 18477 - DNA, 1194 bp, Zea Mays
cttcttcaaaagcgcggtgaggggagccgcgatggagccgaagttatggacgaacttcctgtagtagcctgtgaggcccaggaagccgcacactgcgcgagccaagcagggttgcggccactcatggatggcttggaccttggcgggatccatggccactccagatgccgagataatgtggcctaggtagccaacggatgcgacgccgaacgaacacttggacctcttgacaaagaggcggtgttggcgtaggagggacaggacggcacggatatgtcgcaggtggtcggcccagctcctgctgtaaattaggatgtcgtcaaagaaaacaaggacgaaccggcggaggtggggtcgcagtaaatcattcatgagcgcctggaaagtcaccggggcgttgcacaacccgaacgccattactagaaactcgtataggccatcatgggtgtggaatgccgttttgtgaatgtcgtccgatcgcatccgcacctgatggtaccccgttgtaggtctagcttagtgaagaagcgcgccccgtggagctcatctagaagctggtcgacgactgggatggggaacacatctttgacggtgagggtgttcaaagcgcggtagtcgacgcagaagcgccaggagccatccgccttcttgacgaggaggactagtgacgagaacgctgagtcggtgtggtgaacgatgccctgctggatcatagcagagcactggcgctccagctcaaccttgtgtgtcgtcgggtaccggtatgggcggactgccaccggcgctgcgttcggcttgagggtgatgctatggtcgcggacacggggcggtggcagtcccgtgggctcagcaaagacatcctcgaatgtggccagcagctcatcgaggagtggagcgctggccaccatggagtggagttgcggcgcggtggtgattggcacgccggtctagtgtacggggcgcctgtggagctgaaatgccatggagggcacgacgaaatccgagaccaccggctcgagggtggccaaccactgagtaccgagcacaatatcgaaacctacaagtggcatgacaaacagatcgatgttgaagtccgtgtcggtgatggtgactggggccactcggataaccccggggcacgagacccgctcgccgttgccacgacggcggtgagccggggtcgggcctccaccc

SEQ ID NO: 18478 - DNA, 759 bp, Zea Mays
taaaatacaactataagattaggatggaggagaaaaggtttttttaggacgggtatactataagcatcaaggtaagatatagaggcaacaaggataaagatgatcgtgaaaagcataacaagggatagagttgaggcaggactcacgaagtggcaaagtggagaaaataattaagggtaagataggtatggttccaacagaagggttgaagtaaaaaaaattcattacggaaggaagctacaaggaattaacgagatcactaagaatgtgcaaaaaaaatgaatgctcatggatcatcgagaaacaagggtggtcaagggcatgctaactaaagtgtttataaacaaacattagggtataaagataagcagatctagaaagacaagagtatgcaatactctaaggatacaggcataccaggacaagggaatagaaaaggcaaaggataacaatcttaacaacggaataagaagggatttcagaggacaagaaattcatggacatataaactgaagttttcaagtaggcagtagacattcagatgtaagtatttgaaatgagagtattgaagagtctaggagtatgagcatgtcaatactaagggaataaaaatagtcaaagggtagcaatttaatgacggaagagagaagaatcccaacagacaaaaaggttatggtcaggggcatctacaaagatgtcgcaagcacaagagtaagatcagatctagtggattgagaaaggttagaccataataggata

SEQ ID NO: 18479 - DNA, 1420 bp, Zea Mays
gttaaaatgaattttctatgcattttacaagtttctagatttgtttttgtattaaaaatgaatttctataaatatttctctgtttttaaacacctctggactgggcctcatttttcagaaaagtcaggggcttctacgcaaaagtactcagactcagaacactccccactggacggcgggttgatatcctgaaagcagaggggctctttagcaatgttgacccgcgaaggggtatgggcaaaaactgatcgtccgatctaaaatatgcggtcccgattagatcagctcaaccatatagggttacttctctcaactaccattgatcaccgaatcaacggacagggttctaaacgatctaagccacacgatcctaaaccgagggctcagattttataacgcgaagaggtattcttggttttaatctcggccgtccatcctatgatcaacggcataagtgatttcttccacccagtcattgccagcggcgatgtccagggggcgccgcggcggagcttggccggagctggcccaaccacgtcctggcgtgctaatcctaaatttaactggcgcatcatgtaacctagagggtagccaatgctgtgggagagtcattaccagagctagaagaaatggcgaagctgcccacgcgcacacccagatccgcgggggggagaatcagttccggcgagcaattcgcgcgccacgacgacaatgtagtgctccgattcgccaggtacgcatacgatgacgtagtccgaagcttttgaaccaagccctgggccccaatgacgacgacggcgcgagatggttgtggcggcggcgtgatgcgatagcagagaggatgcgagcacgggaggaaaacgcgagcgcagggaagaagaaaaagcggggcggagtagctgtgagggaggtttaaatggtcggataggtgcggtcatggtaggatatgcgcggtcgccatgccgaagttaccggcggactttgagccgagcgcgccgtggaagtagtcgaggggaggaaaggttagagctgacggcgtccggatccggagttgcaggggcgaccggcgaataaccacagcggaaaccgcgtacggcgcgggagttggctagcagcagcgaacggatctccaaccaatacgcccgagctccacggatccctcttccttcgcatacggcggcgttggcgatgaaccaaccggctgacacggaggtcccacacgtcagccgaccctgcgcacggtgagaaggggatgggccgcgcgggagctactggccagatgggccgagatcccagcagccggcccacacgcaaccccttcacttttccttttctttttcctgattttctttctctctcttctatttccaagtttaaattttgaactcaaacttaaattcaagcttgtgctacattaatc

SEQ ID NO: 18480 - DNA, 318 bp, Zea Mays
gacctcaactcgtggagtttggaagcccccactgagcaccaaatccctccttccaaattaatagacacaatgtcgcctttgacacttggtctctttttctaaaaaatcaagcatttcgatgcttctataactcccatgccactaggattatcaatgaattgagtccttttcgaatttcttttggtgctgctgcatttgttttcctccaccaccctgaaaaactgaaagtcgtagtatgtggcgccatctgcagcagccctaattgttgcagaattatggtccaaatctcacgagcaaagacacatcatatcagcaagt

SEQ ID NO: 18481 - DNA, 517 bp, Zea Mays
agttacattgtgctgaactgtagtaattatacatactcattagtacaactcaacttccttatttactttacataaggacactacttaaactacactactctaattatcctagtcctaggctgctccactgccagcttcaggagaacgttcatctgcgaggttcatggaaggaggggctccaaaaaggtccaactccccatcaggtcctccattagctgctccagatggtccggctcccattgctgcaacttctggtggcacatttggatgcagccggtcatataacacgtgcacctcttcatgtagggtgttacaatacgcttgcagattttccagggatgcacttagttctgctacccgggctagagccttggcctcacaatcccaggagaaagagcgcgaatttatggcccagtcaatggtcgtgtctcgttccgtaatttcctgttgtaagcgattaacctccactgacagttcagcaatgcggcggttatctcacgcacgctccctactcccg

SEQ ID NO: 18482 - DNA, 664 bp, Zea Mays
cgatcttttgagtttccttccaaggagtcaaacctcagcaagccaacaggatccgctctgccatgtttcaaccagcctggttaaagttccttccacacccagtccgttgcaagcagccaacctccagccaatgcttgttggcaatgtggagacctcgaccacttcaagaataattgtctgcacctgaatacatgcgtacctgcctactccaactcggtgaatggccccaagaatgttacgtcacccgcctccaaggcaccctccaccaacagtcagttaagcaagactcagttccacggtagggctcgagtgagccacgtcgactcccaggaagctcagcaagcccctggagtagtactcggtgagttcctagtcgaatttacccctgctgctgtgctttttgattctggagcatcccattctttcatcgccactagttttgtggaaaagcatggtatccccactacaccattagaagtccctctggtcactcggaccctagggtcagaccttctctgccacctcaaatgctcccaagtcagaattcttttaagtggggtagtattcctggcagacttagccgtactaccatcccactgaattgatgtaatcctaggaatggattggttgacccgacacaatggcatcatagactgtgcagata

SEQ ID NO: 18483 - DNA, 370 bp, Zea Mays
gagaattcaacgaaggggacctagtactcgtgaggaccaccaggacagagtcccggggcaagctagagccgaagtgggaagggtcgtacatagtcaacacaaaggcatccccaagtgcatataggctagcaacgtcatctagcaaagacttagaacactcatggaacatcaattatctctgaaaatttttcatttaagatccaaggcccaagtgcctttgtaattcttcaaacaatgtcattcaggcccgcactcttttcctcccgggggtgaggatccgtagatacccctccccaatacacgtcccgaacgtcgaagatagcaaatctcgctaaccgccccgatctagccgaagacgggatcgttcctt

SEQ ID NO: 18484 - DNA, 520 bp, Zea Mays
catagaaggggtcaggggcgttcgcctgcaaccaaggagcgtgcgcgggcttgcaatcgggcgtgggcgtcgccatgttccaacgaattcctcgccgtcgctcctacgccgccgcgggtccgctcctcgccatggctagctctcgtcaccaaatttctagtctggtaagttgcatccctaggttcgcctttatcctgtagtcgtattgcgcgcgcatgtggtcggtttgggtagcggagtgcggggttggacgttcgccggcgagtacgccgccgggcgagctctgtttctcgcgcggggtgtttcgtcgatggagtggggcgtatcctccgtcgatcagtgaacgaacgggcgcgattagttcatcttactggtgcgaggggaacaaagtttggtcgttggattgtagatgaaggagtgggatcggatctcgcgcgtattaaatctggggccttggatctagatccaacgatccctggcacatacagattcctcgacggcaggatctaatcctggccgc

SEQ ID NO: 18485 - DNA, 707 bp, Zea Mays
gcgggacttcgttcgcgcgtggccgagctcgccttcacccagggatcataggtatgcactcccgcccgatttgcgatcacctagaagccacgtagcagcgatcgggctagactatggatgaccggagcaaatggttcgcggcagtgccgccatgcgtcgtggccggggcttacggttgcgtgattcgcggtatggtcctctccacgtctttcggcttgtacttatcgtagcatagcgcccgtctgtttgcgggttagagcacctgggcgccgaccgtggcctcgccggtgggctgcgctgccggggttcagttgtgcgccgccgtgattgtgctagagatgggtgatgacctctgagtcgtgggatcatgatctagcgtgtgggaatgcttaccgtgtgggatgcgattcggaccctcgatttcggatctagcggcttgaatggcgttgtggcaaaatagaatccggggcgtagatcttggatctgacggccaagggagagtgcaggagagtagctcgctccgatctaatctgctgcgtcgatgtctaatcgggcggctcatagtgaacgataccctttcgctgatacaatttgctaaagagtccctagaatactactgaataaactcgccgtcccttgcgacaggataatgagtcttagggattcttgctctgtagcccctgacttttccagaatttgacgcccag

SEQ ID NO: 18486 - DNA, 489 bp, Zea Mays
atttccccgagcgaggcaaccaaagcgctaacttcttcagcagagggtcgcactctaaggcccaaaccgccatcagcgacaggtggattcgatataaaaagagtgaaggccttggaagggggcaggttccaggctgagtatgccactggggcaccaacatttgataccttgcctctaagaattatctcaagtcggttcaccaaatctacaacgggaattcttctgttggtaacccgagttgaatcagctagacctcggtacagataagccgggtatgccctatccttcaacggctgaatgttcttgaagacaaaatcagcaaccacagcctctgcagtcagacccctctccttcagcagtccaacttcagctagcaaagcccctgcctcagccacctcctaatccatgggggactcggtccaactcggagtgcgaacatccggctgtctccccgaccgtgaggggagagaacttccatggttctcaaca

SEQ ID NO: 18487 - DNA, 422 bp, Zea Mays
gtcttgctagcatatttttcccctgctgatcctttgctagtatttaggttctgcagttgcagccctcccatactgcagctcatcatttgtttcttgcctcttccttagttcatttgcattttagtttcatttatgattagtagttcagtgctttggttgatatgcaggccaagcccctggcgccggcatatttgcatttaggcccctagcgctcgtggccgccattgctgtgaagctttgcccccatagcttcttccacacctacgacctatgggtggccgccgttgcgtccaatcgccattcctctccgtcgctgacaacagccgcctgaaacaacctcaattacttccctccagctctgcttcctttttccgcacatggaagtcgaatcttctgcttcttgcgtcgctggtagttcctct

SEQ ID NO: 18488 - DNA, 849 bp, Zea Mays
cagaatgtccctacttccagtcatcggtggcatccgctactggcaccaatgatgatcaaactcatagtaggggttacaagcagtcgagagtgggaggagaggatcatagatctcttattggggtggaagtggagcttagaagctgcaaggtgtagtcctagctaagtattggtttggcatggctccacctcctagtctttattaatgctcctcctcctgttcgtctctatgggtttgtctctgtctgaaggcgtccggtggtgtccaagtgtgatccctctcgatcttcatccccctgccttgagctgaacctctcccttttataggccgagagaggggtcaaccagtggtgtcttttctaggaaggagacgtaaggcaagggtaaaactagtgttttatccccgagtgaggccacgcatactcgtggggcccaaggctgcttggatgttgcgtatttatcgtggtggatgacgtgggggtgtgatggtaccaagcaccatcattcggctatgctgaccccaggcttccatagtctgggctcgacgtggcccatcgtgtagtgccatgtggggaggtctacgcactcaggcctagttcgataggccataagtgtgccacaggccaaggggcacgcgagccattaatgtgcgtcaatccgggggctcgtaggtcatcagttgtatgcgtcccgaggggcccgtaggtcatgagtgggaagtggaccggtgcccatgctgtggctcagtgctaggcatggttaatgtggtcagtcatttatggcgggtcattccggggctaggtgcgggatccactcgagtggttgccttccgacacacccgacctccctc

SEQ ID NO: 18489 - DNA, 574 bp, Zea Mays
ctcctggatctcagaacagatgaaaagggaactctttggtgcaggaaccgtctgtgtgtaccaaagggggaggcatgagaaatcctgctagatgaagcccacaactcagcctattctatccatccagggtctaccaagatgtacctagacctcaagactagatactggtggagagggatgaaaaaggagatagctcaacatgtagcccgatgtgatacttgtcaacgaactaaggcagaacatcaaaggcctgcagggttactgcaaccacttccagtgcccaaatggaagtgggaagaaataggcatggatttcgtgatcgggctgccccgaacccaaaagggcaacgattctatctaggtcataattgaccgtcttaccaaagtacctcactttataccagtaaagactaccttcgtaggagccaccctcgcccggatatacctcaaagaaatagtcagacttcatggcattccgcgaagaatagtatcagacagaggaacacagttcacctcaaagttttggttgagtcttcagcaagctatgggcaccaagttagatttcagcaccgcct

SEQ ID NO: 18490 - DNA, 624 bp, Zea Mays
gacagagatacaagaaatgtacccctgtttaggtttggtgggatgtgcccactgtggcacaccggggatgtgcccactgtggcgcacgtagcaggagaccaagaatgtggcatgctaaggcaaatgtcgtccatgtcactacagcagacatggcaggccatgacgtacgttgtccatgccgccacaagtgttgcactaatgccacgcccccaaaatgttcaggcctgacaattaggaagtgggggcacgatgctgctacaatcgcacctatttcgtcgaacaggcgcatcacgtattctaactctaccaactccttggccgatcgcggagtgggcggtcagtccacgtggcacgtcgggagccccctttgactgaggttgtcatgaggtgcagaggacacatggcatgccttgaccccgaaacatgttggaggttcctaggcaccacacacgagtcgacagagtgaaagctcgtgggagtccactgtagtgtctggagccctccctccaggagggcccgaggacccctctgtggacacatggcaccatcaaaccccaccagcaagttcgcgaaagccgttgcagaaagaagtctgatgaaggcttatgtggtaagggtcctcat

SEQ ID NO: 18491 - DNA, 311 bp, Zea Mays
ctgagcatggccatggtacagtgtttcagggaaagcagatatgggtccgatggccgcggtggaaaaatctcaccgccgacgacctatccgcgccacgattggtgccggagttgagatgttcgggcggcaagcatcttcccccgaagatctttttcctccggataggaccgccgcggtggaaggcactaaccccggctgccacgcggtcattcctccttccggccgtgtccgatcaccggcgccgctctcctctgttcggccacgccatcacggatttgacggtcttccggccatggttgaacgtggcaagc

SEQ ID NO: 18492 - DNA, 273 bp, Zea Mays
attgatgatagatgggaggaagaaggagaacaagagactgcctctgagtcagtgatgtatgatcggttaggattgttaacagaagatgaacgtgaaactactgaaaggcaagatgcttttaccccatttggtgtccgccgaagtgatgaatttgatgatgaaacagctgcattgccctgcattgattgcataccacaagaaagggtatttgtttgcaacagatctaatccaataatgaagattggtagtttgtacaaggatatgaaagaattc

SEQ ID NO: 18493 - DNA, 362 bp, Zea Mays
tttggaaaatagaaagcagaaaaaaagaaagaaaacaaatctgtgttaggcccaatcctcgcgccggcccatttacttctcatctacgcaagcccactccctccccttttcttttctttcgcgctagctgataggtgggacccccagcttagtctcttcaacgcgacgcggactcatctctggtcgcctgaaccgtggggtcagctggtcagggtgttcttcctcctctgtgacgaattccgccccgctccaccattcccatcgccgtgtggacccatgccgcatgcacctctgctcaatccaacgcgccctcaccaaccattgttgggtgggaccagagcgtcagctctttcccctccgct

SEQ ID NO: 18494 - DNA, 969 bp, Zea Mays
ctccaaaccgaaccctggcaacagcacgctcgccgtcggccatctcttcgcgggaactcgccccaaacggagatgactgactaaatcaagcgttgcgctagcatccctgatcccaagcgaacctagttcatcccctaattgagcaagtctgacccagaatcccctctgctcaaaatgacaacaagtacagagggaagattgagctgttcccggcgactaggtatggtatcgttcaatttctaagtactaggagcatcactacaccctaaggaagctagaacaaatggtaattgggctggaaatacctcaggtgacgctggccacggaagagctatccacggcggcacggagaaccaatttggggaaaaacctgaattaaaatgctatggtggacgatcggaggcgagggagggtgctctggcttcgtgacaacctaacggagctaacgacacactcaatttatagtgtccgagagcggtggctccgatttttgaaagggaagggcggtcgaagagagggggcgagtcaccggcgcaggttatcgtggctttcaccgtggcaaagcctccggtgatggacggacttacagctatggttcactgcgacgtgttaaagctactaggcatgtggcgcacagatggtaagcggccaacgccacaaaggatcatctcgtccggccgtagaccaagtgggtacgatgactgggcggcttgatccatcccccttttagatcttttacccctccatgactatcccctcatcagagagcacgaatcgtagcaccggcgcagatcacgatgcgcggtcaccggcggcgaggtgggatgaatctgaagatcttttcgtgcattgtaccatggccatcttcttcagtcgttctgacagcccgagttgaggaacaattttctccaatttttatgtgatagcccactaatcctcctgtatcaaagttattatcctttaatccag

SEQ ID NO: 18495 - DNA, 403 bp, Zea Mays
cacccgcataattttttcttcggccggaatcggtaaacgggaaagtcggaaacagataacgaccggtaaattccggtatatcgaaaatggataaatccgagcaaaatagctcgaaattgatcgggaaacggtaattgtaatcggaaaagatcacaataaacaaatcctaaccacacaattgttcattcacagccacatacaagtctcattcacaaaagtacacaaaacataatcttgtccacatataattggccatacacttatacatgtccactcaaattttaacacacaatacataagtcttaaaacacgattgttcattcacatccacatacaagtctcaaccacacaaatacacaatgcatagtcttgagtcttgaccacatataaatgatcataaatg

SEQ ID NO: 18496 - DNA, 325 bp, Zea Mays
gagtcaactatcactttggtccttaaatgagctaaaatgaccatgaagcaattcttggttacgaaaatccgttgggtgacatgttttgccattaatacaactgagtgatgactcccctccagaataaaagacccacacccacccactcacgtcctgactgctggtgaggcaagaatcttgtttttggcaggatatgcttaacacacctgaccttgggaccaatgtgtgagaaatttgaaccctgtgctagaagctcacactgcagaggaatataaaggataaggcggaccctgtgctagaggcgcacacatgagtggggtctaga

SEQ ID NO: 18497 - DNA, 525 bp, Zea Mays
ctactaaaatatacaaggtagacctaagcggaataaaagaaaaaacagtagcagtatcctgtcaccaagagaggcgatgatcagctagcattagacaagaaaagaaaaagatgacttacaaggcattcagcacccacagtactgtagagtgcatggtatgctaaactgataagtacataatacattagggagcacaatagaaatactgctgcttatcaatataaaatgtagggaaatgtagtatcacaataccactcagctataaccacagtccacggtaaattggccagctatttttatcagtacatttatttagatactgtgtaaggtctttgatgcatacctttggtcgctaatagcttacagaacatattcttagagtccttcaaatatattatattctgcaagtgttttttctaatacatatctaccctacatgtctccaacaaagttaatgatgtttagtcttatgtttactctgtattgtcataagcgatatgtttttgagaccagaggtagtataaa

SEQ ID NO: 18498 - DNA, 402 bp, Zea Mays
acggcgcggtgacccgccgtagcggcgccatgggcaaccatcgtgcggaggtcgctcccgagtagggaccccaaatactattgtgtaaaaacaaatttcgggtcacaaaggaacagacaggaggaatctcaccgttgattgccgcacgaacagccccggccacgacaaagtgtggttccgcggcggtgctagatctccggcgaggaattaaagacgtcccgagggacaccccattatggcgcggccatagaaacgttcctcgcgccatggcgaatctccccgactggtccccgatgattcgacgtacgcttgaccgcgaatcagccatggcggccgcagttctctcctctctctcgcgttctttctaccggtgttaacgatgacctggggttttggggaggc

SEQ ID NO: 18499 - DNA, 373 bp, Zea Mays
gactcaggaaaagaaagttgatgtgtgggaatgataaactgcacaggctgcacgtcaaaaagagagctcgtcaccatgctgcttcccgatttcatatccatgttccggcctcagtgctgctcctcgatctgttcccgccagacaccattcctgacatcaagttgcagttcctccccccgcccggctgctgtgacctcttcctccctccgtgtgccacggtgagccgtaatccaaaggccagacctcctcgttgccagttgtcgtgacctgaagctaggcaagatctcctgttctcctcacgcctccgctctcctctgctcctctctcctttttctccctgtcatcttcctcctctgtagtccttcagtccttc

SEQ ID NO: 18500 - DNA, 393 bp, Zea Mays
gggaggaccccgacaatggcacgggtgaggagccaaaatatcactagtgtcttctagaatatcgacgtcagcattgctctggtcttcaacaaaaccaacattcagttcgagcttgttgcactttgttgtataattaacaagtctatttcacattccttgtaatctatacaactcaagagtcagtatctagctatcgagttattgtgtcagatttctgttggaacatcaccagttgtccaggtcacatgccaaaagtctggaggcatgtatatcgttcggttactctcctatggttgtttccaataaacatcttgaacataatagttgaaaggtaaatttcaggtgaaaaatgtaattttacaacacatatttcttgagcagtcacaaatcaca

SEQ ID NO: 18501 - DNA, 462 bp, Zea Mays
gccagacaacaaacatctagctgtagaactcattgactgtagaatcagcctaacataaggactgctcctgagaaatagcagcaagataagtagggtgactagtacgcttctagcgatcatgaagaagggtccacatccgatgggaactgtcacactcattcactcaatgacctttgcagcaaagcgatcttccatattagcagtgagaatagtaccggctcgagcatcctcatccatccatatccgatatgcattatactgagcctcatatgatgccaagtgaccatcataatctgcaagcaactgctccttagtcttaggagtcaccttgttcgatatcataggttggacaagagccataggtaggagtagtaatgggctttaaactttatgctgcaaattttaaggatcgaatcggatcagggttaggctctatttttatttaatttttaaactaatatt

SEQ ID NO: 18502 - DNA, 940 bp, Zea Mays
atcaccactgtctcgtggggccagtcaaccccgattgtaggagacctcaacaccagaatctctacattgacccgtataccagaaaggacgcgacaatacgtcatactgggtgtatgcctacgtactacagaagattatgcagggctcatgatgacaggaaaagccacgcttcgcacgatagctgcgtgagactggtccgtgggacctgccatgcaccactacgaagacatcagcaacgaactcgctacaggaacccgtatgacgaatgagcagggtggtatgccataccagaagtacggctaagcacggccctacggaccatgtaggaagcgctacgtcaacccatggcaacaaatcgtcttcttacaagtagagaacaagtctcctctgtaaggtcctacccttgaactataaaagggcaagtcctcctcgttcttcacacacatgcaccggttgtaacacgatttaagacaataatatgatcagcactacactggactagggtacaagcctgaaccagtataaactctatgtctcaaactccacacccgagtctcaacaattcaccattcagagtgaatccgcgctagcatcccccaccaaaaacaaatcttattgtcccccgatttccaaaaccacgacagttagcgcgccggatagggaattcttagcgtgccaagtaacttcttacactctgatggctcaatcttcagcgttcaccggaggcgatactttcgctcctggagccgcattacgttcagctccctcgacttcctcgccaccgccaccggcgaactccgcctcaccgagcctgacgtgcatgttgccgcaagcacaggaaccacacgctccacaaggagcaagacggtgaagcatatgatcacacacggaggcgggcgctggacaccgggacccacctgacagcgctgtgcgatggaga

SEQ ID NO: 18503 - DNA, 1423 bp, Zea Mays
aattcatattcctttttctttcacatgtggtttaacaatttatgccaaagtggtattagaccattaagcaatttacgttccttctgcgcaggagatccggtaaactcccaccattttgttgtcgaactgagccgaattaactccatgtaagtaccctatcaatgtggatttttttattactacagatcattgcaccttcatttttcttttgaaatgtattaatttttttaccatcagaaaagttccatagttttactgccagggcttatcctgcttctgcagaaggataattttttttctttcgagcatagtattttgatgaattttggcacgaaggataaattttttaccatcagaaaagttgcatactgttgcaccttcatttttcttttgaaggatatattttgatgaattttggcagaaggtgttgataagaaatcaatttgaagtttaattagcttcatgttttgcagggaacaagcggtatttagttgggttttggaaggaattttcgcattgaatttagcttattagtttgttttcttcagcttggcatcaactttaaacatctctgtggtagtgtggagtcttttatagtgccatctatttctggtctcatatataaccaaccatcccagttaaccctaagctactagtttaatcacttcactgtacaagtaaactacgccacaataaaaaatgttttttttcatgattcattttttttgaaagaaaagctgaggaaaacccccgcagcaaaaaaatattaaataaaaagatgcaagccagaaaacaaggttactggacgaaccagagaggcaaacgggagagagagagtgggagagaagggagaggaagaggagaatcagctatctagagtttagccatgatagaatctagatttctttgttgatctcttcagatgtacagtttttatcttttatatgcatactttattgttatcatctaaggaatgtcgtgtctcttttcttttgaggggattgctattctgatgctgctcatttgttgacagatttgctaaaagtaagagacagtacatagaagcacaagtagaatatgctaaagaagaagctatactatcagttctgagaactcagttggcatcccaacagtcatatattcatcaggatagccattctctaaggtatgcaggatatgcttaattacagattgacagctagtggagcatgattagttgattttgaaagcttaactatactacaacagcatgacattattcttattggtttctttgagtttcaacattaaccagttgaaatataacaaaatccactggcatttctcttatcactaatatgtttgatttgtggtttcacttgtttcatattcaggaggaaaaactccgaacttgctgaagagcttaaagatctttcccatcaag

SEQ ID NO: 18504 - DNA, 619 bp, Zea Mays
aatagacccctggaaaaccctggaatgaaaccctagggggttatctataaaagtgtgcacatttttggacctaagtgcaaaaaccatgaaattagggtaccttaactcatatgagtcacatgtatgtagatttgcaagttaaaccttgagatttggacttatttgcaaaaaagcccacttaaattctattgagttaagtctgaaattcagtgtatttggatcaactttgagaccttatatcttccaaactataaggattttgccctatgtcaacacatcaagtttgtagagctgtgtaaggagaacaattttgattaagtaattaagcactagtgctgaatagaaattgaagataaatgagtctgaagttgtgctgtcagaagtcagttggacaattctgaacacttgtttcagaaaggtatggccaccagtgacattggccacacttgaggcttagatttgggttggattcagtaagaatttgactaaggatgctatagcaaaagtaaagagggtttatggatctataactttgctacggatgggtaatgtggttgccacacaaaaattgaagaaaatatcgtttgaaatcgggctgtgtggcgcactgttcatcgga

SEQ ID NO: 18505 - DNA, 972 bp, Zea Mays
gcgcgccgttgcaacagccgccgctttgactgggggtttaggtagagatttgccccctcggcctgggtataaagacctcaacgtgtccacctccgatcctatcttctcgcgggaaccgttgaccaccacgaacggagagggaccgagtgccaccgcagccgcagaacccgtcgtggctgaagcacgcgactgccgtcgtcgggctgacctgagccattgagggagcttcgcctcaacaccctgatgatatccgtagtctcgccacacaagttttgaggtcggagtggcgtgaattggtcgtcggaggaaaagctccgtcgtgcgcctgcacttcgccgtgggcagctcttctgcgtccacgattcgtggtatgtattcatcgcctgtgcccgttttcatcaccgtatcgtgtagcactggtccaattagatttagttgcgtcatcgccggggattcgcttcgccggtgttgggttttcgccgtggccgggccgcggcggacagggggaaccaaggcgcgtggtgacgatgggtccgtggccgtcggatccgtggacaacggtctagattgatggcgccggtgtaggattggtggagaaacagtctgagccgttgatcgctctctggacggcttagattagttctggatctcataaaaccgtagccatcaatctctgatccagcgatcctggatgcgtactggttcattttggtttgtatttaatctggtgcactcacatctaatccaacggccgagacctgatgatacccgttcaccatggttaaactgcaaaagagaccctatgttttttgtaaaactaactcgcggtccacaggaattattctctgtgtcttaggaaacttaccccgagacccctgtgttccctgtaaatagtggcccagtccagagttcataagaaatggatgaataaaatctgaaaatgattttaatgggaaaaataaatgctagaac

SEQ ID NO: 18506 - DNA, 485 bp, Zea Mays
gatggtccagcgcaatctagctcaattggttgagccgaggagcatcacgaatgaatgggggtgtcgaaacagggacaagaaagacgaggacggacctgagagcgactggccacggtggggtgactcacggcggcgcagacgaccaatttgggggaaaacccaaattctccggctatggtggctaatcagagcgagagttggtgttctgagttcgtaataagttggcgaagcaggccggggcatcaatttatagtagctcgaagcggtggctccaaatttgggaggagagcggggcttatcttctcggcgagacgattaccaaggctcgccgtggagcgcagcgttcaccgagtgacggtcactatttaggggatgccacgaccatgacaatgcggtgaatcgggcgactacatgtcccttgctgcaatcacggcgagcaccggcggcgatatttcactaaccgcacaagcaagtgggtacggcgg

SEQ ID NO: 18507 - DNA, 414 bp, Zea Mays
ggaataggggttagggattgcatgtgaacttttgtctgtgtgatactgaacctcggttgctgcgcaggttccgacgtttgggcctgcgcaagcaaccactactgaaaatactgattttgcggtggagacttcagctgtagtgcccgccgatgatagtgtgcctggctctatgtctgaatgttttgagtccgacggtgagtctgggagttcgtttccttggacggaggagtccttggatgagggcttagattattttgttgcgttggatgtggctgcagcggagacttcaccgcgtgtggagggtgctgaggatcttcatgttgcgagtaataggtgtaggcggcgaagggtggtgggaagacagtgtgtgggtgaattttcgcggagtgcaggcgctgtcgcatggggatggag

SEQ ID NO: 18508 - DNA, 364 bp, Zea Mays
ggcagggctaatctttcttggtgttgaatgcatggttgttggggggaaagcatgattgtagtttcattggtgttgtgggtaatatggatgttcgttttggtagtgatggtggtggtatggatggggttggtaggtatgagcgatggctctatggttgtattttggggcagctctggccatctggtccttggtttccttagtttccgggcagtctctagttgggtgctctgagtcttcatcatggaagatgtagtagaactttcttggctgctagggacctctgcctctgcctttgcctcaagttgcgttgccattgtagccttattgtggagggtagttttggtgccggggtggccctctgtcg

SEQ ID NO: 18509 - DNA, 773 bp, Zea Mays
gtccagttttagtcaagcatttgggttgctttcaaggtgattggcaaaatcagaagacggttcctgtggagaggaaggaaataagttatgggagggcattgtttagtggctttgagcaaggttactagaccaaaagaattgggaggtttgggcatctcacacctgcagaaaatgagttgggcccttagattacgctggctctggttgcaaaaagctgaacctggccggccatgggcatcctttaaactaaatgttcatccttcggttatggccttcttctatgcagcggtttcttcggtggtggacaacggtacgaacaccttgttttggacagataaatgaattgatggcctgagtctttgtcagctggccctcatctggtcaagttggttttctctagggccaaaaagagaagtgtccatgatgctctcacttcgaggaactgggtgcatgacataagaagtgttatcactgtaaatgttttatctgattttctcaaagtttgggacctcactgcagactgggccctgcagccggaccaggaggataaacatatatggatgctttcaagctcaggaatctactctgccaaatcggcatacaacagtctcttccttggagcaacaacttttaaaccttggggaggatctggaaatgttgggcacctggaaaatgtaagttcttcatgtggctcacagtcgttgctggacagctgaccgtctggcggaaaaagggttacctcaccctcaaaactgtttgctatgtgatcagga

SEQ ID NO: 18510 - DNA, 440 bp, Zea Mays
gacgcctgtgaatatgatccattggtcttagtcaaagcatatgttctgattacagattcacgtgatctgtaataactctcctccgatgaactcgccctgcaggtgatttgcctcacgaagaggttcatcctgatgatgaaattcctagcaatgcgcgcaatatcattgtgctaggaatacggaacaatgaatcttttgtttttgggaaatgacgaagatcattattaaatgtgggagacaaatgtgtcgacacctatcttgcctctctagattgcaaagggatccaaaacaaagtcctaggcatgagtgcttgcaactctcttatcgggtcattgataaatgcaatcgaggttgaaccgataatcgcaaaatgaaagtcgtgagcttgaagttcgaacatttatgggcactgttgaaataatgtgtggtgaatgtgatgg

SEQ ID NO: 18511 - DNA, 736 bp, Zea Mays
atcacgagcacgtgagggcgctaaaacacgagcaacaagagcgagggcggacctgggagcagctagccacgaggaggcggttcacggcggcgtagtcgaccgaattgggggaagaaagaaattctttcgctatagtgactaattgaaggtgggactgggtgctttggcttcgtgataacatggcgcaacagacccgaccatcaatttataggattgctaagcggtggctagtgaatttggattgagcgcggtggcggtcagagaagaaatgagtcacgggcatggtgattcgtggccttcaccgtggcggcctccccggtgatcatcggacgtgcataacactggtgattgcgacgtggtaattgctgaggcacgtggcgttcggtcgacgggctgccaactccggtgacttatccggaccggccgcaaagcagaaaggagcacgacggctagccggattagtgcccatagcccaacaacggtgacgatctttttaccctatggcgttatccgggctttagtgggcacgaatcacctcatcgacgcgaatctacgcgcgaggtcgccggcggcgagggggatctgcttctgttgatattttggtactataccattggaagctttttcagttagcctgacagccgaggtttagggcaggttttctccaaattttccatggcaacatcatcatccttctgcaccaaagttgtagacctatagatcatcttcatctttg

SEQ ID NO: 18512 - DNA, 470 bp, Zea Mays
cggggctagctgtagcgtcccggccggtgtactaggtgccgtggtatagcatgccgtagctgtgccctgctgccctgcggccctgccacaccacacggtgcatgcgcatgcctgcctggccggtgcggtacggagtggatgggtagggcgcgcagcgtactgccccgacggcgtaaatactccacgagcgagttgcagatggatcggtatatagatgtctgaataagcccagcaccgtggatccgtatgcatgggtccggcggccttaaaaacacgacatatattagcacggcatctatactactacagtaccaatgttgatctatagatgattagagttgtacgtggaccacaagtttgggtccactatatatatcaacacccccaattcaccaacacaacaccactaattagctacagtcgtcggaatatttttatcattttactagccagttgtcacgtactttgct

SEQ ID NO: 18513 - DNA, 428 bp, Zea Mays
cggagctcggggccggggcctggtggattgtggtcggcttttgcgtcgccgcggttgggcgcgaccgttgtggcttgctggaggtaggagaagctctctgggccgtggattggccgatgaacggatgagatttgatcgtgtccgatggtgatccagtgcgtccgctcgagatcgtgcggctatgaattgagttaggttccataaaatcgggacggtaggatagggatctaacggcccggatggcattccagttcaagcggggaagatttaatctgtacccttgtttcctgatcggatggccagtactcgtccgtaccccttcgtggtgtatcttttgcaaaagagcccctgcagttttaagcaataaacccgtcgtccatgtattactattcactgtgcctagtatctcttgcgcagagacccccgcg

SEQ ID NO: 18514 - DNA, 358 bp, Zea Mays
cttgccctatgcttcccactcaggtggagtcccgcggctgtcgcatggcttgtggcccgtgacataagccaacgggccgagcctgacgtaaggcccatacagccgtgcagcctctgcatttattgcggagaggacgcgccgcctgccactgcgcagacaggcgacaagccctctcgacattaaatgcgccctatcccatccgttggcagacgacgtcaaggtcatccagtagacgacgtgcctgaccagtctgttggagaacaatgcgcgcgttccgagcagcacactgtactcatcatcccttctacaagaagcttcccctgcacgcggaggatacacagatctcgggcgtcaagcg

SEQ ID NO: 18515 - DNA, 295 bp, Zea Mays
ttttaactcgtgcttttataaatacaaatgttaattgactcggttaataccagcttaaatacttttatttattcgtttgttgttgttcgcatgctgcatcgtttgcgcgtcagcgtgctgttcgcgcgcgtagtcgcgttgactcgcgcgtatcatgcacggttgtgtgtgttgtttcgcgtacgcgcagcgtggcgtcggggtcccgacgacatccgtctacccctagacgacgttcgtctaccgtagacgacgcccgtctaccccccttaacccgttcgtctaccccttcgtc

SEQ ID NO: 18516 - DNA, 366 bp, Zea Mays
ggggccatgaacccctcgggcattcgtaccacgccgacgtcgagaccgtgggggagaaaaaggaaggtgggcgtctctgtggcctacggtcaccttacaaccacaccatggctcagaggatgacaagcggagtaggagcatcaccgtgatacatcgaagccgaggttagtgctcggtgtcgcgatggtcgattgtgggttgacgaattcttcaccggagatctatggtgccgccaaatccgcccctcgccatggattaaagccgctaccgcatgacgataggtgaagcaagccctgttatgttcgcggaactccctgtttgcgtaggaccttcgagataggggggatcgacgacagagggacaacg

SEQ ID NO: 18517 - DNA, 461 bp, Zea Mays
aaaaactttgaacgagcctgccacgcctctggtgcagggctgggtttgggcccgcatagagcgggctaggtcgggttcggaccgggcccaaataacgggcttcgtgtcaggctctcgcgtcgcgtgcttgttggccatgccatgcacctcacgcctatttggttacctagaccgcaactaggtctggtccatgcgaatgtgccatgcatttgtcctcctccatcctgtgtatgcggatgcaatgaaattctctcgcatctccagagcctggtttcacgtgagcaatggctagcttgcggtccttctcccacctggtttggatggtgctcccatcaaaagctagggttacaaccctctcttcctgccattcccaccaaaagcttcctccaagcacacaggtaaaccctaaccctaactattcctctccacccacgtcagtaaaccctaacccttcctctccg

SEQ ID NO: 18518 - DNA, 314 bp, Zea Mays
cttttattcgcttaaggagtagatttcgtttggtgttgagtttgggggcacctgcggtaggaactgacgaccagagttgtagctctgctgcaacatcacaatgtgtcgtggctcaactttcctctacccctatggctggaattggataaccctctccactcgttaggtctttcacatggggtagcacgtgtcttgcgtgggtcgcggcgccaaggctgttgacttacgtcgtcggcgattcattccgccgtgggcgcggtggagccaccatgtttggggcgagtcctcaggtggaagacagcccctgtccgttg

SEQ ID NO: 18519 - DNA, 514 bp, Zea Mays
tggcggtcggagaggggaggcaagctcagtgcgggggaaaaaggtagctttcaccgtggcagtgactccggtgatcgccggacatgcaaccagtgagtcaccgcgaggaagtcccgcgctgagacacgtggtgcgcaacggcggtagcttatcggcgacgaggctatccaaccgacgatgagctggggggtgaagtacggcggccttagccgtagctcaatccggtaccggatttttaccaggtcaagcttatatgttgtacacggtgcacgaatcacaacaagagatcgaccaccggcgacagctcaccggcgacgagcgggggttaagtcgggatctccttcagttcagggtctactgtaccatggaatttattcaacagtgcgcctgacagatcatgtttaggtcacgttttctctcaaatttccatggcaacctatccgaggctctgcaacaaatttgtagagcaatatgccatctacaatattgccatatgatgttgccccaaaaagcc

SEQ ID NO: 18520 - DNA, 358 bp, Zea Mays
gcgttgttcttatgatccgaagaggggtggaaattggccaccatggccatggtaccgagtagagggcattgttcgggcatctaggtgccagctacgatcttacgtagggaaaacaaaggagggtagtgattgctcaccggagaagaaggtgctcgccggagaaacgtggacgacggcgatgggcactgtggacgacggtgcttcaatgctccggtgggggaagtcggtgtgcgctgcactttggttgcatgcaacgaagatgagcaaagtctggagaggaaatggggaccatacggaggggatgggggtcatgcgggcgatcaagaactaccgaagttacgtgcggggtgagcgggag

SEQ ID NO: 18521 - DNA, 426 bp, Zea Mays
ttttcttcaggtgcaggggcggtgctgtatcctccaacccacacaatagacatgtcatgaaagtatcttcccttcatggcgtcaatttgactttgtttaatggtcaactttccgaagatggaatggcttggccaccagggccgatcttaggaatcttcatctccactttccacatcaaagtcatcactgtcattagaatatttagataaatccgccatcatctcctttgtgatcttctctgtatttgtttttgccaaagattcataaaacccagtaatgaaagggtccacaaccttcttctccacggccaccatcgtcacctcagacaccttcttctcctcagacatttattcaaaacttcagtatttcacgaagctcgaaaatcaagcaagagctgacagcaagagaactaaaatttgagaaaac

SEQ ID NO: 18522 - DNA, 478 bp, Zea Mays
catgggtattcgatgaacttacatggctttggagaatgtgtggtgtgtcctgctcatgatcaccaattgtcctcatgggtatccgttgagttgctccaaccaaacttggatgaactgtgttgttgtcttcaaggattcctagcgccagtaacgcagccgggggagttacatcatgccgaccatctgacctacaaggtaatgtcgatgttgtattctctccacactgcactggtccgctagccgtcgccatggtgtatgccctaaccctcctaggtcaatgaactaaagcggcggctgtgtgtagccctgttttattttttggagttatgctcctggattggccaaaaccgtcctggccaatattcatggtctgttcaaaatatcctgcatgatttgcatgtcccgagatttacgtgtcccgaccaatttacgattacctgcctattctgttacagcaacataaactcctcacccccac

SEQ ID NO: 18523 - DNA, 436 bp, Zea Mays
cgtcgcgtgagcacctcgccgtggccagcatgctacaggtccgatcatgtcctctgctctcttgtttcagtacccttatgtgcccctgatgcttctcgactcgaccgattaagctagaacccattggatcaccggaacactttgtgttatccgttgatcgtgcggtcagcatgagcagagaggttgggagctcgaaccgtgcaattgattgaggggaaacgtttgttagatgttgaattaggtatcagccaagttagagcaccggccattgcgtgtcttggccggtacaggttcactagagctcggtctgtcgctgtgctgcgtcgtggaccagacgttgtgaagaaatagaaatccaggggggttttgtagctgtcagtgaaacgcagcaatagtgtcgtgaccccttttcaagttattcaaatcgccaagttct

SEQ ID NO: 18524 - DNA, 532 bp, Zea Mays
tgcaattgtctgcctcaatcatcaatagagaagagaagaggagtggggggattggagggcgagcagcactgcagcagacgcgatcggaagaaaaggcgtgcggcgtggaggaaggaattgaagtcaaatcttttcagcgtacgtaggaagaggagaggaggacccggccagccacgaccacgagtcgaaagaggttgggacgtcgtcggccctgcatgcagatgcagcccgccatggcgccatgcatggtcgatggatcaatagggtcatggatggatggacgcgcctgcatgctctgctgatagaacgaccgaccgactgaagtgacctctcttggaaagcccttgatgcaaccaccaccgtttaccctcttcactagctgcctacttttgtttcctactactagcttttacctggcccggggggcccccacggatcgatatccgagcccccccagctcggctcctccctctcgttttttttaccatttcgaaactactgtgtgtaagacactgtacgtacatacgacgta

SEQ ID NO: 18525 - DNA, 811 bp, Zea Mays
agcaaaggtacgtgaagaaggattgttaaggggacatagagtgagtcctgacaccgtagagtacgtctacgaggtcatgagtcatgatatcacaagcctaatgcacaaggatttttatagaagtccgagccgcaatgtgtgtaatactctacgccctctactcctcttgttgatcatgtatctctgtgtggtgtgtccaagattacaaggaagggggaggaactacatgctttgagaattgtaggctaagataagctaaactaactcctctcggctctcgctggtttggacgggttgctttcaaggttgttgtcttgagtttggtcttgcgaatctaaattgaatgttgttctaccacctctttatagatcaaaggagtggtagtgttacaagtatatacttcttttggccttggcttgtcgtagagccaaccactcgtgtcatgtcatgagatcgtatgtcatattacggtaggtgttctccgatgtaatcatgttgttattcttttggcgcattaatgcccctcgtaccttttagtataagcacaacctttcatactgtaatgtgttggtaacaaggattctcccaatcttcggacaggcgagctcttctgcccagatgcaacatgtatgtatgcatgcatacatgtatgtatgttaaactatgtgtgcatagctgcgctagctagggttagggcatgcctcaggtgccccaggggcatagagcgtcaggtacctcggcacgtgagggcccccgggggcttaggtagtcagatgcctggcgacgcgagaggccccaggggtatagaccg

SEQ ID NO: 18526 - DNA, 2214 bp, Zea Mays
ctgagtctgatgcgtcaactgaagtagcacctgattatgattatgattatgactatgataatgatatggatgttgcctctgctgatgagttctttgaagcagaagaaatcttcagtaatgctgaatctcaagatggaaataaggatgcggatactctttctatggtctctacagattatattcgaactccaagtgccgaatgttggaaaaactctccattttccaactttgatctgaatattgacattgatggatcacaagacaataaagccgataacttgggcttgttgttagaaacagtaaatgatggaaagacatgcacatccactgaagccaatattttgctcaacaatgagactgcagttgtgaagtcaacttttaccgctacaatagcatgcacatccactgaagccaatattttgctcaacgatgagactgcagttgtgaagtcaacttttacagctacaatagatggagacacagatagcggcatctcaagttctacctataaagaggatgggtgcatgtttgaaaagggtagttccaagcaggatataaggatgggttccaatcaagacttgagccagattgataatgtattggttaaggaggtgattatattagaaactaatagtactgatgacatacagatgatcaaagaggtcatcatatctgaagttacaactcccaaacaagtggtagaggggaatatgatggaaactgaattagatgaggcagtccacagttcagaaagcactgcactgggagaagacgaggacacaaaacgacctaatacttttttcaaaaaagatgagggacagagtgcacgagatgaatatgctgcttatgacaatggcatagtgattgaacgggaagaaagtcgcaacaaagaaaaatttaccatcacaggcacagattcactagtggctgagcccaaagatttaccacatcttgacagctcaaacacttctttggaactaagttcagccaatgaaaatattgatcagcttcgtgcttgcagtagtaatgtcactgcagagcgaagagcaggaattgacacatcattttccagctccaggagtcagtcttctaatatctcttgtgcgaacattctaccagaagaatctaacttgataataaaccatgcttcaacttctgtgaatgcaaatacagatacaaccgattcatctcgactggtgctaaagaaaaaaccttttctaccattggcgacatctagtcttttttctccatcatctcccagacgcaatctgcttcgtgctgcatccacagatttgtcctttttttctccatcacaaacagaatctaagcagaactccgttacttctacaagtggaaggggtgattcagatacatcttctgtgcttccaccatttcagctctacacatccctgggatcatcatccaaaatgtctctagtacatcctactctgcgaccaataagaacgatttcatctctaccatcattatcatttggcacattcatagagatgtcaatggcttcttcaagatcacccaaacaccaagagcatgttagatctccctcaataccacaagatcaacatcttcacccaccaatgacagaggaaaatgatctacattcaggtagcttaactttgcctgcttccaaccaatatggccctcaaaccccacacccacctccactaccacccccacatgattcttgcacccaaagttattcgagcaccataatatatgaacctgaacaaataagagctgatggatcttgttcctatagtccagattatagacaaagtgttctcaacttaggtgattcctcactaacttcactctctaatagtagtatagctgcaactgaatgtcccttaggagcctctgattttgtagatgaggaagtaacaagtagacctaatatagtaactgccatggatgtcccatttaccaatgaagatacaaattctttgttgcacatgacttgttcttcacctcccaaaacattacaacgtgctgaaccaccaacgctgccgccaccacctttgcctctagtaccaccaccatcacaactaccactgccaactatatgcagtgatagtggatcagttccactggtatactcaaatccgtcttcagattgtccatataaagaaccaacaatgctaccagaacacaaatctgatgttccagctacttctctcgaaggacatgaagcaagtg

SEQ ID NO: 18527 - DNA, 684 bp, Zea Mays
gcggagtgtcttttaaataaaagacttcgattaacgcacttgttgtgctattccggctgcacccttaggcgacttttgcgcggagtgtcgcacgcgagggtagtctgcgctgcctctcgcggtgacttcggagtggtcgaatgcggtctttttcgacatgttgcgtctgagttattgcgggggatttttgcgggtatattacatggctccgccttgttaaaaacctcacccctcgggaggaaaagagtgcgggccggaatagtattgtttggtggattacaagggtgcgtgggtcctgagggtttaaacaaaaaatttgcggagattgtcaatattccaggaatgctctaggtcttcaccggatggcgttgtcagcctgtacgtgctgggggacgccttcaatttgatgatgaatggaccctcccactttggctctagtttgccccatgactctgttcaggtggtccggacgagtacgaggtcaccttcgttgaactctcttgggacgaccgcatggtcgcgccaggccttggtttgagcttggtatttgttgagggcctgcagggcgaagacatggtctccgtcgatgaggtctttggacgttggttcgtctacgtcggggactgctgatgtgcttgttcggggcgacccatgctttatctcttgcggcatcatggcctccga

SEQ ID NO: 18528 - DNA, 413 bp, Zea Mays
gttcatggactctacaaaattctttagcattagcactctttccctggcttaagagagcccatatgacactaagcctgactataaagtttggtgtcagctgatgaagatgtatctcaaatctttttaatacttcaccaatcatctcgtacaataggaatcgaagcccggctcggaaaaagctcttgaaaaccaccacctcatcatccttcggctctagaattatctcttcacccacgaaccttatcaagttgtcatcattcttttcgaaataaccaagtttcttcattaaaactacgtcctcaggtttcacggtggatctgccaaactcgatatggctaggcttgcttagacttagtatgccattatcttcttcatcaccacttccaactttggcaataacatttttagcttcg

SEQ ID NO: 18529 - DNA, 739 bp, Zea Mays
ttcgtgccgccgccggtccaatttgtgctaggggtgaatggataacaccggtgtacgtcaccggggataaactccggccgataaacaattccggccgtcgtaccatgttcaccgcggtggaaaccgataagaacgccggtgactgccgtcgcacggccttgtgccacgtgcctgagtacctccactgcatcgcggtaagccttagtgactctcggttgatcgccgggatgaccgccacggtagaggccacgaatccactgtgccagtgctcttcctttcctccgaccgccgcgcgtcgtcatccaaattcccggccgccgctcttgcttcctataaattgagccctccgtcagctccgcaacatcaccacgcacttagccacccagcattgcccccaaccgatcaccaacgtgctcaaattttgggtttccccaattcggtttccgccaccacgaagaacacctcgccgcggccagcgcaaatcaggtctgatcctgtcgtccttagttttgttctagcatcctcatgtgtctgtgatgctcaccgacccacccaattgaattagactaccaccgttcgccgggaacacgggcaggtgtccgcgataaccattgtcaccgtggctagggcgttgtagtgtgccattgctgaaattgacttaggggaatggttctgggagatccaattcggtgttcgccactcggggccgccagtcttggctccctctggccggtccagg

SEQ ID NO: 18530 - DNA, 277 bp, Zea Mays
tcatatttaaactcctctctacgaacagctcaatttaccatgcaaaacaatggaacagtgattaagaacaacgatccgtccatccctcacccaactgcacacgcctcgccgcccgtcatttataagccgccaactctctctttgtcttcgccgctccgccatcgtacaccatccccactaaaaccagccgtttctgtaggtgttagttataccgccgctgttccaatggccatgcccaacccaagaacggtgttgacatccgcgccgtcaccgcccg

SEQ ID NO: 18531 - DNA, 470 bp, Zea Mays
gaaaagggaaaaataggggggcgaccactagggttttgtgggaaaaagaaacgacgcctcagatgtctcttgactttgcatccaacggcccacaactctttccccacatccacgcaccgaagataaacctttggcaacattttttttgggatattacaacgacgcaacagcctcggccatcaatttataggaggcttaggcggtggcgcgtaatttggccgagcagtgctggcggccggagatagagaagaaccttggctcagtggattggtgtcctcagtcgtggcaaactcaccgacgatgattagacgggtataaagagtcacggtgccgtgacggaggtgttcagatacgtggcgcaaggccgtgcaacagcagtcaccggtgttcttatcggtttccaccgcggtgaacatggtacggcggccggaattgtttatcggccggagtttatccccggcgacctacac

SEQ ID NO: 18532 - DNA, 301 bp, Zea Mays
gagatgttatgaccgacatcccctacaccaggcgcagggacattagtggctaggagggctaaggcccacggccaggccataggccacatgcggccaggagatcagctaggttagattagataaggattagctaataaaaaggagagattatatctagttagttggataaggattagaagagatctcatagctcttatccttagatcagataagcatcagctgggatataaatacttgtaagaggtcatctgtggaattaagcagaatcaaattattctggcttccctgagggagccaggag

SEQ ID NO: 18533 - DNA, 677 bp, Zea Mays
acaaaggtagaaattgtcaaaatcattgtctaattttacaggcaacaaatcagagcagaactacataagtaggtagtaggctcatgattcatgaacatcgatgtgcaacaataaagtgatagactagtagatggagaaaagtactaatacggtagtacctcactaccttgcttgttgcttggcagtagcacgcactaggcctaagcgtccagatcttgtagctgtaggccaccggtgtcctggaatctagtgttgaagccatcgtgggacaattggagttgacactggcggatggattggtggccgatggcagcaagggctggtggttggccatagcccatggaatagttagatccaaactaggattgatagcagcggagtagggagcagatgttggaacgagattggtggccgactaagtgggattgttggccagcagagcgagattggtggcctacggagtgcgagatggcggcgatagtagcagttctcaggggggactatcaaaaccctagaaaatggctcttatatctggtatagggtgcgaaattttggtgaatggaataggcacggcaggagactgcattgtgtgccaaggttccaaaatttcaccatcgcctaaacggtaaggtacacgctatacacgttgcctaaaaacgtttttccaccatgtcgtg

SEQ ID NO: 18534 - DNA, 655 bp, Zea Mays
tgctcgtactgtgcttcgcactttttggggattcagtggccggcagtagtgattgtgttcgcatttgcactttttgggaattaggtactaattcatgactaagtttactgctgacgtattttagctgtcagatagttcattttgtcactttcaatcattccatagcatttcatctcctttagtgcacagtatggcagccgaccgtgatattattactgatagtattctttgcattttttcctgtttcagttggttacaacattagccggatccattgcaaagggaccaccattttgatgcatgggtaagaatctgcattttcaccatggtctatcagctgaatcatggtcagctaactgcatgtttacccttctcctcgcatcttcacccttctccgatccaacagagcccgtgcggcgatagttcagtgacgaagcaaataacaggtgacgcccacgcatcgcgctgcaatctggtggtggtggtgtggtggtggtgaggtcccaggcagccagcgatctgctcgcactttcgcaccagtggacggtgcgtcactgctccttctctccagactccagccatacagaacatgtatcgccatgaaaatatatgaacaagaaactgaaattgccatgaaaataatcctcagtttctt

SEQ ID NO: 18535 - DNA, 621 bp, Zea Mays
ctcgaatttagtttttgccttttagttatataagtaataatggtgatggaaataagtacatcgacaagaagtttatcgtttttatctttgttttagctatgcagcttttactttcaactcactaacatctagatattaactgacagcaaattggaaagtcaccactcacgagcacagcatcgagaaccctggcaggcgctccccactgcttgcataagcatcttcacttttcagatccagcaattgtccatacttgacggttgacacaacttcttccagaatgcctgccatgggagcattgttttggtcctcgacgtattctgctacagatggagcacactgcacgcgacgacatctctcgcctggcacgaggcggtgtcagggtgaacagcgatggcgaactgcgcatctcttgtgtttttcttttatctgaacacaatgaatctttgaccaaaggaagaaacaaatagagcctaaatcaagatgccaacgcagatgctctccaacgcctcctcatcgaagctgttgtggctctcctgcagcgacgacgactttgaccgcatcgcaaccacacttacaactccccgcagatctaccgaaccctacgaaaatcaagaaccc

SEQ ID NO: 18536 - DNA, 941 bp, Zea Mays
cgggtatgggaaagtgggttgtcgggagcgtgctctcagacgtgttctgcggcggcgaggtaaggttctcgatgccctatcgcgataatattcaatcggttgggccgacaagctatgttaacattcaaggatgctagaacatggcacagaggggaaggaacaaacctgggaatagttggtcacggtcgggtgcctcacggcggcgtaactgaccacgatggggaaaactgcaatttgtgagctctggtgggtaattggaagcgaggaagggtgcactaggcgcgtaaccagaaggcggatcagggagagcctttaatttatagtagctacatgagtgctttgtgaatttgggatgagaatatctcacgaccagaagggatgtgagtcaccagagggcaactgttgtggcgctcggtgaggtaaagcccctggcagtaaatgggctgtccacagcgacctattgcaacgtggtaacgtctccaagaatgaggcatcctcgcggcgagcggcagacgccgacggggacattccgtccggtcgcgaagcaagtggttacggtggccagctcacaaacttatccgtagtcatgatcttttcacttgcccggtaatatccacgttgatccaggcacgaattttcagggcaagctcgaatcacggtgcccgatcaccggtggtgaggtacactgcaccaggaatcttcttcagtgtactataccatggcaatgttcattcagcgcgccttaccgagccatttgagagtcatttctcttcgactttcattcaacaacctaccaagtcgaccatagcaaagttgttgtccatcatgtcaactttaattttttatagggttcttgttcatacctccactcgatcaagcacaattcagctctcaagttgatctaatgccaccattagtctaaccttcaggccaacccccga

SEQ ID NO: 18537 - DNA, 402 bp, Zea Mays
ggacgagcgaagagctaaagcacgatcggattctggccactggatccgcgatcaacgactgtcactctcccctcacctcacccacaccgcattgtccccaagctgtggcgctatacagggccacggcggaggccatcgccggccgtttccaatccacgaccccgagcgacgtgcttcaatccgaagggcaatacatgaaaaagggacgccaactaaccatataggaaacttctcacctcgactctggcagcaacgggacttggcgacatggaggagcagcgtggcggacctctggaagcacggcgaggaattgtggctgttcagagcatgaatccacccaagcgaggttacgacggtattccgagtggcatgatgaggcccatgggtccaattccgaagacc

SEQ ID NO: 18538 - DNA, 537 bp, Zea Mays
gttttatttttaagaaagccagaggctcataagcaaaagaggcgggccgaagaggtatctttgattttcagccgttcgattacaatctgaccgaccagattagatcagccctgatatgaaccggtacgtgtacgttatccctcagatcaaaatcctacggtcatggtttaacgaatcacagatctaatctgggccaagggatcagagatccacggctcagatcagtttcatccaaacgctgtcgaacttctaatcgtggccgttaagtatccgatcgacagccatagacccatcttccacccgcagtcgtgcaagagggaatcaacggcgcagacaacctcttcaccctcttccttaccagccggtcgaccacggtggcgcggtgcacaccgcggcggagctcaccggtgagcatggccgaacggcacccaagcccccatatcaccaacaaaaacggctacacgatgcggatgtcctagtgaacagcaccagtgcgacttaccaggatttagggtacggacgaagcctgcccatgga

SEQ ID NO: 18539 - DNA, 546 bp, Zea Mays
ctgtaccatcatgccgagcatagaaaacaggcaagaaatctaagcctaagcccctacctagctcaccaaatgttggactaagaacaagccaatggcataggatttggcgctagaaggagggcacgagggaacacaagggttagagtggttcgggttgctagagcgtaataccctacatccactatgagttgtattgcctgggagtctctgtgtttgtcagtgttcgttagagaagccttagttggccctctacgagaccgagttctatcgtgtgtgtgccctcccttttaaaacccaagcaaggcacgtacatggtgaccaagccccgacatgtgggacaaataatctattgctatatatggagtaagtggagtggcagttcgtggacaacgaatatcttctcctggtcttcgtatagatcttctgtcttgtcatgtccttgcctcgtctaatcggagcagtgcgcagaagtaggttgtggcgtaggttgatgcgctacctcatgtaggggtgctcaagcgatgttgtcctgtcttcttcgactat

SEQ ID NO: 18540 - DNA, 446 bp, Zea Mays
atgttcccttgagtaggaacaggtcagcacaatctacacttgcttgctattcctcacgagacttgcaccagctgcaaatttgatgataaactagatagtaagccaaggaaatggaaagacgtgtaaaacaacagagttgcataaggattactggctcttccatggatccctgaatgacctgttgtctgatgactctcgcaggtaataggtctttggtgccttggtggctcggtgcaagtcacaaactcacaatgctgtcaacacattcctttaaacttttgaacgtggacgtattcgtgacaactggtgtctgttttgttatttaaatttgtgtagcctgctcatccttacaggttgtaacttcatgtcgctgggatacagtttttttttgtcatttttaatacttttgcatttgcatgtcatgtagttgatattgttttttcatt

SEQ ID NO: 18541 - DNA, 561 bp, Zea Mays
tcacctttttcccctggcggacagcaacatcggcatcatcgtcccctgggtagccggcatacggcagacggttcaactaaaaaacgcggttcaacgtaacatttgaaccgcgaatatcccaactcctcagagtctccttcttcggaacatactttcctacaatcttcacggcctcggccttcacttcacgcacaaactcggccgggttgcgaccgcgtaaatccaccacaaaggcaggacttcgcacaagctggcccctagggtcggcattcgatgtgggcacacttcgcccaatacctagctgtgcgccaagggccacactccataggtgataaattcctcaaccatgtcgcgcccactacttaggtgggcagcatgttgaagggccccttcatcctcgtcttcctccgccacctagaattgaggaaacgccacatagaagtgtgagcacagaatggccggagggaggcttggcaggtcttcgacgtcgccaggagccacatagaaccaaaaatcccaccagttgccccatttgttcctagcacaagggactatctccac

SEQ ID NO: 18542 - DNA, 631 bp, Zea Mays
gttggtttccccaagttgttgagagcatgcacagttcgcctcggaatcaggagctagccagagtatgatggtcgtgaattcgtcgagcatggcacagagaagtgtgtcgtgactgtatacaatggatccagtccgcaccatgtggaatggagtgtcactacagcgggacacagattcaaagacacttgccaagtcgtcgctcgcaaggcattgagggccctgtgtcaaatctatgaagaagaagtggccgacaccccgctcagattcattccgtcctttcagaaagaccgtccagtttggatggccaggatgcgtgcattagaagggcagcagctgcttgaggacgaccccacagtcgtgtacctcactgcatacctggtcaccctagatgcacagtatgatttcttggctaggcaccaccgtcagatgattgctcgagcagaagatgcagaaaagcgcaaccgtaagctccatgtggatctcaccacagctcaagcccgtgcaactgccttggaaagtcatgaagccattgctgttgaagccctgaagcaagccaaggatgagcacgtccagaagttgatggaggcctacttggtaacccgtaaccaacgtagagccctgtggatccaag

SEQ ID NO: 18543 - DNA, 296 bp, Zea Mays
tttggttgctaaatgtgtacatttagctacatccgatgttgtttaagactttagatcacttgtcatttgaaaagagtcggtggttacaatggccaattgtgctataatttgtcacctaaatacacgaggatttaatttatatactaatgcatattaggctcgtcccatatttgtcaaatacggaataaatacgggttcaatccggaaaaaacgggatcccgcaaaaacggacggaataagccctctcccgtttccgtcccgtttccatatttttccgtaaatacggaaatggtcgg

SEQ ID NO: 18544 - DNA, 419 bp, Zea Mays
atcaatcgagtgagagtgtgggcaacgaggcgagggcaagatgaggtagagttatcccctatcgggccacatcgtgcctgggaaaataaacgggctgggtccaggccggcacgctgtgcagctacattagcctaagcacgacacggtggccatgccggcctggcctgatcatgtttttccttgggtcgggtcgggcccgtgtcgggccaaaaccgtgtcgtgccacgggtagcctaaacggctcagtccgactggacatgtatagtaattacaaaagcttctaattatctaaaaaagttgaatggtcacacgtgccattggtctggatatttctagtgctacagaaggttcaaaattagagttgcttatctatttagatgaaccaagtgtgcctactagtgataagaatgtcagcttgc

SEQ ID NO: 18545 - DNA, 441 bp, Zea Mays
gcggattgggtcacgacagaagcttatcaccgcgcctgtagccgtgcgacgtggctggaccgctgatgttgccatggaaactttggtgacctcggttatgccacgtcgtggctcgttactgcgcggtagtaaccgtggcacactcagaattacaatctttgagccgttgcaccggtgaacgccacgattaagccactagtgctctcccctctctccgaccgccagctcgccatctcaaattcacgggccaccgcccttaggtcctataaattgagcatgccatcagcttcgctaggtagtcaagcatccaatacacctacccgtgcctcagatcgtccaccagagctccccaatttgaaatttcccccaaatcggtcaagaacaccgcgtgtgtgagctcgccgtggccagctctccacaggtccgatcatgccctcctcg

SEQ ID NO: 18546 - DNA, 354 bp, Zea Mays
aatcaatcatagacttatactaatcataatcatcatttcatgcatgcatgcgacgatgatgggctggtagggtgcattattaggtcccacatttttgtccttatttaccttttaccacttcaccatgatcttgctcacgtgtccactcccacagtttcaaattttaagccgttttttagtgttgcgaaacttgtctgatttcagtcagatttatcagaaagcaaatttattattatgtacaatatcctctcctatccatccaaaaaggatacaactacgagatttgcgcaagttaaattgttggacttctcaagaagtgcgaattgcattcttctgttgatgaaagtagtatca

SEQ ID NO: 18547 - DNA, 1409 bp, Zea Mays
cagctaagcatcgcaagtacatcaagatgatctagttagtaactttagattggccaccagactgtgggtggaacgctgaactcatctgcaacttgacatctgtcctggtgaacagctcagtccaaaatgtactagtgaaaaatggatcacgatcactgacgatggagcaaggaataccatggtgacgaacaatatgatcaaagaaaaccttagctaccgaagatgttgtatagggatggctgagaggcacgaaatgagcatactttgagaagcggtccaccacggtaagaataactgatttgcctccaacctttggaaacccctccacgaaatccatggctatatcgctccaaacccctgaaggaaccggaagtggctgtaacaaacctgccggatgaaggtgttcagacttattacgttgacagactgaacaacccttgacaaaatctcttatgcggctggcagcaaggggactatggaaggaaaccctccaactgttgagggacttttcgatgccctcgtggccttcttcatgaactgaagctaacaacaggggccacatggatgaggcatctgacacaaaaattttcccttgaacagtaagagaccatcaacctcggaccacccttccttcacaattccagccaccaactgctgcctgagcgccaccacctgtaaatcagatcccatctcagcccgtagagtgtcaaacagagcaaatgtgggggtggaaatactgtgtaggttcaacatgacttcatctctgcgagacaacgcatcagcagctccattgagtttgcccgacttgtactcaactatcatgtcatacccaaataatttgctgacccatgtatgttgagggatggtggataactgttggtctaggatgaatttcaagctgtagtgatcagtctgaactgtgaacggtcgcccctagagatatggacgccaatacctgacagctttaaccaagccaatcaattcccgttcatatgctggcagcttttgatgatgaggggctattggcctactgaagaaagctatggcgccctcaccttgatgtaagacagccccaaacccaactctagaagcatcacaatcaacaataaagcgacgagtgaagtctggcatctgcagaaatggtgatgtgatgagggcttgtttgagcaatgtaaaagcctcggctgcttccggtgtccaacggaaagactcccttttcaataaggcggtgagaggtgctgctattgttccatatccagcaataaacttccgataatatccggttagtcccaaaaatcctctgatagctcgcaaactattaggaagtggccaggtttccacagcagaaactttgtcgggatccatggcgacccctgttgcagatatgatatgtccgagataggctactg

SEQ ID NO: 18548 - DNA, 845 bp, Zea Mays
tagatggggaatcaagggccctagttcaacgaaccaacatgaatcggtatctgaagatctggaccatcggatcaggggtgggcggccaagatcggacatccggaggtttaacaactatggacggccaggggtggtgccgcttgcgctcgcggtggcgcagtcgctggaggcgaagcgggccagagatctagggggtcgaggaccgtctaggcaggccagggctattggggagaacccaacgaacaccacggtggagcttcggatgcaagaacgggaccgaggatgggtagaaaatggaggggggattgcgggcgggtcggggggtgctccggtgagcaatccccattgcagtggggcataatccggtgcatcgaggccggcgtgagctttggtgaggggtacgagcattctaggtcgggatttgagcatgggggtaggttgtactgaccagatgccgtggagacgcggcggcccaacgaggagcgactccgatgagcctaaatccaccgcggtgagacaaaattaaggcaaaagaagggaagggtgaggttccttactcaggggcagtgctcaggggagctcgacacgacgtcaagaggcttcggttagctggacggcgagggaacgcggcggcggcaatctccggtctgcacagggagggagttagatgcggatggggtaggcggctattgaaaggggaaaccgaggtgggttcccagtgcaatgcgctcaggcggagctcacagtggccgacacgatggcagaggcctggcgacgatggtggaacgatgatggcggggctgcgagctaggtgagggcaagggacagggagagagcaaatgagg

SEQ ID NO: 18549 - DNA, 855 bp, Zea Mays
tgtgtgcgccgcctcggtgaattcgcattggcgcccgcgtcgggttccttggacggggcagggagcttcgtttcgtcttcctgtggctgttgatcgccttcgagggagaaggggaccactcgcttggtggtaattcctcaccggaatttcatcgccgtcacataatcgcactgctccgtgagcagtcgactctactgctcggcgtccggtatgaacgcagcctttgcattctccgttaccctctcttgatttgtactcgctccgtaccccgataggacacctagatgcgggacctgggctcaccgtcggggcgccgccgcggctgaaatcacgtcaccgtggtatgagttgggagatagaagaaggctaggcgtcgtcggtttagtagtcaacggtgcagatcaatctaggaagtagcctttcgcagggggcgatctggtccattagatcataaatggacagccgcgaagtgatcctaacgttttaaatccaaaccgtcgatgtccgatctcgcggctgcgattgcataccggttcagtgtaatgtggctctaatctggagcgtagatcttagatcgggcggtcagaaacgctcgatacccccttcgcggtgcacttttgcataagagcccctcggtaagtaggaaatagaacccgccgtccaccctcactgcgctctgtgtctatagatttttaccgctgggcccctggacttcccagatattgacgcccagtccagagtagattaaaaatagagaaatgatattagaaattcgtttttaatacaaaaacaattctagaaacttgtttattccatagaaaattcatttttgctccaaattgaaccattctaatt

SEQ ID NO: 18550 - DNA, 841 bp, Zea Mays
gcgaaattacgctaggggcgtgtcgttttgggtctgccactcttccaagccaaggctccgggaccgtggtctaccagggcccaactaatttctcgtcggagatcgaaggcgccgcggaccataggaactccgtggccggagctctgcaattcatgctttcagtaagaacatttcctctccttgtggtcgctctacgttctaggatgtgatgcgcttcgaactagggagtcggagagctcgggtaccggtaattggtcgctggacgtcgtacgcgtcatggtcgtgccaaatgtcggcatggtcaagtcgtggcacacctcgaatcattgtgtgcaccccctcccgtggttcgtcgggatgccctagtggaatggcggggtccaattttgggagttacacggtgggggatggggatcggcaattgccggcgggctgatacgccatggcggcgagcacaccgccgcccgcctacattgtgaagagggtggagtgactaggaccgctgaatcgccgacgaacggaaccgattcaatctgagggtcgagtagcgcggaattagtcaccgccgtttgatacgatctgagcgggtgagattagatcgtgcttacttcaatccagtgcgttggtgtcagatccaacgtatgatacagcgtactgattcggtctagggtaggcgcaatccggtccatggaattctaatcggatggctgtaaacactctgtaccccttcgctgcacactactttcacatgagccctcgggcttttagtgactcaacccgcggtccactacggggttggactgagtctagggaattttatacgttagcccctgggtttctg

SEQ ID NO: 18551 - DNA, 292 bp, Zea Mays
gataagtgacccacgagtactttcacttttcactgggcatcgcgtagggctagaatcgtctggtttagaccggtaggaagcatgatcgccgtggccggccatggcgccgtcgtgttgcctggcagcgccgccgccctgggaagaacgggggtaggtgatggcccctggaccgttagatcgggcgtgttcggtcaggattagaagcaggcgcagtgggctcgggtaccgttgatctgataacgtacggtcccgattggatgcgtcgtacccgttcacagcttttcgatctggt

SEQ ID NO: 18552 - DNA, 691 bp, Zea Mays
ctcgaatttccaacatttggcttcttttcaggttgaagactgtttctgtgagattgtcgcgagatgacagtctccggccatgccaagcactgctgtctcggtattcagaaactgttgtccctttgattcggaggttttgctcgacgcccattaaggttgaggaggtcgccaacatcgaagctgatggaaaggtctcatatctggatgccgctgctctgccctgcgacaactctgactgtcgtggtgagcccagtcatggcagcaggccatggacgaaacggttgaagcattatggaccttctcagaagggaaaccgtaaccatcatgaaacgaaactgccaggcagtggcagggatggatcttctaggaagggcagccaccctcagaagggtaaaacgaaactgccaggcagtgggagggatggatcttctcggaaaggtagccaccatgaaacaaaattggcagacagggatgaacttattcagaagggaagtcatcatgaaaaggaattggcagacacacccttcaaaccttttcttttccagattgtattggatacttctatgagttctcttatgcctgtacttgacggatgggtgaaaatcggtaatcgtctggaaagagataaagtcaatatggttttgttccatctgaggaagcagagaatgtataacaaggctctgaaggtacc

SEQ ID NO: 18553 - DNA, 649 bp, Zea Mays
tactaacaatatcctttgttgttctatttcaggttgcgatcaattgttcgaaaaccaacctttggatataatttctcctgttgagaaacaccctagcatggacaccgttgcaacactagaagatcttttcctcaagacaaccaggcaagcattggcaaatgttcttgatgggctaaatgcccatactttgagagatcctattcgttgcgccagtctgtgcctcgcttcatcttgtcttacaggacaatttgctagcattgcaagaattaaagctatgctggacaaattaattaccatttccaaacagctgcagaggacgtattctaagtttgaagtggcaagaaaacaagacgaacaaagcactgctgaaatcaagcaggcgcttgacgtccaaagggaagctcttcgcactgttgatgaggaattggcctctgctgaaaagcagcgggcagaaaccatgacgacaattgagaaacttaatcaaattttaatggaggtagagcaaaagagagcgcgacttgaggaaatgcgttctacttcagatttggaggtgaggaaattagagcaggacttgtgtgatgcaattgcagacgcgagcaagaaggctattgatgtttttcagaaggaaacaacagaactgaatcagcag

SEQ ID NO: 18554 - DNA, 585 bp, Zea Mays
ttcaaatgtctcaatttgattgggacacagaggggtcgtggggtggccttatatccttgggtaacacaaggtcctaacaaacttccatagctggcacatccaagcagttagaagaatcttcgtctgatgcggaggcggttacgccatcggtgggatcgagtacgaggaaggggattagcattggtcaagggggaagaacgttagtaacgtgtcgggcccacatgtcactggtatagttaccgaatgtgcgtggctaggcgctggccagcgggacccacacgccagtgaacgctatggccatgtgttttgtgcgggattggtgctgagtggatgacccattggccccacatgtcagcgccaagcctaggtcatggactggcaggagatcagctaggctggggtactgattcggcccatgaggctagggttcatcattttcatttcttttcttttctatttttatttatgttttcttttcattttcttttataagtctcaaattcaactccacacaagttcaaatttctatctatatcgtaagtacacaataagggaaatcccaacatgtaatgcaactcattttta

SEQ ID NO: 18555 - DNA, 878 bp, Zea Mays
tatgtacatcatggttatccatagttgttcctagaaagttgtcttgcttatgattaaggtttatcatgaatattgtagaagcttctagaaacttggttatgtttattatatgacaattgtttaagagaggttttccttgcacattttcaatgggcaagtgatggccatgggaaaagttgtcttaatcgatgctaaggtcataacttctgtagtttaacaatgacttcgggggaggaagaggtagaagatcatggcatgctcacctatggctcaaatcgacggtgagggcttgtcctttggtttgaagagtaaggcacgcattgttcagatgtgggggtgacaatgagatggtggctggactgtgaggttccgcggcaagggcatccgtatttataggcggaggaacgacgatttataatggagggagtcttgagcggcgtactgtgattggtgacgttgccacagtgcagtcgcaacatcctgaggttggcagggtaacttggctcatggtggggcattcatttagttgtgattgtgacaagtgactggcgtgtgctcaggcgggtgcacgaggtcttgctggagtgactttcttcactgaggtatcacttcaaggtctgcaacccgacactttaatatagcagctcggcgtgcacgacaaggctgtctaagggcagagggtgtaggtgtggcttgctaggatgcacaaatgccaaggcggctagaggcaggattacaatttatttacgcatgtgttttgccacaggtggttgtgggctccctctgtctagtgtgggtgggcattagacattttcaagaatttaccacggtgaaagaaaagcttagtctataatttagaagaatatcgaggaataacc

SEQ ID NO: 18556 - DNA, 796 bp, Zea Mays
ggccattgcccattacgggtatttggtccttaagatgtcgtcccccactgggatcctcaccatacgaggtgaccgcaccgccgcgctagcagccatcaagaagctacacactctggcggccgagatcgctcggctgaacgacggagggagaggcccctcggcctccagtgccagagcgccctccaaggcgccgaaggtacagccgtctgaagcagacgacgggccaacgaagaccatccaggtcagcgcagacccctcccagaccacccgcatcgtggggaatctaggagaaaaataggaactcacgctcgtcgccttccttcaagcaaatgccgacgtgttcgcttgggaaccgtcgcagatgcctgggatccctagggaggtgattgaacaccatctaaagatctacccagacgccaagctggtaagccagaagccacggagacagtctgtagagcgacaagacttcatctgtgaggaggtccggaagctgttgcactccggcttcatcgaagaggttcatcaccccgtgtggctggccaacccagtcatcgtgccaaaggcaaacgggaagcttcggatgtgcatcgactacaccagcctgaataaggcatgtcccaaggacccgtatccactgccacgtatagatcagatcgtggactctacctcggggtgcgaccttttgtccttcttggatgcctactccggtttccatcaaatcaggatgtctagggaggataggaagcataccgcttttgtgacggtggatgggctgtactgttatgttgtaatgccc

SEQ ID NO: 18557 - DNA, 972 bp, Zea Mays
acttaatggaacacgatctgcttcgatctgtaggataccgatccgacggcacagatctgatcgcctaaagcggcacgcttagctaatctgggtcgtccattcgcggaatcaacgccccaaggtgcttcttctacctcacaggatgccgccgggtggtactcgcagctccgccgcggcagacccgatgaccagctctcgccaccgctatccactaccctattcgctcccgaggtcggtgcaacgcaaggagggaatccgagtggtctggatcgaggtggcttaccagtggttgaagttggggtggccctcgactacggcgcggagtgatccacagcggcgccaattgctccgtcgagccattggcctagctccggccacccactcgatgattcagtggtaggaatcgcttccccgcgacactgcgaagctacacggtcacaatcgaagccctggcactggcgtggacgaaaatcagtccacggcggacctcgtcacatccttcctccattctccgcgcatctcccactgtcacagccgcccgtagacgaggccctccactcaccatattgctcgtggccttttcaagttcgtgatctgatggagaggtgcttttatagaggcatggagtgagtccgcgccgagaggaacggcagctgggcggcgcggatttaggggattctgtttgggcggtcagcaaagaagaaggagctgacacaccggtcccaggtgacagcgggtggagggggaatccggccgaattaatagggatttgaagggggaaatcccaacaatcactgttggcgcaggctaggaggaatcccgcgcgctccgccgcttgcgcgcagtttgttgcgcggctccacggatgggatgacagcgcgggcccacagttcagctactaggcgcgtgcaaccagagactgcccaaaggcccccccccatcggcgtgagggcacgcgagcgcgcaatcctg

SEQ ID NO: 18558 - DNA, 454 bp, Zea Mays
tgagagtgctcaaacgaggaagcagaggacaggggctgacctgtggagggctgaccacagtgaacttagtttcacggtgttcttcgactaatttgggggaaatcccaaattcgagctcactggtggacgattgctagtgattctcggtggctgggtgggtgatgaccttgcgaagctggtgggggcttcaatttatagggagagcgtgcggtggccgggaattttaagaaggacgtgtggcggtcggaggtagaagaaggcactagcgcacttgaatccgtggctaacgtcgtggcaacctcaccggcgacgatgggacgacggtagggagtcacgatgatgcggtagatggacagagacacgcggcgggcaacggagaaggtttgacgacggtgagaaccttatccacgggcggtgagcaaaggggaagggattacggctggccggagtggct

SEQ ID NO: 18559 - DNA, 485 bp, Zea Mays
caaataatgatatataggaggacccccaagagcccaatgaggactatgactctaacaagatggtggagatagaagcctcgtaagccctaacacaagaaggacctgcaccagaagaccctaagcctaaggtgccccacctaaaggaccatgcaccagaattacctcttaacctaggatggagaaggaccgtccacaacaatgatggcatgactttatagttcccacatatgttttgtaacatactcgtcgacttagtactaatgaacctccaagttaactacattggaatacaatactaacacattaagggtagtaccagcccaagtagatggtgacgacagagatcaccagtgggacgagtatggcataaggaatacaatgtccacacattatgctctatccatttgaaacaactctgaagcaagaataaatgatgctaccaggatagccatgttttcattcaatgatctgaatcaagggtatat

SEQ ID NO: 18560 - DNA, 390 bp, Zea Mays
cagagaaaagcagacttagggtttcttcaaccaggaaactgtcagcgagtatgtgtatgctcacgctgtggacctactagtctagcatgctaagtcggatggtttgagttaggtaagtcctcagccaagcatactaaatcggacagagcacacattagtcagatttggcagttggaatataaaatcagagcaaaagtctcgatactagcaaggatgacctcaaacacatgatatcaaaggaagctcaagatcacgtacaacaaccatattccattcatactggggggagatcattacaaaagagaaaggtcgactcattatgaaccgaccctggcagaccacattccccacttcacttccattttttctactactactactaccactacc

SEQ ID NO: 18561 - DNA, 333 bp, Zea Mays
caaaattccatatatttttgggtgcaaggaacatgttctattctgtgaaatacctaggggaccatatttggttgattcctgtcaaactctgggcacatttgtctccattcctttcatgtatgccatgggagatcttgactttacaagtatgccagtcatgctgacactcctgcttgtcattgtacacttaatatctgtttgactatctgtagttggcatcagtgcttacaatcataagctttgagtgaacatgcgtgctgggaaggaatgctgatatgcttagctgtgcatgagtattgctgttgcaagctttagatatgcagtgttgtagtc

SEQ ID NO: 18562 - DNA, 524 bp, Zea Mays
agcgaacaggaacacgatcttttaatcctatccacccaattaaattcaacggtcaccgattcatcttcttcctcccagaacccagtagtggtggtggcattccctccccggtggagttgcgccagagaaggccaagccgatgcccaggtattcctatgcggtcgcggctagagctagaggcagctgagggtatgacggaacagcagaggagattacttacctagggcaaacactgggatatcccaggcacagcatagacgcatactgtccatccaacgagcaatccacaggcaaatgaggccggcattgtccaaatcgatgcccgtgatggactcctcacgccatggcgaccacccgcgactaggtcgtgtacaccgaacgtccgtgggggcatggaaccatggcggctacaccattttctctctctcccatggcatgactctagttttctcccaaaactccaagctcttgacgtccgagctttcttggtgacttgagacgcagcttcagggcggtgtccctac

SEQ ID NO: 18563 - DNA, 1381 bp, Zea Mays
ccagcttggagatgcgccggggacggaaaactgagtatcttgaaatcccccttaaggacagcatcaagggatggcgcctggaatggtttatagttgataacaatggaaattccctccccccggtcaggaagacagccagatgttcgcactccgagctggaccgagtctcctacagacgaagaggtggctgaggccagtgtgctgctagctgaagttgggctattgaaagagaggggtttaactgctgaggctatagttgctgactttgtgttcaagaacattcagccactgaaagacagggtctacccagcttatctgtatcaagggctagccgacccgactcgagttaccaatagaagaatcccttctgttgacttggtgagccgactggagatgattcttagaggcaaagtatccaatgttggtgctccagtggcgtattcagcctggaatctgcctcctgccaaggccttcactcgtttcgtgtcaaacccaccttcaactgatggcaatttgggccttagaacgcggccctctgatgaggaggttagtgctttggttgcttcacttgggaaaatccctgatgatgagagacaaacccatttcgaggtacctttggatcctactgatgctgaaataaacgccgtgcttgacatgttggctgaagattcttctgacgctattcctgctgagacattggcagtggcacctctcccagaggtcggtataatcttggatgctcagagacctgtccgtgctcgctcgaggcgtccccgccgaaccattcagactgatctttctgttgatgagccgaaaaagaagaagagacgtattcggcgagtatctagtttggatcagggtgctggtccttcggttcccaatgatgaggaggttcctgcgcctgaacttgctgatgctgatcccaatgggtgtggtatgactgctgctgatcccaatgggtgtggtatgactgctgctgatcccaatgggtgtggtccatctgttgctgatcccaatgggtgtgttgccagtgttgctgatgaagacgacgaagaggaagaagatgaggttcctctgattcggaagaatagtcggcaattcctcgccagtggggaaagtagtggggttccttctccggctttgtctgctcttgttggtctgcagaacatatccctggccgactttgatcagactctcgaggacatggtcccagaggatttgttatcggggccagtggatgatgatgcagcggaagcttgtggtgctgtgccggatgctgggttgaggtcgtcccgcgcctcgtcaaccttagagcgtggtttcgagggtcggggtgctgacttggactgtcctgatttcatggaagtaaccgagggtccgt

SEQ ID NO: 18564 - DNA, 297 bp, Zea Mays
gtgtggtgtagtgtggtgcggtcagtgggtgtggccaagagatggatgcagataaacagttcctggtggttggagggctgctgctgctaccgccaccacctttaatggacgcaggctcgacgggccgggcaaggtagtatatggcaacgagagggaggaaggaagcatgcaacgcaaaatgagcactctgattgagcagagcaggagctgtgagcagtcgtatcacgtctcgaggacacggttagttagagcatagctgtcaaatcttcaaccttttgtcatattattatagtatct

SEQ ID NO: 18565 - DNA, 988 bp, Zea Mays
ctcccccacatcaaagttcattctgcagtgatttctcataatcatggcaagtgttaccaccattaatggccttcaatctccttcaaaccggctatatttctcccttccctctccagctataaaagttgaggtgcgctcacctccttctcctcgcccctgctcttttctccccgtcgcaatctttctctccctctcgctcctccatgcacgcgtgtgctccaccgttccctgctgctcaaccccgtcccaccgtgccatcctctgtgttcggcatgccgctactcgtctgatttctccttacttgcccgtccgcactccatggtttcgcagctgagcctcgacgccgtttctccgatctccttgcttgttgtgccacgtgcgtgcctgctctgctctactcagctcagtgctgccgtcaacgccgttctgcgctgctgctcaccgttgtctaatgttccccctgcgcagcctctaatcacgccatcgctcgtgtcactgctccattgctatcatacagtgcgccagcccctcctgtaactgcttcgccatcgttcttcgtctcatcagaacacgccatgcctcatcatcaaagcctcgctttgagtgcctcaccgacgtcaccttcagacccccttcgaagttcgccagcatgatgtcgcgggagctctctagacgccaccattcattggagttcgcctcggcatccttctccagtgacgtcgttacctcgctactcgtggccgcaccatcgcaccagtagctacgccatcatcgcgccacgtcaagcaccgtcataaaagcgtcgtcgtgcccccgtagatcccgtgttctgctctcttcgtgtgccatccgaaggtagaagaaaggtccgatttttatacgctaccccctatcttgtacgtttaatttagatctaaccactgctataattttccccattgtaaaatacgaatgtcaggctcaaataaatgaaatattaatttgttaa

SEQ ID NO: 18566 - DNA, 685 bp, Zea Mays
cggtgatatgtcaggtggctagcatcggtttgggtagggattgttctgggattcgactcatgctggttcttaggcctctaatctaaccggtgttcaagctcccaccacgatcgctaggcctaaccacgtgtaggatgttctagctgtgtggtgaaactttaaatgtagtgggtcagacccgcttgacgtggacggagcggggtttcaagggccatctcccccctatgccaccaaggcatggattcgatacgagcccaggaagagtgattggttccttacaaccgatacgactcagggagttgaacacggtttgaactgtcgtttgcgcatgtttgtgtatgtagggaacctattcggagcacgtcaataccttcttgattgggtataagtcagatgacacactagacgaaccttgaagcctagtcgtacgccaggatctaggtcattgaccatgggattggggcccaccaatagtcttgggagcctcccagctcctcgtgtcgcctgccatatctcgccagtgggttttgggtggcaacacattctagcacgcctagtgggaccatctatgttaacatatgcgacattggctgcctagatagcaaacactcagacgaacatgtctggactagtgcaagaccggcccatcacgtatgaagagctgcctccagaacaccgagcaaag

SEQ ID NO: 18567 - DNA, 1104 bp, Zea Mays
ggaatgataagcatatcttgtatgtgaaaatattataaaccttgaccgagaattattcaaattctgtacaagttaaggacagaacctgcatcaatagatttgtatgcaaggcgcctctgaggtgatactgttttttgctcacatgactattataagagaaattaagggtcaaaatgtattttgtgttaatttccccttatcaaaatacgcttatcgttttgggacggagggactatttaaagcccattccatgaagtcatgaacagtcatttcttcctagtctcctctgttactatatttccctaatgcaccttgcagctaagccataaatcattgccatttcttctcaaattgatagtctcctgtccatttgactctccccatcaaattgcacacatatccagatatccttaatcaccttgctgatagcttgattcagttaccgctgcaaccagattggcaaaggtgaaccttgaagcatgtactacgacacattgttgaatctggatgcaccatttctgctcgtttcattcacaacctgaccagttgctgatgctggctcagaggagatgagatgtgtagatgagagaagttgtctgtatacctccaaaggttagtggcgggcagtggccagccatgatggtcaacatgttggattctcccagccaactgaaatggcttagtaagcatgtgagccaattaagatggtgtgttatgagcaaaaccaagtggtactgtgtatgtgtgtgtgtgtgtgggggggggggctgtttgtactggaattttttttattctggaatacatactttcttggatattatgccgtctttggtagtttgaagacatagttcttaaggcggtaagacgagacaaggagttgggccatcgcctggatgcctaggcgacgcctaggcgcttactaaggcgagcaagatgacgccttaccaattaaagaaaagacagaacaacaacatatatgaggaagaaaaagaaaaagggagaaagaaaaaaagaaggaaggggtagaagagatggcccagcccaccaggcaggcagcccatatatcctccggttagggttgctcccatctcactgtcgccgctc

SEQ ID NO: 18568 - DNA, 646 bp, Zea Mays
aaatgaatgaatgatctgtgttgattaatgcaaacgttgtactcctgtttgtgccagaaaggcaggcaggcaccaacacccccacctgaaaaaagcacatgtcaaccaggtagccatccaggcatccacccacccaaaaagaagaactgaagaagtagccaccatagtccataggattctttcatgatatcttgttggtacatgagcatagattccggcgatagagcaggcgggcggggcagcaaagggagcgagcagagagagagagagagagagagatgaaaagactgaatagactacggtggcggccgtgctgtgtttttattccatccaaacatatcggctgtgtgtgtagcgttcctgcagctggaaatcatccaggctctgttctgtgggggctgtgccactgggcactggccatgccaggaaggagggatcgctgcagtgtgcagttctgctctcccattctgcagacagaaggtgccaagcagaggcagaggctagctatacgtttggcaccagaactgatcagaccacctccgaaattcagcatggtactggagtactggactatacgctacgtccttgctagcttatggtgtagtggtattatgttcctgcgacttgcagacccaagggtggctac

SEQ ID NO: 18569 - DNA, 688 bp, Zea Mays
atcttctcataccccggagtggtgacaccttcaaatagacataatctccctccttaaactctagcagtcttctccgggtgtcagcatagcttttctgcctggattgtgcagttctcaaattctcccttatttgctggacttgttcctctgcttcctgtataatctcatgtccaaacaactgcctttcaccagtttgatcccaatataatggagtcctgcactttctgccatacaaagcctcgaacggtgacatcttcaaactggcctgatagctattatatgagaactcagcataaggtagctcttgtcccaactactaccatgctgaagggcacaagcactcaacatgtcctccaatacttgattagtcctttaagtctatccatcagtctgaggatggtaggccaaactaaaattcaacttcgcatccatattctcatgaaaacttttccaaaatctgggggtaaactgtgatcctctatccaaaatgatcttcttcggtacaccgtgtagagacacaatccgagccatatataactctgccaattgagataccttataagtagtcttgaccggaatgaaatgagccactttggtcagtctatccataataacccatataatcatatcctttcgagatgcgaggcaatccagtaatgaaatccgtatcaatctcttcccacttcca

SEQ ID NO: 18570 - DNA, 559 bp, Zea Mays
agaaattctccggctatagtgactaattgaaggtgggactgggtgctttggcttcgtgataacatggcgcaacagacctggccatcaatttataggattgctaagtggtggctagtgaatttggattgaacgcggtggcggttagagaagaaacgagtcacgggcatggtgattcgtggccttcaccgtggcagcctccccggtgaccatcggacgtgcataacactggtgattgcgacatggtaattgctgaggtacgtggcgttcggtcgacgggcagccaactccgatgacttattcggaccggccgcaaagcagaaaggagcacgtcggctagctggattagtacccatagcccaacagcggtgacgatctttttacctcgcggcgttatccgggcttaagtgggcacgaatcacctcatcggtgcaaatctacgcgcgaggtcaccggcggcgagggggatctgcttctgttgatattttggtactgtacccttggaagctttttcagttagcctgacagccgaggtttagggcaggttttctccaaattttcc

SEQ ID NO: 18571 - DNA, 372 bp, Zea Mays
gaaatgacgaggcccctcttgctgaaactgggacagcgcatcatcagcaaccttgtgtgattggttggaacagtttgatggaaaaagcagaggaggacttgaagtacatagtgtctatctttgtggttagtgatgtgactgtgtcagatgctgacatcgcatatgcggttgctcaaaaacttgaagtcaattctaattcgctaattctgaggaaactggctcatgcacatttcctgctcatgcttcccaccctgcagtttgctgaccagttgacactgagatggaacactatttgtgcaggcgctttttccctacattgtaaaagttggtccatgttctttgggtcttcgagtgcaagtttgcctatccctg

SEQ ID NO: 18572 - DNA, 688 bp, Zea Mays
gtggtatgtatggtggaaaggatggaagaggtgacgacgagtggggcatgtggatttggtggattggtaatgtgttggatgatggtgggctatagctggtggtggcctggtggaggtcgatggtgcctgtgtctctggaatgccaccataacctgggagaccgtaaggaaaccctggatggttgctggcggcggacactatgggagttgtgtgcccatcaatttctgtcacatgcagcgccagattggacaccttggtggcgagatgtgcaagggccttcatcatggtgtccatcttctgctctagggctgcgctgatggtgtttggcgccgcagcagatgcgacttcgctggcagtgttgtcgtcgttgcctggcatctccgataccagattggtatgccctcttctccttaggttgtagctgtgtgtggtaggtggccgctccttgagcagttggcgatgagaggaggtcgtggttctcacggcctgggagaagacagcaggggaggagaaactagggcagggcggcggctgatcaacaatatgttgatcacaacctattttcattttattgcaattaaggtataaataacctccttttacagattaacctaaaaggcctttagcctctttattctactgctaaaagggccttgctaatagcccacttagcctaagccggttcagc

SEQ ID NO: 18573 - DNA, 431 bp, Zea Mays
ttgctctcgagccaactccaccggccgccccagtcgagcctgcttcaactactatggctgacggacccgaccccactccttccaccacttggggtcagctcgagctagctcctgctgagactggaggagtggaagctgttgttgagggggaggccacttcctcaagggaggctccacaacatatttagcactatcacccacctcagcagatgatcggagagcttcacgagcgagtcactcgctctaggtcacaacacatttctcattttgctcactcagcttttgttgctacttttgagccctgagatgttggacatgctttatctgatcctaactaggttaatgctatgcatgaggagcttgaaaattttgaaagaaatcaggtttgggttttggtgccacctccttctaactgccatcccatcggtaca

SEQ ID NO: 18574 - DNA, 923 bp, Zea Mays
gagaaagagaccggtggacaaactaatcaaagctttgaccatgtccttccaatttcagttgcagccaagtgtcaaagcgagacaatcttctgcaccagcagccaggacgaccggataggttgggggagcgctggatgccaaactggctgaacaagctactgatctgtatagtgacccaatatcactggacaaagagactgttgttagttgttcaaagcatggcacttcgaaggtaaatgcactaaaggttccagatcatgagattgggagtacttcactcgatgggtcaatgctgcctcgaggaactgtagacatgtgcctaaggaagtccatcaaccggtctagtgaaagttactgcatagatttcaaagattgtttagatggaaatgattgtagagacagccaacaagaaaccacgcatgacaatgttttaaggaagaagcaagaatgttccctgttgccagagactaaagatgagttgaacgggaaagctagaaaggaggattgtgaaccccaagcccatagggttgagatcgaatcaaatcaacggataacaacagaggattgtgcctctgatacaatactttctggctctgctaaacaagatgaccggatccgatgttcttcgataccagacttaaattgcttgcctagtatgagcaacgatgaggattttatggcaccacctgaggaaccggtttgccaggtaagtgtagacagtttcaaacctcagagcatttctaagagtctttcagcttcattaactggacacactccaaagagagaactgttcaagcaagtagaggggaaacagtgcgatcgagctgaggaaaccaaccaaatcgccagggaagtttgcaaagatggtacctctgaagcagcaactcagttgcagatctcggaatcaaatactggtcctccgc

SEQ ID NO: 18575 - DNA, 477 bp, Zea Mays
agctctcaccgacgagcagcacgcccagagccccgttgcccaaatcttaaaattgattggtgcaaggcgtagaggagaagctagcggagttatctggggtcactcaccggccgtgcagacattcgagcagctcggccacggtagggagtggaccatggtggaggagtaggtccggtgagcgattccaggggcccggctaaccaatcgtgcccggtgaggccttgaacgtcttccggggaactgagtgaagctccacgagtatttttcgaggcccggacggcggtgttctggtgggagcaaagcggcagcgacactccctcccttccttgccgacgacagactatggggtttaggcagcagatgtgggcgcatgtggatgagaagaggggtcacgatggttggacttttatagcccgaggagcagaggtccgacatgcatattccctgcgattcccggtggcgggtttgttaggtccg

SEQ ID NO: 18576 - DNA, 851 bp, Zea Mays
ggcaagttgtgcactgaacattgttcagttagctggtacagaatcagtgttttcgtctcgttttggagcacaataactcttaatccgtgagccttaggccttggattgctgcagaaaatttgtagatctatattttgggaataagtttagttaacttaggttggtcttttattgcttggaatagtgaggtttgaaggggtagaaatgagagttcagacggtttgttttgagttcagttcaaatggttgcagcttggttcagttttggggagcagaaaaatccccacgtctctgctatgctccacttgtagcagtttggattgagaccatggataggagtaggattcgatgcttccagtgcctaagtaatttatgcttggtgtttatccattgccggtgcccatcctgtctacctgtctctggtttgtgtgtgacttaggttcactgctctaccgtggattcgatcgggcatggtgcttgtgccgtgaagccgcgtgtgcaggtttaagcagctgctggcaccatcgaggtccttccctgctgtgatcaggacaacttcagccaacgcctatttctgtaactcgtggccatggttctctaggtgtgtagcgctcctccttcacgcgctcaggcgcgtcctccacgttcggcgtcttactgcccctcgtgcgcgctcggccttacctcccctgaccacattgctctctctagctctcgcgtgtcatcttccctagcggctggtcgtgcctctatcctactccgacgttcaccagcgcgcatgctttgcacctgctcgccggtcatccctgccccagcgcctacttcatccatggccggctctttgcgtcggcc

SEQ ID NO: 18577 - DNA, 377 bp, Zea Mays
acaaaacaaaaaaacaacagtgactgggggtcacagaggcagacaacacatcctgcctgcgcaccagctagttctcggaggatcatttgggatgggagagcattaggccaacatgtttgttggggatcctccgatcatacattagcctaagcactaattagtgcccagacgagaggttgctgttagagagttgggaggcagtgacaggccacttctccatgttgcttgtggaggaaaaagggcagagcagagcaggtctggtctagccatcagacgggggaggggactaggggactggcgtccgagaatgagatccagtgggttgcttcgcttcttgttctcagctcaggtccacccatgttacggacatctcttgt

SEQ ID NO: 18578 - DNA, 557 bp, Zea Mays
ggttaccggcgactgtaaagttctagtgggatggtcagcgacgtcggggaggtcacgagggtcatgtcgatggtcggctcgtcgtctgtgatggccagagctgttctggcctcatgcgcaggcgggcgagctcgtcagcgtcgagaagttcggcctatacacagaggtagagttcgatccagtgagtcggggagcttcgcagaagttcggtgttgtcgtgggtgcaaggaatttgggaatggctcaccttgtagttcggtccacatgctgcggcgggtggccaaagtccggtgaggtcgatctcactgttccggtggggcagggccttggctcaagcttgggaaggcttcacggcctctctgggaagctatccaaggactcgggcgaggttgggggtctacgagaatggctggccacggcggccgtgctcgggcggtggtggcgggcggtggtgcttgctctttgcggcgaactccggtgatctcaggctcgggcgggagtgagggcgtgcgagagagtacggtcgaggccttgtgggctattataggcgtggccgc

SEQ ID NO: 18579 - DNA, 571 bp, Zea Mays
caggagtggtaaccttttcaagcaaaactcgctctgtggccctattttatgttgccctttcttcaatttccgaaggccttttctcagcaggctctgaaggcccagcttcggtatcagcttggattactgcggcttcaatttcagccagctttgtttcagcttcggttggcacttttgaagcctcgacaactttccttgaaggagtagagctcaaagtctttactgattctaacacatctagtacatttgccatccttctcctcttgggagttgtggcagaacttttttgtgccctcagcactgttacttctgatgaagggcctagaattcctagcgcttttgtttcttcaatgcttggcttttcagctttatctttatcagtcttcaactaagccagctcggctgaggatatcttcggcatttcaaccggctcttcagttttctgtgggggaggaacaggttctcttggttcagcagctgaagaagcctccccaacaaattcaggcaccacggctggctcaatatagcgtggccggtgggtaagtaccttcatctttttgcttgtagcctt

SEQ ID NO: 18580 - DNA, 649 bp, Zea Mays
aacttatctgatacgggagcatcggtagcagccagccccagcccctaggtcctcctactcccggcttcccgggcgagaaatttatttgtccatttgtccatagctagctggagccttgattagtcttggtctgactagctaagggagtgtgctacgccaatacacgccatcctctctccgacgacacattagatgaaggcgggtatatataattagacatcgtaatctgcatgcagagcaggcaacctcagcccatggctcttatatattaaaccataccacgtatacgttgttttctagtgatttgttcacactcgacaaagtcagatgatgtcgagatgaaacgacactaatgttctggcattagagtaccaaacaagcaatacaaactaaactcgatccagagcgtctcctcctcccctctctctcggttgtttagccacacatcactggctgcagcgcaagacggtaatgcttatcttagccaactaatgacgtgcccccactcatccactcatgctacatgcaagccgccgaagccgatcctcgtggctccctccactcacgctacatgcaagcatcgaagccgacttacccaacaactgctatcggccactatgcactaaggaacgctatgcctaatgacgtg

SEQ ID NO: 18581 - DNA, 1198 bp, Zea Mays
tactaaccgaaaacaggttctctcactatttaacagagtcactgaccgtttacaaaaagacccccgcacttctatctattctcggttggaagtccacgacgacggtgaacgaggccgcgctccggtgagcaactgtaccggccgaacggggccatgaccggcgctcccgagcgacggacaccaaatcggacctaccccgagcatttcccctaacttaattgtgcaaatggtgatctattctcttctgttcacgagaacagcggagactacggacatttgatcgtgttcccgacgattaacgaggttctagcctaattggatgggtcagcgatcatccagagcaagtgagaatgccgaaacaagaacgcagatggcgagaagggacctgatttgggctggccacgacgaggtgttcttcgcggtggcagagacttgatttgggggaagtttgaaattccaaagctcgggtgaacgattacgagtgggagtgggtgctaaggcttcacgatgacatagcgcagctgccccggccatcaatttatagagggcatcgacggtggccgagaatttgaagaaggatgcgcggcggtcggagataagaaaggaccctggcgccgtgggttcgtgtcctcagtcgtggcgagctcaccggcgatgatttaacgactgtaaagagtcacggtgacgcgacagaggtgctcggatacgtggcgtaaggccgagcgacggcgatccccggcgggcttatctgctcaagccgcacggcagaggggaagtactgggggggtcaccggagtgctgtccagcgcatggctttaccgagcggtcttatctggtcaccggcgacgtgaatcgcaacggcggcggtgtgaatcttgacgcggaggagtcgccggcggtgaggatccaacgctggcagtctgatccttatcggactactgtaccatcgaagtaggattcagttggcctgacagtcaatgtttaggcttgatttgctcacaaatccctatggtaacatactctatgctctatagaaatgttggagagctatataccacctatatttcgactatagtgactgaactcatttgatcacaagatcaaggttgaattcacactcaaagctggctctgttccactgaatatctgaatttcagaatggaaccagcctgacagccaagctttaggcttaattatc

SEQ ID NO: 18582 - DNA, 443 bp, Zea Mays
cgctctctataaattgatgccctagtgagcttcgctaggttattacgtgctcaatgcaccagttctcacctccgatcatccaccaccgtgccccaatttgagatttcccccaaatcagttctccgcgccgccgtgagccacagcgtcgtggaccaccgtctctaggtccgctcttgctctccttaccctcgtttcagcacccttgtatgctagggatgcttgttgtcccaaccaactaaactagatcacactagatcgctgggaacacctcgggttgtcctcggtttctgtcgtcttcgtggacagagggatttcgggccagaatcgtgcaattgatggagagattagggtcgccaggggtaggaataggtgtcaaccgagttagggcatcagtcgttgcacatcccgggcggtacaagctggccagagggcacgctcaccac

SEQ ID NO: 18583 - DNA, 803 bp, Zea Mays
ctctagccggtacgccggatttaaccagagtcgttgcttggttggatttaaccagagccgttgcttggctgatctatggtccacgcccatcctggcctaacccacgcaccttgatttaatctataccatcgacttcataatctacaaccctaccatcgtcttcaacctcacgccctctccttacggtggcgcgcccagtctacggcggcggcgcccacccaaggagcctccagccggccccaagctatcgtgacccctctaccagagcaaccctacgctatggaacataaaatgaatggagcacacgggtactcacccacggtgaagctgcgacgcacctgaccatgaaaaggaacgacacctcccgatggcgagaaattcacagcaccccggtccatgattcaccccacgtcgagacgcaaaaccttcgaagtgtttcgacggatcccccgacacctcctatcgacaagctcgagcagggaatgcagcagcttggccacggcacggcaatggtacttggtggcgcaagttctcccgagcgacaatggccgagatggtagaaaggaagggaaggaagggatgagccccgattctcgacttgctttatggcgagggtaatagagacgccacaacaatcccactataatggcatggccggccctccgaacacggcggtcagcacggggaaggaagacgtgcaacggtaatgtgggtccatgaaaccagcgactagagaaatcaggcagcgcatactagtggatgactaggtggccccacgtgacaacgattccagcgagcacgac

SEQ ID NO: 18584 - DNA, 521 bp, Zea Mays
tagtgtagagatgtcgtactattaagaatcgatgggtttgttagtcattcttggtcctccaatgctcaaactccacatatcacctccgacactgccagacttttctcaacactaccggatttttaaatatatgttgggggtgtgaagcttcgaattgtttattccttgtgtcctcaacagtcacctgttgtgtatcctgatacagggatatgtcaaaaaatgctacttatacctccttgtctcttttgaaagctccctccctcacttactccatccttgctcaaaattcctgggtgctttcccactcaaactgagaagaacacctagaacagcaagaaccctaagacttcttctgttcaaatttgagcattagagtttctcaaggtcggcattcaactcttgatttttggagcttgttcctagccggcgtgttacatcttccgcgagctgcaagggttaccctctcatactaagagtgaaagctcttggtttgagatcgaggaagggtgtgtgactctttg

SEQ ID NO: 18585 - DNA, 455 bp, Zea Mays
gtttggatcccaagtgggggtgaaaataaaatataaagcataatcatgggttcagaggaccgatcgcaagcacggtcgtgatccgatggaacacacgcgctctgggggcctgggggctggggcgacacgggcagtgcgaaagctgctggtcatcgcaggagacggcgatgcatctgcatacagtaagtacggcggggaaaccagtgcagctacagctcagtcgtgtccagtccaagtccagccacacatgtcgtgtccgaccatctgcgtcccagcatctgtgtatgtcgtttcaaaagcttgctgccactgcgcgacatcaatacatcgtcacgtcacacgcacacagttttagcttttgatttttcccccatccgtgacgctagctagttggctagttcactcgtagcatctctgctatttgcgccaatagttcctaatttattactcctccg

SEQ ID NO: 18586 - DNA, 480 bp, Zea Mays
tagcagaatatgaaagtggagcactgacattcaaaaccttgcctctcagcatcgaatcaacccgactcaacatgtcctcctcagatattcgcttattggtaattcaagtggggtcatcaacaccggtgtacaagcagggtagactctatccttcaaaggctgaatattcttgaaaacaaagtcgacaacaacaacttcagcagtcaagcctctatccttcaatacacatatctctgcaagcaacatcctggactcagcaagctctgaatctgtggggatctctatccagctaggcgttggaacgtcgggctatctccctgatcgagtaggaagagacttgttatgattttccatagtaaaccactcgaagtgccatcccttaatgctgtctttcaaaggaatgtcgagatactcagccttcctgcctcggcgaagttccaagctagcacctccaacaagctgatgttgccctccagccat

SEQ ID NO: 18587 - DNA, 401 bp, Zea Mays
ataaaatctggcaaggccaagactggagtggttaccatcgcctgtttaagacgctcaaaagccacaactgcctcttctgtccaccaaaacatcccttttttcagcagtcgagttaatggccgaactatacccccataaccttgcacaaaccttcggtaataaccagttaagcctaaaaaccccctcagctgaataatagttgtgggtcgaggccaatttaccatagcagttgtcttctgaggacctgttgccacctcgttagatgaaataatatgacccagatatgtcagttctgtgcgaccaaaaacacacttcttgtgcttgagaaagaaccgatgactacgtaaagcagcaaacaccagtcgtaaatgctccaaatgcgactgccaactgggactgta

SEQ ID NO: 18588 - DNA, 646 bp, Zea Mays
accagggggaggagacgacgaggaccctcctcgcccccattatgcaggtcaaggggaagaccgtgtacctagagcagcaggaaggtcgcaagaagcggcgtttggataaagcagcccgagcaactcttgtcgtggcaacagcagcagcagagtaggcagagagaggtggtcagctatagatatcatcagatcagattgcctaccgggtctgtcatctcgcgtctcgacctcgctcctccgctccctctacacctgccgtagctaccactccacctcccacttcgccagctccagtcacccctgagccatccaccacttcagccatacctaccacctccaccactcccgcttccattgttcctcctcccactcccatctctgcaccacccattccacatgcccacttccgggagtgtgacgagaccgaggtgcgaccactggctgtcgatcctcgtctgatcgatctacagcgtgctactgcgacccgggtacatcggttcaaacacgtacccgtggagtctcggctacctgctcagagggaccctgcagtggcagatttattcagcgcgagaattcatgagtcgttctttcgagctcacatgtcagcctagatagctttgtgtgcacactggctattggatctccc

SEQ ID NO: 18589 - DNA, 358 bp, Zea Mays
gggcagtaagattagtgttcggtggggagattagcagtgactcacttcgaatggtggatcgcagtgactcgagtggtggatttgagacagttgttatactggttcagggcttgcgccctagtctagtgtagtgctgatcgtagtattgctctgagcgtgttacagttggtgtgctcgtgtgttcaaaaaagaggggtccttcccttttatacttcaagggatggactatacaatggggactttgtattctgctggggggtgctcgaccgacggcccttggggtagcatggttcctctaatgttgtccatagggtcgtgcttagtcgtactcccattatggcgtactgcctcgtccgcc

SEQ ID NO: 18590 - DNA, 401 bp, Zea Mays
gcctcctgaccctcaagaccgtgctctaaggtcgatgaggcgcgagacgctgcccgggatgaccccaaaccgacatcgggcacatcagcacaaacatccatcgcgccaccatctgccggctctgacaacagatcttctggaaccatgtcttcaagagtttgatcaaagtttgccagagataattcttgcagaccaatgagggcagacaaggcaggagaaggaacaccactacttcccccactagctatgtaacgccggctgttcttccaaatcagagggatttcatcctcttcttcatcatcttcatcaacaacacggacagtacacccattggggtcaacttcagcaggattacacccattggggtcagcagcagtcgggtcacactcattggggtcagc

SEQ ID NO: 18591 - DNA, 387 bp, Zea Mays
cgggggtagaatactccggttttgtttcattctactttcggccagaatcacttccatggtgtcagctaaaaatatcagaatacttcccgtaaatgtggctacatttgtagatccaagcagccaggttggaaagaaaaccaccaatcatgcctgtgtagacgagtttccctccacacgttattgcctgccttatgtctgtagtgtgaatgccatatttacctccgtaattttagccgaggtggatcccttcctatattttctctgctttgtttccttgaatgtgtggttctctttcctttccaactttccccattgatggaaggtggaaatcggctatatgtcctcaccggctataaatgtagccacacccctcggtttctatctgct

SEQ ID NO: 18592 - DNA, 871 bp, Zea Mays
attagattgagtctcgcccgaatcggtatacgatctgggtcacccattaggcaatccacggtttagatttccccgcccgaagggttatgagcgacgcgatcacgacggctgaataccgatcgaaggccaagatacaaggccgcaagggataagcttaaaggtctagcctcatccaccgatgcgaaatccaacagccatcgattcttcttcaacctcttgtccgtcgaacacgctagcgagggagacccccccaagtacgtagccgccattaccagagcacaagctcggtacttcaggtgctcccacagccaaaccaaatacaactagctacgtgaaggaaacagggaagcaatcaagagttcttacctaagtttcagagctcgcacaatcacaagatactcggccgcagagaggatcctgcatccgaactggtcctttgtgacccccattgtgctggtggcccccatccccatcgtacttctccgtgtcggccaccccgaccacgaggcgttctagcatcgcgtcgcagaaccggcgcagcgatgcagcatcctcttctctctcccctctccattttctttgctcggcaccacgctccctgcataacgcctgatggttcggtgcatagatcacgacgagggcgaggcggggcaccattttacacccaaccatggatggagtccaagcgcggattgtgggattggccccaaagtcccagcggcgaactcgctacatctattacgaagtagaggggagtcttgacaaatgggttccacacgtaggcgacccagataggtgcgtgcgcctagaggagaaggtgacggcagggaccccctggtaagcacgcgggaggtggttcatgggccgcaag

SEQ ID NO: 18593 - DNA, 502 bp, Zea Mays
gcactgcaccatggccctgtgtcgccccggcctatgctgtgcccctagctcgtgtcgtggccttgcactgcaccatagccctgcgttgccccggcctatgctgcccctgcctcgctttgatgatcgctttgatgatcgcgacatccttcctcacactcgtgccgaccaactcctctgccccatcgactgtggttcccctctccacgcctgcgccaccccttgcttcacccagcagaccacgacaccattccccccgcctttatcggcccctacttcgcatagtcggccaccacactcttctccatgctagtgctgactacctgctccgtccagactgttgtgccgaccttccaccttccttgctccgcgcactgcgctaggcctcacaaatcctgggcgccctctgcttccgcacctgtgacccctggtctctccttgcccatgaccgactgggcatcctgcccctaggctgcgcacgcttgggccatcatggcagcggcgg

SEQ ID NO: 18594 - DNA, 871 bp, Zea Mays
tcccatcaaaacccagccacttggacttaaaaatctactgtgtctgaggctgatgtacccatgatgatgaagctgggttacttcgaagaagctgagaagaaacttattcattttgccggagaagaaaccactcgagagcccaaaaatgatgaggtagtagttttcaagagctttttcagagcaggactgtggtttcccttgaatgagatgattagagaggttttggataattatgatatctatcttcatcagttgacccctaacgctatcgttaggctcagcgtttatatttgggcccttcggagccaggggatggacccaaatgccgaagcattttgctgagtgcacgagttgcactatcagacgaaggccaaagctgacgggctgcatgagaattttggctgctacaactttgcatatcacaaacatatgaaaggtctggttctgagttatcgtatgaaatggccaactggttggaagaatgaatggttctatttcaaggccgacgagaagaagagggagaagctgatgcaaatagtgatgagtccgctgactttaagcttcggactgactaggcccttgtgccgcatgacgtcggggtcaccatgctaacaagctgtggcagaattcagggtggtggctcaacagatcagcactagagatcttgttcaagaatacctggcaaacagggtatctccaacattgagtgaatggagtatgccgaagctgaaaggaacgaagaaggaaaatgaactcgtctgattaccttatcgcttcaagtttgagaaacagtttaaaaagccctgccaagaatggctggagatgattgagactatatgcaatgaaattttgggtaattataccaagaaag

SEQ ID NO: 18595 - DNA, 742 bp, Zea Mays
gcgcgcgatctctgggacgccattaaaggcggtcctgtccagttccgcgatgacagacgcgcactggaggtgatcgtcggggctgtacccaaggagatgggtctcccactgctcgacaaggctacgacgaaggaggcgtgggacgccatcgctgcgacccgcatcggcgtggacagggtccgtcgagcaacgctgcagcgcctacgccgtgattgggagaacatcagcgtcaatcctggtgagcaagtggatgactttgctgtgcggttgtcaactctgcaccagcagcttgtcatccatggtgatagggacatcactgaggagcgtgtggtggagaaattcctgcgcacggtgccgaccaagtactcgcagatcgtcgtcgccattgagcagttccttgattttgaggcactgactcttgaggaggtgactggaaggcttaaggcggtggacaatcgcgaagaacaagtactgaccgagccgatggccatcaatggcaagctgttgtacactgaggagcagtggaaagcgcgatgcagaaaggagaagaagggagacgatgcaggtggctctggttccaggaaccagcgcggtggcggtggacgcagccgcggtggtggacgaggacgaggcagaggaggtggacgtggtggcggacgaggagacgacaatgttgctggccgtgtcggccccaacacctgcctcaactgcaaccaggaaggccactgggcacgtgagtgtc

SEQ ID NO: 18596 - DNA, 488 bp, Zea Mays
cagatcgccagctcagtgcccttgccgccgacgagccatgcgcggattcgtgctaacgtcgcggtgattcgcgctcggatcaattcgagagcgccgggggtaagaaatatcgcccggggatgaactccagccgctattttactccgaccgccgtacccgagcgtgtcgcggccgccttggataggttcgccagagatagaatcttcgcgaccgtgcgccacatgcccgagcatcttaccacgtcacagttagtcgtgttaagcgtatccggtgatcgccggagagcttgccacggtaattaacacgaatcaactgtgccagtgacctcctatttctctgaccgccgcgcgtcttcatccaattccccgaccaccgctcatgcctgctataaattgagcatgccgtgagctccgtaggataattacgcatccaaagcaccagcaattgcctccaatcgttcactagagaacatgaattgctcatttccc

SEQ ID NO: 18597 - DNA, 776 bp, Zea Mays
acgatccccacatctcctcctccttaccgatgctgtgcacaggcggcggtgttctcagcccacggcggcgccatcaccggaaatcccaacctacacactagagctctaaacttcgatcccaacgacgctacacatagaggggaagtaagcgaactcgtatgagaaatctcaccaggaaccgaggcgtgatgttctctacccacgatgagacgcggctctgcggtggtgacggcactccaacgacgaatcacggtatcttcgtccaccagacatgcacagcaaggggtcaattgcttgagcgtgacctgatgaatcaccaggaccaattccccgaggctgaaagctaatgcaaaggatttccaggtgcgacggctttccctattatcctcctcctcgccatgatggtgctcctaggcgtgatttatttgtgatgccgatgggatgtaggagggtcgtgggaccctatttttatagcctggagaccggggcgcacaaccggttttgaccctgagtttcccggcggccgttgcagcatcccaggtgtatgatttctgttcaggttcagtaaggtgagcgaaggggtcgacaggagtgtcctgcttggcggcgtcggggatctatgtgcgtgtggcaagggagccctagtcgagcgggcctggttgccagacggccagcgtgagtccgtgtgcggacgagatcacacggagagtttcctgggcccgcgtgtcagtgccctctcgttgagtgagctagcgcgggaggtgggtcgatcaacg

SEQ ID NO: 18598 - DNA, 629 bp, Zea Mays
tggtagttgagttgaggccctcttttggtgggttccagatgttggtgtctgatctgaactgatgtggtgcctgccatcgtttctgaccgacccccacggcactcgcgtcgatgaacgcttttctccttcccaggctcccagcccagcccggtctggtctggtcttctgctgtggcctgctctgtccgagctgattgtcagcaaccggctgggtcgtgggtactgagtactgacccccgaatgtttgtcagtcgtcagtcagctcaaaaggcacgttgttattcaaccatcagaaggaatgacagcaagcatgtttcgcccccacaaccgccacaggccccattcttcagaggcgagttgctcagacccagaaaaaaaaagaggaggaggaaagaaacctggaccatctgacatcgtctcgctttgctcaatgttcgtcattcatcattcgtttgccttgccgctcatgaacaactttgccgttcaaaagcgaccacctttctgtctcctcccgattatttggcaccctagtaaaatggtgacgatggacatccgtactccacagcaatagtagtagcacctagcagcccgtctcgtgcatcttgcagatgaagcaaggagttggttacg

SEQ ID NO: 18599 - DNA, 548 bp, Zea Mays
ttcaatcatgaccgcccattcgttatataagggccagagccacactcgtcttccccaaatcacccctgaccacgcagcggcgctccctagccaacggcggagcccaccccggcgtgcagtgccctggcggccctggtgccctcaacttaaccccgacaggttccatacgatgcagtggaacaggcgagttgattggggagtttcttaccgtggattgtcgcgcaggtgatgcagaccacggcgatgtttggttccgcggcggcgcttgtactccggcgaagaattcaaccgcaaccggtcagttccgcgcccgccaacccacaccgtcagcagaggcatccgccaaggaggtttctctggtggtcaatcgaggatcgacgaagcttgtccgtgaatcgaccaaggcggctgcggcggacactcaccctaactctacacggtaacttggtgcttgatgtcgcgcagcgaaggaaagggggaggacgggattcggctccaccatttatattcgccacgagggtcggttgggacgcccgctctgggttcca

SEQ ID NO: 18600 - DNA, 281 bp, Zea Mays
ggagaccatcactaagtctagcgaaggtgatttggtccggctgatgtatacattcaggtttggggataaatttgatgaaccaaacgatgactggctgaagtgcatcgaagctacaagtgatgatttgcttggagcttattccaagacagaagacaatgccttgtccgcagccttcgggggtcagggaaaaaagagaatgaacaaagtttttgacgccattggctttgtctaccccgactaccgctacccgctacagggacaggggaaaaagagaaaggttg

SEQ ID NO: 18601 - DNA, 435 bp, Zea Mays
gtgggggcaaggaagtcctgaggatgatagagacgagacgctgaaaaaggggtcgttgttggatttaattttataccagttggacgatggagttgttcaagcttcatgtcatagtcccaccacgcaaggcaaggaagaaactagaaggggattggtctctgcgtcctaggcgtgggaacgtaccagcaaaatgtaccccgttggaaaattatgtccgtctgccctgccgctcgtgttccttggaagtatctggctgttcttttgttgacggtgcatggtctaccctcatttctaaaatttataaattatagcagctatattatggatatataatcctagtgtgtgtattcttattcggaacatgtaaaacgaaaaggaaatcatgataatcaaaacccctgactgtgttttcaactttttttctctctaattaat

SEQ ID NO: 18602 - DNA, 675 bp, Zea Mays
actgaataccatttcccatggtacagtgtctgcaccggatcagaccgccagcgcggctgtcctcaccgccgacgaccgatcttcaccgtgattcgcgccaccgccgttgtgattcacgtcgacgatgacccgataaggccgccaagtaaaagccatgcacctggggataactccggtgactcaccgtcgtaccccttgtgctccgcggctgtggcagataagttcaccgacgagagccgtcgtccgaccgtgcgccgcgtgtcttaaccgcgccaccgcatcaccgcgaccccctccaactgtctatcgatcaccggagttactgccacgccataggacacgtattcaccgcgccaggcttcttcctcatctccggccgccaccgcgccatcgtcaattcaagcgccaccgctcgctccgcctataaattgagcccccggccagctgcgctaggtcgtaccaaagccatagccaccactcccgtctctgattagcccccatagccagagaatcgctcacttcccccaattcagtttccgccaccgtgaaacgagcctcaccgtcgccagccatactccggtcagttcccgtcttctgctcccttgtttaagcgttctcatgcatctgcgatgctcctcgacccctttaatcgaaccaaactgcctgggattgccg

SEQ ID NO: 18603 - DNA, 492 bp, Zea Mays
gggtagcttgcaaaaactccttctgctacctcacgaaaatggtagcgggaggcagagcagcgacaggcgacacgggagtggctcgtagtgcggaggaaggtgcaccatgtaggaaagaagacgtcaacagcgggggctccaaaatcaggcgatgatgcagtggctacgaggtgacgatgagtggctgtgaggtggcaagcaacagagaagggagagagtgcacggaggaataaagagcgtgggaggtggctcaggtgctaccataggctttataggtcgtaaaagggagggagacgaggtgtcgggtggagatggggaggtgtcgagtgacattaatggtggtggagggaggacatattttggcatgttagtgggtaggggattggaacataggtgacctctatgggggggggataagaagagcaggtgcatgctggctcgaagcagggcgtgtagtcgtggagcggcggtggcgcgcgaggtaggggagag

SEQ ID NO: 18604 - DNA, 440 bp, Zea Mays
cgcacctgcagacctgcttcggagttccctgatctgggtggcttgaattcgtcgttgatgtgtaattctaggacaggaaaggctggacaacagaggggatctaacctctgaagctctgcgcgttctgaagtgccaaagatgtcatcttagagaggggaacaaagtaagcgtggccaggacagatcacatatgcgcgggcgttgcttaccatggcagcttgtaagtcagggaagtgagtccagcgacgatctgaatccgatggaggcgcccaagctgatgtatgacagcggctcgaaaagagtcccgcacacaactatgaggtcctgactcctcactcctgtagaggtgaagtttgtctcccgcgcaccagcgcacgtcccctgtcccggcctcccgcagtgcttcctgttgcaacacatgtcgcacggctccatcacgcc

SEQ ID NO: 18605 - DNA, 1243 bp, Zea Mays
ctggttcgtgcgcataaaaacagaaaactagaggggcctctacgcaaataaacctaagactcagagcacagtagctagggacggcgggttttattatgcaaaagccaagggtttattcgcaaaagagttaagtgaagaggtatcgttggatatggggcgcccgatccgaatcctacgcccatgattaaatcggctcgcgtagtgaaccggtacacattgcgggccgatggatttaaatcctctggtccagattttaatacatcgcgatcgaacaccatcagccgatccaacgatccacggctgagatgagctgggccgaactggtacgcaacatctaatcctaaccgtcaacgcaaagatctacggtccaacccttcccttccccagatctaatctcatccactcaaacctcatcaaacggccataaggccatcttccacctggcaacacccaagcagcggcacccacaaccccgcggcggcaagaagcccaccggtggtcaccgacctccacaccccaagccccaactaccgattcgatcatcgattcgcgcggagaagaacaatgcgaacacctgagggggtacctttttggaagaaacggcaggaacactgttggccacggcagggagcggatgacggtgagggaaggggccccgatgagcgattcggtgagccggtgtgcaaatttgtccaggtgttgccaagacgagcttcagtacgccccgacaacaaaccaggaccacacaacggtctgtaagcaacgatgaagaccccggacggcggtggcggcctgagcacctacactatcaattcacggtgaacccgtagagcgaccaaggcaagtcccgggcggaatttataggggcatagagtccgcggagagatgaattgctgattccgcacggctggcgcggaggttgggccccaggatttgcggacggcgttgagaggatctcgcgtgatttcgttgatacgaagtctggttggggagaacacccgagcggaaccagtccccgcgtgcggaatgaggtcccagatcggagcaggccccaccagcgatgtcctccacgagtgccccgaagaggaggggtcgtttgcgccagctggagccgcgaaccttgcggcggctgttacagcggcgcccgacccacgcggagatggaggaagcggatgaatccgacatccagggcccatatggacgcgaggggagtgagcacgcggtgagaagagacgcggcccac

SEQ ID NO: 18606 - DNA, 813 bp, Zea Mays
aaattcaaaccaaaaagggtatatttgtaaaaatcttttgcaaaagggctaaattgcaaaaaaaagggacattcggtcggctattggaatggtgtcccaagtgcaaaccatgaaagtcaatgcatccaacaaccggaatacaatagagaataatgttttgccataaacagcagtaattttttccaccaagattttcacataaaccaagattctaaacctcaacccctgcatgtccacatgtgcaactcctacaacttcaccaatcatcagacaccccaccatagtgtctccttcgctaagggaataaggtatgtaggggcctagggggacaccagcaaagagaaaactccatccagatggggaacatccctgtacctcaaaatctagaggacgcgtgtgtccactcccgatgctctttgagtccatctgtgtgggcaattgggcatcctctagacatgtgaacagggagcaggtgggcaatgcagtggcgcagtagggaggtggcgcctaggcaggggcagcgaacagcacagatacaggtcaatgctgaggagggccgtcgtcactatgggcaggtgggtgggaggtgcaccaccaggtggaagcagctagggcaggctgagacgcccatagcagatggaggcgggctggtgtgtacgaacaaaggaagggaggaagaagtaaaaggtggctgatatctgcggcccacattgacggcaaccaacgaatccaaaacggtccatccatcctcgcactctccatccctcaaccaagcacagatgggatcatcctaacccagaaaactaggacaga

SEQ ID NO: 18607 - DNA, 275 bp, Zea Mays
ggcatactcagcataagtcagatcatcttgaacactaaggtcctctagtggtagctgctcttcaggtaccctgagacacttcttcaattgtgatacatggaaaacatcatgtgcatccgcaagatgatcaggtagctccaattgatatgcaacctctcccactcgctttaggattaagaagggtccaatgaagcgaggggacaactttcctttgacctcaaatcttcacataccccggagtggtgacaccttcagatagacatgatcaccctcct

SEQ ID NO: 18608 - DNA, 670 bp, Zea Mays
gagaaacaaagagtaaatgacaaagaacaaatcgtgtgcagggatttaggagagttacaagaagatcgcgagccaattagcatttgaaaatgactagaccgagcgaggccacgtgttcgatcgcttgcctgaccggccgagcgcggactggccgcggcagcgcgcgccccactcgtggttgccccgccccgtgtgtctgcaccttaccctcgcctataagtgccccagaggccttagccgtttgcacacgcgcaccaaaagccccgcccgagctagagatcaccggagttcgccgtggaaagcgagcgccaccgcccgccatcactgcccaagcacggccgtcgtgaccaatcttttctaacgacccctagcctcgccctagtccttggacaacttccccgagaggctgtgaagcttctccaagcttgagccgaggcattgcctcaacggagaagcgaaatcaccctcgccggacttcggccgcccgccaccgcgcgtgaaccgagctatctggtgagccatttttcaattcctcgcgtggaccgacctactccgaccatcaccggagacgatccgcacatcggcatgaccgtcaagacctcccttacaccctcgaccacttcaccggagcaatctcgctgccggtaagcccctcctcccttttctccgc

SEQ ID NO: 18609 - DNA, 528 bp, Zea Mays
tggtgatcggcggtggctccgaattccgatcaacggcgatggtagagttaaattccactgcctggggagcttcacgggaggtcggtgatgctctggtgcaaggaattgggtggtgttgtattgggtggctatggccacgttcacaggcaggcaggtgaagtccggcgagtggtggcatgttgatggaggggagtagagggtgaatgggttggcctagaagcttcactgtgactcagggaagctaacggtggacctcacgtggttgaagggtggctacgtcggtcgaaccacagtggccggcgctcgggtaacaagggcgggtggtggcgcgctcagctgcagtgaactcccagcaaagtgggcttggcaacggtcggggaggaagagccgagggcagggcgacctttataggcgcgggtgtgcgcgcaacactgtgttgcccggccatggtgtagggcatgaactcaggcactggttggcgcacatggagcatccaatggcatgctctacggctcaggtctgtagccg

SEQ ID NO: 18610 - DNA, 346 bp, Zea Mays
cccttgaccacctttatttcttgatgatccatgagccatcattttatttcgcacatccttggtgatcttgttattccttgtaacttcctttggtaatgaatttttacttcaactcttctgccggaaccacacttatcttatccttgattgttttctccacttcatcattttgcgtgtcttgccttaactctgtccatggacaatgcttttcatcattatcacctttattctcatcaactctatatcttaccttgatgtttatcttataccgacctttaaaatctcccccttttccatctcaatctgagcgtcgtactttacctacttttcccttggttgtatcctc

SEQ ID NO: 18611 - DNA, 506 bp, Zea Mays
gctttgctgaggtcaaagaggcaatgggcttgtactctatccattttgtgaacttgtcaatggcgacgagtatgtgagtataccccccttgagattttttgaatggctcaatcatgcccagccccagcacgcgaaaggccaggttacaggaatagtttgcaaatgttgggcaggcaagtgttgctgctttgataggaattggcatgcttcgcacttctgaaccaactctactgcatcattctttgttgttggccagtagaacccggacctgaaagcttttcccaccaatgtccttgatgttgcgtgtacgccacattgccccgcatgaatttcatccaggagttgccttcctgtagctaagtgaacacacttcatgaggactcctcttgcacctcttctatacagcagaccccctatgatggtatattgggccgactgtcttgcgatgcgttctatcgtggccttgtcatctggttcttcctcgttttttatgtacttgataattg

SEQ ID NO: 18612 - DNA, 426 bp, Zea Mays
cttggttgccagctcagagggactttgcggctgcgcctctcttcattaccaggactcaggagtccttcttccgggcatatctgacaactcagattgccttgtgagcgcaccggcttttgaatttacctgcttttctgcatgctgtcggtgccgattcagagggacatctcacctatctgccaggactacattctctattgaccatgagtggcaggtatattgaggagtgggtcagagtgttctatgctacagtgtggattgaccctgaccatcagtgactgtgattccatttcgagggagaggatgtcactttgcatgccagttagattcaccggctctttggatttccagagtcgtcgactaggctccacagtctgtgctacggcatctcggatcctcctcgtcgccctcacaacggtgttgcac

SEQ ID NO: 18613 - DNA, 372 bp, Zea Mays
gttgctgctgatggcgccacgaatgaacgtagcaggccggcgccggctgttctgagccaccacaacgtgagacggcctccggcggcggcgattcttggggttcggagtccatgattattgggcggcggcggtcgttcccgagggaggcattgggtgtgtatggtgagaaggcgtcgcgggatggaaacaaaatgatagcgatttgtatatatcatcaactcaaggtgatttcactatttgctacatttttcatatacgtcttgtcagactatcatgtgaagatggttccatatttataagtgtctagtatatccactaacatctatgacggttcttatagtctagacgactctaatagtattcttatttgag

SEQ ID NO: 18614 - DNA, 498 bp, Zea Mays
gcggccgtgggaaggctcgggcgccgccatcgtggattgcgtcgcgggaagaagggacgcgggccatctatcttgggatggagggataggattgcatgtgaataacgcttcggcttggggattctgcaccgtccgattctagatggatgcataggaatagatctcggatgttttaaatcttggtcgtcgattaaggatccgatggccacgggtccataccggttcgtttagattggggctgatctgggccatagggcttaaatccaatggctgaaacttacccataccccttcgccgtcccaacttacaaaagagtccctgggttttattgatataaacccgccgtcctgcgcggaggtggctgagtctcagacacttttgcgctcttgcccctgtagtttatgatatttatgcgcccagtctagagaattagaaaatccagtaaaagtaattagaaaatgatttttaatgagaaaataaatgctagaaacttgaata

SEQ ID NO: 18615 - DNA, 563 bp, Zea Mays
caaaacctcatttcagttcgccagtttacttctgataacaattgttctatcgaatttgaccctcttggcctttctgtgaaggatctttattccaggagcatgatcgctaggtacaatagctccgggcccctctaaacccttagtgctccaacttgttccctgatgtctcgtgcccttgttgccactgtctccactacttctgccatcgattgtaataaaattactagtgattccatatgtcatgcttgtcaagttaggcgacacactcgcctaccttttgcaaactctacttcgtgagctctcgagaattttgatttaatccattgtgatctgtggacttctcccatttatagtgtgtccggttacaaatattatcttcctggtcttgatgactgctcgcattttctttggacatttcctcttcgccttaaatctgaaacattcactaccttggctatttttttctcttatgtgaagacacagttcgactgcaccatccgaagcattcaatgtgacaacggtcatgagttcgacaactcttccactcgcaccttctttctcac

SEQ ID NO: 18616 - DNA, 1039 bp, Zea Mays
tcaatcctcaaaaagccttttcaccaaaaccctaatccaccgcacgccacatgctcggtgaaatgcccaaaccagccaaaaatgctctaattgaacccaaacttttcaggcaccttcataatacctccagtaacatattcgcccaatttcacgccaatccgatattccaggcttcaatttcacacaattccctgtttcgagcgatcaattccgagtcgagtgcctaaatttcattttctctgcctaaattcaaaccaagcacatacttcagtcatattcacccatataaacctattcgtgatgtatcagctcaattccacgtcatttcatacctcaattcgaattccaaacctcctatggcactatttctcgttcaaacaccgtttttgtgtcgtttgacctctcgatcgccatatctctcgttttctgtgccatatttctctatgtatgtatttattcacatttcatatacttatgactatgtgactaatatgtgctcacctcttctgtcatttcagtgaccttgcctgcccgtgagccgtctcctgtcctgcctggattttcacatctcgtttgagctttccaggtagatatccactcttctgatattctatcggcagttatcgacttgtgcttagcttctctctcatttgcaggtcacgatgccgcgcacgaagaatgtgtcggcgccagggggaggagatgacgaggaccctcctcgcccctttaggcaggtcaagggaaagatcgtgtatttggagcagtaggaaggccgcaagaagtggcgtctggacagagcaggcagagcaaggatctcagttgcagattccttccgatcagattgcctaccgagtttgtcgtcatgcctctcgtcctcgctcctccgctcctaccactccctccactgtaccactccaccacccacttcgcctgcaacagtcactcctgcgccatccaccacctcagccatacctaccacctccacttcttcagcttccactgctccttccgctcccctttctgctccacctatcccacc

SEQ ID NO: 18617 - DNA, 389 bp, Zea Mays
ataacgtcgaagactgcccagaaattcttctggcaaaacattatttgccgattcggagtcccgtctgagctcacagtcgacaatggcaaacagtttgacagccaggacttcagggacttttgcttctccattggcaccaagcttgccttcgcctcagtatatcacccacaatctaacggtgtcgtggagcgcgccaacggcaagattttcactgtcatcaagaaaatgcttctcgacgacaagaagggtaaatgggccaacctgctacctgaagcagtctgggcgctgaacacgaccgaatgccgggcgacaggattcactccctttcacccgctatacagatcggaggccatgaccctacaggaaatcaagcatgggtcaccacggac

SEQ ID NO: 18618 - DNA, 440 bp, Zea Mays
cttctgctttttcacatcatcctcaacttctccgagagcatatcgggatagttggatgaatttgtctctgtattcgcttactgacattttccctgtttgagggataggaactcctttttcttgatcttcatgagactagaaggaatatggtaattctaaagtgagtggagaattctgcccaggtaatggtgtgatcagtggcgtgagtagcgcgatatgcatcccaccaatctagagcggggccgatgaggtgacccgatgcatatagcactttctccctgtcagtacactgagctatgttgagcatcttgtccatggactttaaccagtcatcatcttgtagtagatttgaggaattagagaatgtagatggcttgtgactcataaactctcggtgcttatccctgggcggagctggtggtggtggaggtggtagttgc

SEQ ID NO: 18619 - DNA, 678 bp, Zea Mays
gctctgcaagcggtcaacgcctgacgccccggagagggtgacccaaatcgggtgtgtggccatccatctgcgaggggtacattcagttgtgaatatgttcatccaacaagggttggcatggcttgtggttctatttgcgtaaccataggactctgtttgctgctggtcatgtccttcctgccttccttctctaggtgcccctggaggccctcaaagcttggtatggggcatcccgaaggatcaggataaaaggacagtcggggtcattgctacagtgtcagttctccatgatcgtgggtcacgctggcgggtgtgatcgagaattacctctgccgggggtggctcctctcatggcccggcggctaccgctattcaggatgactgtcgaagcacttgactaaagccatctataaccccctagcgacgcggagaagccatctataaccccctccttggtctataaaaggagggaccaacctcgatagagacacgaggacacaaggataaagagaaccacagacacgccgcatagagatgtgggatcctcccctctccccccttcttgtaacccctactacaagcaaccaggtgctggtagcgcaagcaatcgaagactagagtagggacattctgctcgaacatgtataatccttgcgtccactaagcacaccatccgag

SEQ ID NO: 18620 - DNA, 367 bp, Zea Mays
atgggatcccaataaaactctttaccggtcctgtccattggcagtcggcactttgatttcaatttcacatcacagagttaggtcctgtttggaattcacatcatagagttcagctggccaaattagctggctaaagtttagctgggttggatccatacagggccctaaaggttctaatggaagcgagagcaagcttgatctgagttcagataggttaccttcacgattaataaccacacttttaatgtgtgcatttcacttctttactttttagtgtgcccatcgccaatcttcttaactgattgggttggaagttggtcacatttttatttaatgaaggtttctccttttagcatgagcacttttc

SEQ ID NO: 18621 - DNA, 468 bp, Zea Mays
ctctgccttcgacctgatctttggaattccactgctatcgggggagagagaggaaattctagtggcgggtggggaaagtagcatatagcaaatgaacaaaaaaaaagttcgatgtatatggtgtggtgtgcaggtgtttggcgatggaacgagaaaggtgcgcgtgcgatgcaaaggtgttgatagggaatgtttgaattccaaagttatccttccaaatctaaagagaagaaataatcgagtgaatggtgatataggcaaaatgattcatcattgatggtaacagcaataaattgacgcttgtggatggtatcggtccaatgctaaccggacagtctatacagtcattgtcaaaaccagaactgaaagttcagtctatatcatcagaagccgtggcccaacattcttctgcatcagttttttcttttggtgcctcaaatcaccataacattgttctgcatcagtttt

SEQ ID NO: 18622 - DNA, 499 bp, Zea Mays
cttcgctccgacctactacgaatacccccaatgtaagtagcaccaatgagctccaatctcttaaagcttacatagacgaacagcgagagcagatgcaacgtatcgtaggggatatacaaaacgatcataaaaaggctagtgcgtgcgcttgataagtctactattgcaaatcttccttcgcacgaggttgaacagagggaatacacacgtgattcatcggcaacagattatcacgaccaatcacaacccctttatgggatgccgatagtcatgtaccctgggcaacaacagcctcccacgcacatcgacgctaaatttgtcgatctgcgcaagtccggaccgtccgcacgtgagcgcggaccgtctggaccagcggcgaccgatcccatttttagaagcgaattaccaaggcctgcacccaagccgccacataccgtgcaaaccctagataacccattcggaccgtccgcgtatgacgtcagatagtccgaatataacg

SEQ ID NO: 18623 - DNA, 394 bp, Zea Mays
tgagcagcattgcatgcttgcagcagagggataggcagacaacagcactgcaggcttgcagcagagggtaggcggacagcagcactgcaggcttgcagcagagggacagacggacagcagccagccaccaggccagccccctcaatttccacgacgcttcatgaatggagggagacacgatgcttgcatgcagcagccatgcagatgcttgcatagagcaggttgtgcggcggcttgcatgcttgcatgcagcagccatgcaacagcttgtgcggcttacatgcagtgggaggttggtacatgcggcgcgagataaggggaggttggagcacggcgtggtctacgttagcttcttaatagttagtagagatatgctaatgtaatcgtactcctc

SEQ ID NO: 18624 - DNA, 597 bp, Zea Mays
gttaggggttaggattaagggttagtgtttagtgtttggattagggttagggttaagggttagggtttagggtaaagggttatggtttagtgttatggatatggttagggttaagtgttaggggttaaggttaagggttagtgtttagtgtttggattagagttaggattaagggttatggttagggttaggctttagggttagggtttagggtgttggaacttgctaactcgtggtcagccaatttcaaacggtgggagaatagaaagcggtttgatgccaatagacgtaaggtaatagggcaactgtgtttttctccgtcccccataatggtacagtatgggggtatttataggtaaccgagggtcggtcctgccttgctaaggacaattggggggttatggcgggtaattatagcgtatcaattacagacatgggccaaccctctatcagccccgtcagcgtggcggcctatggtcgggaccctgtgacatgggccgattatacaccggcccccttttacaatgtggaagattacaatgcatggtcttcatagtctggtttgtttgatctccggagtccttgatggtctttgcc

SEQ ID NO: 18625 - DNA, 1060 bp, Zea Mays
gcggactgcgggttgtttctctaaaattataaggggttttctgcgaagtggcatggcgaaggggtattgagtattaggagccgcccgatctaaatcttgcggttcagattaaattcagatgtatacgaatctgtatgcaatcaccaccctcggatcggagttcaaaggtctggattttatgcgcttgagcccatcccgaaccgtccgatcagaacaacggctccgatcgagttgcacagcggatgaaggtttagatctaatccgaccgttcattcgggaatcaatggccatgaactcgaccccatcccctgacctcaagccacggcggcgcgtccagccacccggcgaccgagcacgccggtgacccccaacgagtgattcggagcgccaataccacgattacccaaggctacgagaaattgagagtgtggcggacccaggagagtgcttattaccggcaacggtgaggtgaaggagccgcaccacgacgcgagagcaattccacggcagaggaggagcgcggggaagaaattgccgtcacaccgaggcaccgagtgcccaagtacaagcgtgcgcagacaccacccgttggcgagccccaagttcttctctgccgacaccggaaggagcgagaggaggaaagctagcgcggcggcgttcggatagctcgcgatgggagaaggaggtaagagcagagaagaatgtcgtgcctgtgattcttatggggaggttcaagaggagctgggtccgcaggttcgtgcggcgggtacggggaggccgttgcagtgggagttcggccgaagcgagagaatcgctcggttcgttgagcttctagtccaccgcggtcactgcttcagctaggggagaagaagacccgccctgacctgcgggacccaccaggaagtgacaccgggtgagcgcaagcggacacaggggaaactgggccacgcgcgagggagagtgaatgtgggccgcacggggtttttcttcaggtgggccgaaatgaagttgagctggcccaagcagtgttttaacctttttttcatttctactttttctt

SEQ ID NO: 18626 - DNA, 630 bp, Zea Mays
ggagaataccggggcgtctgcagcgtgttcagcagcctcaggtgcggcgtccgcgacgtcgagctcgaccccttacacgtagaagatgcggcgacatgtgcggttgtggccccaaaaatatttctcgttgcagttgaagtggagttcgaggaggcgaagagtccgaagcagagtccgggctagactcataaccgccgccagtgtttctgggttatggatccggacagcgtggctcagcggcggcagaagccccctgtgaagagctgaacgcgctggttctcctccagacgacctgctcatggcaggagggcctgaactcgattggcatactcctccaccgtgcccatgcgtcggcactctgtcagctcgaacagaggggcagagcacaatggcggcccgaaccgtagacttagaaggtccttgaaacgaccccacggtggtgtgccctcgtcctcttggagttgcatgaaccagagctgggcgacgtcctctagattatatgacgccatccagacgtgttcctctggtatggtgcgctgctggtggaagtacgattcacacctgctgaggaagagcatggggtcggacttgccatcgtagtggggggagagtcgagtttctggaatctgg

SEQ ID NO: 18627 - DNA, 896 bp, Zea Mays
cgtggacgaagctaacaaaccgaacacgccagcgcaactatttctccgaaattcgtgctgggttcgcgaccacttcctcagctgcggccacacgacccgctgtcccatataacagggccatcctcgccgttactgccccttgccacgtagaagttacagagaacagacggggagggtacagagatccgccaccgccatatctcggcgacagcaacggggaaacgaccacgaggtagcctgggggtgaactcgggtgtgtgaagccgttctacgaagcgttggggtaggagatcgaccatgacccactgaatcgctcgccgggggtggaggactgccgcggctccgccatttccaagaatccccgtccttgccgcgcctatctctggtgagatgctgcccatatagtccgttgtgttattccctttgcgatgcaatactcggggtgggtagtgggtcacggtaacggcttgtggcggtgctccggtgagctcgtcgctgtcggcacgagtgccgccgcttctgtccggcgattttggccgcggaatcgtggcaggttcgtgggtaccgttgatttgggagggcacggtcaagattagatcacgacacactggttcgctgattaacctgatgttgtctgatcttctaggaagggcccagattggaagttgaacaccactttcaacgctttcgatctacaccatagatctacaaactgacagacctagtcgcggtttggttgtgtccttgattcgggccgagggatcacgatccaacggttgagtgtgcatactccgtcataatccccaccgatgtaatcgtggccttccacttgtaatcgagcggccaaaacgtagtgataccacttcatcgaatgcattttcatatgaacccctggc

SEQ ID NO: 18628 - DNA, 849 bp, Zea Mays
cgaggagtggagcgactgcttgggcgatgacggcgagggcaacggtagcagcgatgacaacgacggccagggtagcgacgacgacggtggcgagggcaatggtgacgatgacggcaaggacgaggacaagggtggtggtgaaggcgacaatgacgacggcaagggtgaaggcgacgacaagggcgacggtaaggctggcgacataatgctactggcataaatattagtatagtgtagcagcagcagtagtagttagtagtagaataatgtagtttagttagtagtgtagtgtagtataagtagtaatgtaatgtaatggttgaggggtgggaggccgactcatgatgagtcggatgagtcgatcttaagtttgtaatgatctccccctgtgaatgaagacacggtttcctgctaatctattgttgtgtgccctgtttttgcatctgatggttcacttagcattttagaggtaatgcccgagtgatgcttgcttttctgcgattcaaacttatcccgagctatcggcctaccactttgcgcctgacttaacatgccaacccctacttctgttgatgtcctcttgagttctgaaccctagttctttcttttttttctccaccgctctctacctttctgagttcccgaatacgtttgcatcgtttgagagatcacgatggcgcccaagaagagaaaacagagtgctactattctggccatcccgccaatcgatcccaacagtcaactccccttcgctggtaaccatgtgtcttttgtttctgaacctgaccttctgcaccttgttgagattggtgttctaccaccgaaagagtcatgcttctggcggatctg

SEQ ID NO: 18629 - DNA, 395 bp, Zea Mays
tgcgaatgggatggaatcatacgtacagttgtcgtgctcgttgctgctgcgttctgagtgactcgtttaccttgtctcactcatcacgagtcgagcgatcgtgtctggtacatctacacgttcgtaagtactgtacttggtgggtgagtgcccgtctactgtagccgtaggtacgtgtgcatccgtttttcctcttactgtggccctgcatgtggatgtacttaccgactatcgaggaaagaaacagagagagaattgacataacaggcaaaagcatacgcaacagcatcccttttcgctggtcctgttggcgttacaagcaaagcaggacagcccaggatcacctccagtccggccatgctgcccccgtgcgcgtgcccacgcacgcactggcc

SEQ ID NO: 18630 - DNA, 450 bp, Zea Mays
tatagggacgggcgatgtcaccaagatgcgaatcgtcgtagccggatggcagtcgtttcgaatcccgcgcgcacgcgcgccgcaaacggtcgactgaccgacaggacgtctcgccgcattaaatgattgtgcccctctgagaaaaaaaatgcgccaaacgttgttttgcattccgcctcaaaaggtacgccctccgccctttgcctctccgccctttatcctctcaacagttaaccagaagaaggcatcttctacctcgggcaactcacctcaggaaggaaaaaggcgaggaggaatattgtttagaggttcgaaggtccggccctcggcagggttcgaaaaaaccaccttagaacacccgggctccgaggccaatactgatcaggggttcgaaggttggcctcttggaagggctccataaccaccccagagcatagagtcagggatgac

SEQ ID NO: 18631 - DNA, 370 bp, Zea Mays
atcaaaacaaggaaaccgattggctacactacaactcaacaatacaggatgctaatcaacatcacaagttcgcaacacaagttgcccacattatacactatggaaaccaaactcagaatcagttgtgactacacgcaagtgatacaaatcagcataaaggcacagaatccgcttgattatatcacagttcatcaataagggttgtggatcaacatcgcaacacaaaactctgatgtacactgtagataccaagcaattgggaccagaggcagacacaaattatatagaatcggcatcaaaatgcagaatcggctccatgacaccacaattcatcaatatgggttacagatcgacattagagatgtcaatg

SEQ ID NO: 18632 - DNA, 1034 bp, Zea Mays
gttttctaaactggtggtgtggacctcgcgctcttgttcagtggaggtggttagctacttttttgtggtgtggccctcgccctgtggattcgtggtggcctttgggttaggtggtggggaatggtcagcagcgagggcaagcttacccttcttggcgacgagggttgtcctggcatcatcatcatttggtggtgagctaggacgattgtccttcttgggaggcatcgtgggaatagtcttcgtcgcacaaatggtgggcgccaaatgtttggtgctgacacatggtcatgtgggcccgaacacgcagagacggaaaggacgagctcaggtgcacgaaaagacgtttggtaggaaactgtagtgtcttgttttgtgtgtcgcatctagcttcaagacaggggtattatagggccgttcgggggtaggtagtccaaagtacagtccagccccctttcaccaaccagttccgaggaatattctatgtaacagggtaattacagcactgtgatccgtataggtggcacatactaaataatacacacatacattacactggtaggtgggcctcgtagacgtgtccttcggtggaccaacgacgagcttgtcacctcgtagccttcgctgccacctccggagtcttcatggctcagcgcccttcgctctctcccgatgcacgcatggcgtgggttagtagaggctttgtggcgaaggccttggtcgatgttgattgtagcagggcctccgtgtgacttcatcctccgctaaggtcaggcgaagagtcataggcctcctcgatccaagatcgtggtcctgcatataggttagtaaaggtgacgcaagtcaaaggccccttcgctctatgatcggggtcatgtccggcctatgcccaacaatgatgacgacggctcctccgcctcctgccattgtcacgacatccacaccaccaccaccaccaccctcctccacctctgtctctgacgtcgccgcccacccatcgctaccagctctcgccttcgatgttaccaactccatgc

SEQ ID NO: 18633 - DNA, 628 bp, Zea Mays
tccctcagactccacgaacggcccgatatctacgcgagtgcaaacatacatccaacattcttgaaacggaaggaaacaatacaccatacaacaatatagatcaaataaatatgcacacgacatagaattcgcatctacgactacgcgagaaaggaactgagacgaccgacgttacggtcgagggttatcacgtttacactaagcggatatgaattataatatttaatttagcttaatcatattgacagacattaatcgtatgccaagtaaaattactacttagtcctgattagttttctactcgaataaccgttgtttaaatatgtatttaattagcgcgagctattctaggtgaggcgaattattaacgtgcacagaagcgcacgacgatgcgtgcgaacggtacgcgacgatttaatgcgcgatgcgcgggcgatggcgagtgacacgaatgcacacgggggggggggggggggggtagacgaggggtagacgggcggtagacgagcgtggacggagtcccgtcaacgcactgcgcgtaagcgaactcgagtgcgtgcactaattgcacgacgcggcttcgagagcacggcgaggcgctgcgcacgcgcgatttgacgtgcacgac

SEQ ID NO: 18634 - DNA, 612 bp, Zea Mays
tgagaggtggtaagcaagggacggctgctaagccacacaggtggaggtggtcaaagttccggcggtgattagccggtcaaagcgcagcgcagttccttgacaccgaagcagcagcagcgacctcgggggtcaaacgggctggctgttggcgtctagacctgttcaactttggcgactctgcttgaacccaacaaactagcagatgaaaaaggaagagaagaagaaagttttgctcgctgggatctcatctctgtgggtcgcgtgtgggccccgccgtgacagggtgctgattagaacactagatagagatatgatatccatccacatgtagatggataattagattagattaggagggcacacatctggatttgctgccggggggggggccgtgatgggttggttggcttggctggctgcttggctccctccctttcacggtgcggagtctccgtgcgtgcgctcgtcgcgtcgcggccatgtgactccccccatctccttttgtgttgcgattgtctctcgcctctcgcggtcgcggcagcctccgtctggatctgctgccgatcaccggcccgaaccaaccccaacctggttaacccaatccgcagtccc

SEQ ID NO: 18635 - DNA, 301 bp, Zea Mays
tctttttacctagtttcatttccttgcaatgtgcatgtcccatgaagacgttaggttcacataatctaagaaaatcacgtgaacccggaatattgctgcatggtgctgtgttgttgcgaacggttgcccggaatatcgttgcatggagccgagttgtcgcgaacggttgccgaccatcgcgctaacagtggactcaggatccagaagcttctcttccgaagatttttgcgatcgggtaaaccagattatgccgaagtcgacgttgctatttatctcccttcagcttgggctctacctccac

SEQ ID NO: 18636 - DNA, 1142 bp, Zea Mays
ctctagttgaggtaggtctggttctctagttgattataacgaaagtttttcgttgttgtcgtggtcctagaaaccgaggacacggtagaatttgtgttcggtgggggatgctagcacagactaactttgaatggtgaatcatgagactcgaggaggtttatactagtttaggcttgcgccctacgtccagtgtagtgctgatctttgcattgctctggtttgcatgctacagagggtgcaagtgagaaggagatgtcgagggagaggagaattgctactcaatgctccattttttcctgccttgttcgtgtttagccaccccctattatagcccaagggttggccttctataaagatatgagaggcctgaagtagggcgggacatgttatatacgagagggagttcttctgacatagctccactgacgtcgcctcctgacacacgcgtaagcgcacttccggtatggagggttgctccgtcctgtcctatacatggattactgtagagactccggtgctaaggcttcccatagcggagcttggttggtcccacagtgcagagtcaggggacgttaagggacgtggatgatgacacctcgtctcgttgatggagactccccttcactcgcctgacatgtcgtggcgttagtcaagatatttggtggcaacatgccttatcgtggttggcgtgggtcagcaattcacactagaacatagtcatgacataggtctctcacacaatcacactagaatcactgatgtaagcatcttatacccattgatcttgtgtgtgcctcatgttttgcttgtgaaagaggtttcatcaatggatctgcaacatttgaattcgtgtgcaccttgaaaatcttcacatcacctcattctatgatctctcgaatgagatgatagcgacgtagtatatgtttggtcttttggtgtgatctaggctccttttcctgtgcaatggatccactattatcacaatagagatccactagactggacgcactagcaataacacctaactcagaaacaaaatttatgatccaaacaacctcttttgtagcttctgaagccgtattatactcatcttccgccaccgaatatgttgttgtatcttgtttggaactcttccaactcac

SEQ ID NO: 18637 - DNA, 1116 bp, Zea Mays
tgcttggatgggacatggcaaggttgccagtcatgcagcctggggcagagaggaacacgggagagtgcgcacagcacatgagcatagagccatagacacatcaattcagagacagaactgatagggtgaggttcatgcttgttctggccagtctggcacatgggtatcgctgtcatttcgggtatgtgtttagagaaaataaacaagaaataacatcctctaagccgatcaattctaacagattttccataatgtttgtacctttcagtgatattttatggaattaagttctttcggtaaactcctcctatgttgatcggaattccttgagtcgtttcaacatagccggtcccaagcccggtaaaggaggagggttgtgttaggtccggcaaaccaacgtaaaaaccagccaaatcttatggagatgaaaccacagagaaaatcgttggggtgtaaccctcttagcgacgcgccatatcggaacccgggtatggtgttaaatgagcaagggtcgggccgtcaccccttaagtgacgcgtcgtctcttgatctggagccggtgataagtgagcaaggatcgggtcgtcgcatccttagtggcgcgctacatcggcgcccgggtgtagtggaaaatgagcaagggtctttgcatcttcctcggtaggtgcgaagggtaaggaagctagtcgagccaactaggatccatgtaggtagttggaacgtaggttccttaacaggtaagttacgagaaatagtcgatgttgtggtgaggagacgggtaaatattttatgcgttcaagagaccaagtggaaaggacaaaaggcgaaggaagtggaaggtacaggcttcaagttgtggtacatggggactgcagcaaacaagaattgagtaggcgtcttgatcgacaagagccttaaagatggggtagtagatgttaagaggctaggagatagaatcatcctagtcaaactggtcattggggacttggttctcaatgttatcagcgcgtatgctcctcaagtaggccttaatgagaactcaaagagggagttctgggaaggtctggaggacatggttagtagtcaagggatgtcaaggaaacataaggaaaggcg

SEQ ID NO: 18638 - DNA, 627 bp, Zea Mays
ggaaatctgcgagtggtgaccggggtattgctcgccgtcgattgcagtcgcctggcgccgctcttcatcgaatttggcccatctgattcctcgccattggtacggcactgcatcctttaattcctaccagacatgacttcgatttgggcttgaccaatttgggtttggggcaccgggaccccttgggcgactggccggagatggcctccgccgcagtcggatgtgggtgccgctctgttttgacgatggagcatgttgacttgggtgcaccgtcgatcagtggatggacgccccgatttgcgcacacgtaccccaccttcgctagatcttccctgggtcgttagatcggaatccgagggttgtggcgggatctcggcttcattatatccgtactgttggatttagatccaagggccgcgatcgcataccgcttcattataatgacgatataatccgagtcgttcaatcgtgatctggcggctagagtcttgcgataccccttcggttgcgcaaattgctaaagagtccccggattcatacttaaataacccgcggtccacagaaactgttccctgtgccttaggaattttaacccgaggcccctgcctttctcagatttagtgcgcc

SEQ ID NO: 18639 - DNA, 331 bp, Zea Mays
ccaggaacggacggggtggatcggaagtagtggttcgcgccctaccagtagacgagtggtactgtacgtagcaggcatctatcatatcatcatcagtgtagagtagaccgaccgacgtgcagggcatgaattgaagccactctagctgctagcgaagtatggaaaggagtggttactggtcgtggttaggcaattagcaatagcattggaacacgcatatatcattccattccttaagttcattcctacgccaatcgaatcccaattataagtgcatgattgacgggctcatcgatcgatatcatcctgccgtcctagctctgcatgcgcg

SEQ ID NO: 18640 - DNA, 714 bp, Zea Mays
gcgatgacagatgggcccgcgtggtcagcgttgtcttcctccccaacgacctgcgcggagtcctagcgatcccccaaccgaatgccgcgagattcaagccgacgggcgcggacctcgggaccaggtcggccaagctcggactcgccccttgccctgtgatccatatattgagcatcaacggaaggagcagagcaccatcgagcaggcgggaaagagagagattggggatgaatgccgccatgggagaaaccaaggaaaatcgtcgctcgggctcggtcgcatggtctgggcgacccgctggggtacatagatgacgtccgtggcacttgagcgaggagaagactctcggtggaggccgaattgctcaccggttcgtggacatcaccgtcgggccgcatctcaccatgggggcaggttctccactgctccaccatcggtaaaatactcctagaattatgctgggttgattccgcttcgcgtttttgctacttcgattggggttcggtcgtcggggtgttggtttcgcgggcatcggtgagctatcggggcggagcacttcttccgccgccctgtcgtgcagtcgggagcaggaagaagcatggagtccattgatctagtgatcaatggtggctataggaagatgaagtggatgaaccaggaccgttagatggtgatccagcgcgcggaacccgtgatcgaatctgggcggtcgat

SEQ ID NO: 18641 - DNA, 459 bp, Zea Mays
ttcttccatggaataccatggagtctaactatctctttaagatatatccgggcaagggtggctccttcgaaggtagttttcactgggatgaagtgggccaccttggtaagacggtctattatcacccagatagagtcgttccctttttgggtccggggcagtccggttacaaaatccatgcctatttcttcccacttccattcgggcactagaaggggttgcagtagacctgcagtcttctgatgctcgaccttagttcgttgccaagtgtcgcaccgggccacatattgtgctatctctttcttcattcctctccaccagtatctggttttgaggtctaggtacatcttggtggtccctgggtggatggagtaggctgagttgtgagcttcctcgagcaggacttctcatgcctctccttttggtacacacagacggttcttgaaccaaaggactcct

SEQ ID NO: 18642 - DNA, 1403 bp, Zea Mays
tgcgagacatggaacactgggtgaatcactgccgacggaggaagttgcagtcggtaagcagctgtgccaatcttctccagaatctgaaaagggccaaaatacttgaaagagagcttagcacaaggcctgtgatggacagacgactgtgcaaacggttggagttttagaaatgccatgtcacccacttggaattgtcttggtgttctattggtgtcagcataatgtttcatcctgttctgagctgaggctaggttagccttgatcacttctaaaaaatcatggcgttgttgcaatgtcagttgaacctcagaaacagtggccattttagaatcaggtagcactccccagttaggctcaaccccatacaaagctttgaatggagagcattttagtgacgaattgtaacatgaattgtaccacaattcagcagagtctagccacttagaccactaagaaggtgtctgatgcactgcacaccttaaaaacatttccaagcattggttaattctctcagtttgtccatctgattgtggatgataagctgagctcaagtgaagcttagttccagcaagtctaaacaactcttgccacaaagtgctagtgaaaattttgtccctgtctgaaacaattgacctaggcagcccatgcagttttacaatatgggtgaaaaacaattgggcaatctgtgatgctgtgaaaggatgcttgacagggatgaagtgggcatatttagtgagcctgtctaccaccaccaaaatggcagtatacccacctgatttcggtaatccctccacaaaatccatagatagatcttgccacgagtgttgaggaatgggcagaggctgtaatagccctgggtacttacaatgttcatgttttgcctattggcaaatttgacattgtttgacaaacagctccacatcagtctttgtcctggccagtagaacaatttcttaagcctttgataagttgcaaacacagcagagtgacctcccatcgctgaagaatggaaagctgctatgagcttagtgtgaaggcctacattttgtccaacaacaagctgttgttgtctatatatcagtccattgttcaaagagaagccctgagcattaggactttggacagcaagttccttcagcaaatcttgtgcatgaggatccatctcataagacttcagaacttcttgaatccaaactggtgtggacacagatatagcagtcaactgaatttctgatgccactctagataaagcatcaacagccttattgtccacccctcttttatattggactgaaaactgtaatccagccaacttagacattgctttcttctgtaaatcagtggccagggactgatcctacagatggctaagacttttgtggtcagttttaataacaaatacc

SEQ ID NO: 18643 - DNA, 374 bp, Zea Mays
agaacttcatcgggagatggtgaattggttgccgtagcactgtgggtgccatggatgcgctgagtgcagtgtgtggggcttggcattgctgaaatcgtgttgagtaatctctcaaaagcgtcataccattaccctctacctattaccgacttcagatcagagttcgagcataggaatcgaagtttgggtggccgcgaccatggccgggctcgtggtcgtcgttgggggtgcttagcgcgcgaccgtgggatcctcgatggagggtctggattagatcgatgtatgggttagatgtggggtggatgtggccattggatcgtacttgtatgaataggatcacatcgtgcttaataaaatcttgtccattaatctct

SEQ ID NO: 18644 - DNA, 570 bp, Zea Mays
ggtcttcggcattcgaccactccgaagtcaccgcgagaggcagcgcagactaccctcgcgtgcgacactccgcgcaaaagtcgcctaagggtgcagccgaaacagcacaccgagagcgttaatcgaagtctatctttacagagacgctccgcacaaagtcgcccacgtacgcagccggacaaatacaagcgtacgaatacggccaacatgccacatcaccatacaaattacaattacatacacacggtgagggcatcgcctatcacatacacacggcgagggcatcgcctattacatcggctcaaccttcagaatgatacccatctccctgtaattaaacaacattatcctcaattcctcaccctcaaaagctctcgaagatccccctcgcctatgcccgccccaatcggcgaggataacaattctcgtttaccaaccccatctacccgaagtcggccacgctccatccccatgcgacggcgcctgccgctccgcgaaaattcacccacactttgttttcccaccacccttcgccgcctacacccagtactcgcaccaggaagatccata

SEQ ID NO: 18645 - DNA, 439 bp, Zea Mays
tgagcatgtcacaccgccttaagccgttgccgacttaagccgattgctccgttagtagggtatagtggtcaccccgagttaagtaagcgtgagcatgtcacaccgtcttaagccgttgccgacttaagcagattgctccgttagtagggtatagtggtcaccccgagttaagtaatcgtgcagtttgacagtgaacaatttgagtgtctttgaagtctttttattgatgatatatttcccagtttacagaatacattgtcgtcccaatagcttttgagatatagctaggggtaaaacttcctgagatgttctatgttccatgagttcccaatttccgtgccgtccatttgagtgagatgatatgatccaggccgagtgacttctgctactatgaatggtccttcccatagtggtgatagtttgtgccgtccctcccccg

SEQ ID NO: 18646 - DNA, 280 bp, Zea Mays
tgggagtattggacacagtctcagtggagctggtggtgggcattcagggggtgttccagcatcaccactactgcctcattctcctgaaacaccatagctagagcaagaagaatcacaagcttcaggttctgtaacaatgagcatgctcagccacacaccctgacatgttcctagtgcaactcctatatattctgcttcacatgacaacaaagcgacaaccttctgtttttgtgaagaccaagtcactaagttgtttcctaggaagaataagatcccagat

SEQ ID NO: 18647 - DNA, 339 bp, Zea Mays
cggctctgctaggtagttaagcacctaatccaggaactcgtgcctcaaatcatccaccagagctcgccaattcgtgatttcccccaaatcggtttccgccgccgtagaaaggatctcaccgtggccagtgcacttcaggtccgttcatgtcctctgccctcttgtttcagcacccctacctacccctgatgcctctcgacccgaccgattaggctaggaccccttagattgccgggaacacttcatgctgtccattgtgcctcctgtcaccgtggacagggtgatgtagagctccaatccagcaattaagcgaggggaaatgtttgttaagggttcaat

SEQ ID NO: 18648 - DNA, 598 bp, Zea Mays
ttggcagagacaaaatggttcaagtagtgacagataatggcgccaattataaggctgcaggcaagattctcatggatcaaattccaacattgttttggagtcctggtgcagctcattgcttggatctaatgctagaagatattggaaagttgaactatttcaagaaaacaattgctcaagccaaaagagtcaccacttttatttataggcatgaaaggatccttagtgcaatgagggagcaaagaggtggcatggacctagttagacctggagccactaggtttgccacttgcttccttactttgaagagcctacacaagcatagatatcctttgaagggtctatttttgagtgatgcatggaagtcaaacaagttgtcaaaaacagaggctgggaagggagtttatgacattgttctatcctcaacgttttggagcaccgttgaagtttgccttagagcttcagcaccacttattgcccttagggtggccgatggtgatgagaagcctgccatggcagaaattgcagcactaatggatagggccaaagagaggataaagcttagctttacatcacaaaacaagcaagttttgctaaa

SEQ ID NO: 18649 - DNA, 422 bp, Zea Mays
ctgacccacaccgatttcttcttcagagagcgaccctcagtcaaagagagcggcgccggtggagctgacagtcgttgccacactgatttcttctgcagagagcgaccctcagtcaaagtgagcggcgccggtggagctgacagccgatgccacaccgagagtctcccacacggatgaccaagacgttgctgcactgaattcctgctgacctgatgaaccgcacggagggatggacaccaggcagcttgatgaccaagatggaaacagcggaaacaacgagttggccggcggcaagcagcaacacggtggctgggcgcaaggcagctgaagcactttccacgaagttccacttggggccggcgacggggcaggggtcctccgcgagacctcttcttgcgcacgactacttgccagccgtcatc

SEQ ID NO: 18650 - DNA, 926 bp, Zea Mays
gccccagtcactttatgaagatggcccgctttttgaaggggctcagaccagaactcaagaccatcctagccagtcaagatttcctcagcttctcgcacctctcaaacaaagccatacaagtggaaagggcaagggaagaagaaaaaggtcacctcaagaggaaatttcaagtcctccaagctcagcagcaagaccggcaccagagaactcgatcctttgggtttccacccaagggaccaagcttcattagaccagctggacccactccatcacggttcagtcagcagagtcagagctcctttcatgccccctcagttgcaagcaaccaaccaccagcaaatgcatgttggcactgtggagaccccagtcacttcaagaacaactgcccccagttgaaggcatcaggacctgcttactccaactcggtgaatgggcccaagaatacctcagcacccgcccccaaggcgccctcctccatcagccagcagaacaagacccagtatcaaggaagggcacgagtaaatcacgtcgatgctcaggaggctcagcaagctccgggagtagtgctcggtgagttccttgttgaatttactcccgctactgtactttttgattcaggagcatcccattcttttatagccactagttttgtggaaaaacatggcatcccctctacccctctagagattcccttggtcacccgaaccccagggtcagaccttctatgccagctcaaatgctcccaagtcagaattcttttaagtggggtagtgttcttggcagacttaaccgtcttgccatcccaagggattgatgtgatcttaggaatggattggttaaccaagcacaaaggtatcataagttgcgcaaacaagatagtccttctcacagaccaccaaggaaagtcagtctcttgtcaggctcag

SEQ ID NO: 18651 - DNA, 583 bp, Zea Mays
gtcagagatggacgtcggcagctccaacaccaggatgggactcacccctagcagcaccagtgctgtgctcgccttgccggcccatgcggcgatgcgctggaccccggggcgctgctccgcctggagatattcaagtgtcttcttcatcgcctccaccgcctgggggcctggtgctgcctgtgctgcctgcgccgcccgaaactggcggacccactcctccagcgcccgctccttctcctctgcctcgagctcatgatcggccaacagcttctcccacctttcaaacatttcctccctgaaggcgaggtccttctcctgccaagcgagatctgtcgcccgcttatccagggaagcatccttctccttgaggttctcctcggccagggcaatgctgttggccctgtcatctagctcccgttgtagcctctgcaggctgtccacagccgcagtctactagacccgctgctcctccaggattttgttgaaggcattcagcttggcctggagctccgtgacgacctcctccctctggtccaagtgctcctccttcttggccagcctcttctccttccgggccacctcc

SEQ ID NO: 18652 - DNA, 271 bp, Zea Mays
attagatttgtgtggtgagatggggctttctaatcctatgtgtcgatgacgcgattgtgggatgcgggttggtttgctggatttggagggctgctatttcgcaacaacgtgcctattttgttgggagcgcctcaatgatgtggttagtggcctggtgggacgatgctgtagcggaagctgaatgtccgtgcggcagatgtgtttatggcgtgttgtcgtgttgatgctaacttcatgaattgcagctttgaagagaccaataggattatag

SEQ ID NO: 18653 - DNA, 1132 bp, Zea Mays
ctgaaacctacaagaaaacccattgtcaccattttagcatcatagctacactgtaaacttgaataggtattaaaacatactcacaactattgtaggacaaccaacaacttcgggtcttgcattaattctccaagggcaatcaccacctttacaataaccccgatatctaaacggagcacttgactcaattcctaactcaaactcattgttaatcgcgtattgcctcatagcaagtctgaactctttcatatccttgtacaaactgccaaccttcataataggatttgacctgtcacaaactaaaattctctcttctggtatagaatccccacaatgtaccacaactatttcatcatcaacatcatcggatctgccacgaacattaaatgctctagatctacaagcatcttgccttgcacttgtttcgcgattatcttcatccaataatcccaacctgtcatacaacactagctctgaagcaacctcctgtgctccttctttttcccaattttcctcaacttgtatggtgccccaatcaattgctacatcctacaacaaatgaaaggaacaactacaggcagttagaaaacatgttcaaatacatctgaaatctacaaaaacactgaagccacaactgaaatctacaaaacactgaagccacaaacttacatctgaaataacatcaattgatgaattagcaaagaaatgatctgctggtggaggaagcagcctgagcatagaagcatcggctcggatctcatggtgctcggctgcgctaccgagtgctcctgctggaccagagtgaatggatgtcgacgaggggggtgcgaatgagtcttcatccatggaggcacggcaactactaagcctcttcctcctctcgcgaccggcgagtctagcccctcatccgctcctcaatgtcggtcaccgaacggtgaggaggaaactggagcggggcgcgaggcgcagagtcacgggcgagaagaggacgaagacaggggtaaattagtccgacggagcacagttcaaatgggcccgcactgttaagagtcggcgtacgctgttaatggagtcttcaccggcaacggtaccaatgcggcgagtgctggcacacaggcatcccaaactggcg

SEQ ID NO: 18654 - DNA, 737 bp, Zea Mays
cggcatgttccattcactcagcgtcgggaacaccttataggccagatattcttggactagatctctggtgctgatctgctcggctaccacccgaaattctgccacagcttcttggcacggtgaccccgtcgacatgcggcacaggggcctagtcaacccgaagcttaagctcagcgggctcagtactagcgccttgagcttctccctcttcttctcatcggccttaacataaaaccactcattttccaaccggttggccacttggtgcgatagctaaccactgaagacttcatatctttgtggtaagcgaagttgtaacaaccaaaattctcatgaagtccatcttctctggccttcgtctgataatgaagctcatgcactcggcaaaaagcttcggcattcgggtctattccttggcttcagagtgcccagatgtagacgctgagtctaacgatagcgttaggagttagctgatgaagatagatttcgtaattttccaaaacttccccaatcatttcgttcaaaggaaacctcaatcccgctctgaaaaaactcctgaaaactaccacctcatcattttccggtgtcagagtggtttcttccccggcgaagcaaattagcttcttctcagcttcttcgaagtagcctagctttatcatcatgggcatatcagcctcagaaacggtagattttccaaagtccaagtggctgggtttggctggcatgagagtgttata

SEQ ID NO: 18655 - DNA, 422 bp, Zea Mays
gaggttatctatggcacaatatttcttaccgagaaacattattcgtgctcgaccgagtgtgaatcatgacgctggcgagaatctaggcgcaaggtcaccggtggcgagctcctctgcgctggcgatccaatccggtcactgtaccatcgcgaagtccattcagttagcgtgtccgagcatgtttggcatcgatttgctccagattttatgtaatgactgaatcaactctctgtatcaaagttatagcctaataaaccagctataatcttgttatagcaatcacagtcaaccactcactagatcatgttcgaatcccagctcaaagattgctcaatcacactgtcagtctgaattcagacctgaggcagtctgacagcctgactttggatccaattttctcaaaacttttcatggtactaggg

SEQ ID NO: 18656 - DNA, 363 bp, Zea Mays
ctttaactatgacttcgtgtttcctatcctcataatcttgttgcatttccagtgctttgcttagaagcatgctctgcaaaacaaattaaagttagagcactcaatctatcacgaaggtaacaaaaatctagataaagatctcaccttgaaattggaataaaatagactaccgacaatgtgttgccgtcagtaaccgctgatgtcagcctccagcttcggaaatccgacactcttagacagagtgtcgattatcttcgacccagcgcggccgcgaatacatcctaaaatttcttcatcaaccccgccgaagagcaaagatcccggctggtaaccgcaagatattgcatattctttcaactcctc

SEQ ID NO: 18657 - DNA, 717 bp, Zea Mays
ttctgattctaacttgttttgcagagcatgttattaagcaatgccttaaaaatgcagcaggataatgaggatagaagaaacgaagtaataattaaaggcttagaggataaaattaaggaacttgaagcttctttgaaggaaaaagacatcctgctcgaacaatttggaacgaaagttcacaacgctttgaccatgagacaaaggagcataaagcaaaggtcgaagccgaagctgaaagaaatacgaagctgcatgaagctattgagacccttcataacaagtgctccgactttgccactcggtgcattaatcagctgaaggggatatttaactcggttggagctacttctgaggagattattccttcggccgaagatatccccggggccttcgagcatattgaaaatgaagttgaaccccttgatgaagttataaccgagcaaggagaattctgtgccctggtggcttcacgcggcacagctgcgacatttatgtaggctaggtgcaaccacgccaaaactgttaataagccaactttcaatctttcaacatcagatttattacccaaatttggaacaaccgaagcccgaagcatagggaacagatttattacccaatttgggcaaagggcgggcgtgaacttgccggggatgaagcacgaaaactgctaaacttggtatggaacttttacctttgtcttctctaccttggttttcc

SEQ ID NO: 18658 - DNA, 368 bp, Zea Mays
gctggtgatagcagtttgggtcctagagtgtgaccttctcccgaagaagttgaggctttggttgcttcacttggcgaaatccccgacgacgagaaacaggttcatttcgaggtgcctttgaatccgagtaacgcagaaataagtgccatgctggacatgttggctgaagattcctctgatgcagcccctgctaaaacactggttgtagcacccatccccgagtctggcaaagctttggatactcagaggtctaatagtattcgcccgaagcgtcctcgccgaaccaatcctccaacttctcctgctgaggggaagaagaagaaaaagagacgtctttgtcgagtgtcatgcttgaatcaggatgccgg

SEQ ID NO: 18659 - DNA, 431 bp, Zea Mays
ttttcccactgttggccaccccttcttgccatgttggcttcctgccctgcgtcccatgcccccttccaagtctcgcaagccgtagcaccgctggaggctggccgacgactgctccttctaggttctataccctgttgttggtcgtagttcgcgcatcataggccacccctttctacacccatggtcgcgcatttctacacgtgccccaatcttgcgtcggctactcccggctccttagtccatgtcgttgccaccccttcacgcttccaatccggccttagtgagcctccctacttccctagtggcccttggctctcgtcccctttccttgtaaggtacgaccgattaagggaacatacaatcgatccaatcaatctattaactagtttatttacattcttgccctagaagtagcatcaacaagtctttct

SEQ ID NO: 18660 - DNA, 626 bp, Zea Mays
actttatgaaagtgataaacgagttatatatctataacactatataatccaccagttcaaattttgcaaaacccacccaatcatatcaccccacacctataactaccactaaatccaccaaacaaattgcacccagacataacacgccatcaaaaccaacgattcagatcgttggataacccccttcttttttactcactcaaatctaatggacaatattatttggatcatccctcatcactcattcctcctctctccttcctcgtgaccccgccacatctagccccccacgtcccaccccttcccctcactagcgctaccgccgttgtcgtcgatccctccctttcctaggatcatagcgttagcaagggctatatgttagtatgtttaaaattagaggaagtatatcatccatcgttgtttttcaatcagttctatcatctgcttgtggcgctccatgtcaaagtaagtaagagctataggtcggttgtacggtgagatggagaagagagggacggagaaagaggagaagttaacgatacataagaataaataaactttatgaaagtgataaacttgttatatatctataacactatataatccaccactttaaactttgcaaa

SEQ ID NO: 18661 - DNA, 506 bp, Zea Mays
tgcttcccagatacttgccaaaatgttgcccgaaaagtcctccgacaactgtgccagcactacagcagagtaatctttgaaaccccccttcgctactttccacccagcaacaaaaatacccccacctggaggaaaagacttcaggccctgtcgggaagagaccctaccgaggatgaccccaccatcgtctatatggctggatacctccacactctcgataaccaatatgatgaccttgcctcccattgtactcacctaaactcctaggtggaaagcctggagcatcaagtcagggaacttacaagggaaaaggcgtcccttcaagagagcctcgagatagcggaaggcgaggaaaccaacacccgtgaggcctaccgcaccctgaagatggattacgacaagaagctaaagaggctcacccccgcaagaaaaatccgcaagaagaccagaagccaaggatgccagactgagcagaaggaagaagcccctccagccctacctcctac

SEQ ID NO: 18662 - DNA, 410 bp, Zea Mays
ccatatctaagtgggtcatcatccaaaactaacataagttgcagtgcatcatatggttttagcggtctgaagtatggttgaagggttatgtacatgcaatagaattgtatttagttgtaaaatggcaggaccaataagaaaaaatctaacactgcattcaagggccaaatctctattggtttcatgtttttgcatatatcatttatggtcatctttttggcgtgtggaatatttgatgtgcactggttcttgtttaagcctgtgaaatgaaaggtaaaatttcaataatattaccaatcattagacaatgaagtacaaatatgcggtctatgtaagtagtctcttttgtaaggttggccagctatgtactatataaacaaaaaaggaaatagatgtaatttagaaaaaaa

SEQ ID NO: 18663 - DNA, 346 bp, Zea Mays
gtttagtagcattctaaagtgtttgggaatcccggggtgttatagatttggggctgcattggttgcacgcttgtgtgctgcatcgtgtctatgtctgtgcatggagatagatgctcctacttgaattgtgtggagtctgttaagtagcaccatagcaggttcgtgtgcatagccgtagagacatgcaaaggcgtcagttcactgggtctttaggttcgcgtgttggtgcatgcatgaattacggcatgcattgctagccagcaactgccgtagcctatttaaatctttgtaagaaacacatgcaagaaaatagcagaactagcgtgtgtgcgctattgcatttcca

SEQ ID NO: 18664 - DNA, 391 bp, Zea Mays
gggatttagtggatgtttgcgtaagacctttgtaacaaagttgtagttggtacattggacaacaactttgttgtagatgattgagtgagttgccacacaaagatttgagaacaaagccctgcaagttgaaccgtcagacagcctgaagaagatatcgatgatacaatgactgaatcagatcgccaggttcagtgcaccaccgccggtgatcccgccctgcgatccttgtcggcgctacgattcgtgcgctctggcgtgcggataacggtcgccggtgaaaagatcttgcgcggggatgaagtcggggcacgattaccgcctagtcgtcgtacccacttgcgctgcgacgtggccggacggtcctcgccatggagatcgccgttcaccgcga

SEQ ID NO: 18665 - DNA, 892 bp, Zea Mays
cttatactgggtcactccaattttgtatcgacaataacatgcaatgaagtttatgagtatccatatgcttgtaacaccacaggggggatgctacagccagctccaagtattttgaaattagttgatttttctttcatggaagaaaataaggcagaaattgctattgcagaaaagagaagagttgaaaccatcagattactaagggtactgtatgatattaagagcagacaacagaataatagccaattgagtggatgaagaaaattagttttcttgcttttgtctgtttatggtgcaacccttagtgaaacagatttggagttatttcaccttatgaatgagatatagtcacccgtgtgccaaaccattactgaagttgatcatctgtggggagcttctgctctaaaatttagagaagaactgaaactagatttttcaaaatcagatacgcgtaacacagagaatgctgaaattactaaaaggagaagggtgctctttcgggagaacatacctgttgattccaagctctgtgcaaagacatctttgctatattgctataaaagatctacaagggcttctgttttctcactggaacaacttcaatgggataactttgctgatagttttgaggtaatttctggaataatagtgtcaactgaagtttgggtattattctaggttttgtggtttcacaataatgttatttaattgtaccttgttgatctatcttcatctgattctggttggcaggtaacatctcaaaaaatggatgttcaggtttacgatcctttttttatcttgcgattctcaattcatactcttcacatgggttacattgaacctgctcaatttgcccgattagggcttcttgcaatcacacttgttagtatag

SEQ ID NO: 18666 - DNA, 649 bp, Zea Mays
cacagttgagctacgacctactagcctgccaccctgtcagcgtcctccgtttccgtctctcttttccacgccgccccatcatcatcatcaccggcacggccattgctggtgccgcccgtcagttttgctatgttttttttatgttcagaatatttgcaaaatctgttgttcgttaaacacttaactatagtagagaagagagataaagagtttgtcaccaaccaacctgccctataataatctcacacgtggatcacaaaaaggaaaaaagaaacacgatggagactcttccgttccacatggccgggccaccgcaaatcgccctacggttggaccacatgggccgctccaccgcaaattcaccaggcccacccagctctacggctggatcctacatggccattcttccctctcggcgcagcgccgccaccaccaccaccactagcagccttcttatttatatatatactgggcttcttcccgccggcccagccaactgctacccattcgcgccgctgtgtcccaagtcccaaccgtgccccaccgagccactcttccagtttcccccgcgcgccaacccgccaaaaaggagggaggggaacccgggaaggaggcccgcagccagagccgccgccgttccgtatccgtc

SEQ ID NO: 18667 - DNA, 297 bp, Zea Mays
gtgtctttgaagtactagcaatttgttttttacatttactccaaggaaaacattcctagccatctagtagttatgattatgaaaaacatagacaaagcctgagtcatccagaggtgtgcaagaaaactgccagtttaattggtgtgcaaggaaactgccagtttattagggtttaatggctttgttggtcatgtgaataagtttaatgtgatcattttaatgcagcattaggtttagcttacttccattgaatcaacactcctgccactacttgttaactggcttgtgtgattagag

SEQ ID NO: 18668 - DNA, 474 bp, Zea Mays
aatcttgtgaattcctgtgaaatccagtgcaaccatgttgtgaaatgtgttcccctgtattccttgagtactcctgcaggttctcagctcctaaggtagggtttcacaacctaaatcgactcaatctcccaaaacctaattcaccgcacgccaagtgttcggtgaaatgcccaaaccagccaaaaatgctccaattgaacccaaatttttcaggcaccttcaccacacttctagtaacatatttgccaaatttcacaccaatccgagattcttggcttcaatttcactcaattccccgttttgagcgatcgttttcgagccaagtgcccaaatctctttttcttcgcctaaattcaaaccaagcacacacttcactcatatacacctatacaaacctattcgtgaagtatcggctcaattccatgtcatttcgtgcctcaattcaaattccaaacctcctatggcactatttat

SEQ ID NO: 18669 - DNA, 693 bp, Zea Mays
gaagcccacaagacgaagatggcccacctgctgggcccatgcccatagtccaggatctcaagcgggtagatgtattagtgtaaataagtgcgggacagtactatactataattaccctattgcacaacatatttcgggaatgtaatacataactaggggtacaattgtatttagacctgcgtccccctgcttaccctataaatacccccgctcgaatcccaacacgggcgcaattgacaagacattggaactttgagccatctgttttgtcatgccacatgtctctcctgttcttgagtgcttgggcccacatctccaatcctaacattaggtgcccatcatgttgtgctatgaatacaaaccccacgatggctcccaagaaagtgaacgttagggccaacttctcccctaagacgaggtcgtgaaggcaaccatcatcgccaatgctaaaaaagccaaggtcactttccccgacaaaattccacccccacggtaaagaccccccctcatcattaatgggaagtaaggccaaactagccaatatcctcaacacaaagacccacctaccccgaagggtagcgtccatacatgcaactcagagacctcgagccatgtccccttcaatccacaatccatgcctaccaagccaaaatctatcctagcctaacaagaaacatgcacccagcgcaaaag

SEQ ID NO: 18670 - DNA, 539 bp, Zea Mays
tcaagaaacacgggaacaccattggggcaccgagagggagtagtagtaacgagtaaacaaaaagtagtgggggggtgcacgtccagcaagtcgaatgacattttgtgctcaacattttgcaggatcaatcaacgacggcggcggcaaaaaacggagagcggatctagcgtatctccgctaatcacttgattaccggccaaaggacgatacggtccaatacaaatcattcatccactaggccattaataattagacaaacaaagcacctgtgttaacgtgtggcaagcaagcaagcaagtgggaggatttatatgttgttattataagtggcggcatcatcattatagtatgtacacgatgcggtgccatgcacctggactactagtacgcttggggaatggggatgggtgcaacggtagaggaaggtctggctggagtcggtgtgcagtgcatgcatccggcccgggtctgggtgctcggtgggtggggtaggcggctgacagggagaggcggcggctaggttcgctgcacgcgcggag

SEQ ID NO: 18671 - DNA, 481 bp, Zea Mays
gtgagggaccgatttgagtttgaaccctaatctagtgccttcttgttccgtgtttgtagccttgagggaaggatctggtgctccagctttggtgagttgctaatcttgtgcttgtccttgtgatctttgtttgtgctccctaatctaatgcctttttgttctgtgtttgtagccatgagggaccgatctagtgctccggctttggtaagttcttaatctggtgcttgttcttgtgatctgtgcttgtgatatgtgtttgaaccctaatctagggccttcttgttatgtgtttgtagccatgagggactgatatagtgccccgactttggtatgttcttaatttggtgcttgttcatgtgatctgtgcttgtgatctgtgttcgaaccttaatctagtgccttcttgttctgtgtttgtagccgtgagggaccgatctagtgctcggggtttggtaagttcttaatctagtgcttgtgatct

SEQ ID NO: 18672 - DNA, 334 bp, Zea Mays
tagctctttaatggcttcaaaggcttctttttctgtaataggtaagtccagatcctccaaattatgagagggcagccccaggtagttaagattaatagtgacagttctatccagtcttgttcctaacaagcttctgtagaagttatccaccagcatggctttgtcagcatgatcagtaaatacattatctccagagaccagttttgccacaaagttcttcttctttctatatctggcatgcatatggaatagtttggtgttagcatcaccctctctgagccagttgattcttgatctagtacgtgcaatggtgcgcttaaatgaggcaagggct

SEQ ID NO: 18673 - DNA, 566 bp, Zea Mays
gaaggaacgaccccggtggcggcctgaatttgccgtcggagcttcgtttctgccgtgaatgtgttgtgcatcgtgggtgacatcaccgcctcgtcaaatcttggtatggcgccccctatccaaatcacgagtaggtgaatttcattttgcgtgattcctcggggtggtttgctcgtcgggctcgcggttagcgcgacaccggtgagggaccgccgtactctaggcacaccaccgtactctgccgtcgagggtaggagtggtcctctgtgtcgtccaatcctagcgtgacggccaggattagaactacgcgtaccgattcgcactgcgcatctgaggcgtcgatgcagtgtcgggcggttaggatccagtcacgtgtacgataaacctggacttgatctcagatcccagggctccgtttgcgtaccggttcgggattaaactgatctaatctacaccgtccgcttacgatccaacggccgagatctgatagttcccctttgcagaaccatattaacaaacgaatccctggccaatgcaataatcaacccaccgtcctattgcatggt

SEQ ID NO: 18674 - DNA, 858 bp, Zea Mays
cgcttgttccgaatcctccgtcaatccttctatgttctctctcccatcctcacatcgtcgccgcctcgtactgcaccccatccccttctctctcgtagactcacgaggccgtagtccaccccctgccgtggtgggatatgttcgacctactgtcatccctgttgtccatgtcctcgaccccgtcaacgacacccgtgaactccacgacatcctctggcgcttgggtggaactccaattcctgtacccctgccctgcccggcacaaatcgtctatatatgaaagcgggttcaaaacgggctctatcacgttgtccatgtcatcttatttaatattcatcgtccgatcatatagcaacggtaggcgtaaacgcgtctctctagctgcagctggcgtacgcatccgctgctcctagaagcttcgcattacggctgttagagtttcttgcgtttcaatcccccctcatcgattattttggatctcaggtatcccgatctcgcggcttcgtaaaagtggtatcccgaaggtgccaattagattcctgttattataacaatctatcttttgtagttttggtattgttctcgtcttaacccggcatacacaactatctacaggtaacgggtcgcagtgatctcgcgtgtggacaaatatgccccttgtgttacggtgaagagctcaagtcggtttgtttgaaacggatcggacttcctttcccctcgtcttgttctgttgctttccccgttgaaatgtagtcgcaggcaggtgtgctggaatgaatgtactaatactgattttacgataataaagtatgtcatctttgaacttaacataacaatacttttattaatacttttggc

SEQ ID NO: 18675 - DNA, 334 bp, Zea Mays
gggcgcgagctagggaaagggaagcagaaaacgggcattggcgaggtcgagggcatgccttttatagtgagacgaagggagcccggacgtcgtggggaagagaaacagagatgtcgccggtgaagacgttgtaacaaacaatggtgagagaaactgtcggcatttatggagggagcaggaacatatggatttggttagtgggaggaaagagcaggaaaatggtggctaccgcttcattcggttaggtggaggagctgctgacactaatataggagagaacaagaggaggattagagacgaattaaccacggattgaattaccaattgaagcgtc

SEQ ID NO: 18676 - DNA, 566 bp, Zea Mays
cccccacatccgctcgccacagcgccgacaccttcgagcccgtgcccgccccgatctcaacccttcgcgcttctcttcatgctcaagcggcggctctcaccagcatccgggcaaccgtcaccgatgtccttgcgccggactccactcagtacccccggtggcgcgatcaggtcttgcagaccctccaccggtacgccctcgccgaccacgtcctctcagcggtctctgacctgttagatgattggcttctgatggatgaggtggtgctctcctggattcatggcaccctcacggccgaacttcaggacatcgtttgcgtaccggacgacactgctcaccggatttggggtgcccttgaggctcagttcctcggtcaccgccagactcgtattctgtaccttgagaccgcctttcgtcggtttgctcaggggcgatctctctgtggacgagtactaccgtcagatgaagacgatggcagacactatttgcaccctcgggccccccatcaccgacaagtgcctcgtgctcaacctcctccgtggcttgagccctcgcttcgatcgtgt

SEQ ID NO: 18677 - DNA, 625 bp, Zea Mays
ccttggaactttggtggtcgaatcagctgagcgaagatgtggcagagatagtgagcatatggtagctgtcgccgggcacgaagaccatccagtacggtgtcctcgatctcacaaatgaggaagtcaacaacatcaaactctgagtgagagaccagggcaccaagtagccagagctagatatgagtggcagcctccctgtaacccatccacggcagaagcgtccgtctcatgagctaatataaaaacttggccgctgtagtgaaatctgccggagaacgtcacgacccatctgagaagggcagtcggaacaaagccgcgacgtgagctgtaccaggagcaactccgccatgagggcgacgaggaggattagaggtgctgtagcacaagctgtgaagacgagtcgatgattcgttgaatccaaacagctggtgaatctggctggcatgaagtgtaacatcctctcgctcaaagcggaacctcatccactggtgattagggtcgatccatacaaaagcatagaaaaatcggacccattcctcaacatatctgccactggtagtcaaaagagtgagaagtccaggcagatatgagaggtgtacctcagagtcagcatcgacggctagca

SEQ ID NO: 18678 - DNA, 786 bp, Zea Mays
ccacgacccgggtgcaggtaagaaaccaccccgatattacccttattccctagaacgcgtagaaccaagaatcatagctcacgggtttgattagccaaggtaatgcgtcgctggagtggccgtgctaccttcgggccgccgatggtgaggtcatggcgtttcagtgccctaactccgagtaatgtcgacccggacaaactcagtagagagctagctacgtatagggtcaattttccattaatttagcgtgcaggatcgccgatgacctggctccggccatgtccgccgtcgtagccggcggcgttgccgccgtgctctgggtggggagaagggggtagattatggagcgtcgatctcataacggacgatcgggatcaatactctgtgtaccgattcgcgccgcgtaatctgtggcgtcgatccggtattggacagttaggatctagtcgcgtgtacgttgaacctggacccttgatcacggatccgaaggccccgtttgcgtaccgattcgggataaaaccgatctaatccgcaccgtcagcttgtgatccaacggccgagatctgactgtaccccttcgcgggtcaacattgctaaagagcccctacgcttatcagaaaacaacccgccatccactcatactgtgctctgtgtcttagaaaacttacactgagaaccctgtgcttaccagaaattgacgcccagttcagagcccgtttaaaatgtgcaaatgaattagtaaatgtatttttaatacaagaataattgctagaacttggaaaattc

SEQ ID NO: 18679 - DNA, 934 bp, Zea Mays
cgcggagtggacggtcctcgccgcaacgacctccgcgaagttcgctcggccgtttggggagttgaccctataaaagcctgcgctcggtgccccgtggcccccaccaagccatccgaaatcgcgcgaccactgccgcctccgaaatcctgctgccattgttgccgtgtgaagaaccttcgccgccatgccaacccgcgcggggccagccaatctgccgtcggagctatccccggtaagatacctagtcagctcgctttaaacctcgcgtcgatatgcacgcttcctggctcgatttcgctcgctgtagctcggagtgcgccacacgccgacgtacctccgccgcggctcatgggcaggccaccgtccgtcgccagagtgctgcgtggttcgactgtcggtaagaagtccctaatcggtttcccctatgtctttgctacgtgctgcgcacctcgaaacggggtttggtgcagggaggcgggataacgttgtcgccagccatggctccgtcgtgccttcgcgttctgttgtcggtcgggcgccgtggtgagagagaggggattggggggagaatggtgaagggcttgggctgttggatcatacacggacggccccgatctaaccgcgcatacccttcgctcaatagaatttgaaccgtagatcacgaattgggcggctcagatcggatctcgtgctccaacctgcggatcgattgtgggccgtggatcttagatccaatggccgttggcgcgtaccggttcacttcacctgagatctaatctgggccgatcagtggcgatcggacggttagatctctccgatacccctttgatcacccatttgacacataagccctcaggaaatttggaaaacaacccgtcgtccaatgcgtgggaaacctgtgtctgggctattttgcgccagagtccctgccctt

SEQ ID NO: 18680 - DNA, 907 bp, Zea Mays
gaaggacaagtccgaggctggcccacgcgaccaccactctggtcggcgcaagggcaagcgggagcacacctcttgcaagcacaagtccagggggaagtacctccagaaggccaaggtcaaaaagcatgccttcctcgcctccctgagcgacctcgaccacgactccaacgagtcggcctcctcttcgagcgacgaggagctcgagagacacgttgaggacaagctcaacgggttgtgcttcatcgtcgacaccgtaggaggtctttacaccatggcccatggtgattatgcagttggtggcgacagcaatgacatcagcgacgactctgcttttgaggtatcaaattccgcccactgaggtagaagagttgaacattgctttggcaaattagtacaagttgcttaggcttgctgcttgtgagaggaaagagtttaaatccaagtttgagtccgctagagcttcagttgtggtgtccgacaagactaaatgtgatgggtttgcccttcacatgtcgaacatcgccactttgcagaccaagtatgccaccctgctagatgagtgcggtgagcttcaatctaggtctagcttgttgggcgcatgtcagacttgtcctagcttgcagactgagctagcggagaagaacgctaggatagcctcgcttgagaaggctagctcagtgagtgcatctacacctatgcagtgtgcactctatgagggtttgtagtctgctcttgagtcctacagacatgacggatcagacaaaacgtgtccaacatctcggggctcaaaagaagcaacaaaagctgagtgagcaaagtgggacatctgctgatacctggagcgagtgactcactcattaagctcaccaatcatttgttgaggagggtgatcacgctggatatgtcg

SEQ ID NO: 18681 - DNA, 434 bp, Zea Mays
atttcttcttctccctaatagtattctcaagtgacgttatcctttaaaatagcactctgaatcattttaatcattttattttcttatttctcatatctaaatagagcatactatgaatgaatcggagttaaatagttgtaagtaaagagttgcagtcaagtgatagtggaaagtaaagaatcggagtcaaataattgtaagtaaagagttgcagtcaagtgatagtggtaagtaaagaatcagagtcaatcacaattgcaggagatctgctaggcaagcaactcacgaggaggcagttctgaagatgacgacattgggagctgttcatcggggcaaaggaaatggaggctaggatggggaggtaggattctgattcacaccctctttctataaatttctggatttattcacgtacatggatgagttgaaaggtg

SEQ ID NO: 18682 - DNA, 688 bp, Zea Mays
agaccggccgaacggggccatgaccggcgctcccgagcggcggacaccaaatcggacgtaccccgagcatttcccctaagttaattgcacagttggtgagctatcaagctctgtccgcgtgaaccgaatgggtggcggacaattggatgtgttcccggtgattggtggtctctcagttcgaattggtgacacggtaagcatcacagagctatgagagtgctcaaatgaggaagcaggggacagggactgaccggaaaggggctggcggcggtgaagctattcttcgctgtgcggcggaccaatttggggaaattcaaaattcgtacgccctggtgaacaattgagggtgggattggagctctagtttcgtgatgatgtagcgcagctaaccgtgggctcaatttataggcagcttagacggtggccgggaatttgaagaaggacgcgcggcggtcggacgtagaagaaggcactggcgcacgtgaatccgtggctaacgtcgtggcaacctcaccggcgacgatgggacggccccagagagtcacggcgacatggtgtaaaggcagagccacgcggcgggcaacgacgaaggcttgacgacggtgagcccctttatccacgagcggtgagcaaggggaggggtatcgcggctagccggagtggagtccagctcaccggcggcgaagat

SEQ ID NO: 18683 - DNA, 593 bp, Zea Mays
tcggcagcgacttaaggcggtgcaacatgctcacgcttacttaactaggggtgaccactatgccctactgacggagcaatcggcttaagtcggcagcgacttaaagcggtgcaacatgctcacgcttacttaactcggggtgaccactatgccctactaacggagcaatcgacttaagttggcagcgacttaaggcggtgcaacatgctcacgcttacttaactaggggtgaccactatgccctactaacgtagcaatcgacttaagccgacagcgacttaaggcggtgcaacatgctcacgcttacttaactaggggtgaccactatgccctactgacagagcaatcggcttaagtcggcagcgacttaaagcggtgcaacatgctcacgcttacttaactcggggtgaccactatgccctactaatggagcaatcgactaaagtcagtggcgatttaagccggtgcaacatgctcgtgcctatgcaattcagggtgaccactacgccctattaacaaaaataatcgacttaagtcagcagcgacttaaggcgatctgacgtaattatgattactcatacagggatgacttc

SEQ ID NO: 18684 - DNA, 613 bp, Zea Mays
ctctgcgcaagtattcccgtgactcaggcgaatccccatgcggtcggcgggttctaattcgattaaacgcaggggctcttatgcaagattctaaggccgaaggggtaccgtgaactactggccgtcacgcgtccagattaaatcaacaaacgcgcgaaccggtacgccatgggatccacacgatctaagatcaacggtcaccatttaatgaatatagagataagcgcctatcgtccgatttgaaatcgacggcccgaacgaagggggtatcactgatctaatcagaatcgttcggcagtaaatcaacgaccatgggtgcatcttctcctccgctggccacacacggcggcgctctggcccaacggcggagccattgccgccaacagtggttgtgcgccaccgtcaccccaaattctgattgaaaagagcaacacgtatggcagatgatgacgaattgtttggtggatcccataccttgagtcgagacggcaggggccccaatcacgtaccgcagcggcacccaacgtgcctaggaaattgcatagaccgcggatggagttgagaggtggcagccagggactcctacactgcggctgcccaaccaacactcccc

SEQ ID NO: 18685 - DNA, 1407 bp, Zea Mays
tgaaggtgagaagtagaaggtctaggtcgaggcctctaaggttgcctcagagaagcctgctggcattgcaaagacccctaccactgaagaacatgtacgagctgttgttgaagagtcttgttctgaacgctcagaaaattgaggtaatgacaaaacaaacatcatggtatttttaagtcctttcggggtcgaccttgttaactttgattctatgtcgaagtaggtcgagaaaaagcccgcctaggaggatacatcaggcgacaagctcaaagaggcattgcctagcctcccctgcatagtgaatccaatggatgcgatctttggagatttatttgaggagaaaagcaacaaagccattaagacccctgccaaagaaaaagaggatgttggttgtgctaggctatgtgcctctccctgttagccaagtcgagcctttgtgatcgtggtttatctctttctccctctttcagtcttctgatcgaggataaggagggtgagttgagttaggagaatggactatttgtgggtacttggtgatgtaacaaaatttgttgttgttgtgggtccctttttcttcctaattggtcgggttttgcgccatcgtcgcctattttcatccttgtattgcccctacatcaccgtcgactacgtcgttgtgcgcctctctcacatggtatacctggaccgttcatgctcttcgtcatcttctttaagcaccactgttgcaacactctagcaccaccatgactccttgcgcaatgcagatctcaccactgccactctgggtccctagatgtgtcaaccatctacttctttgacttcgtccatcacaatctcgttgccagtgtcgtcctctgtcctcgtctacttcatccacaccgacaaccattggtgcattgacacatgcttcctcgttgttcttctacacattgcaactatcgcggaggccttctctgctagtcactttagacactgacgtatggttggggtcctctacctagtatgtcttttgctagcaacactggtgcgtaccttcatccccggtgtgtttttgggcttagctagtaaacctcacacatgcctcagccacgttgattcgacaatgtcgacttcgccatcgaccttctccattgactgccttgactgcatcaccatctttgtctatggtgcttccttctattcgccaccatcaccacaacacatcaagcacacgacttgtgtggctcctacttcttagtgacctcgatagctttcatcgaccacaactatcctttgcaagattatcgaccacaactgttcatccttgtactaggctacctcaacatcgacacagagaactatcgtctacatcagcttctcgtcggtttcttctccaagtcgttgcatctgcactccgacaacgtcacg

SEQ ID NO: 18686 - DNA, 414 bp, Zea Mays
tcctcgagcaaaggctgcactcgtaagagatcctcgactcgcccgagggcccccttcaccgaaaggcaaattccgcccgcccgagctcgtctcggacaggaggacagccccgagcccagcctcagccaaaggtcacgagaaccgtggagatgtgcgaattaaatgcgacaattcagatatctactccattgacaccgcaatcaaacagggaatgatggtaccgcagtcccgtctactttctccgactatgatgatgcacacctgcgaataacagacactgctcccccactctgtccactgttctcgaacaactccggatgagacatgcacacgtctgggtacagcctcaccctcgggagagaactccgtctcgtccaaagacggcttcagcctcgcccgagttcgaccttcggc

SEQ ID NO: 18687 - DNA, 500 bp, Zea Mays
cgcgagcagcagcagtgcgtaatgtatgtgtgagggaatattctgaacaagctgttatcagtcaatcatacaccagagaccagcagtccagcacacgctaaactcgatccactggcgcatgcatgcatggtgcggagtaatggagacagtgcggtgcaagtggcgagtgccggccttgatggtgagataaggatgccaaggttggacgccatgatttgagaggcagcaccagcagcaccatggctgtcttctcgtttcccatgtatctttctcacccgacgtgtagtaaggctcttgctgggccgaacgaggagggaggggagaggaggggccaccgccacaatgcccacccgtcatatctactagtgggagtggggcactagtgggaggctcgacggcgaccgggggtccctggtactgcacggctccggcgcccgcgggcgcgcgtgtggggggttgaagaaagagccgagatcaggggcggaactgcagggaatcat

SEQ ID NO: 18688 - DNA, 503 bp, Zea Mays
gtgggctgttttgttgaaccacgtagtgtgcaagcacgatggtcaatgttagcctggtgttgacgagttaggaaatctttttagcatcagctcccatgccgcatccaactccaatagctcttcccaccaggccttcttgttgttggctcccctatcggcatctccatgcagacctcaagggtgatggtgatgtacatccatgtctccctctagtgctcccacttattagtgaggtcgagcgagatgtacgacatctaaggattcagtcttaagaggagctatacgtagtacccctaatgagtttagactacttgatgccttgagtacaaataaatcgtagatcaatgccacataaggcctcaccccatgaatgcctcacaccaataagcaaaggccaataggtcgaagatggatttggtggtgaggtgcccgatctagaggccatagaactccaagacacgaaggaagaatcacgacgatgggaagttcaaccccaccattgt

SEQ ID NO: 18689 - DNA, 360 bp, Zea Mays
cttggatctcttggtgttgctaatacatgtggttttgctggtgggggtggaatggttcattgtggaattgtcgctggtggtattgttggggatgataggtgtgtgcaaatactcgttggctggttgatttctggccattcggtctttggtggccttggtttcggggcagtccctggtgggatgtgcggagtcttcgccgtgaaaaaggcagtagaaccttcgcggttgtggggctcggccttttcctctacctctagggttggtgccgcggccctgttgtgtggggtactcttggcgacgagcggtgtctccagtctgctgctggttggcgatagtgttcacttgttgctggttgcggtt

SEQ ID NO: 18690 - DNA, 344 bp, Zea Mays
tctcaatcatttctagccactcttggcaaggctccttgaactgcttctcaaacttaaagcgataaggcaatcgcacaagctcaagtgttttcttcgttccctttagcttcggcatgctaaattcactaaacgtcagagacgtcctcttagccaagtattcttgaactagatctctagtgctgatctattcagccaccaccctgaattctgatacagatagttggcatgctgaccctggcttcatgttgcacaaaggtctggtcattccgaagctcaaagccagcgggcacatgaccatcgtcatcagtttcccccttttcttttcatcggccttgatataaaac

SEQ ID NO: 18691 - DNA, 349 bp, Zea Mays
agaggaatcaataagtcatggataccaatttttcaaaaataaaatttgcctagaaactagtgttggaatcgtcaggactagaacgctagacctaggacgaaaggccttaggaatagtgggaaaaataggtggatatataagtaggccatataggccagtcttagaattgtagggatgccttagaagcactcctctgatcggtgaggatacgctctttccagcatgcatgcactataaaatatgaagaaactagaaactaaggaaatatgtatctaagtatgaatgtaacaaatagggttaataatgaataacgaaatgagtagatgaatctaattcaacccagctcctt

SEQ ID NO: 18692 - DNA, 565 bp, Zea Mays
taagtaagaatgcaagtcaatcatgaacagactgagtatctttgaagcccttttttttattgatgacatatttcccgttttacagagtacatcgtcgtcccgatagcttttgaaatacagctagggataaaacttcctgaggtgttctatattccaggagttcccaatttctgtgtcgtccatctgagtgagacgatatgatcccggccgagtgacttctgctactatgaatggtccttcccataagggcgatagcttgtgtcgtccctcccccgttagaattcggcggaggacgaggtctcctactgagaaggatcatagtcgcacggccttgtcgtgatagcgtctcagagtctgctggtaccgtgccgattgaattactgcgctcagccgctcttcttcgagtacatcgacatcttctagcctagttgcttcggcctctgctatgctttcaaagataaacctcggcgccccaaacttgagatcagcaggtagcactgcctctgaaccatagaccatgaagaaaggagtgtttccatgcagggctcgactaggttgagttctt

SEQ ID NO: 18693 - DNA, 399 bp, Zea Mays
ctcccagggctggcaatagattgtacacagtcaagttgggcataactgatcctgtttgccttctgacaaaaatggatgatttggcctggaagtggcatgcaagatttgggcatttaaatttcagagcacgtcgagatctagggaagaaaaagatggttgaaggtttgcctactgtagatcgtgtggaacaagtatgtgatggatgtaccctgggaaagcagcacaggtcaccattcccaaaggtctcatcttatagagccaaaaagggtttggaactgtttcatgctgatctgtgtggacaagtgagaccacaaacagtgggtggaaaatcctatttcctacttgtggtggatgatttcagtcgatacatgtggatagaattgataaaatctaaggatg

SEQ ID NO: 18694 - DNA, 417 bp, Zea Mays
cttgattcaggcacagtgctattgattgtgcgagcttcggactcctcccgagtgtcgcgctgttattgcgcctggagatgccctttctggatgctgattatgaaccaaggtaggcgccagtggtggcggtggtggtggtagctgagcccaatcagtttgagaatgacttgccaaagcaaccaacgtcatgggttgctggttgcccacatattcagggatatatggcgaatagcatgaagcagtatgcaagacctgcttcggctgattttgccgtgcttcggcttcggcgatctccttctggttttggatcgtgacttggcacgtccttgttgtgtgtcccttatcctccccacagaataagtagaacaatctcttgggtccagtgccaaaccttcctccgaagcttctcccccctct

SEQ ID NO: 18695 - DNA, 796 bp, Zea Mays
tctctgctagctcagtctgcaagctaggacaaacggtacatgcacccaataggatagacctagatctcaactcatcgtgctcatctagcaaggtggagtacttggtctgcaaagtggtgatgttcgacatgtgtagagcgcactcatcacattcagtctcgtcggacaccaaaactgaagctctagtagactcaagttacctaagcgtgctctcatacttggatctaaactctttcctctcacgagcaacctacctaagcaacttatcctgactagccaaagcagcgttaagctcttctatctcaatggtgagatcatcagtggaaggtagtacctcagaattagtgttgccactgatgtctttgtcatcgctggtgttgaccgcgtcctcaccaagtgccatgctgtagaagcctcccgtggtgtcagcaatgaagcacagcccgttcagcttatcctcaacccgcctctcaatctcctcgtcgctcgaggaagatatgacatcgtcggagtcatggtcgaggttgctgagggaggcgagaaaggcacgctccttgatctttgccttctgaaggtacttcttcttgagcgactccttgttgaatcctcccttggacttgtacttgccggaggtgtacttgccccttgcaccgaccaaagtgatgattgcgtgggccgcactccgctttgcccttcttggggcagctggcattgaagtggttaggatcgccatagttgtagcatccgtccttggacccgccaatgtcgtcggctcatacggttattgtggaaccac

SEQ ID NO: 18696 - DNA, 461 bp, Zea Mays
gaaatatggcacagaaaacaagagatgagacgatcgagaggtcaaacgacgtgaaaacggcgtttgaacgataaaaagtgccataggaggtttggaattcgaattgaggcacgaaatgacgtggaattgagccgatacttcacaaataggtttatataggcgaatatgagtgaagtgtgtgtttggtttgaatttaggcgaagaaaatgagatttgggcactcggctcggaaacgatcgctcaaaacggggaatttggtgaaattaaagcctggaatatcggatgggcgtgaaattttgcgaatatgttactggagatgttgtgaaggtgcctaaaaaatttgggttcaattggagcatttttggctggtttgggcatttcaccgagcacgtgacgtgcggagttctagggtttcggtgaaaagactatttggggtgggaaaaccctcccgaaggagctag

SEQ ID NO: 18697 - DNA, 476 bp, Zea Mays
gagcaggcagacattgaagaaggtgatattggtgaagaagagattgattataacaccgctatgccatcgaagcccagccatttggattttggaaagtcaattgtgtctgaagctgatatggctatgatgacgaagctaggctacttcaaagaagctgacaaggggttgattcgctttggtggggaagaaactatcccgaaactagaatgatgaagtggtggtctttaagagcttcttcaaagcagggctgagatttcctctgcacgagatgattggagatgtcttggaaaattttgagatttaccttcattagctgacccctaacgccattgttaggctcagcgtttacatctgggccctccaaagtcaaggggtggagccactcgccgaagccttctgccgagtacatgaacttcattatcaaacgaaggctagggaagacggactgcatgagaactttggctgctacaactttg

SEQ ID NO: 18698 - DNA, 510 bp, Zea Mays
aaaagtcttgcccatgaaagtatgtgatgcaccagaatcaaaaaggatgatggcgggatgattggcaatggaaaatgtacccatcatcacaggctctccttccagttggtagccacttgagtatagtagacttgcctagtttttcttgtatttttacctacctgagtgcttgccacatttcccttgccttgagatgtgctccagaagtctgttggaaattagatttagtttgctttggataggaacaatccttgatgaagtgtccagacttcccacagttaaagcagctgttagatgaactgggtaaggcggggaaatgagtaccaggggcactcggctgattgttttgagcaggggcaggagtgggacggataaaaactggttgaaaggataggcgggtggacaagaaaaagagtgatttgggttataaggatgaatcaccaacctcgaccgcttcttggatccttgagaggatccttcacccccttcacacccacatctttatctttc

SEQ ID NO: 18699 - DNA, 431 bp, Zea Mays
tctttttcattttttctaattgcttcatcagccatctcacgaccgcccttcatccacacatcggagtaaaatctaccacccaacgtagaggcctcatctgaagggtccttagtgtcttccaccgagaaaacaaactccggctgagctgcagccttaacatgctcacaaccggctttttctaaggtcgccacaacccctcgtgcgccagcgaacgcgcagaagtccccttgatcacttaagatttcgtcaaaggcctcgacctctccgctgatccactagacaatgtcgtcggggtccccgcggatgattttttgctcggaagagttggctcctacctttgtaaaactattccttagagttttggtgcattccaaggatatctcatagcatctttctttggaattgcggagttcttcgacattcttttctac

SEQ ID NO: 18700 - DNA, 352 bp, Zea Mays
gcgaggtgctgcttcaaggcgtcggagtcgcggcgagcctgctcagcagggtcgtcgacggagggggcgggggtcccgaccatactgcggcgcggagtcagcgcgtaagggcagcggaagggtgagaggggttggggagatcccggtctcgtgataccatgaaagagtagtatggctgggaatagttgattgataaattggaggagcccaaggctcatacatataggcaaggatatccctaataaaggaaagatctaatctatcaataggaaaggtctaatctaggggatccttgccaaacacagccaactaaccaaatacagagggggggaggcagccgccgcaccctgtt

SEQ ID NO: 18701 - DNA, 561 bp, Zea Mays
gacgcagttccgctatgagaaaggtactagacatctatcttatacccccttctggattgatccaaacaatccagcaggacgtttgaggaaagccccttccagctcccgtgcacatacttctgctggtcctgctgctgctgctgccggtgcctcgcgtccctcccctggccgcggatctcccacgccacgtggtcgtggtcatggtcgaggtcgtggccgagggatgggtgtccgcctggcccatgggattgcagcattcttttctatgtgccggaatatttctgcagatgtgcatgagctggcaaggcgtcaaagggagactgacgacaatcttcgtcgtcaagcttcctctatgggtatgccttttgcccctcgctcgcctgacgtgcctcttcatccgcctcctccagaaatcaaagagtggcaccagcaggcctacggggtgccttttatgtcagctgacgatgaagaagaagatgaagaatactttgatgatcgtgagcagtttgccccgcctccctaccagggggatccgggtcaatcctcttctcatccttcgcc

SEQ ID NO: 18702 - DNA, 491 bp, Zea Mays
cgccgaccggtggcctgtatgtccggaccggcggttctgagttctggttagggtggtttgacttgcgtaatttgctggtgatgaggcggggaaggctgccttgtctgtctgtacgtgggtgtgcgtgcgtgagaggctggttgatggaggacgccggcatggaaatggcatctgtttccttctcttttctctgcctcgattttcttgtttcccgctaaattagctcggtgtagctgccagtttaacctcctttgcagacgtgtgtaaaaagcgtactgtaatgtaacagcagaccagggacaggtcaaaaactcgaggtcagcgtgcgtgctcaactagtgccgacgaaggtgatgcgatcccatgctgtccagtccagtccttagctcgcatcccgggagtcgttggtgatcatcgcacgaccaaccccgcgttgtacattccttcctgggaaaaggtgacgacggacggagtgctgatgctctgcctct

SEQ ID NO: 18703 - DNA, 471 bp, Zea Mays
tggttgttttcgtctttgttattaggttgtagatggaatctagagttgttcttgccatggaggtcgtgtgtttttcttctttccatggaggacgtgcggtttttcttgtccggatacagtcgggcatgcagcatgcttatatgtgctccgtacattagctgagtaggtgtagtataagaagagccctttttttttcttctctttgatctgcttgttatttgtaagtgtagttgtgacaatcacattatacaaagaaaacgcacgtcatgtcagtgcagtgaaaaacaaacaaacatgaatctcttttcatatacatatatctgccgtcgtgaaaatcacaatcggtgaccatatggatgagctatttgctgggacatatataagctgtcaaattatataaactgaacgctcgattccaaccatcactgctattccaacctgaccaagccaacgttggagccccaaaagtgc

SEQ ID NO: 18704 - DNA, 924 bp, Zea Mays
gatcagatttacagctcagctcgccgccgatgatctccaccgtgattcgtgttgtcgccgtcttgatttgtgctcgggttgattggataacgctcggagcacgccgccgtggataagccccggccagtaaacaattccggccgccgtaccaggctcgccgcggtggaattagatgagatcgccggtgaccgtcgtctcgcggccttacgccacgtatcgggacacgtccgtcgtgtcgccgtgactcactataaccatctgatcatcgccagtgagcgctgccgcgattgttgccacgaatccactgcgccagtaatcctcccactctccggtcgccagcacttctcggccaaattgagcgccaccgctgttgcgctctataaattgaatcctcccagagctccgtaggatcatcacgcacccagccaccaagtattgtcctcgggtgatcaccagtgagctccaatttctaacttcccccaaaatggttcgaatacaccgcaagaacacctcaccgcggccagcttgttctaggttagttcaagctcctcaatcatttgtcctagcatccttaagttctcctcaagctcctcgatccctttaattgaactataccgccatagatcgtcgggaacgcattgttcctttgattctccgcactgtcaccgtggacagagcagggtagaccaccattcatgaaattaggttgggggaaatgcacgggtgaggttcaattcggtgtctgccactcgggaacgccagtccttgccccatttagccggtctatgagctcgccggagctctgccgcgctcgtcgtcgtcggggaccttagcgtggaagggaatagaacttggggtgtctctttagaaaccgtcagtgactcagggcaacagtaaacgaacccaccttgagttagccagaac

SEQ ID NO: 18705 - DNA, 294 bp, Zea Mays
gcttgtcccagggtggaagtggtggtggtggtggaggcaatggtgcttgctgttgtcgcaccactctctcttgtcgcatttcctccctcatttcttgcctttcctggtgcatctcttagcgttcctgtcgcatttacgcctgcatatctaccatagtgttggccatttgttgcagcatctgcatctgagctgcaaccaatggatcagttctggctggtggcagatttggaggattcatctctgcttgttgttgttgtctaagcaccctccggttgtgtggattgcaggtagatc

SEQ ID NO: 18706 - DNA, 343 bp, Zea Mays
gaaggagagagaggaagggaaaaggctcaccacggcgacgaacggagaggcgagctcggacgccggcaacgacgagggcgtggggcagctggcgtagtgggggtagagggagttggcgagacggcgctgctgcaccactcggcgagcgcactgatggaggtgggggtcgacgttctggcgtgggaagggagagacgaaggcggctggcaattttggagagagaggaggcgatgtgggcggggttggcggcgagagacgcggctggaggcggcgtggtgcaggcgagcgtctctgcgcggggacgggccaggggaaggaggagtgcgctgggtgggctgcgcgg

SEQ ID NO: 18707 - DNA, 823 bp, Zea Mays
tgccgacctcgaagcaaatagaatccctcctacccaactaggtccctcccgggaggcaggatctaggttcttcctaggctatctgcgtcgtcgacgctctgccacctccacgcggacggtccacgcactagcagagaggcctcaaggtcctgcacgccatgtaggccctagggaccgttagtatttggcccagaaaggcgccaacagagctaaaatgaagggaaagtgtccatgactcagggagttgctcccatgtagcgtcagcaacagattgatccatctagctcactaatacctctcaaactccacgattgagtcggtcgcgcagaatctttcccagctgaagtaacactcgcacgtgtttgatggggggtaagatgccatcgctattgccggttgtcattggaattttttgaggaacaccacatgaaagacattatggatagaggcacgtgaaggcagagcgagattgtaggcgacagtcccaatgcgctcaagcacttgaaaggggtcatagtacttggaagccagcttgacctgagcattattagttagacccattcgcctgcctagaactccactacgtgatgatgggtgtcgtaattgcttttcatgatctcctaggcatgcagaaatctgtcacaaatttcaaacagaaattcatcatggtcctggagctgttggtcaacagtggccaccttggattgcctttggtcataggagagcaatgctggtggattgcgaccgtagaccaccttgaatggtgtggaacgaagggtagtctggaaagagatgtagcagtattctgccaatggcagtcagc

SEQ ID NO: 18708 - DNA, 429 bp, Zea Mays
gggggttcatacggcttagatggggggatagacgtctagcggtagacgatgatggggtagacgttcttacctcaggacgacgacgcgacattgagaacgacgcaatggcgaggctatccatatgcaaaaaaagggggtgtagatgacattgtatagggtgtagaggagggggtagacaaacacgtgcgagggtagataaacatcatcttcgacgacgggctacgcgcaagcgaacgtgagtgcgcgctacaagaatgtggttttggggttgtcctctacgtgcggttttgcaaatcgcgtcatgcaggggccatgcgcaggggtagacgtgtgatgctcgtcttgacaagcgaggatatggcgcccacctcgcgcaatggctggtcggggtttgcgcaggggctatccgagggtgggacgaggttgctg

SEQ ID NO: 18709 - DNA, 595 bp, Zea Mays
ttagtgaaattaggttggggaaatggatcagggtaggtccaattcggtgacaggcgctcgggagcaccggtcttggccctctccggccggttttgctcgccggagctgagctctccgcatggaccgccgtcggggacttcaccatgcaaagggatagaagatgggggttcttagtgcaaacagtcagtgacttggttaaacagtaaaagaacctggtcgcagttagtctaaaccgcgggggcccctgtgcaaagtcgccagggcgcgggcgcgcgcgggcgcctttcctctctggactgggccgctgggctgaaaccagcccaacactgttcaacccttttcccttttctttttcaaaagaactttagaaatatgtagaaaattatagaaaaatgataaaattgtgaaactaattttactagacttgttattttccctagaatttaataaaaatagttttgtgatttttagtggaaataagaaattttagggtatttaaaatagttaaaagtattggttatggatttttagaaaaccaatggtaattccaaaaatgcccaaaatttttatatgagttcctcataatatttagaag

SEQ ID NO: 18710 - DNA, 770 bp, Zea Mays
cagcgagcttgattgttgctttgcctttgcgctttgcttgtttactcctactacaatagcctctcgccgccgctggctctgctacccgcgttcttcgctgcatctggttcttctcggactccgccgctccccccgcagacgcaagaaactgctggccatggagcccccatccgcccaggcgatgtccgcgactgacgacttccaggacaaggccgtcgacgagtggtaaggggactcgactgctccctccaaaccccgatccttctcgtttccgctttctcctttacgagttatatatgaccgacggcggtccgccgtttgtttggttgcagttgctcttgctgctacgattgctgctccagcatcctggacttcctgtgctgctcgtcctgatcgatcgatgcctgccctttcgacggccccgtggaatttctcagggaaccggaggccttaccgtggcccactgatcttggattctagatgccgtgggattcgtgtgttctttaggtccttcggtgacgatgtttgtaatccggattcgaatcatcggtaacagtaaaggaaacttgatagactgctgaacagccgagttatcttcaaccctgcggtgtgtttcctctgataaagcttttctgcgcgtttgcagatcgattcgctgtttggaattcttatgggtgacgtgcggtcgcacttgacgcacgcttcattgcagattttatttacaggagttcttttttttttccgcaaaccatttggttctgcgtttcttg

SEQ ID NO: 18711 - DNA, 329 bp, Zea Mays
cggagaaccagagagctggcggcaacatcgatcctggcagcaagcaccaccgccacctcgccagcagagaccaggggctcatcactgataacagaaaccatgactgcattagcgagatcctcctcgccactagccacctgatcgctccagtcaatgatacaaggaggaggcacatctccacgagcaggctccgaagcaggctctggttgctgaaccaccaccatagcagggtcggactgaccatcacccatggccccgccgataccgcggacgccggcgacgacgagaccgaccctccatgccgccgcgatccatggcagagagccccc

SEQ ID NO: 18712 - DNA, 3462 bp, Zea Mays
atgaagtgctcatgtgcaaagttgtgccggacagcttgaataactcttgccataaggtgctggtgaagatacggtcacgatccgagacgatggtttcaggtaggccatgaagacgatacaccgaatcaataaacacttgagctactttcagagctgtgaatggatgggaaagggcaatgaagtgactgaactttgagaatgtgtccactaccaccaaaatgcagtctgacttgccagacttgggtaagccttcaataaaatccatggagataacttgccaagcgtgtgatggaaccttgagtggctgtaataaaccagggtaccgagaccgatctggtttggcgcgggagcagatttcacatgaacggacaaaatcccgaacaacagacttcatggatggccaggcaaacaactgtttaacgcgtcgataagtaactgggaagccggaatggccaccaacagcactgtcgtggagcgaagatattaccttctgttggagagccaagttattgcccaaccatagtctgcctttgtacttcataagcccaagctgcagagtataattgcctgaggtgccagaacctgcagtcaactcagttaaaagcttcattgcctgggagtcttgttggtaacactgttgtatgtcagtcagccagcgcagagaactcacggtgatagcagcaaattcaacagaatcatgggggcgccgagagagagcatctgccgcgctattatcagagccttttttgtaaaccacctgatactggagtccaaggagcttggtgaagactttctgttgccatggagttttcaatttttgctcattgaggtgggagagactccgatgatcagtgtaaataatgaagggggcgtgttgaaggtatgatcgccagtggtcgacggcgagcaacacagcaagatactccttctcatacacagacaagcccatatgtttaattcccaacggtttgctgacaaaggcaagagggtgactgtcctgtagcaatacagcacctactccaaaaccagaagcatcagtttccagagcaaaaggcttgtcaaaattgggaagagccaacactggggcagcagataaagcttgctgcagccgagtgaaggcagaagcgtgttcagaagtccagacaaacactgagtttttcttgagtaagttggtgagaggcttagcaatcacaccgaaatttctaacgaacttccggtaatatccggccaaccccaaaaatccccgtaattccttacagttacgtggttgtggccaggaagatactgctgccacttttgcaggatctgtggcgacgccagctttgctaatcacatgcccaaggtaggcaatattttgttgagcccatgagcacttggacaatttaatctgccactggtcttgtttcaacagctgcaagacccactccaaatgaatgagatgattatcccaagtgtcgctgtacactaatatatcgtcgaaaaatacaaggacacacttgcgtaacaagggttgcaaggttttgttcatagctccttggaaggtggcgggtgcgcctgtgagtccgaatgccatcacacgaaattcaaagtgaccatgatgggtctggaatgctgttttatattgatcctgaggtgccatgcgtatttggtggaagccagctcggaggtccagagtagaaaaccacgcagcaccgtgtaattcatccaaaaactcgtcgatgacaggaacaggaaattttgttttggcagtcaaggcgttgagatgtcgataatccacacagaaacggtatgtattatctttcttgcgcaccaaaattactgaagaagcaaacagactcttactgtgttgaatgatatctgattctagcatctcagtgacttgtttctcaatctctgtcttgagggctggagcgtaccgataaggacgcatttgcacgggacgagcatctggaactagaggaatgtggtgatcacaatctcttgcgggcggaaggcctttaggtaattcaaacactgaagagtactggtccaataatgcttgtaagccggctggaagtgattggatcatgtcttgttcctttgttgagaagtcactgagactgcacagttggataaacgagccttgactgtctgatgtcttcaccccatagagcttgatgtaagaatttcccaccggaatagagacccacttgtccagccaatgcaccatcattgggctatttgttgccaaccaatccatgccaagcactacgtcgtactgagttaaatccaatacccggaatgtagcggtgaactggtaaccttgaagggaccacactgtgtcaaccaatgcagattcacaagtcatttgggcgccatttgccacacggaccagcaatggttgtggcaaggaagtaagattggaacattgatttgcaatggtggagctaataaatgaaattgagctgccggaatcaagcaggatgagcaccgagagaccacaaacttcgcccacaaaacgcattgttttcatttgaggcacctgagcaattgctgaatacgataactgaaagctgttgagctgaatgtcctcgagcttttcagaaagggcctcttcagacggttctggaaattgatcccaaagttcttccacgaggtgcagctggactgaatctgggcattgatgaccgcgggtataaggtgacccacacttgtagcataacccttgagccttccgatacacatagactgaagcaagacgatcaccactcccaggtggctgaacagagtgcagagacttgtgttcttgtggccgaacaggagttgtagcaccagccttgggtggagaaggtagaggtaggggacctctattgtaagaccttcccagtggtatataatccatcttcttatactccggcttcttggctgtggcgccgatttcctcctgcaattgcgcaagaacgtaggcagtatccaaatccttgtgtcgctgaatcatgaccatagatttaatgtcaaaacgaagaccatctagaaacctcatggtgtaatacagggggtctgacatggtttgataactatttaactgatcgaccagctgggcaaattgatccacatactcaactactgttccctgttgcttgatatgaaatagctggcgaactaatagagcgtgttgatccttcccaaaacgttctctcaacatgtggacaaagtcgacccacgaagcagtgctcaactggtgctctacagattgccaccagcgagcagctgctccagagaaatgcatggtggctaccttaatccaaactgaggaactcactgcatacataacaaaataatcctcacaacggcgctgccagagcttagggttttcgccgtcgaaacatgggaagttcaatctaggcagtttacccaaatcagaatgcagtggtgactcatgagctacatgttcagagctatcatgccatggatccatgtgcg

SEQ ID NO: 18713 - DNA, 371 bp, Zea Mays
ggaggacagggatggacgagcaccggctcgccacaagcgtacagtacaggtacaaatccatatggaaagcgggaaattctgctactactgctggtggtatacgtcgtttgacccttccccgtaccgatgcagagatcaccgagctgacgcattccatttgcgcgtcatgtatctcgaggatacatattcgtgtcaagtacacgtactgacgtacctgatgttctaccagcagtacgcttggctgaaagcgcagggttgtcgtcgatcgaatccatatcagattcatcttcacttcttcagacactagaggattttgattttgcgcagcgtcagcgaccatgcgttacatccatcttcagagtcatgacagt

SEQ ID NO: 18714 - DNA, 967 bp, Zea Mays
gaaaaagccacgacataattcccgtgaattctggggttggaaatgccagttcgcaagggctcatggccacctcagcaaaatctagagcgagcggcaagcaagtggtgggcacactagtggccaggaccctaatgcacaaagcgcgaagggcgtcaccatcttgtgtttgagtcctaggaatgtctgactcatggtttatcatgaagagaggcaacgagccatcgagtccagtcgaacgaagttggcaactatatgagtcggtgcctaggagtatgaggacagtctcctagcggaccccgtgcttggatcctgcgaaaggacccagggcctcactcagattacccgtttgcaactcaccaagcgccattgattgaccatcaaggaaagtgtggtctggctcacctccctacattgttgtggaaaggatgtgcgggggaggctaaaacaaaaagacaggatgactccccagacggatctccacatcgagcagaggctcgagagctcacctcgtacgggtatgtgaatgggaaaacgtcgcatgaatagcgcccctcggaccatgagagagcagaggaccaatcggggtctgagggacccaatgaccatgcacgttgtaggaactaacgggccacaaagcaagactataggagatcatgaattatttactccaccgacaccacctagagcatggagtttgtcacgacatcaaagctatttgttaggtgatccaagttcgctgaccttgtctcggcaagtaggacgacaacctcatttacgcagccacctcagtgaagctactcaatggtgaagcccgtcacgacgccatggtgactcccaaattccacagcctcacaaacacgcattggaatgtcaatgagatgcgacatttgattcctcccccatgcatgaatgaatcttccagcctgatctacgcataggaaaaaggccagcgctttaggcctaggac

SEQ ID NO: 18715 - DNA, 589 bp, Zea Mays
gtgaggagttagtgcaggagagtggagcattgttgatagagtttgtggttgaggactcactagagctagtggaaaactagatgttggataggcaagcttgatgaagtgatgctttgctagcccccctcccatctcccttgaagttgatatagtcgatgatggactagttgaccattgatgtcaagccatcgtccaccatcttgccccatgtctagcctcgctcttcatcgaacatgatgtcgtgcatgatgtgcatgtgctttatcgtaggtcgtggatgaggtatgccttgacgccatcaacatagtcgatgaagacccctagcatactctatccatcaagctagttggcatggttgagcttcttggcaaacaccaaacaacaaaacacatggaggtggttgactgctagcttgcgatcgtgcaagggctcatatgggttttgacatcaagggccttggtgggcaagcgattcagcaggtggatgacagtcatcactaccccgcctcggtagataattgatgtccctttatacttgaagaaggcgtgagtggtggctaccaccatctagttgtgatgattgatgacat

SEQ ID NO: 18716 - DNA, 391 bp, Zea Mays
tgattgtataaaagtgcaggggctctttagtgaaaccgacacgacgaaggggtatgagtaatcactggtcgtcagatcaaaagcccacgaccacgattagatctaattcccccgaaccgctggtcattagatcaaagagcgacgttggagatttaaataacggggatcgcttctcgcccgcccgattgaccatcaacggcccacaatcaaccctgaggtgacacacccaggagctgatctaagccgcatgttcaccatcccacggcccaccacgcttcatccgaagcagtaccctgacccctatcttggccccccctgagatcaacggtccgaaagatccttcttcaacctcccgtgcacaggcagtggtgtgggctggcaacgatggcgc

SEQ ID NO: 18717 - DNA, 502 bp, Zea Mays
cgccaggcatagctcgaggacccggccctggtggccatgcacgccgagattacctcggggacccgacctgcgacctggaccatcgtcgacggtatggtgctgttcgggggcaggctgtacatcccgccagcctcgccgctgctatcagagatactacgagcggtccatgaggacggccatgagggcgttcagcgcacctgcagcgtctccgacgtgattttcatttccctaacatgaaggagttggtgcaggactaggtgtggtcatgtgcagtatgccagcgatacaaatctgagcacctccacccggcaggcctcttgatgccactaccggtgccgcagggtgtgtggacggacgccgcgcttgactttgtggaggccttaccgggcgtccgcgggaagtcggtgatcctcacagtggtggatcgcctgagcaagtattgccacttcatcccgttggcacatccctactcggcagagtccgtcgcccaagcattcttcgc

SEQ ID NO: 18718 - DNA, 574 bp, Zea Mays
gctgagtgcgcagtatgccactatctggatggtggttctcccgcccctgtcaggatttaggacccttaccgctcaccgccccatggtcgcttcgactatggtaccccagactgcaggacccagatagatttggatccatagatcgacggagtcagtgtctgtaataatgattagtttagcatcttagtcttggtcagttttagttagagttagtttgcctatcatatgtttgatgcttgtcatgatgaacatgtaatgaagttggctctttgtaatgattgtcatcaaggtgtggctatcccctgcaacttggtgtagttatcaataaagtcaattatttagttgggtaatccctttatttccacttttctctttatttgagaggctgtcagtgaagatgatcatttgttcagtgctatgaagatttctgtatatcttttcttatgctgaaagactgcagagtcagatttgatgtgtgtgctttctacagatatctgagaacaggcgcagaggtgcaaggcgtgctcagccggaacaacaagcaccccaggaagaggcagctcagcagcagcag

SEQ ID NO: 18719 - DNA, 791 bp, Zea Mays
ctgccagtcagatccgacagctatttggattccctgagtcgacgactcgccttcacagcctctgctacggtacttctgatcctccacgtcgccctcacggtggtgtggctccagggacagctcacgtcgcggctctgttccgcccgcccttttcagatgggtcgcgacgttctccagcagactttactacagcagcgaagtacttatatgagctcgtcagacggacactcctgccaaggatgggatacagggaggctaccactcatattcagctttggctccttggtgccctggtatcccactctgagtttgatgttgtggacttcctgatctgtgagatcgaggacaccgttctggatgggattcgtgctcgtcggcagctaccttatgctcactacttgtgccacatctttgcgcagctgattcagccacctcgatttcagagcacccttgaggcctctcgccttgtatttggatcttaccgtcctgctcctgagattccagtgccagcttctgcttctgtgtttgactctcaggccgaggatgcagctctacgtcagtttgacactcagggtacagctgatgatgatgatgatgatgattttggggttcctcctccgcctccgcctcctatgcctccacgctcacatgatcatgaggctaggagttctagtgctgcccctcctcatcctcaggctatggaccctgcccttgcttcgattcttcagactctcacccagcagcagcagactctcacccagcagcaggctctcctggcagccgagcaggcc

SEQ ID NO: 18720 - DNA, 1180 bp, Zea Mays
ggggatgccatgtttttccacaaaactagtggctataaatgagtgggatgctcctgaatcaaaaagtacagtagcgggagtaaattcgacaagaaactcaccgagcactactcctggagcttgctgggcctcttgggcatcgacgtggttaactcgtgctctgccctggtactgggtcctgctctgctgactgttggaggggagtgccttggaggcaggtgtcgaggtaatcttggggccattcacctagttggagtaggtaggttcgggtgccttcaactagggacaattattcttgaagtgactggggtcttcgcagtgccaataggcatttgctggcggttggttgcttgcaaccgagggggcctgaaaggagctctgactctgctgactataacgtgacggagtgggtccagctggtctattgaagcttggtcccttgggtggaagcccgaaggatcgagctctctggtgatggtcttgctgctgagctcggagaacctagaatttcctcttgaggtgccctttttcttcctcttttgccctttccacttgtatggctttgttggagaggtgcgagaagttgaggaaatcttggctagcgaggatggtcttgagttctggtcttagccctttcaaaaaacgggccatcttcttggtttcggtgctgacatcgtcaggcgcgtaacgagccaacttgtgaatttgtgcacgtactcactgacagatcttccaccttgagttagttcccggaattcatcttccttgagttgaacgatcccctggggtatatggtgctcatggaaagccgtttcaaattctacccaggtagcgcccctaacggtcgcgctgaaggtatcccaccatgctagggccatcccagaaagttgatgagcagccaattgaacatgctgattttcggggcatctgatggcttccagtttcctcttgatcgtgtgcagccagtcgtcggcatcgaggggattgctggatccagcgaacgtgggaggcttgagtctcagaaattctctcatcctgtcctgtggtcttccaccacctgggcgttggttctccagacttctagtgaggacttcaatgagtcgggtttgattggctagaacttgggccaaatctagtggtagttccggaggtgcggggaggtgggtctcactcccttctc

SEQ ID NO: 18721 - DNA, 505 bp, Zea Mays
atcaactcataatgagttgatttgtaagtactgttactttcctttaatgaagaatgacgttgctttctctgtgccgattgttttgcttcgtaatcagttaatttctgccatgatattcattgcccatgatattctctatctgttatgtttgcagcataacttagagttcttgaatcattcctccgcccaccttatttgtgaagttgattctcttggaatagtaagtaaataactcgggcatcatatcgacgcttttagaggtagctgtcgagtgacttgaagacgacgtcagagttttagagataactgccgagcgactaaagacgacgtcggcgtgttagaggtaactgccgagcgactaaacacgatgtcggagttttagaggtaactgccgagcgactgaggacaacgtcggagttttagaggtaacgccgagtgacttgaagacgacgtcggagttttagagataactgtcgagcgactgaagacgacgtcggcgtgttag

SEQ ID NO: 18722 - DNA, 284 bp, Zea Mays
tggccactccgatctacccgtagacgggttcgttccatccccatccgacgatgtctaccactccgtgacatcttgccaacactatgcttcgacaccactcttcgacggcggtgctccacgaacctcaccctagccgaggtaccagacacttcacgcacttccaatcgtggcacagcctccaccgcggccacatccaacgcagcaaaattatccaaatcctcgtccgaagactccttagtccacaaaaatgggctcccaaactccccccatccgatgaccaagac

SEQ ID NO: 18723 - DNA, 667 bp, Zea Mays
aggccgacacgctctactcgagaaaggggggggaacctaagctctacacctataaaaagcacactggctagcaccgctactacaagaaaccatgaacacaatgacaaatgaagtgggatatagctatcaaaactagaatcgaaaagaagggcgaagaattaggagcaagagtaatgtatcacacataaatactgtcctcctagagaaattgttacaaagacgtagaaataaaaggaacatctaagcatcaacgggcgacactagtctccaagggccagtcagcaggtcttaacatcaactcggtgagtagtcgagcgtcagggcggacttgatcttcaatggcgtccaactccttattgctctggcctacggcgaaaccttccgcgatcacaacttcgtcgatctcatcaaaatgagagaccatctgccccagagccaagccgctcctgtggaaagcgccttggtgacgacacgctccacatggccaggtagctcccacagccaatcgaccaaaggcaccttgattggaggcaggggcaaaacgtgggcacacactttgccgatcaccagacgaaactcctagaactcattgctctcctcagagagcgtagccgccgccttggccatcacagtgatagcaccatcacaagcaagcgaaagctctcgc

SEQ ID NO: 18724 - DNA, 346 bp, Zea Mays
tctaatatgggtaacataccaaaacttagcactcaaggtttattttcaacatgtccatgtgaacttgattaggctaataaagggattttgggtctttcgtttgggtgaatttagaatgaggtggtcttggagtatttggcctacaattaagcatctttgtgtgagtttgtgctgttcatgggaggttttatttgattcctttggggattatggaactctgtattttgacatggggaagatttggattgagccatattgtttgaataatgattgtctaacatccatccttatcctctcctcctagttgcaggtacaaccgtgaataccgacatccctgttgtactca

SEQ ID NO: 18725 - DNA, 435 bp, Zea Mays
ctacccccataaccaaagctcctccctggacaaggatccgatatcctgcgccatctccagcctatgcaaaacctcacgactaagacccaactgggcattgacactacccacctatttatgaccccatgactgcaaacatttagctaatcttttaaacttcaggaaatcttctccaaggtacaataatcctgcaaaggtagattccacgaggcagccaccacctccaaaaaaccagggaacttttggccaaaaactctcaaagcgaaatcttctcttccccatgccccctctctaactctaagagttaggggacagtgatccgagatagcagtagcattactgtgaagagaacaatctggaaaaaatcctcctagtccgtagtgcagaaaacatggtccaatttcacaagagtaggcacttccctctgatttgacc

SEQ ID NO: 18726 - DNA, 734 bp, Zea Mays
ttaagatgcaaatggatctgtccgtacccttttgcatgctttaatttttttgatgagagaggaggggagagaaccccctactcgcttttgcatgttatctataaactatgtgaacattctatttctactgtgcaggaaaaaggaagcagcgaagaaacctatgcaaacaaggttatccaagctgctaaagaaccagggctacgtccttaccataatccatatccgagaggtaaccttctgtgatgttataataaacacctccatattattctacatagcgagccacaacagaaatttttttgacaacattttttcacattctattcgatattaaattagtttatgaggtaaataattccaaattggtaaaagatgagttcaacattggcccattcttctcacagctgcaggcattagccaacagacctacatcttgcatatgtatttctcttgcatctacttacctctatggatctagcatatggctgcatatatgactgattatgacactgatatatatgtttcgatttccgatgaaatgttaccataacttttttgtcggtcatattcattgttgctagaattctagcagaacaagcatgacaataagcttcgctgctgactctgcagatatccacctgcaatatagtgataaataatagaacatttgtgagatgtcgtggtgccctatcatgctttctttgctttccttcaaattcttcctatgatatggc

SEQ ID NO: 18727 - DNA, 627 bp, Zea Mays
gattatatcgagagtatatttattgatgtgacgagaagtttagaaaatgctagtttgcgtggaggatgaattattaagacatgagtgtcggagttcatatattagtggttacgatacgatgatcgaagtgtctcgagtgcacgccaccatatggttgtatgcgagacgaggttatgcacatgatgagtttagtaaaatccatcggtgtcactagtgttaagttgaggtttatttgcgcgtggaaagtaataatgtgtttaatacatagaactcttagtcgatgatagaaattgttttggcttatatagagaggtggtgacatgccaaagtagtcatcgcttcctctatatcttgagtcgggtcaatacgcgttttgtgttcatgaattgggaagtaagcgcatgatggtttcgagttagagattagtggtttacggttcgtatgatttggtcgatgtgtgaatatacatgtgaatatatatatgtttataaaaatgttgtggtgtatgttgtgccttagatagtgataataataggcaagccgatgtgtatgttatttagcgggctatgtcgttgctctagttagccgaagtgttagatgggttggttaagctcgtaatcacgatga

SEQ ID NO: 18728 - DNA, 413 bp, Zea Mays
gtggcactaagatgaaattgagctccatgtgagtctcaaaggtacgataatcattaagtgaaacacgatcaagaagaccctaaatgtactcctcttgagacagatagaagtccacaagtgtggtggcctcaatcccgaggaaataataaagaggaccgagatcagacataaaaaactgctcactcacgtgccctcatggaaatatactatggaccatcaccagtgataatcatatcgccaacataaagaagagcctatccacaagatgatgtgtgcacaaaaagacttggatcatgagcattagcataaaaaccagcagaagaaaaacactctaaccaagcccgaggatcctgcttgagggcataaagggagcatcaacagacatgtcgtcgcagctgacgggcgaactctgg

SEQ ID NO: 18729 - DNA, 1072 bp, Zea Mays
gtagtaaggggtaccctagtttcagggtaccgacagtggcccccgggcccacctcaggggaggatgcgagcctacaggtggggccaaagcttgtacttcgcctcaacatggcctgattggtgattggcgcgccgcttccgtgcgtctgctgacgtactcaccgtcaatccgccttcggtcatgccaactaccatattttttctcgcggctgacaggcccgcagcccccatgcctggtggtttcgtcgggccacgcacggggcgcctcgataccgctgcattggtttaaaaaattaccttctgtgttttgccgcgaccccaaggaggcgcactaccggcgcatgcggcgattcgctctctccgcacccgggatctggcactcacggagtatgacttgtgggcctgggcccccgtgtcatagactgggctgttgtctcttgcggcggagatgaagaggcgcgctacaacgtgcggcggttcgttccttctgcacccgaaatccaactcgcaaagtgtatgacttgtggacctgggcccccatgtcatagactgggctgcctggatctaggtgcccgtcacgcgtgatctcctgcggcgattgaggggcgcgcggaagggtttccttgagcgaggacactggtttccttgaaaaaaggttcacccccgcgtgcagtagttaccctttcacattctcttccaatcgattgcgcccttttgccttcgtgctgcttcgttccacgcccgcaccaccggctgtgccttttttccttcgagctcctcagttccacgcccgtgccgccgtgcacgccatgacttcactcagtcaccccgaccgcttccagtttgaggcggcgctcaacctagtgcacgacctgcttgggtggagcgtggcagcatttgccgcaaggatccacgccggcgcagctcccctcggcgatatcgccttcggggaatttgttctgtttgtctcctacattttctgtgggttggcgctgccaatctcgcctttcttcctgctgctgttggaggagttcgagctccagcttcagcaccttacgccccactccatcctc

SEQ ID NO: 18730 - DNA, 522 bp, Zea Mays
tggaattccggatcggtggttgggatccgaagctcgtggcagccgcgatctctggccctatagaacctggccgggtgcgccgtcgatacacaagaccgggcgtcatctcctccatccgtctcgccgcaagcctagaacagaaccgcgcggcgcccgggtccccagatccccttcacatcggtctctcgcctgcgtataaacttggtttcgcaaccactgccgctcacctccccaacgccataaccaagcaccgtagttgtcgttgtgcagaacctcatcgcgagctgagcgaagccgccatcgatgccccgtgctctgggcgctaatcgtgttccaggggatagacagagagggagtgtcaggtggccgccgtcggccacatcacgcgatgtcgcgggatagtccttggagtgctgttcggcgtgttcaccggagcactccgcacgtcctcagcacttacacgggcgacgccggtggccggagttgggttgattcctcgccgaagtcatgggtcgccgcaac

SEQ ID NO: 18731 - DNA, 694 bp, Zea Mays
cagaggaggtgatggctggagggactgcagcatgttcggtcgatcaatgatcttcaccgacacccggatagggtagacagttgaacggcgcagcatcccaccatcggtcgtgacaggatcaacaatttcaagcttaaactccctgggaatggagttcgggctggaacaccaggcggtaaccttgaacacctcacgctgccgctcacaatctgggtgaagatcaacaatccatcaccactcgttgaggagagcttgcacagttgccaattcccaagcatgggcagggatgctagacacttcaatctcaacttgaaaaggcagagacgccgccgcagatgagttaagaattctgctccatctcataacatggattttaattgtgggagacaaattcacaattcttccccatcaaaagcatgatccgccatttctaaacttggaaggataagaagaaaacttgcaggacccagtcgacacatagacagtgagtcatgtacaagctccagcctccatgcaaagctggccaaaatagcttcctcaactgcttcatgaatggccacagttacattgagaacaatggcacgtgcaagcacatctgccctctggttgaaacttggagaccataggatgatccgagaaggaatccatggtctgttgcttctatcaatatgtggctcctctgtgcagacaccgc

SEQ ID NO: 18732 - DNA, 646 bp, Zea Mays
tttggcgtccggggtcaagtgtgtgctcgtcggagtccaagaaccatggcagagaggcgccatcacgtggagcggagcccctgcgctgccatcctccggtaaaatcacctccgaatctccgccctcatcactaggttgtgtagccgtcctgcatacttgacctaggtagcgctcttgatgggaatcgttcatcggagggggggtgttgccgcggtgccgcaccgtaccatggcgggaccgagactcacgacaatctaaaggtgaaattgtctcccctctgttcgccatattctccgcttagtgtagcagctcgtcgtgtcacgaatcgggtcaccgaggcggggatggcactgctcgccggagcaccgcgccgccgtccctgggaacgcgttgctcggggctacgtcaggatagaagacggtgttctaaccgttagatctctatccgatggttaggatccgatctggacgcatcccttcgtgcacctaatctgaaccgttagattgattgtcgacgatcgtgatcgcgcagatgatactctcttcgggatcgatcgtgagtcgttggatgggatcgggcggtccagaacccttcttacctctttaaaaccaccaccgtcggatcgtgatcctagggttgtgagcgc

SEQ ID NO: 18733 - DNA, 318 bp, Zea Mays
gggtcttttggcttgattgtgtccgatgacatcttataaagtgcatttaggacatcactatacttgcggctaattgtttccaaagagtgaccaaatttatttctgatctgcctaaacgattgtggacccccacatgcccacaagaatatgccaagagcttccatagtactcacacccctacttggaagcagaccataattttgtaccaaagtgtcatgcaatcgtcgaaaaacagttcttcgcataccagtgcgttccttaaactttcttatgaggttagcatacccttcggcgtttaggaattgttgtggcctgttc

SEQ ID NO: 18734 - DNA, 301 bp, Zea Mays
gtgttccaaaatggtctccctcaccctttcaacacagacaacacaagtatatatagccaccctctccaaaactagccattatgggccaatggccccttttcagcgcacatgcggacggtctgcaattcaagcccggaccatccacacaagaatcccaatgcctatcaatggctataaaaatgtcagagcattcaaaaaagacttgcatacaatctgccccatgagcccggacggtccgcgataccaaaaactgagccaaaccgaagttctgatgactctgcacatttgctaaaatttgtac

SEQ ID NO: 18735 - DNA, 599 bp, Zea Mays
cccaatcatgccttgagcttggcaagagcatatgaaaggtgagctcaggcgctcgacagccaacccacataacccccaataagtcgcaacgaccataaattctagtgccagtgacaacccaacaaccaatgccaccagctgcacccaagacaacaccacatagaccgttcaagaaattgactcttggtgaaatggccaaaccgaggtgccaagggctttgctataattatgatgagaaatatgtccacggtcaccggtgtcctcgattgttttatctagaattaacggacttcgaggatgacacgactaaagaagaagataccccacctaaggatcctgaaccaatcttattgctacacgctttaagtcgcattagatctaaggacactatgtagattagagtataacttaaggactagcacgtcataacccttctggataccggatccacacataattttgtcgatcaagagactgccctatctctgcacctcgaattctgttcatgccgaggacgagttactgcagccaaggtgacaaggtcagttgcagaggcattgcaaacaatctccacatcttagtaggcctagaggtcttct

SEQ ID NO: 18736 - DNA, 781 bp, Zea Mays
gtcctcggtgttctggctaatctgaaatgagcataagcactgttttcgggagtcgatgacacttcgtagaaaggccctcgatcttctatctcttcacaggggaaggtcctcgacaacggcgcacgctgtggagctccggcgagcaccaagaccggccaaacggaacaagggctggttccaagctttggccgaaaccgaattcatgccccaaccattgattcccctaagttaattgcacaaatggctaccaaatgtccctggccacggacgcagcggaagtaatcaatagaaccgtgcgttcccagtgatctacggcggtttagttaaaactaaagggccgaggagtttgaggagagcttagggatgttagaacaagactagagacaacatgatcggacctgatttgcactgaccacggcaaagtgttcttgcggcttgtttgaaccgatttgggggaattgtaagattcgcgctcgttggggatcaactgagggtaattcttggtggcggggttcttgactaccctacggagctagtggcgcactcaatttataggcgcatcgagcgacggggaagaatttggccgaggggtgctggcggccggagaggggaggcgagctcagtacgaggaaaagtggctttcaccgtggcagtggctccggtgatcgccgggcatgcaaccggtgagtcacggcgatgcggtggcgaggtttggacacgcggcagacatagagacggcacaacggcggtgagcaaggggaggagtaccgcggctgacccg

SEQ ID NO: 18737 - DNA, 356 bp, Zea Mays
cagggatataaagtccgccaacatcctgcttgactattcgttccaagcacaggcatggctgacgaggactattattattcattaaataaagtagtagaatgctagctagctgctgctgctgtctcacggtcacggtctcacctctgcggtccgggccgtgttgagatgtggtgcgcaggttgcagatttcggcctggccaagctcaccaacgacacgaacacgcatgtctccactcgcatcatggggacgtttgggtgcgtccacgtcagtccagtattcattctcttccccggtccatgcatcttcagtcttagcttccgaaaccaaaccatacctgcagaggctagctggcgat

SEQ ID NO: 18738 - DNA, 492 bp, Zea Mays
cgcagatgatggtgggccagtagaaaccttggcgtatcacctttgccgctagggccctggggcctgcgtgggagccacaggtccccctgtggacttcgcgcaggatttgaacgccttcggtctcggtgacgcacttaagcatcggctgttgaccccctttttgtaaagttggccctcgatcaatgcgaagtcccggcttcggtggtggaggcgcttggcctcgttgctgtcgactgggtgatagtacccctgtaggtacagggttattggcgcccgctagtcttcggtcatgataagattgatcttgctggggtcctcgctgtcgttggttatttggagcccttcagggctgcggacggctggcgtgccgatgacgtgatagaacacgtcggagggtagggcttcacccctggcggctgccttggccaatgcgtcagcttcttcattcttggcccggtccacatgctgcaccgtgaatcccttgaattgttt

SEQ ID NO: 18739 - DNA, 659 bp, Zea Mays
gcgcataaaaattgaaaaaggcagggggcgtggtgtaagaattctaagactcagagacccctggcttggacggcgggttcaattaaaagaagtccgagggctcatctataaaattaccaggcagtcataatagtggacgaatctgagtcgctagatcaagaaccagtggccaagattacatcacgaaccggtatgtcgccatacccgctggatccgaagccaacgcctgagatccaaccacgccagtgcccactcccagccctcggatgcacgacttgcggcctagatttaaagtgctaaaagggtatatctacggtttaatcccagccgtccagttcaaatcgacggtagcaagttcatctaccacccctggcatcccaggacgacggcgtgagcacaccgtgcggcggcgccatagccgggtaccaccaccatcgcacacaaccgcccaaacttcagcccaaaagtgtacgctcgaagaggagatcacgtggagttaggttaagggtattataccggtgatagatcggtgcagagggccaacgacggagtttggcggctccgcgagggttcttgacaccggcgagcaattcatcgacgatgggcaagcgaatccaccccggaagtcggtccaacacacgcggcggggcccgctgatg

SEQ ID NO: 18740 - DNA, 1112 bp, Zea Mays
gcaggatctattgatactagctaacagaaagcatatgtttcatcacgtactaggctacttgttaactttaattcagccaaaataatgtaatagttgatgttctgttcatttatcgatgaagaagccacattacttccggaagcaaaccgctagctataagtgtgaccatggcaaataaatggttggccatttttcaatgacggtgtacaatataaaatcactagcacaatatgtggctgacaagaggacaacatgaccttcgcacctgcagagacaacctcacttctgcatttgcaacactgcagatatgtctgttgtctacacaaaacaaacaccatttatgagccattctgagcacaccagaaatttaaatctgagaatttttaacaaactgagaatttctaaatggacaaaacttaagtacaaacttatagaccctgcaaggttattgaaaaaagacctgatgtgcaagctagacgggcaaggtagtaaattatccatatcatttcatcaaaacaaagaatccaaaattcataccattgacaaatgagttgctagtgttcgcatgttcaaaggttgttgacaggtcgtcactgcaagggaacgggactgtcgaaaggggatctgaatgctcgtcaccaagggctgccagatgaggatggtctagtacataaccttccatgagaccatgaaaggatgcatctactcgtcgctgttgatccatcgggtgtgctggacgccgacggacgacacatgatacatttgctcgtagtcgcgtcatccttgcccctgtcgggccgggccaactgacctcggtggctgcatctcaaattcatcaggccgccgctgccgcaacctcaagccgcgaccaccgcacagaggacctccgactgggggagaggcttgtggaaaagggaaacacgcaagaatagtttgatggcgcgcaggagaagacgcaaggggagattgggggcgcatcacgaccgcgaagatatgcgtagctcgtcacgaaggattagcgtcgctaaaatttggggcagatttatggtatctgttggacctcagtttttatgtttcccttcctaaaaaacatattagcggtcagattaaca

SEQ ID NO: 18741 - DNA, 684 bp, Zea Mays
aaaggtttggagtttgcggtggatcatgtgttccctggagtggagcacagggaatgcatgcggcatcttgctggacactttgtgaagaagtttaaagggaaatcattaagtgacagcttatgggcagcatcattgactttttgtgtggaacaacacatggaccatttgagcaaaatatacattaagccaggtgtgcaaacatggttggcaaacaagaaggtgtgaacaaggagcaaattcaatgtattttgtaaagttcactatgtgaacaataatttggcagagtccttcaactcaatggttaagggggtcaaaggtcttcacatagttgatgtattggacaagataagacaaatgattatggtaaagtttgagttgcgcaaaagaattgcggaagaaagatttaaaaaccatgagatcatcccacttgtcatgaagactttgcatgcaaaaacaagaggtttgaggatgaccatcatgaaattcaagccttatgtggcagagatgattttatttgacaaagagaagacggagtggaggttttcagtggacttagagaagagaacttgtacatgtaggcaatggcaaatatgtggattgccttgcactcatgcactttgcttcataacttctctaagtccaccggcttcacatatagaccaatatgttgatgactactactca

SEQ ID NO: 18742 - DNA, 364 bp, Zea Mays
cccgagctccagctctcttcacaccagcttcggccacccctcttccccttccctgagctcaatcgagccagcgcgctgccctcttcctccgctccggtgagccctccctccctcctctggtggtctagagttcaattggtttggctcacgagtttcaccacttcaccacgaacacggcgcacccttccccttcacctatcacacatgtaggcctcgtcagtgacctcaccgccgcgggcgcccgccacctcaccgtggaccgactgttccaagcccccatcgcccaaattggcccctccaccatgacccctacccctacggccctacccatgctccgccacctccctaaccatctggaaccgga

SEQ ID NO: 18743 - DNA, 393 bp, Zea Mays
tcggagctatggcttcatcagacgaggtcagtgacgcctgaccaggggcggcgacaggcttctttgaaccttttccgtgcttcgaccgtcttctctttcttttgttgcggaggcttctatgagactacccctcagcagccatcctaggggaatcctccatcttcgcaacaacctctggtgtgttgatcttaacccacaccaaacgtcgcctatgggggacagcacactccgaggttgctgacgaggccccgcgctgctccgagaggcgctgccacacagacccccttgcttgttgtttttccaatctctgccacactgtcttcttcctctacacttctcggcggcctagacacctgacagcctgatgtccagtcttgaaacacttgaaacagc

SEQ ID NO: 18744 - DNA, 639 bp, Zea Mays
gccgggcagagaggctattcgcgcgcatggggaggtaggactcaccactgggatgccgcgccgaggcccgcccacaacacgatggggcaagaccaatagaccgcaccactggtgaaccgagctccaaagaacgccgagcacggaggtcagtgacacgacgacgacgaggatgaccatggagggggaaaaggtaagcgaggcacgactctgcagtacggaggggatttcagtgagcgattggccatggtcgagaccagacccgcacaaccaccaagcacggaaggatccccagcccacgatgacgtccccaacagctaaatcgatgatggtcaatcagtggtggcgtgggtatgcggtggcggcactcgactcactgtagaacacctccagcggcgcctggaaccccgcgaagcccctagaccgcgctcctagcccggaacctcgccattgacaccgacggcggtggtaaacacattaccacggcgggcgctgcgatgccgcactaggttccattgagggcgtgtcttactggatggatgagagggtagctccgccaccatttttatacccctggcatacggagtccgtgcaggagcagttggcaagatctcaggcggattctgctcctgtaaatgtggt

SEQ ID NO: 18745 - DNA, 568 bp, Zea Mays
cttggcacagcggcaccctgtgggcatcaccagcgccgcctaccaccgcgacatcaccggcactctgatcaggaatatgcgtgtgagtctccagccccttgttgatactctattatcccgacagtcccatcccaagcaaaatttctctcatcttcttccgcccaggtgagtctccagccccatgcgatgtgctaacgatcgggtattgagcgtgccaagcggcgatgcgcgtgtctagggctcacactcgttttcatgggttggtaagatcgtctaattcggaggtggtcaagggattggttggcgtcatcctggatttgacaggaagctctctcctctctatttctcttcccgtctagtctatgattgattcgacctgttgttttgggagaagttagagtagtcttcagtgcaggttgctgcatttttcagtatattgttctatgctgcaatttgagtggagctttggggcttctaggtcaattgatgtgtttgttccaagcggcgatgctgcatttttcaggaaatggattattgttctatgctgcaatttgagtggagctttggg

SEQ ID NO: 18746 - DNA, 524 bp, Zea Mays
gccatccggagatatgatccgataagcgctgctagagtatacatcttttacaatgtacgggccttcccatttaggttcaaatttgctttgcatcttatgagtaatattcataggccgaattaccgcgagaaccaaatccccttctttgaacgacctttttacgcgtttgtcaaaagctcgagacattctagcttggtatgcctctaagttttgcaacgcacgtagtcgtgtttcttcgaggttgtctagttcccttaggcgtaatttcactgactcgtcttcattgagcttttcttgaataacgactcttaaagaggcaatttgcacctccaacggcaggactgcttctcctccatataccagagagtaaggagtcattttggttggcgtccgagtcgtggttctatatgcccacaaggactcgagtaacttttcatgccaatgtcgcttattttgtgcaacgacctttttaagcaacttgcatagcaccttattgaatgcttctgcttgaccattagcagccg

SEQ ID NO: 18747 - DNA, 1256 bp, Zea Mays
cgggcgacctggacggaggagggagcttcggcgcgggattactgggtcgattggcggttgattctgttggatttccgcgtgccactgccattgccacgattctgttactgggtggggaggtcgatgagcgtgcgtgcacgtggttctaaatgctgttctggaacctcctaggaccaggggtttcagtacacttagccacgtttctagcctaatagcacaatttgtcgactagttctgcaaagtgcagtcacggcggcgtcgtattcttgttctgtgcgcatgcgtcgttatcttgtgctcggcttcggtgtgtgtgtgcattgttgttagggatattctaggggctgtgtttccacaaggtcgtctgaggaccagccgaggtttagtacatttccatcttttcaatggctcgactgtttttgcctgataccccagagttgccaacaagtagtacaaagtgcagtgaaggtggcatcattttttggttctgtatatatgtctgcgatggtatctgctgctcatgctctaactaggacatcatactgcatatgtacattgtgcaaaatgcgctaccatgttgtcctaaaagattgttattacaccacattttatgctttggccatgttgtttggataattttcttggatggctaactgctgtgctatgaggttgagtgccaatgtcccattgattttaattcctggagcaacatggcttaagactattctacaattttatactcctacctgatggtaatgtagtaacaggcttgcatttcttgaaatgggcagtggtacttctagatgctcctgggatgggtgtattatacgagtcttgcaagaaactgctctggttccatacctaataattatctctgtaccaatgtattgggcacttctgtcttttggttgtatcattgcatcgcttgtctcgtcctcaatgtgaatgtggttatgctcttgttaactgggatttttaatctcattgctactgtagtacttagtgatttgattttgcctggttggctgattctgttgtatggaaatatgttcttagatgttttcggtagctcataaaaaatagaaatggtgttgattttgtttgcatttacatggcttggtcaattgcttttggtgttactatagttgggcaggtactccaactctgttgcattttgatcactagcttcagaagtacttgaggaatttggtcaatggtagtgaagaatatggtggtctattttgttcttagaagta

SEQ ID NO: 18748 - DNA, 397 bp, Zea Mays
ggggactgttgcagcgccgccgggggttggtcaacagtggatgacggatccacgccgttagatccttagtgtgcggccaggattagagtaagcacacccccctccgcgcgtgtaactctgggccgtagatttgagggtagacggttgggattagaaattgcttattccttcgcgatattgaatccggcccgtccatctgaaatcgggcagatccggagggcttgggtcttgcgctagcatcgaccgtcggattttaatctagcagtccacatccggtaccggtttgggtaatgaatgatctaatccgagcccttgaatttggatccaatggcttagatggccgcgtaccccttcgcggaacaaaattgcacaagagcccctcaagttttagaataac

SEQ ID NO: 18749 - DNA, 715 bp, Zea Mays
ggaatggagaggggaataacgatgacaaaatagcacacctagaatcagaactaaaatacatacaagacaagttattaaacatgagcttgcagtatgcggaagtagaggcccaacgggaggaattagtgatggagcttaaaaatgtgaatgcaaagaaggggggacggtggttctagcaattagtgacagagctcaaaagctggatgccacagtcatgaggcccacatgccacagcacagcgaaggtacctaatacatgtattcatctcatgcttctttacatgcgcccaattgcatttgattacttgaggaaaaataaatgtaaaattaacattatcttctttattgctcctacttgggttgaactgaagctgaagcaggttttttgtctctatgtctgtttttggaaccaaggataggggctctgtcattcatatcaggaagaagagaacacaccttccactcgggtaggacataccgacagaaaggccttctcaacacctcacctaggaagcatttgttttattgactagtttcaatttaagttcatgagataaaaaaatatgccaaaaaaatcttttgtctagtcaaagaatcattttcaaactgctctgcttcagtatacagcattgatccttcccttgtacaagtaacaagttgtttgtctaattgtcaggaaacatgttgtgaaaactgccagaggcatccagatcttg

SEQ ID NO: 18750 - DNA, 884 bp, Zea Mays
actcttgctgatcggaatcagaagccatcatccatggagggagatggtaggggcttggtttcttaggagttcggtggtattcaatcaaaaagacagtgggtttgcaagagacgacatagagccaagtcagtttctgctttggctaagcggcctgcacgatcggtgtcacctgtagtgggtgataaaccttgtatcatgcgatggactcagcagatgaccagagcagaggatgatctttagaaggcagtggtgattactgttatcagcgatcatgagaaggtcccggttgaagagattgctgagttgattgctcctaggctagagttggaagatagctccttgataattcgacagtcttcagagtcaagctacatcatgtttctacccaactgtggcatggtggatttgtgggtgggcagttgggccttttctcagggcagccactttcactatcacctgtaagaaaaggtctcgttttttgaattccaaaggtgttgtgttacctaccttattggacgtagagcttcagggaatccccatccttgcttgggaagccaagaccgtggaacaattgcttagtccttttgctagtgttcatcatgttcatccagacaccttggagctaaaggatgtggttgtttatcattgttcttcttggtgtttgaacgtgtcactggtaccagattcgagagagctttggattgttgagcctccctttgccgttgatggtgaatcctatgacaggagaatgtttatgtatccaatctgcataacattgtcgtctgcccctcggtaggatggatctgatcctaaccctcaggttattgaagtggacggtgatgatatagggcgtgtgcagcagtgatatccacgttcaagacctc

SEQ ID NO: 18751 - DNA, 430 bp, Zea Mays
ttttaataatcttaaggtctcttttgcaaagttgactagctgaaggtgtatgggttgttcaaggccgtcggctcttgcctcgagggtcacgattagatctacgtcccttcgaagcgatacccatgcgggccatcggatcggtgatcaatggccacaatttaagataaccacgatctgatctctactgtccctaaaaaatagatggctcggatgaaacccctaaaccagtacctagttttctaatctgaaccgtccactcatcgaatcaatggtccacaaggttctttcccaccccgacacacaggacatggtggcgcatgcgccccacaacagcgatctagcgggagtcacgtgacacgatgcccccaggccccaaactctacatagataggcctaacgcaaaggggatgtcatggcgagtctaagtaga

SEQ ID NO: 18752 - DNA, 513 bp, Zea Mays
gtgttgtgttcacccatgtggagtggagtcacgtcattttctaattgctgggactcagtttcaagtttccactgctctcccatagtcccatttccctgtagttgtagagctccgatgaggaccgtggaatcaatgcaagctggtttcttctcatcatcttgctccaacccatcagcagcagcgtgctccttgtagatgtagtttcagaacgcgatgatccatcagccattaaaatgagagaaagccctcgcttcatagttggggcatgacaggtatcaggatatgcaaagatgaggcagacattgcaccaaccagacttatgtctttacatcagcagctagttgcttcctaacgaaggctagactactcgtgggcgttcgccaaccgttgtgcgtgtctccgacggccacgcccgcctttctcttcctcgctgacaaaccggcagacacacctgcaatcgaaacctcttattcctttctcaagtgtgagaccaagggtctgtttggttcacta

SEQ ID NO: 18753 - DNA, 518 bp, Zea Mays
atcgcacctcgccgtcggtgatccccgtgcctggattcacgctggccgtcacgattcgtgctcaacgcaaagtggataaccgcgggggagtaaaagatctagcggggagatggattgggtcgcgggcagtagcttatcggaggggcttggtggctgtgcgacatggccgaacggtcgtggttgtcataggtcgccgacgagctcgactgcgccacaccgtggtcctttaccacatagtcgtaaccgtggcatgctcaaaattactctccctacgtttgtatgccgtcgagcgccacggcgtgctcgccagtgcaatgtcttgtcaccgccgccctccaaatcccttccaaattcggagtaaccgtggccaacctctataaattgagcacctccctttctttgccccctcataacgaacccagtgcaactctaacctcggccggtcatccaccatagcccaagcgattccgttttcccccaaatcggttctgcgcgccaccgtggacacccctccgtcg

SEQ ID NO: 18754 - DNA, 476 bp, Zea Mays
gtggtttgtaagatcatctaacaatgctaacaccgttattttggctaggatatccataggaaaaacactgtcaaacagacaggtcccttgctaatcccctgtggagggacccaaactacacatcaataagaccacaaaacaacatggaccatttctgagaaacaaaaggccaaatggaaaagagaggaaagcagcacataacaattgtctgttctacttcttcctttccatttaacttcttgattgatcacacagaagaaatgcgggctgtgggcctctcctgcccgactgcttcccttgataatgctactaataactcttcctaacgaaagcagcatgtacagtacaataagtgaatatgatatggacaggctagagcggcacagatgaccaagctggacttgcccagagtgtactagcagtagtaagagcgcctttggatgagttagggctagttagtagttgggctaaaaata

SEQ ID NO: 18755 - DNA, 464 bp, Zea Mays
gtatattttacagttgtcgtctccctgatctcaaataggtggaggactggaggtggttctcaaatctcaagcccatccatggcgcctacaagtggatccggctccgggacgcaagctaatcgtccaccattgtcttcacgtggtgctgcaacgaggagggggagggtgacctcaaaccggtcaactatcaatcgtgttgatgctgctggtacacctacatcgacgccgacaccgagtgcagacccatcaagtgtcggcgatgctactgctagtggcacaccaacaccatcatcaagtactaatgctccacctgcagcagcacaaccacaatcaggtatagacaatgtcattgtggaagatgatgatactgttattgttgggacgaagaggaagctgaaatctgatgtttggctagagtttgaacaagtaactgttggtggtaaattaaaagctcaatgtaattg

SEQ ID NO: 18756 - DNA, 685 bp, Zea Mays
aaaatggtttatgttctgatcataggatcaaccagaacatcaggaatgtctcctgcaacatgggccgatataaaagaataaattggtagcaataaaataaccaaagatggcatgcacgaaaatgatgatctaactgaagatcatgagtgccacaatcatttgcagcctcacttaatgggatcatattgggggcagattgagcatcaggcacagttggcacgacctcgacaccacgatcatagttttcctctttagggcgagagacaactaacaaacaccataccaccacctcaatgacttgcttttgggtcttcatagttgatttaacataatcatcccactctcgctgacactcaattggtatgataagtctttgcacgttgggtggaggacctacatttagcaccccatcaacgatgatgtcatcaacaacatgccaaccgatcttctccttagccctagcaaccacctcactaaaggagggtttatcatcgaatatcacagccatacgttgcatgtcaacgaactcaacatttccataacgatcttgttccacaagcctccacggtatatacccaaaaaattgtccatctattttgaaatacgaattcaacgttgaataaccaattgtgatggttagtgcctaaccccatccactatgactaactaatacctaactataaac

SEQ ID NO: 18757 - DNA, 325 bp, Zea Mays
tggtggaaggtgtaggtttacagtatgggactagactaaatggcatgaatagtagaagtcatgaagggagttgcccacgtgtggcgcagtggatcaatggtttttgcctcggcaacatgcgggttactagcgcggcccaggccttgcagactgcacaccccgactgcatttaatgtggggtgcatgctgcccgccactcgtgtgaacaggcgtgcatcctgaccgcaattaatgtgggtgacactccatgctagatacccacgataggcgatgcctggcaacttcagtgatatgcctcaggccatatggcaacaccgtatctcca

SEQ ID NO: 18758 - DNA, 495 bp, Zea Mays
cacgacgctgctgtgttccccgccatccttggcttcgaggtgtaccggctagacttgaaggacagacggtgggcaagggtgaagaagttgccaggcgaccggcgggcgctgttcgtgagccacggatcgtcgttcgccgtgcgctcctcggagacggcgggatgcaggagcaactgcatctacttcgtcggcaacaaatggtactgctccctgtgcaacagggacgccggcaagacctggggtgtgtactccatggaagaccgggaggtattgtttgagcacgctgtaaccgagccgggaccatgctcggcggcgacgtggttcttacctagtgtagtctaggagcatgtataatttcgtcagcaccccggagaatgcggaggccagcaaaggtgttgtttcttgcatagggtggagtgacgcctaaaaatatttgggccccacggccactgagaagattttgctttgctcttcaaataccgcagcgtgtccgca

SEQ ID NO: 18759 - DNA, 560 bp, Zea Mays
gagaaattccccctgctccgagcaccgcaagcgcctggatagaccacaagaaccttcaagggggttcggccgagagcactggttggctaggtgagacccggtggtcgcgcgttggttttatgcatgggaacaagggagtccgagctggatcgtttcaaccacctgacgacttcggcgaggcagttttcatgtccgtgcaactccagggtggaagaagagtccgaccagtgggggccactggccagagaccgcgtgcaagtgatgagagagctgaccaacgggacccacatgtcagcaccgggtttagttacatgggttgcgcggtagcaaaggcctagtggggctgaagggacccaagggactcttttgcaaattggcacgaccgaaggggtacgggcgctggagtcgtgtgatccaatctcgatggtcaggattagatcactcctaattccaaacagataagccctcatggccacaggatctacgatcaacggccaaggatgcgccatgctacgatctagtaagaaccgcccagatctgatcgaatggttgcaatttaa

SEQ ID NO: 18760 - DNA, 587 bp, Zea Mays
ttgtgtagcgcctcctctttcctcttccccttcgcctttgtcctgccacccatgcgtgaggccacctgcctgcttgcttcattcatgtcgagacacttatttggcttagtggagtagatgtatgatgtgctgacaagctaagactttttcgccgtggatgattcctaggctcttggagatgcttatcaggtgcgtaatgacccactatagaggttttagtagcctgaagcttgttagtcatagcatcttggaagggcttgataattataactgtctaaaagagaatggtaatgaaaataagtgttgactagaaatataggacacgactattgtcctccatggtggtgcagacaaggtcttttattgataaaatctattttaaggtgtaatagacgttcttatatttcttcgattctggtggcataaggtaactttgttttattattcgctgacttgtttctctctctaaataggctacagttcattgttcaccgacctcacttttaattgaatttaggacaccaggtaccttgggccaataatactccatcgtgctggacatttcccatctcaaatattagttgtac

SEQ ID NO: 18761 - DNA, 609 bp, Zea Mays
ttgatgtttatgtggcggtggatgttggttggtaagatgccttagatgacctggttagctctacatgctggtgctaggtttggagctgtccctacaacctttggtgaccatgaaagtgctgataagtgtcttctctgtatgatggtatgtcatagaagtgtcttgtaaaaactcagacctgcgtgggctaacagtgtcttgcgtgtgtgtgtgttcgctgttgcctggtcccaaaaaggcttttgaattggggaatatatgcaaagggtgtctagatggtagtggtggtggtggtgtcgcctgttcagcaaagctgaggtcaatctcggaattccaatatctgtaaagttcgaaccaaaggtggccctaaaacactaggcaattctagatgcctacgctcttattttagcaactgcaaggatgatgagacattgtgttgggctacaaaatgtgcattaggactgtcatattgtctggagtagcatactttgaggctttcaaaatgttgtgggattagttaaaaaaagttgtcccactggttttaactttggtgcacttgctggttttgttcattttcatctcgacacacaaaagtgcattgcacaatga

SEQ ID NO: 18762 - DNA, 760 bp, Zea Mays
ctcttggaggaccggcggtgctggtgcaaccaagtgtcaaggctgagaaccgacccaggcacggcggatttctcgccggtaacgcgtcgccgcctcgcgtcgtggccagagtcttccacggcataaaccaccgtaagtagtactgctatgagtttgtggcacttagggcatcattatttacttaggaattcgatgtttgggagctggacacccagagctgttctcgccggtgagtgcgccggtgaggtctgcgcgtacggctcgacgaccgctctcctgtgaagacgacgcgatggctgccgtcggatcgctgtgcaacggggaggattagatgcaggctgaacgtttccagtggacaatatggaccgttggatccgatcgggtggtggccgagcgttccgcgcgatttaaaaccctgaccgtcggatcgagatccgaggatctataatgcgtaccgattcagggtaattgagtctaatctgcgccctcgacgttggatcggacggtcagatttaacccgtaccccttcgcgatggtcatttttctaaagagcccttccagaattgataaatcaacccgcaatccaccctgtgcagtccactgagtcttaggaatttttacgtgccagcccctgcgctttctggaatttgaggcccaatccagagaactttaaaaattagaaattaatatcagaaatcaatttttagtgcataaataaatgttaaaatttgtataattcatagaaaatgcataggaactc

SEQ ID NO: 18763 - DNA, 734 bp, Zea Mays
ggctggtgctctaactgggttgactcctaattcaacacctaataatcgtttcccctcgatcaattgcatgatctgaactcttaatcacactgtccacggtgacagcgcgaactacggatgaacagaggtgttcccgatgatctagcgctgtctagcttaattgaacgggtcgaggagcattaggagaacataagggtactgaaacgggagagcagagggcatgaacggacctgtagcatgctgggcacggcgagctcacgcagtgcggtgctctagaccaaattggggagagtttcaaaatgaggctctctggtgagtaattggaggcacgagtgagtgtgttgggtgcataattacatagcggagccgagggtgtgctcaatttataggacttggggacggtggctcgtgatttggagttggcacggtggcggtcggagagggaagaggttactggcgcaagcaattcatggcgttcaccgtggcaagctcattggcgatgaatgtgtgggctaaggtgactcactgcgacgtggttaaagcaccaaagcacgtggcgcaaggttgagaggtggctaactctggtgagtctattcgaagcggccgtgactcaggcgagtacggtagccggagcagaacagtggcctgagttcacccacgacgcgatatttcttacccttaagagttatctgcaccccacagagcacgaatcgcaatggcgacgacgatcacgg

SEQ ID NO: 18764 - DNA, 415 bp, Zea Mays
tctaccgatgttacaataatattaaaggtaatgactgaacccttcccgtttgctatgctaagtcccctggggtcggatctgactagcttattgcaatcaaaggagaagactacttcgacaactgggggaaatgagggggttgaacagagcgtggatgtgaagaagactgctttggcaactgggggaaacgaggggatcagaagaagcgacggatgatgattgtgatgaaggctatccataagaccccgcccctgatctcggcggagaaatgtgttgcccctgctaacgtcgaagttaacgctgatgtcgaagcttatgaagctgcccctgaagctaaaaaatagcggaggccctcttggaaccacaatgtcagagattgacaagattatagctgatgtggtacctaggagggaaa

SEQ ID NO: 18765 - DNA, 666 bp, Zea Mays
gtcaaggaaaggaagacagaagtgtggggccaaagatggatggagaaaccccttattaggaggaatgggagggatcgagcaagcataggaatggttgcctcaaacaaatcaaaatgctctagtaagaatgcactattcccactctggcattcaccaaatgaatcgaccacttcaataaaacacgaccattacctccactgggcaaatcgaccacctcgataagtgcgagataccactaacgttgtaggaaccagagatgacacgaaaaacagtttctcgaacagtaaacaacacgcttccgagagtcaatcactgtttctaggaaagaaagcatacaaggttttatacgcccctacaacccattaaaggtccaagggttcgaaggatggcccaccgaagggttcaatagtcacccgaggcaaaaatggtgcgagggatagaatggatgggtcctagtggcttgtaccccaacgctcgaatgttagggaggcatctcgacatgtattcgagtctagacttccaagcatggttatttcatcgaaaaaggcatatgagtcatcggggttaaacaaacaatgttgggaactatatgatgacgaaagcgagggattttgatggctaatcaccagctgatcctatggatcccccaatagggattaggccatt

SEQ ID NO: 18766 - DNA, 441 bp, Zea Mays
gggcactctggagggagccgcgttcggactggaagcgggctctatttcctcgggatcctcctctctttcgttgcctgcctcattagggttcatgtcttggtggtgcatttctaggtgagcgttggcctccgcaagctcttcttgcacatcatggagctggatttccataatatcgatggtgttatcccagatttccacctgctgctccagagtcaggatgcgctggttcatctgttccacctgtagatctttttgcaccaactccaaagacaagtcgactatgaagtcctcacgattgtcgagggtgatctttgtagcctgagcgagcccagtgaggtgtgtcatggtgtctttttgcaaggccggcaagcggtacaatgcgctcatgcactggacggtgatcctcccaacctggtcgagatgcaccacattgggccatcc

SEQ ID NO: 18767 - DNA, 661 bp, Zea Mays
aagtaaggcagggagatccaaacactggtgcgctctcacggcaatatgagcagacaattgtgccctgaaggactactgggtcctggtgctaaatagtggcgcagctgatgggtccctctgagctggcaaccaagagtccatgggtacatgtctgaatcgacatacccgggcagctgtggctcgctgaagatcgagcatgcgaggatcagcagcaagtggttgcaccacggtcttgtcacgctcctagaagcgaggtggaggaataggtggagtggaagcgtgagcgggagcagtggaagcaggagtggtggaggtggtggtagcagtgggagtggtggacggctcgagagcgacaggagctggtgaagtgggaggtagagtggagactaggtcagaaggagtggaacgagcagtggaggagtgactccaagacgcgagacgacggacttggaaggcaatctgattagaagatatccgcagctgacctccccgctctgcctgatctgctgctgctgctgcaatcgctgcacgagtggctctgtcgagacgtctcttctttttgcccccttggtgctcaaggtagacagtcttcaccctgacctgtctgaaggagcgaggagggtcctggtcatctcctccccctgccggtgtgacattcttc

SEQ ID NO: 18768 - DNA, 952 bp, Zea Mays
aagaaacatactgaacaactaaatatagcacatcaaccaaatctgtgaaaaatgacccagttaccatcagaggaaaatttaaggaacagttcagactctgcgaccttggccccctatcacacagtctagtggtccttgtaggtaggactggaggttcaaattatccatcttgaatagcagctacaaggaaattatatgcctgctaaactcaactttcatcagatctatgcatgtttgccatttctccaactcaaggtttgcatcgcaaacagtagcagttattagttgttaacctggttgcgcaattcaatttagagcctttcataaagttttaacaaatttcacaacaagaacctcagcaagcgagggggagtcgttgcttggatgtgcacgccatctgccagagttctttcccaaagcctagggaccatgggaaacaacgaaactaaatcgtctctcccatttaacttaagtttgatcaaggacctttaagatttattacttattagcaccaaagaaaattagacaaactgagctgagtgccctacaacaaaaggacatttggcactaagacagccaggagttccgcttcagtttcgcgctcgacataatgatacatcaatatcataatagagtagatagaaacgcaagacagctaatgacagcaaggatgaccgaggaccggaaacgaatatttccggcagctgatgaccccctccaagcagaccagcatctgaaattctttctagataagaacatttgatgctaaaagtacacctaaatctgcaccccgcgggacaggggttagtttacaatggtgctttacacggtgacagcaccacagccgggagtggaaagcgggagcggtagagaaccgaagcaacggatgtgattccgttttccgtctgcgagcgaggagagcacgagcacgcgtccccggatccgccacgcc

SEQ ID NO: 18769 - DNA, 486 bp, Zea Mays
ctcgtggtgaggggaggtggcatgccaggagcgtcatcgcaggccaagccgaccatggaggagacggccgcatgtacgaccgcgctggccacgtgggggtgccgacgttggggaagaagcccacgatcgtgggggaggaggctagtgccacacccgtggtaaaggagagaaccacgttggagtgccccgggacggcgaggttgtctgcatcagcggcgagggagggttgcgtgggggtgccgacgacgaggtagagttgtaggacgtggctgtgctagatgggtgcgccggaggccatggattggaagataagcacacgactgggcaagcacggttccacgggtggaggaagaagacctgccggcggttgcgtcctagattcgggcggtggcggcagcccgctcatgttcccgcatcgtgccgttcatgggaaagaagggggcgatgctcctacagatggtcatgtcggctgtggaggaggcataa

SEQ ID NO: 18770 - DNA, 426 bp, Zea Mays
agtttgccgtatgccgaattctcatataacaacagccatcaggccagtatcaagatgtcaccgttcgaagcattgtatggacgaaagtgccagacccccctaatgtggtccaatgtaggggaaaggacactggaaggacccaactttgttaaagaggccgaagagaaggttgccctgatccgcaagagattacttgaagctcagagtcgccagaaaagttatgcagacaacagacggagggaactcagatttgaggaaggagacttcgtatacctcaaggtctccccgatgcgtggggtcaaaaggttccaaatgaaaggaaagctagcaccacgtttcgtcgacccctatcccgtcattagcagagtaggacttgcagcataccgccttgaactaccagaatccatgtcggatattcacaatgtg

SEQ ID NO: 18771 - DNA, 340 bp, Zea Mays
gaatctgctatggctagattttttggacgggttaaatagggaaatttaggacacccttgcttataaagattatgttaacgtaacccgattgtttcatcttgcttgcaaagctgaaagggaagtgtagggacgacatgctagtgcaaggtctaatgtttctgcaggaagatctacaccatggcagcagtgcacgactacgtccatgatcggccgtacaccagcaccaactccctcgctgagtcaaccagcaccaccgccttcctccagcgacaaaccacgtgcatcttccacaaattcagcaaccaaatcttcccagaaaccagcaggtagtgcctcttta

SEQ ID NO: 18772 - DNA, 604 bp, Zea Mays
tttatgtgaagaatgacttggtagcgagagaggatgttaaggagcttattatgtgtcccatatggtcccgcttcggccttcgaaaaccgaaggttgaaatcgatgaagccgccgaagcatgccagaaggcctttggtactgtatgcttctttattggtacaagagacttgattcaagaacatatagcattcagagtgtggtcgcttgtagagaactaggaagtgccgaaggagactgtcaccgagtctagcgaaggtgacctggttcgactgaaatatacattcagatatggagataaatttgatgaaccaaatgacgactggctaaaatgtatcaaagttacaagtgatgaactgcttgggccatattccaaagcagaagataatgcattatccacatccttcgggggccgaggaaaaaagagattgaacagagtttttgatgccattggttttgtttaccccgactattgctacccgctgcgaggacggggacagaagaggaaaactgctgcttcggccaaaactgctgcttcggcgactccagatgagcctgcgccgaagagcaaaaagttgaaagtccttacccaccggccacgctatat

SEQ ID NO: 18773 - DNA, 714 bp, Zea Mays
cacacgccatttcaattcccatcgcccattctgcatactacgcacgcccggtccatgcgataacctcagttttgcacaatccacacgaagggcccacgtgccagactcagctcgcgcaaaaaaacgccacgagttgacactagcaaaacacatgaacacgattgcttcctccaaagtaggaaggcttataagctggtaccgcaatgtttggctggccggtatggtacaatatttgcgcagcggtgacaacgacggtagtccgcgcgggttgtgttgtttggtgcagcccactagcatgcctagcacgctgcacttatctggcactggcccagcttaccgtttcagtcccccgctaacgctctcactgccatgtggcctccctccagctctctctcgcatcgtgtctcgagaggctgagacgtggcggcgcattcatcctcgcaaccgctgcgacgtcttcggtccacgcccacatcccccatcttcacgacctccacttcgtcagctcttctcctccttgatctctagcacgcgcgcgcaaatgatgcagataaatggaaaccgtgcggcacctaggtcgagcgagggcttgccgcgcgctctgacacgctctgcatctgtcgttggggcttcgatgcacgcacccaccacgcgctcgacgtgctcgtccaccgcgaggcctccatcgatgccttcgtctcgctcgcgctcgac

SEQ ID NO: 18774 - DNA, 648 bp, Zea Mays
ccaccacgttagactgctcttccacgccgagctcaatccatggccgtcgccgcaaaccattagccgttgcaaccatttgagtttggcgtggtcgcgctagatttgcactagggcatctcccttcgccccatcctcgagagtataaagccgcaatcaccttccccggcatctgtcccgggaatcactatcgacgcaaaggaaagattggagaagcaagccaccgacggtgttattgccttcgaccgctgctcgggatttgatgggaggtcggcggggttcaccagggaccctagctcgtggccgcgggttcaccgaaggatggtggtggctgagcagcacgaaatcactcatcggagcatggcaccgtcacagattctgcacctcgccgtgatcaactcacctacaatagtgccaaggcctcgatgtgtggtccatagcattcgttggatcacacaaaacatttttagggattggaatgggtgggaaatcgctcgtgtggtgcgtaatttgtcaccgcagttgatcgtccgcctcggggccacgcaacgtcgtggtcagcttccctgaccgtgctaaactcggtatgagcatctcccttctgttcccttttgcccccttgatgtgtagcaccttttagtcttgttgatg

SEQ ID NO: 18775 - DNA, 446 bp, Zea Mays
ctaagggcaggcaagagaagcctctacatttacgcttcgtagtgcgaccgatgtattttggatttcgatatgaagagcaagtttaacaatatagccgactattaactatagtggtctttgtagtcaatattttcagcccatgtaaaatccactcaaccaaattaaccccacatccacaacctcctctaaatctaccaaacaaatttcaaccagacataacacaccataaaattcaacggttcaaatcgctagatatctctatctgtcttgatcactcaaatccaatgataatattatttggatcatccatcatctccaatctctccctcctccccagcgtcctcatcacccctcccctcatctcgtcctcgtcacccctcccctcctctcgtacccggttttttaagaaactgacgtgcttccaaacttatcttagaagacagaat

SEQ ID NO: 18776 - DNA, 449 bp, Zea Mays
accgatttggggcaaatctcaattcctcgggctacggtgtatggcaggacgtggttagggttgcgttgggtttgtgacataggggccaagcaaggaaggcgcttaatttatagaagtcgatcgcagttgctccgaatttgaacgagatttggatcacggcggtgacatgatattgttgctaaagcgagttcactgtggcatgtactgggacaaggtcttatggcagtcactagttactctccacgactcgcgacgacgtggtaaaatggcctatagcgtggcgcgactgagatcgtcggtgttccccgtcgacatcggccgcgcggacacgtcgccaggcaatcgagtgcggccgataagctcacatccaggaccaaatcctcctcccttccgatcttttacctctcacagttatcctcgcgccactgggcatgaatcacagcgccggc

SEQ ID NO: 18777 - DNA, 375 bp, Zea Mays
ataacaaatcagacgtctccataaatacgcatccatccgtgaccttcgaaccacaactcgacaacactgggcgtgccgccacaacattggcggagtattaagcgtcgcctcggagctgttccgtctgcgcagcggtgctgaccgtgtgcagcgttgtggtcacccaaatctacagtatcgccctctcttgagttcgcgcttgcctccgccctcttttacgccagtctacggttaggagatacgtattcaacgcggggtgggtgcttcggcaatggtagcctctgctgcggtctctctcaccattgtattcaatagtcaaatgtgggagatgacctggtacccgctcatcagaaaatgaacgactgggattagttg

SEQ ID NO: 18778 - DNA, 378 bp, Zea Mays
aaggactaggtcgagggtgagaaatcgagagcttaccgagaacggagggagaatttgtgtaagagctctacggcggatccgcgtacccgcccggctccgacgtggaattacgtggtcgccggccaaccactcgggtgaccgcccaccgcaacgtaatccccggctccagatatgactaccgcacactcaaacaaaacccgagcggcgagggtctgggtgaattgcaggggcggcagcggcaaaccaagtctgcaccaagcaaatggtggctggtaaactgggtttaagcgaatgaaagcaggtcaagggcttcggtgatggggtcgtaaccttaagacgtgagggtgctcggcggtcgcgcgtgcaccgagattgccg

SEQ ID NO: 18779 - DNA, 372 bp, Zea Mays
ttcttggtcttggctttcgttgttcttgataaggccaaatctagacctctctttctgagatggactctccaaccggtccattctttctttgttgtggtggattcatgtgcagctaccaaattagtttatgttccaaaaatgtttcacccaacccttctccctagggctataaattgcatcaatttgtatatctatttgatcttagcctttaatacatggttctgatgggatttctcatgcagttccatctggaggaggcgttggagaggaggctgtgtaggtgactgaaattttaccaaaaacattattggtgttggtgcttatgtttcaccagccatggctgctggagctcactgtgttgtacaaccatct

SEQ ID NO: 18780 - DNA, 695 bp, Zea Mays
cgagtatctagtttggatcgggacgttggtacttcggttcctgctgctgaagaagtgcctgtgcctgaatttactgacgccgaccccactgggtgtgattcatctgctgctgatcccaatgggtgtgctccatctgttgctaatcccaatgggggtgttgcctgtgctgctgatgaagacgatggggaggaagaagatgaggtccctctgactcgaaagaacagtcggcagtgtgttgccagtggtgagagtagtggagttccttctcctgctttgtctgctctcattggtctgcaagaattgaccctggcaaattttgatcagactcttgaggatatggttccagaggatctgttatccgagccagcagatgatggtgtgatggaggtttgtgctgatgtgctcgacgctggattgaggtcatcccgtgcctcatcgaccttagagcgcggtctcgaggatcaggagactgacttggatcgtcctggtcccatggaagtaactgagggttcatcagccttagaggcggctattgcggagaacttggttctcagggacggtgttgacacttgcccagcccccgaggatgttgccggggatgactcggcccgggtgggaagcgcaagccactgcccagcccccgagggtgctgccggagatgatccggctcaagtgggcagcgcgaaccgtgaccc

SEQ ID NO: 18781 - DNA, 906 bp, Zea Mays
aaattggagataaactggcctaaagatggactgtcagtcaccactgatgactgaatcatgactaccagtgacattggcagaactttgagatccatttttagtaggatccagtgattatttgattgtggatgctatagcaaaatcaaaggtacattatagagcaacaactttgttacagatggattaacatgttatcacatacaaattagagaatgaagctctccaaatcatgctgtcagaacttctgatgaggattaccatggtacagtgaccagaaaagatctccggtgccgtgagctcaacatcggtgatccgccgccacaattcgcgcccgcctgggagattcatgtcgcgggaggagtagataacgtcagggccgggtaaaaacatccggtaggggggtgaatccagtcgctggccggaccggccgtcttgtcccaccgtggacaaagcgctggcataataaccacgcctccacgtcatatgggtcgtggtaagcaaccagttattgaccgcagaccagttcccttttgtgcgccacagtgatcaagccactgtgaaatatcctagccggataaccgtgatcataatcctaaaattcttgtccagttcgatcgggacctataaattgaggatgccctctgctccgcttcttagtaacgcgtccaacccatccccaactagctcctatcgtgcaccaccgcgccccaatttcgcatttcccccaactcgcttctccgcgccaccgtgaaccatcgcgccgtggaccgcccattctaggtctgttcttgttctctttgttcatgtttcaacacctctattcactggtgatgctcgtcggttcaacccattaagctcgaccctgctcaattatcttgaacacctcgatttgtccgtgaagttcgc

SEQ ID NO: 18782 - DNA, 720 bp, Zea Mays
cgagtaaaccacgtcgatgctcaagaggctcagcaagcccgagagtagtgctcagtgagttcctagttgaatttactcccgctgttgtaccttttgattcaggagcatctcattcattcatagtcactggttttgtggaaaagcatggcatttccactgcacatctagaaattcccttgatcacccgaaccccagggtcagaccttctatgccacctcaaatgctcccaagtcaggattcttttaagtggggtagtgttcttggcagacttagccgtcttgccatcccacgaaattgacgtgatcttaggaatggattggttaaccaagcacaatggtgtcataagttgcgcagataagaaagtcagtttcatgtcaagctcagccacccgcccaagattcaatggtgtttaatctagcagcagaaagcatatctgtagtagaagaattcatggatgtgtttccagaagaattgccaggaatgccgccagaaagagaagtagagttctacattgatctaattctcggcaccgcaccaatcgcaaaaagaccataccgcatggctcccaccgaatttgcagaactaaaactccagatcacagaacttcaatagaaagggtacattcgtcccagctcatctccttggggagcaccagtcctgttcgtcaccaaaaaggatggaagtatgaggatgtgcattgactatcgatccttaaatgaa

SEQ ID NO: 18783 - DNA, 707 bp, Zea Mays
cttttatttcagtcgccttccagaaataggctgtatgcctatccactatggccaatagccagagttctaaattgcagcagcaaccagccaattactgtcagtaactggaaaaattctagggcacttttgacatgttatgttggacttcttgaaaaccgtcgtgaaagaaaataagagaacataatgcagtgagatgtctcctggctcccagcaaaaggtctgggaaattattgaaaacagattttcaaaacccttattacaatactggcggtgtagccttgtaggtttgagctttcatgggccacagcccaaccaaattgtatttgcatgtgttagtatacaattaaccattatatggttcttctgcagcctcatgtctagcgtcacttgttagacatccaaataagtagtgcaataacttagaagactgatgcatcatgtatgattggtctaggtagaggaattcacccttttcagatatgctgtgatcttgtcttctcaaatagtcactgaatagccaaatccaagtacacttttggcattattttaagtttgttgcaagaattagcatgcctcatggtttaatgtgtaggcatttgttggtatatactccctctctgtccttgaataaatcaacttctggagttgtcttaagtcaaatttttatgtttgactgaatttatagaaaaagactaatatttatgaca

SEQ ID NO: 18784 - DNA, 660 bp, Zea Mays
ggattagcccgggatcagacatcaattctctttgtgctactagctgcctagaacacacacatctccctgcctcagaacgggaatcaaatcaaacatgcgtggcgtctgtggtaggtgagctggtgaggtgaggctactagctcgctccgaatgatggagctagctagctacctagctaagagtcttcatccaactgtgcacggcatcaaatcacgatcgagagctccctttgggtcatatgcaatctcatcgccttcgtattttatgagatacgagagatcggttaggtgctctctcgctccacggtggtaggggcactgtatacgtgctcatcgataaatttaagcaggcatcagtgtgtcacgctcagataaatgtcagcaggagattggcacggctatacaaaagagatctggtactggtagcttagctgcaccaaccaaaaacgagagctacaactacaacttgcagcagctgtagcttatagcgcgcggctgcttctggtggtggtgacacaaagtccttgcgtcgtgcgcgcgtgcatcagtagggactgcaaagcatggaaggaactgaacatacatgatctgcagtcaaattagctgtcggctagtgtggtcagtgagcttggagggcatgcatatgtcaagcagcctatag

SEQ ID NO: 18785 - DNA, 874 bp, Zea Mays
aaaaaacatattagagttttcttacttccattgtaaatttaatgagacttatccaggctttctttttataccaaagctacatggggcacgctgcctgtgaaggcgccaaagtagccacatgcagttattgcagttttgtctagtttgttgtcatttgctgcaataccaatgctaagtggtttgaacatcccgtaacggtaacctcagttagatattaaataatattttaaaataaaccacagtggttatgttaaaatcattttggtgaacatgttactgttatgtgagtgatgatatctgatgttcatttcctatttcagaatctatctttttcattggtttatgtgaactttatcatgcaaatcactggctatctgcaattctgcattctagaaagaataggtgatccttcaagttgaagctaaattgttcttctactgctgacaccattgtgatgcaattttccttctttatcctgtaggtggctgagttgattgaaaaagaccttatattagttgggtgcacagctatagaggacaaactgcaagaaggcgtgccaacctgcattgaaactctctctgcagctggcataaaaatttgggtgttaacgggagataagatggaaacagcaattaacattgcatatggtgaagcttccatctatcttgattagtttgtgttacttattctgctccttaaactattctctgccagttttggtttctgggtgttcttttcctgatctccctttcgtctaacatatgcagcatgcagcttggtaaacaatgacaccaaacagttcatcattagttcagagacagacactattagggaggctgaagaccgggtaagctgcacatactgcactttggac

SEQ ID NO: 18786 - DNA, 1013 bp, Zea Mays
tggtcaaggatctaacggttcccatgccacggaggcatcagcggcctagatccaatcccagccatacatctccgtttcaacggcccacgtcctttcccccaaactctcctctccctggtcaatagagcggcggcgccactcacgagcacggcagaggccctcgccggccacagcattccccgcatccccgttctaaactccgatccgaggtgttcactacgcagcagatacatgggcgaactggatggggaatttcttaccgcgaattgccgcgacgactgacccagtcacggtacgatgtgggccgcacggcggtggcgccctccggtgaggaattccgccatgccaaccgcccgtcctgcccgaacgagcagcggatatccatcggtgaccccgcgcgagcccccggagtccccaagtatgcttcgaatggccacctcggtgaagatccatggcggcgattcccctgccctctctcctcacattacgatctctctctctgctatctacgacaggcgcagccgaattttggtctaggaggcactaggcgaaaacccaaggggtcgcgactttatcccccaaacgcggaaggcttcgcgcccagctcccccggccgcaccgcacgggctgttgcaacgactggtccacgaaaggaggaagaccaagctgaccgatgggggccacacgacagcgtcaggaggaaagtgagcgcggcagcggtatggggaggaggtgggccggctgtgcgtgtgttgagttaatgggccagaagtgatggtccgcggcccaggtaagctttcttccgttttcttttgtttttattttctgttttcttttctccttttaatttcaaatttaagtcccaaatttgaacttcaaatatgaatgtgaatttagtactcaaattaaaggtagtctttaatcataccatttatggttgggtttatatttttatcaattttgttttatattttatgatgtttcttctctttcttttctttttctatgtcatt

SEQ ID NO: 18787 - DNA, 894 bp, Zea Mays
ctattttatttaattcctggactgggcgcacaattttataagaatgcaggggctaaaacataattttctgggctcgactgcaatttgttttggcttaggatggatggcgggttggtttctagaaagtgtaagggctcttttgcaagttgacgcggccgaaggggtacgggtgaatgcggaccgcccagattagatcctatggtgcagattagatctaggcgctttataaaccggtacgcaacgtcaaccgtacgatcagagatccacggtccacgaatgcccacgatccaatctactgcgagccacacgattaaaatccgatggctcagacttaaaatgacgaaggggtattctctcttctaatctggaccctccgctccctgatcaacggtccacaatcgcaccagccgaatcgttattgcgcaactaatcacaaccgtcgcagatcgatccaatggccatagacaacccacatccgaccgatacgcccatctaatctacgcccttcatcttggatccgatggctctctagcttcttctcccccccggtgttcttccacggaggagcatctcaaccccgcggtggcacacaaaaccggcgaccagatcgacgcccaagagccccaacagctaccccggatggtgctacgtgtattcgagacaaagaagaaactatggaagcaattcttaccaagcttagcggcgcggaatcctctggccacggcgaaaacggatctacggcggatttaacttcgatggcgagaaattcccaaggcgcgggccaaaatttgcgagcggcgcggccccgaggtcatccatcccagcgtctcgcgtttgagggagatccgcacagggcgttcttattctctctccctcggtctctcacatcttctt

SEQ ID NO: 18788 - DNA, 333 bp, Zea Mays
aaaagttggtcccgatagagccgcagagaaaagggtgtccgcatcgtgacgggagagtgcatctgctactgtgttgaggcgacctggctggtactggacagagaaatcaaacccaaggattttactaatccactggtgctgcgggattgtggagagtcgctggtcgaggaggaacttgagactatagtggtctgttcgtatgatgaagcggcgtccccacaaatatggccgccagtgtcgtactgcttgtacgagaccaataagctctctttcatatgttgctaatttgtggtgtctagctgataaaggacgattgaagaatgcaatgggtcc

SEQ ID NO: 18789 - DNA, 682 bp, Zea Mays
atatcatttttctcctcaactagggctctgaggattccaaagataacggcgacacgaagcaagacctgcggagccggggcctgtgccttgtcccagtggcgagcacatacacggtggcggccgagacaccggagttctggcaccctacatttggaggcacattccggtagacaaacaaacaacctcatgcaaagagtgttctgaagctaaagcaaagcaacaacctggctcatctgttcttatcaaactaagttttgtacacagatggtgatgatcgtccagttttagtagcaagctaagtagcctgctgagacggaaagcaagaaatcatgatgccgcccaaagcaatcgaaggatgttttgcaagggaaaagacgtacgatgatggatatgataataggtttccggtggtctcttctaagacatgcatacatgctggatcaggtgcagaagagagaatgattaattgaggccgtgtgtatgtgtggcacctatactcatatatatgcatgcatgcaactttgcaagcaaataattagtgacagctatatataattagcactgtgtagtatgcataggttggcgttggaaggggaaagggtgggggcaggtgccaaaattatttcgaaggaaaagcaggagggtattggtgcagatagatggcaacagtcatggcagcatg

SEQ ID NO: 18790 - DNA, 680 bp, Zea Mays
gaatagtactgggccgaaactggcccaatacaacccatgcccatgcgaaaacacgtgcgctcgcgcccgcgttgacaactttgcgcagaagaccttagctatttgaataacttgaaaaggggtcgtggcactattcctgtgtttcactaacagctacaaacccccccccccggacttctatttctttacagcgtcaggtccacgacgtcgcacggcggcagaccgagcttcggcgagcctgtaccggccggataactcagctaccggtgctcccgtgcggttgacaccgaattgaacccttaataaccatttcccctcgatcaattgcacgatctgagctttatatcacactgtccacggagacagcgtgaactaaggatgaacacgggtgttcccgacgatctagcgcggtttagcttaattgaatgggtcgaggagcatcaggaaaatctaaggacactgaaatgggagagtagagagcatgatcagacctggaacgagctagccacagcgaggtcactatgcgcggtgtttcagaccgatttgggggaaatcccaaattggggctctttggtgagtaattggaggcacgagcgggtggattggatgcttgaatacctagcggagcggaggatgtgctcaatttatggggcccttgagcggtggcccgtgaatttgag

SEQ ID NO: 18791 - DNA, 433 bp, Zea Mays
ggggactgggatactcccaaggggcccgttgtgtcttcttgggggctctggacttgtacgcataggggtccggtgtccctctgagggggtccgaaccccacgttgaacacctggaatatacttcccttccttgccacgtggcgtccttggacctgcccatgtggtagggttgggtgccattcaccgcgtgccttgaggtgctgcacgagtgcggtgccttcatgctgtagaagagggtacccctgatctaggatatcgacagtggccccgggctcgcctcaggggaggatataaacctgcaagcggggctagagtctgattagcgctcctacacgcctgttgacgtaattactgccggccttcttatggtcatgccgactgtcgcgcctattcccacgattgactggcctgtgaccttcacacttgatgccac

SEQ ID NO: 18792 - DNA, 458 bp, Zea Mays
ccccataacttggccttttgcatgatgtgggctggacatgatcgaaccattcaagaaagctcaaggaggatacacccatgtacttgttgccatcgacaaatttataaagtggatagagtagacctcagccaacgcagtggagttcgtccaagaaatcatattcagattcgggatacccaacagcatcatcacagacctaggatctaacttcaccagcgcagagttctttgatttttgtgaacggaggagcatccaagtcaagtatgcattagtggcgcacccgagagctaatgggcaggtagaaagagcgaacagaatgatagttaaggcactcaggaagaaaatatttgacaagaatgagaagctcgcgggcaaatggatcagggaactgcctttgtagtctggagtctgcgaacccaaccgagccgggctctacacaggaacactccattcttcat

SEQ ID NO: 18793 - DNA, 489 bp, Zea Mays
ggggatgtgcaatgtgaagtctcatcgaatgtaacctcataggtctccataatgtggttagtctccaggttaagaacacgataagcacgagaatgtaatgcataacccagaaaaaccccatcagaagtctaagactcaaatttgtccaaatttacctgttttagcacaaagcatctgcaaccaaacaccctgaaatggctaagcttgggtggccgtccaaatcatagatcataagaagttttgttcagaaaagcccgaacaaagatgcgattggacacacaacaagcagtgttgatcgcttcggcccaaaaacgcctaggagtcctatgctcatcaagaatcgtcctggccatctcaacaagggttcgattcttgcattcattaatgccattctgctagggcacatacggagaggaaaactgatgcttgagtcccaaagaagcacagaatgttgcaaatggagtattttttaattctatgccattatca

SEQ ID NO: 18794 - DNA, 662 bp, Zea Mays
cctgtgcgagaccggggagcttcgctacgatgcaaggaaggtcccattgtgcttccttagcaggattagcggctcaggttcccggaatttctcaccggcggtcgatttcgcctccgtgccgcgttccatcgtgtgcgttcgtctctgcgcctgaatccatggtgagaaacctacacctatgtccgcctctgtcttctctgcgcgttgctcgcttccggtaggaatatagggctccggggcatcgggcacgccactcaccggcgggagccgccacacgggcagtgggcgccgccgagctcagccaccaggtagaagacagcttggatgccgtcgatcaaatctcggacgacccagattaaatcccaggataacccttcgcgaaatcgaatccgagccgtcgatgcgatcgcaagcggatcggatgccaccgtgctgtgggccgtagatcccagatcgggtggctagggtcgcgtaccgcttcggtctgtacataatctaatctgcaccgctcgtgctggatcggacggatcttgtttgaccataccccttcatccaggcacattagcataggagtccttacaattcattgaaaccaacccgcagtactcgggtgctgttctctgagtctaggaaaccttgcacagaggcccctgctgtttctg

SEQ ID NO: 18795 - DNA, 313 bp, Zea Mays
caggcactaggaggggttgcaataggcctgcacgtttttggtgctcggccttcgttcgttggcgggtgtcacaccgggccacatactgtgctatctctttcttcatccctctccaccagtatctggttttgaggtctaggtacatcttggtagtccctgggtggatggagtaggctgagttgtgagcttcctcgagcaggacttctcgtgcctccccttttggtacacagacgattcttgaaccaaagggctccttgttcatctgtcctgaggtccggaagttgttctttgcgagctttttccacaagtcttg

SEQ ID NO: 18796 - DNA, 787 bp, Zea Mays
gcaagttcactttgagatgcctatgagtccaggtgatgcagagataagtgttatgctggacatgttagctggggattcttctgactcggtccctgctgaaacaatggctgttgcaactatcccagagcttgagaaaaccgtggacactcgaaagcctgagggtactcgcccgaaacgtctctgccaggtcagtcatccaactgcacctgtcgaggggaagaaaaagaaaaagagacggcttcggcgagtgtcgtgtttggaccaggatgctggcccttctgctcctgctgctgaagaagtaccggtggaactctttactggagctgatcccagtgggtgtgaccctaccagagctgaacccaatgggtgtgaccctgctgacgctaatcccaatgggtgtgaccctgtaagaactgatcccaatgggtgtgaccctgccagagctaatcccaatgggtgtgatcctgtgtcgtttattgtccgtattgtttataaggacggagaagaagaagaggaagtcccattgattcggaagaacagtcggcgttacagagtcagtggggggaatagcgatattccttctccagctttgtctgcccttgttagcctgcaagaattatccatagcaaattttgatcaggctctcgaggatgttgttcctgaagatatgctgtcagagccaactgatggtgatatgatggacgtctgctctgacactccagatgtgggattagaggtatcccgggcagcatcttgtgcatcatcgaccttggaaggcggtcttcgg

SEQ ID NO: 18797 - DNA, 289 bp, Zea Mays
tcaatgttgaaggcatgctcatgtaccagaggttgttcagtgctcccgcccaagccggtctttctgcattgtcacaacaacttttatagcttcatatgattcatcgtaccggttgttgaagtgttaagttacttttgttttgaggggaagtattgcagatcgttacaatgtttctactcttgtgagaagtcgaaataggagtgccattggatgggttcatagctatgacatccattgatgttattctctttttctgctcaaagatgactgcaataggcatttgttatat

SEQ ID NO: 18798 - DNA, 621 bp, Zea Mays
ggaaagccgccggtaagtccctcttccccgacagtccgtaaaccagcggtttgaggcgatttatcggccggtttgagcggctaatcggccggctagctccggcttatcgggcgcatcggctaggacgcgtcgcgcggcttaccggccggttaggccggtttatcggtgatatgagccgattaatcggccagatgggccgattagccgagctgtcgagtaggggtagggttaggttaatttttccccttttggcttcaaatcatttgaaattattggacctccgattctagcaacgaaagacaaggttcatcttcacccctgcttccctatgtcaattatccggttggtgaggtaacacagcaaccaacgaggtgggtgtacgaatgggaggaccctgagtagcgtaggaccactcacacagggatcggacaccaaggcctacagcaagcatattggacccccgattctagcaacgaaagacaaggttcatcttcacccctgcttccctatgtcaattatccggttggtgaggtaacacagcaacccaacgaggtgggtgtacgaatgggaggaccctgagtactaccaaatgtttgttgagtcgtggagtgcgacttctgc

SEQ ID NO: 18799 - DNA, 787 bp, Zea Mays
atggcagggaccgataaggcccccgcccgactgatcacgcaccgacaaacctttgtcccaacgaaggcaccacgcctccgggggtcctaccgcctgctttggagggaggagcggacacctccggtggagcagcggcaggtgtcgccaacgggcccgaggcggacaagctttccgtgtaggcagccctgaccgatcggccgactaaaggtttgatgaataaggaaacaaattctactgaagccatcgacccagagaatagggcagggagttctgagaagttgtcttcctccatgattgggaagtcgcttgccatcttgcctaaaaaactgagatggaatccgctgtcgacatagcgagggacgtatccggaattgcctagaatttggagcatgcactcgcgtcatcatccttgtcctcgtccacatcgatcgagtcagtctcggtgccacgttccctgcgcatctgacactcagccctctttcacttcttctccaccctatctttcttatccttccgctactacgttgcccgcacgcgagccacctctttctccaccgcgctcttcggcaggggaacggggtcacctcacaacaccagagaagaggactgaaggaaggaggaagatggggctggaggatgtgaaactaaaaatggggaaaggaggaggggagtggaaccaaacgaacttacaaactccacaaagcctagctcaggacacattggagggcaacctggattcaaaacacatatgggatgatggcctcatccgcacccttgtgaacttcca

SEQ ID NO: 18800 - DNA, 916 bp, Zea Mays
taacgatatcgttgaaaagacccacagatacatttgaaggtaagtcctcaagaccggagaattggtaactgaattgtttctcttcattgttgactagaggaacaggtgcaggcggttgttcttgctggacctgttcaaccggccaaggatcccaaccatcatcagcattattggcattggcatcctctaattcaatttcaccattggggggatgttgaggtcaaattggaaattgggcacaggttgccccaatccaaaaaattccaccggaagttgatgcccattatgagggtacggaggtacaggttcttcatcctcaggcatgttaccaagcatgaactgctggactatgtcacactgaacagtccaggaaaccccatgaaacccttcagctactgaaaacacaataaactatggaacctcctgcagagaagtcacctgtgctctaacaagaaatctagtagcattagaaatatccggatcccacatgagcacccgaccaaaagaaccaatagcattctgaatgtgctcgtgtgaccagaaatccaagggaaacccaaggagcagcaaccaacattcatgattaaaaaataatgctcgttgattccaagccgcattgtgtctaatcacagtgaaagtaaagcccaaagcttgttgcggacccatggccacgagattgtccctatcaaaaaatgaatcggaacctcaccaaagcctgacccaagtgggagcgctgaacactcctaatctgaacatgtctaatctccaaaaggtactctcggacaatgccagcaaaaaattggaaattgacctcatgctcaggtagcggttggaccaggacaattccccaatcatcatgagcggacggttgcgggcgagtgatagtacgtaccataatctcccgatgatcaatggg

SEQ ID NO: 18801 - DNA, 945 bp, Zea Mays
gtcgcgatttcctggcgacgacgacctctaccggagacaataatcctacagacatcatgcgcaagcctacccgagcaaaagccctcactcaattggatgggtttgacccaaatcgatgcttgttcacggtcatggcggcacaagggctccggtgagcgtgttccgggcaacaaaacgcggtagggtctaaattgaagcttgggtgagtttcacaaattcacgagaggtcgagtatacgcactaatttggaccaagcgaggggggtggaagagtgagtcgacgtgagcatgctctcagaggtgttccgtggcgtcgagatggtgttctcgataccagaatgcggtagtgctcaatcggttaggccgatgagcaacgttaatagtcaaggatgataaaacatggtacagaaggggattaacagacctgagatcggcaggccacggcgagatgcctcacaacggcgagtttggctaatttgggggaaaaactaaattcgctgtctatggtggctaatcggaggtgagagttggtgtcctggcttcgcaacaggctaacggagcaggctgcacactcaatttataccgtttgcaagtggtggctccgaatttgggaaaggcaagcaggcggctggagcaaagatgagtcaccagagttgcttatcgtggcattcactgggcaaagggtttacgacggtcacgacttagtcttcacggcctgcgacgacatggtgaaacggcttaaggcgtgtcatgaccgaggtaaatggcaggcacgacgatgatggtcgtgcggtcacgtcgccggtcaagtgggtacgacgactaagaaggaacaatgccccaagttcatcctccgcgcaagatctttcacctcacatagatatccgcgcaccactaggcacgaatcacagcgccggcgtggatcgcaacacgggtttaccggcgg

SEQ ID NO: 18802 - DNA, 426 bp, Zea Mays
gccaactccattgcagcggcggtaagaagaggccggcgcggataagccactggcggatagaccctacctggcgatgtccggcgtctacatcgcagaggccctcaagccatgaacgcacgcacgcacatctcctctcctgaattcgcgtcctgctttgctgaatcctgcggcattattttccggctcagctgtcaagaatgagaaggcaatcacgtcttcacctgactatccctctctgttcctggcgtgtaaagccgaaagctgattgggaaacggaacaggacaggagccgcgcgtgccagccaccagttcgaagtctacggaggatagccggagacaaacgtatgtggcgagggctagctgacagtgatctcgtcacccctctccaggccgcagctacactgaccagagacggtcctgcacgaa

SEQ ID NO: 18803 - DNA, 439 bp, Zea Mays
gggagataagcgggttgctgcattggcggctcgctgttgcttctgagctgagtcatggatcgttgtggtggcaccaatatatatctctcagacgatagcccttccctactggctagcttgttcacgtcaaccctgctcacttgtatcgaatttacgcactgacggttgtggttgcacaatagcactggcctaatatataccgtaacatgtgttttttattgtagtgcgttgttctgatcatagtagatctccgcttcattatcatggaacccttagcttgttgctctattaacccagaactgacataaagatgctcttcacaatcacagatttgtgcagagtgagagttgctgtaaggctccggccgaagaattcagaggatttagctcatggtgctgactttgatagctgtgttgagttgcagcctgaggttagcttg

SEQ ID NO: 18804 - DNA, 333 bp, Zea Mays
acttattctgcctcagatatggacagtcttttataaaatgaccagacttcccacagttgaagcagccagttgaggaactagggagggcgaggaaacgagcaccaggggcactcggctgatttgtagaagtgggggtagtggaagggcgaatgaaaacaggttgtttgaatggataggagggtgggcgaggcgaagaacgattctgattaaatggtcggattaccaacccggttcacttctcaggtccctgattggacctgtcatccccaaatccctttgattttccttggcctgtattcttggcttctacttctagcgccgtgctggcagctc

SEQ ID NO: 18805 - DNA, 274 bp, Zea Mays
gttttgtattggatgtagggaattgtgcgtgcaggaggggtgcatggctgcatgcacatgcatgtgtggggctcaagtagttttccttaaacgcacgccaaagggataaacaccatgcatgtgggtcccaccggtagcattttctccctcctttctctacacaactcacgcacgacacgagtggagtagtgggtgagtgccgagtggttacctttcttcctcaccgctcacgcacatgcgggcaggaagccgaccatggcgctgggtgctcgac

SEQ ID NO: 18806 - DNA, 287 bp, Zea Mays
gccgcttcgcttccacctccgcatcatgtatagccttgccgttgtccgtttggtacaccgggttgctgggtcggcgatcgccggtgtgctacgccgccatgcttcgcctctcctcatcggtgcctggcatgtcggggaagaagcggtctggcccattgatccatcaatggacggtcaagatcatttcagaaaataatggttcagcttggaagtttatgaccgtagatcttggatcgcatggccgatggcgcgcgcgttgttttgaccgtgaatcctgaatccggtgg

SEQ ID NO: 18807 - DNA, 723 bp, Zea Mays
gtggtggagcaaaaattcggtcggatatagtgtacagaagtgcagaagcctcaatttgcggctcagttacttcatggtcccaccagcacttggtgggaaaactttgtggttgtgcaactagcaggacatcaagttacttgggctgaatttaaggaagctttccgagcacactatattcctgatggagacttgcaattaaaactagaggagtttttaatgctaaagcagggtcctcacacggtaatgcagtatctcggaaagttcaatcatttgtctcaatatgctgttgaccatgtgaacaccgatgttaaaaagcgagattgcttcatgagagggctaagttttaaactgcagaagaaaatggccacatgttatgacctaacatataaccgagctgtcagtgtgccgattgcagtggaagaaaaagggcgggtgcaccaaaatgctaaaagaatgtggaaaggatttggagctggctcttcctaggacccaacaaagcatcaaaaggtaataatcagaacagttggctctaccaacactccctatcgtccagccgcttatcctgctaaaactcctatctacatccgtcccactaatatgcaacgccaatccatacccacaaatagccaagttccccgtttgcctgctccccctggcaccaaatatccttgctacaactgtggaaaagtgggacattttattaaagactatccctacccccac

SEQ ID NO: 18808 - DNA, 417 bp, Zea Mays
gatggagtaggctgagttgtgagcttcatcgagtaggacttcttgcgcctccccttttggtacacacagacggttcttgaaccaaaggactccttgatcatctgtcctgaggtccagaagttgttctttgcgagctttttccataagtcttgttgtctccgaatccaggcgttgagctttgcatatgaggtcttctagcattggtttgacttctaggctgccgttgtttcccaaacatgcattcagctgagctgattccttcttccaatcttctaaaaagttggttccctttatcctgaaaggttttcggctgagggcgtctgctaccacgttggcctttccggggtgataatgaatctcaaggtcataatctttgatcagttctagccatcttctctatcggaggttgagatctgg

SEQ ID NO: 18809 - DNA, 352 bp, Zea Mays
caacgatccaataggggatctagaggccagggtggaacgactcatgtcagaactacgccatgggagtagggagcgtgcgcgagatagtcgccgcattgctgagctgtcagtgggacacagctattgactgggcggtaattcgcgctctttctcctgggattgtgaggcaaagactctagcccgagtaacggaattaagcgcatccctagaaaatctacaagcatattgtaacaccctgcatgaagaggtgcacgtgttatacgaccggctgcatccgaatgtaccgccagaggttgcagcagtgggagccggaccatctggagctgctagtggaggacctgatggggagttg

SEQ ID NO: 18810 - DNA, 373 bp, Zea Mays
cacacaatgaactgtgaaggctacattgataggatgaatgtacatatacaagaatacctgttgtggaggaagctaagtaaaatatggaggagggggaggcggcaatgtaaaagctggcgacgatggctggcatttgtatgcccatttgttgtgccacttgctacaaatgagatgcaagtcagtatttaggaaatatgaaatggcaaaattttctagtggttatgaataagacaatagttaaacttactgaaaggaaatccaactgttggacgaatagattcacataatactggctttgccacatttggtgctcggcttgctgcctttggtactcctgttgatgccttaccatttctagtagcatagaaatttc

SEQ ID NO: 18811 - DNA, 956 bp, Zea Mays
acggggagatccggacgagcggaggcggcatggagagggagggcgcggggaggcggcgtggggaaagaggttagggatgatggtgtgggcccaaagggaggcaggacagagaagtgcataggacaccaagttgattcatagaattttagggggttatttgtaaaaaatgacgcgggacggcgttgaaactggtgctttaatatagtagaatagggataaccataggcccaatacagttagatgatcgatgtaaatttacggaccaaccatactagaaaaatccacgtaactgggcctttctggcacgcccattaggactagaactaggctggcatatccaaagtggtttgtggtggcttaattgatgcgtaattttcttagcctgagcaaccctacatccctcactggttccaaaatcggctagcacaacgcgagggccgcacctacctctccttcgcctcctttgtcctcgccgcaatcccaccccgtccgctccactcgccccacgacgtatctcccaatcaccatgaccgactaggtgggctccacaaggacctgctggacctcgtcgccgcggcgtgcctcctgtcgctcgacctcctcctctttcgtgtcgtctacggctcctggcgcatcgctgtagccgccttcaccgcccgtcacagctgcacgcgactcgactgcccctagctgctcctccccacggatttcagcgccgatctcgaccacctaatcatgtgccccaactgcaaggtctccatcggcaccctcccagcgcgtctgggccatgtgaacccacgtcaatttgtacctctcggctctacgcgcggggtgattgttgtcgagaatgagcgtggcgagatgcacctgctcgatcttgtcactggtgttcgcaaatcgctcccatccatcgccatgttccccctcatcatctgtgtcgagggtctccaggtcca

SEQ ID NO: 18812 - DNA, 543 bp, Zea Mays
gttcagatcagatcgccaggttcagttcatctcgccgccggtgatcccacgccgtgatcctcgtcgccgttgcgattcgtgctctgtgggggtgcagataactcttaagggcaagaaatatcgcatcgtggatgaactcaggccactgttccgctccggccgtcgtgcccgcctgagttacggccgattcggatgaactcaccggagatagccatctatcgaccatgcgccacgtgccttggtgtcttaccacgtcacaatagctcatattacacacgttcggtgatcgccggtgagcccgccacgatgaaagccaccaatccgtacaggttcgccggagctcggcctggcgccgttcgccgtcgaggaccgcaggttgtgaaggattagaaagtggagggcctcggtgtaaatgtcagtgacccattgaaatagtgtgcgggactattagccagtttttcaaacgaccgaggacccttgcgcaaagttggcaccgcgggcgcgtgcggacgcgcgttttctctgttctcgggccgacttgga

SEQ ID NO: 18813 - DNA, 535 bp, Zea Mays
tactggacgaaacacgagcggcggctgagcagggagcaatggcagcggctcgcggctatgccctagcgaaacgcacgcgacaaacaccctggtcgaggcacgaactagagggatgcgaggaggagcggtggtttgggttataggcaagggtttggggcgagtttgttggcatcctaacaaccctccagaggttctcggcgacggctgcatgcccacggcggggagggcgccgcggatttcgggaagacgatgacccagtatgcgggcccggtcagtcagtgggagcagtgcgaggggcagcgccgcgtcaggtgggaagttggttccgccattcccccgcggtcgccgcaaccaccaggagcacggcggctgacgacgttccattattctctctctcctccctctctgaacgcgcggacggcacggaggaatccgagcggagtcggccgaaatcccagccgaactctgcgctccgctgcaacgattcggcaagaatcacgggagggagacgactgggatatgatcccaccggtca

SEQ ID NO: 18814 - DNA, 637 bp, Zea Mays
gaggaatcttcagccaacatatccagcatggcacttatctcagcatcacttggattcaaaggtacctcgaaatgaacctgcctctcgtcatcagggatttcaccaagtgaggcaaccaaagcactaacctcttcgggagagggtcgcactctaaggcccaaaccgctatcaccagcaggaggattcgacacaaaattggtaaaagccttggaaggaggcagattccaggccgagtatgcaataggagcaccgatgttcgacaccttgcctctgagtatcatctcgagccggctgaccaaatccactgcaagaattcttctgttggtaacctgggtcgaatcagcgaggcctcattacaaataagtcgggtaggctctgtcctttaacggttgaatgttcttgaaaacgaaatcggcgaccaaagcttctgcagtcagccccctctctttcaacagtccaacctcagcaagcagagcccctgcctcagccacctccaggtctatgggggactcggtccagctcggagtacgaacatctggctgtcgccctgaccgtgggggagggaattcccgtggttctccatgataaaccactccaggtccatcctttgatgctgtccttgagtgggatgttgagg

SEQ ID NO: 18815 - DNA, 461 bp, Zea Mays
ccgctgcatgctggcagactcttgccgccatcgttgcgacttgcgaggccgtgtacatgtcattgattgattgggctggccacgatgaaccagcgataatgcgagatgggcccgtacaaacgcaggacggcaagcgcatgtgagatccagaataatggaaagggcagagcaacgcggctggcctacaaaacaaatgaaacaatgatgatcgccggtgcggtgcgcacaggcgcaacctggcacgtactgtgcaacggcacttcggatggacacgaagcgaggcaggcaggcagggtcacggtgacaggcgtgcgtacgtacgtgtctacctacgtgatgatgatgttgccgctacactggatttggttggccgtgcatatgctactccgatcccatgatagatctcattcttctcgccgcccgcactgttttcacttttcaccgccgccgttgaggtcgca

SEQ ID NO: 18816 - DNA, 473 bp, Zea Mays
cagacattcttgattctgatatggataataatagccataatgaaagtgtggataatgctttgactgatcttgatgatgttatggttctcagaaaaggtcgtaaaattcgtcacaggaaaaaaactgtgaggaagaaaaaaggatagtaaatctcccaataataggaacattcctattaagtggagaggtcagaatgaggggcatacccaaaattgttcagaattataggtttaatttgaaactgtcagggtctgggtaaagaagtgaaaagtgagttccttcgagatattattaggagagagagaattgattttattggtttgcaagaaaccaacaagaaaaactttgatgactcttggttggacttcattggtggtaacagaaattttgtttgggtctggtctccccctaatggttggtctggaggcttactggtagggtttgatgctgacatctttgatgttagagagaaa

SEQ ID NO: 18817 - DNA, 502 bp, Zea Mays
tcatacacgcgccacattgagaagttcactgacacatctttggccgtatctggcgaattcattatctcatttccggccaaatctttcaactcgttcccaactacatgcatctttgcaatggctattgccaggtcactacgaaccgtttcaaatctggttatctgcgaaaccacatactatgcagttggaattgaactcggaaattaataatactactgcaaggaaaccttaccgacactgaacgtggttcagagcactgtttcgcgacagaaggggtctgctgctgggtgtacccagtacctgatgacaacagaagagttcagagcactggttgtattgttggtaagtttgctgagtgtttagtacctgatgtggccgcgcagttcacgctcggggaggagtgctccttggcgcgaacgtactcgcctgaaggcttggcaacgatcgacacagacagacgactgaaagctgaagctacttcggcctcactgtccaactcgac

SEQ ID NO: 18818 - DNA, 319 bp, Zea Mays
gtcaagaaatgcgccaagaacggcaggaacgacatcaactgccacctccaccaccaccagctctgcccagggataagcaccgggagtttatgagtcataaccaccgacattctctaactcctccgacccactacaagctgatgactggctaaaatctatggacaagatgctcaatatagctcagtgcactgaaagggagaaagtgctatatgcatcgggtcgccttactggccccgctgcggattggtgggatgcatattgcgctgctcacgctactgccaacaccattacctgtgcagaattctccactcacttcagg

SEQ ID NO: 18819 - DNA, 809 bp, Zea Mays
gtccaatgttcaggaaagtatctatacagctggcatctgatgcattgtttccttgtcaacaaaaagggaaacagatatcaactattcccataggtaaaaagggaaatgtatgccaaagctggaaatattgtgatgtaattaatgggttattgctataagataatttatagcatgattagtaagtagaacaagtgtgttttagagagcatgcatcgtcatccactgcctattaatggaaagaccatgagaagaatacccagcagtccaatctcagttcacaagcagcaggaaacatgttatagttacaccaggactgagtctgatagtgattcgaaaccagcacaaacaactccgactacacgctaccaaaccaaaaaaatggggggaaacaaaaggagcgcgtgcgagggtgcgacaaactcttgcgccacttgagcaactctatgtcaaaggcagatgcggaatcaccgcattgtttttcgctcaattgtcctcaaacaagcttctcgacaacaatgctatgggcatccaagtcaaacagcggggagcactagaagctcagcgtaacagtttttagcgccaaaaaaagctactacatgcaagcaatttgaactaatcttgcctgatgcgtttagcagacgctaagcattcgaaaatagcaagtgcaaccaggtctccggtcctccccgagctggaactatcaaccatccatacaccatgcaacgccggacctcagattgcaggcagaggtgtcaattcaccagaacctataacttcgcactacaccacaggctactctagaacttctg

SEQ ID NO: 18820 - DNA, 635 bp, Zea Mays
cccagagctccagctttctctcgagcagaacaggtactcttttgcaatcacacccacgcccgttggacagtcacaccggtcaccgtttgccacctgcagtgctggtaagaaccttgtaagagcggggtaagacacttcataatttgtattccaccaccaccaccaccaccctgagagatagttgtagggctcacattgtttgttgcttttttgtctctgttttatgctaacaatgacaggaccaaagaatcaaatggacaaggacaaggggcctaagcttaacgacgatgagtgtgtctcttagctagaattgaaggagatgatgcacgcgatgactgaagcttttaaaaaataccaggactctgcggcgacatcctatgagcagcttgattgacgagttgctaaacttgttacacgcatgaacgtactggaggctcgtccccccaccaactccagccccagctaactctcctgtggacgacgacgacgatgacgacgatgtttatgcaccgctgcgacaacgcctcgcacgtaatcgacaaggtctgggaggtaatggtagacgttgtcatcataatcctgaaccagaccacgatccatttgctaagattaagttctctattccaccgttcatg

SEQ ID NO: 18821 - DNA, 639 bp, Zea Mays
tgttctccttactatagttgctctatgaatgtggaattactttgggaacaacttaattgctagagataaaacgcaagcaagagaacaagagggatgagagagaggaagaaacatatcataaacaacaatcaacacaagaacactgtcgatttattttccgaggttcggtttcgaataacctactcctcgttgaggagctaactaaagacggccccttttaactctttccctctttcaaaaggacactagaaccggttaaatgttcttcttttcataaagtacacttagtccccataaggacaaccacataattcggtgtctctcgctagctttacaagtatgtgaattgggtgagaatgataatgaaaacttaaaacacaagaactgaatgcaacaaggtcaaaagaaacactatgcaaagacgctactatttctctagctcaactttgatgaatttgatgcttggtaggagttgggatgcttagagttgttgcaagtattgaatgtgagttttgtgtagctcttgtgtcttcagtgtactggttggggtgtatttatagctccaacaactcatatatgcgttggagtaaatgggcatttactacacagtcgggtggcacactggacccttgtcaaatt

SEQ ID NO: 18822 - DNA, 691 bp, Zea Mays
atggcttgctgaatcttttttggaatttaaatcgataaggaaggcgtacaagttcatactttttccctcttccttcttcttcagcatcccccatccactagaggttgggaaagttcttttgccaagtattcctgcaccaagtccctagtgctaatgtgctcagccaccaccttaaattctacctcggccacttggcagggagaccctagctgcatattgcacagaggtcgagtcatgccgaagcttagctttaagggactcattgtaacgccccaggtgttacttagggttttcactcaagactatacaagtaagcccatcatcacatgtgacttaagttgggaaaagtacaccaaatttggagctcaagatcctaagtaagtgcaacctatcttagatgtcatgccttggcttaccatgtacattgaaggggtagaaattgcccaaaaccctaatgcaccccctgtggacaattggagtactataggtaagtatgaccaaaaagttatgaaaaccacttgatcatgtcttgggccaattataaaagatgtagtgcacttaataccctacaaataatagtaagaaagtaaccccaaaaaatttcagaaaaaccccaaaagattcacaaaagggttgagcataagagaaaaatcagaattcttctaagtccaaaaccaccccctttccaaag

SEQ ID NO: 18823 - DNA, 496 bp, Zea Mays
tctctatttatagcctcaaggaggacctccaggagcactggggtttgtcgcatatgggagaggaggtgtggccgagcccctgtagccggtatggcccttgtactcactgttgacttataccgggaggggatgtctggttcctgtatttgcatctttgactacggggagagccgaggccaaggccgagggctcggtcacgtacccgagccagtctgatggggaagctgtccaagtcgtagtggttggagtagtggtgggtatggcgaaaagctcttggtaatacgtcagctctattgcttctggtgacgtcgtgtatcctcccgttggtattatcgaggtcgaatccatgctcgggcaaggcggaagtcttcccgaggccgtgaccaaaccgaccccgggactcgcagccgtgcatgacaaaatcaaaggagtggccttctgtgggattcacggggagcaggtagccgaggctaagctcgggcgaggcgtaatttcc

SEQ ID NO: 18824 - DNA, 717 bp, Zea Mays
ctgatttcatcgagagtaccctttagggctggatcagtattagggttgtatggttctggaggaggagagagttcagccacaccaaaatataagtttttgtcagactcgaagctaaaataattacgaagctaaaacatgacaaatgtacctatacgcattttgcgctcagcggtttcttgagcttttctcacttcttctgaggcaagatgatattcttcttcgctttgtcagataccttcgtcggctatctcttaaccattgttcaaccaaacttcggaataaaatttcccgctaagggcagtagcttcggctgaaggcactttgatgttagtcgttgaaactgagaagtctggctaaattacagcattcgcatgttcacaaccagctttttcaagcaaagatactgctccccgagcaccgacacaggcacaaaaatccccctgctagtgagaacttcgtcaaatgcctcgatttcgccctaaatccatttgatcacaccctcaggatcaccacgaatgacattccactcagccgagaacacaccaacactagtaaaagcatttttagcttgtctgagcactgcatagcaatgttatagcattcctatttcacctgtcgaagctctttaacattcttttgaaccctcgatcgctcggtgtcagatatctcgcgctacgattgctccacgttgaaattttcagtaacttcatcaagctt

SEQ ID NO: 18825 - DNA, 525 bp, Zea Mays
cccggataacgccatggggtagaaagatcttcacccctattgagccatgggcacttttccgtccggccgccgtgtccgcttagcctcggtcgcttcgaatctaccctcgctagagttagacacctcgcggtcttgtgccacatgcctcggcactttaaccacgccgtcatgactcatattaacctatcctgtgatcgccggtgaggatgccacgattatggccaccaatcatgtgcgccagtgcacctcctcctctccgcccgccgcgcgtccccattaaattcactagccaccgctcaaacacactataaattgagcacaccctcggctccgttaggtaatctagcatccaatccaaccgcttgtgccctcaattactcactagagcccgcgaattgctcttttcccccaaatcggtttccgccaccgtgaaagagccctcaccgtgactagcttgttccaggtctgttcatactctctgctcttgcatttcagcatccttaggatctcctgatgctcctcgac

SEQ ID NO: 18826 - DNA, 927 bp, Zea Mays
gcgtcttcgcaaggtagaccaccctccaaggccgatgaagcactggaaactacacgggttatctcttgcccggcaggatcacgtggcagaagaccatcatctgggacctctgaacagatagtgggattgtcagcttcaggaggctctgatagaaggtcctcaaggatgatctcttccaactcttggtcaaaatcagatattgacaacccctggaggctgacgagcgctaacaagacttgtgtgggaatgtcgttgaccctgtggcgatggctattcttgcggatcagcggaatttcttcctcttcttcctcctcttcctcatcaagcgctccgccggcaacctgaacatcgtcgcaacctccgacattgtcctcgaggatggtgctctctaggccatcgccaaggaataacgtggaggggccagtgtctcgctccaagcatgacaaccgccgaagtcgccttttcttcttcttctcctcgacaggtgcagctggatggttcactcggcgtgaacacttgcgacgagcaccctctggtttctgaatctcctcgccttcaccaaagttttgcccaatcgcaactgccattggcttagtgcgggcagagtcagatgattctctggccagcaagttaagaacaacattcatctcaacatcatcagtactggacaacatctcaaagtaagtctgcttctcagcctcaggaagatttcggaggggagcaatcaaggcctcaatgtcctctgaggagggtcgaactctatggcccgggctaccatctcgaacatgaggattggaaacaaaattggagaaaggactctgcggaggcaggttccaaggagaataagataagggggcgccaacattcgaaaccctgccccttagcatcagatcaagtcggcttagcaggtcctcattgggaatccgt

SEQ ID NO: 18827 - DNA, 473 bp, Zea Mays
cagtccactctgatacgaagtcaactagtgcttgagtctttactgttgtgcgaggccgaaactctatgtcatgagctcccagttcacatgcccacttggctattcttccaatggcttctttgttgtgaaggatatcccctattggaaacccggtgactactatgactttgtggtcgtcaaagtagtgacggagcttgcgagcgattagaagtaccgcgtacagtagtttttgaacttggggatactttttttagagggtcccagaacttcgctgatgaagtacaccggatgctgtactagatatgtgtgtccttcctccacctgctcgactactaacgtggtgctcaccatgtgagttgtgcaggatatgtataacaacagatcttctgccggctgattcggtgtggctcggcgtggcggcttgagtactggtggtgtggtcagaaactttttcaatgcttctagagcttcat

SEQ ID NO: 18828 - DNA, 603 bp, Zea Mays
gattcagtttcagtgtcttcctctttatcttctactggaaattcagcaaacctattatcttcaatttgcttgctgctgccaccatcttcatcttctacaatttgcttacccctgccacaatctgctgcatctcctagactgactccttgtgattctttggaaggttgctcaaccatttgaagacagacaacaacttcctcaacataaatttctgcaacaccagcatcagttatgtgactaaccattgttaggcaagatgcatcatcgactagcagtacaagaccattgctcaattctgcccctggcttcaaccaatgtaaacgcataaagttcttactgacaacatgatctgctaggtggccctgtatctctggaagagaaaccttgtccaactccacatatgacaaatcacatttgcctcctacatactcaagcttcccttgatttatcacaaatcccccactatgatggaacctaattgacaaatgatccaacctacatttcataaggaaatgttaatacacttcctaaatcatgcagaccttggactacagctacgtcgtcatccatccacccacaagatatggaccttcccccaaaaac

SEQ ID NO: 18829 - DNA, 839 bp, Zea Mays
cattcgggaagaaagagctcggggctatgtcccacactctagccgtctcccatgtgagcggtgcagtcaggacagtcgttggtcttgttcccaaggccacgctggtgtcggggctgtcctctcctttttcaccgagtgatctgggtccacacccgggtgggtgatgttgacaaaggggtccaccgtgataggggtgcaatcttagtcggtcgagccacaagtgttttttggccctgggcccgcccgacgcgagtgtaatcctacgtgaggtggaagttggttgaggtttttgtgccttggagttcatcagcgcagttcttgttggagtcaggtgggacgagcctgcctccgcaattggtgccatcggagaagatctcctctcggatggatccgtgatgcgatgcaagacgccttcttgacctgcgatgtaagagagggatccaaagcggaacacctccccgacgttgaaggtgatcggggtgttgaagatgatagccatggagtggtcatggatcaacgtcgcacctcctacctagcgcgccagatgtcgatgtttatgacccgactacgcaccacggggttccccacatgatgcttttgagcagaacgcgcgttgttgactgcgactcgatggtacgtgcgggagcacgtcagaccacacgagtgtttatacaggttcagaccgctagaatgcgtaacaccctacttctatcgaggatgtgtattagagtttcaccggagtatatggattacaggtgaactacggcggtggaggatgagttctcctgccgatctggtggtgcgtggttgctatgagatggctaatcagctataaggtg

SEQ ID NO: 18830 - DNA, 478 bp, Zea Mays
aagggcacatttccctttcatctatgttttcccatggttcactgcatgcgggacacattagacatcgctcctccgcacacgctcgtcgctacactgttggatcaagatgtcagccgcctgaaccgttcaccacgtggggatgctgatggggtggacccctggtgtcagaatcatctccttgcccagagtttgttagagacaacagaattcatgtacccactgccgggcatctcgggcatgatttggtcgtcgccctggctataaaactctacaccgaaggggggggggggctaagttctaaggtcgtgaccctctcccacctcatctgcctgcttagcttagatccgcgtatgctcccccatcgagaaagaagcgtgtgttgccgtggtcgagatcgaacaagagagttgtcattgcaggggtaattccgatatgctcgtgctgacacctcgagatgatgctacgaagaaccgccgaa

SEQ ID NO: 18831 - DNA, 1132 bp, Zea Mays
tgatgctcatccatgagctcagtaggtgcgaacgcctgtagctcactgaccgtgtgtgtctcatggctgacaaccaggccgtggttaccaccatcagccccaccgttaacatcctccttctggacctgaccgccatcggccttgctgccattcacattttctcctctgaactgttctctgtcccattcttgttgcgatcaaccttccctttgggatcacccaaattatccttatctttcctgctgccttcttctccgtcctgatcaaaagcaagcggcaccgggacaccatccaccaggtgcttctccacccagtaatgcacttcataaataactctgttgatctccacctcaccagcagaggggactgcttctggatcaattacacccaccatcatccgacagatgccatgcttccggaagaattccatgtcaacctccatagtggtgccaagcgtagacccaactccccaaatatgtggataagtgcacagtgccgacggtagaccatcaaactgtatccaaacgtcagtaagagtggccttcactcgacccccggatgaactagccttgaactcaagaattgccttctgagacttagcctggaccggaccccattcgatcatcctttgcaattccgctgctgcaggaaaggaagtccgaaacacctttggggtgatttgatccacgttccatggaccaagtccgggtagcagcctttccaactctcgaatcacattgtccaggctaatactcccctccaccacttgtattattgccaacctgttctcattgctacccttagtgagcttcttgttggaggggatgtgaaagaaaccgccatttttatggcaaaaccagctgggatagcatgcaccttaggagcgttaaacaccggacatttcagcttgatatggtgtcagtaccacatacttcgcagaataactccgctgtacactcgctcatcacgtggcctttcccgtaacacctatggcagtaccccttgctattcagcttgccctcctccttggtaccttccttctccttgttcacagtaatcttcttctcttcctttgctgacgctgaaggaaggagtggtccagcatttgcactcgcctgcttgtgatcggcgg

SEQ ID NO: 18832 - DNA, 274 bp, Zea Mays
gtgggtgctgagcggggccgtggttgtatggttgtgggatgtggtgctgatatgtgtgggcgacaactcttgggttgtcggcgggttgcgcccgggacatcctgtccctggtggccttcgtttccaggcagtccctcgtcgggtgcgtgcagtcttcgccgtgaaataggcagtaaaacctgcgcggctgctgtgcccgtcctcgacaccgaccacgcgtggcattgccgcggccctggggagggggataatcttgacgacgaggggtctcaac

SEQ ID NO: 18833 - DNA, 864 bp, Zea Mays
cacccaagcataccccttaggttaatttggttagtctgtcctcgactcgtgtttgtccgcgacgatggcggaacaaagacatcagcaagcccgttttgagctaaacaacgtggtagggttcaatcaatcgacttgggaagtaccagtggctcaccagggttatggtgcttgcgagaatttgaacggaggaaatgtagaagagtcggtagacgtgaagggcggtctgcggtcgtgtccagtggcggcgagacgacgttcctgaagttgtactacggtagcattcaaatacccatgctagtgagcatcatgatacctaaatgaagctataacatgtagcagttgcgctaggattacctcaggtgaggctggccacggtgaagctactaacagcggcgccggtgaccattttcggggaaaaccggtgagctcgagctacggtggatgaggtgaagtagtgagaagtggattgaatgcataataggatggtggagagaggggagtacccaatttaaaggaaccgatcgtgcacttcacgaatgtggggcgagtgtgttcacgacggcgtcgagatatttgcaccgagacctgttcttcatggcacgccgtgaaacaatggcctcgggtagtaactatctacccgccacaactcccagcaccgtggtgaattggtctatggcgtggcacaaccaaggaagacggcgaccaccacagcaatggccgctcggccacgtcgccgtgcaagtggatacgacagcgcaaggctcaatccactcccctatgatattttcacctcccccggtaatatccagccaaaccaagcaaaattttcatggcaagctcgaatcacagcgtggagatcaccgg

SEQ ID NO: 18834 - DNA, 747 bp, Zea Mays
gggttatactggtttaggcttgtgccctagtctaatgtagtgctgatcgtagtattgcttgtggggcgtgttacagtagttgtgcttgtttgtagagagatggttgtcttgtccttttatagctcaagggtggacttgacagtgggaacttcataatctacttgggggctcaatttgttgtcaccgggtggcgtagccctcctaacaccgtccataaggtcatgcgctgccgtactcctgatatggcgtactgctccatccgtccagtatacgggtccctataccatgtgtttggttccgatgctaggcagagcctagttcataagctcatgcaggccaagccaagcctgtattagtggatgcaagtaataatttgtgtggttgtttggttgactgcacgtaactagccaggatttggtgggcacgtgtttggtgggcacatgtataactggatgcaagtaatataggacacacttgtaagtgctactggctataccttaggtagtagaaatacaagtcggctgataatttaacaaagaacagatctttgccagaacacacttgtaagtgctacaggatttctgttaatacaagaacacatgtatatctgttctttgatatcaaataacagatctttgccagatactacaagtcggctcataatttaacaaagaacagatctttgccagaacacacttgtaagtgctacaggatttctgttaatacaagaacacatgtatatctgtt

SEQ ID NO: 18835 - DNA, 652 bp, Zea Mays
actcatgacctacgagcccctctgactgcggcacatttatagcccgctcatctccggccagtggcacactcatgacctatcgaaactagacctgagtgcgtaggccactggcagggtgcaacacaacgagccacgtcgagccataggctatgaaggacaggggtcgttatagcccaaatgatggcgctcgtgcccacgctgctcatgtcgtccgtaataaagaatatgggacagccaggtgaccgaaaagcatgcatggctttaccccatggtaatacacctagttttaccatctcggttcgaccccctccttagcctataaagggaggagctcgtcgccctgacataagggggaccccttttctgaaggagcacacgggggacgcccttttggagagggcactcggaggtttaaccgcatgggaggataacgcaatgatggatcaagagaagacgacgcctagaagaccgacgaacaggagaaggatctggaggccggagccccgtcgccaaaccaagacttagctaggactccaccttgtaaccatctccattacggataagagacgtgtgagcctctcctccatctctcgcctgcttgtaacctctgctacgaactttgatcgtcaatggtaacggtagcacaagccgt

SEQ ID NO: 18836 - DNA, 382 bp, Zea Mays
tttagattagctaaccacacatatcacaagacctggagtcctggagagtggagatccaagatcgctaagaaaggatctaataaaaatgaggaaaacctgaaagagacaagaaacataggtaactccctaatggcatgaatccaccacacattggaaaacacaaatcacatagattgggatttatctaggacaaaggatggacatccagtacaattcctcagcttgtggaatcttaggattaaagtaccaatgtcttgatccatggacacaattgttggagactggcgagtgaaacccctaaccctaacccgtcttgcagcggattagcaggataccgaatcatgcaagatccagaatgtgccacgccaaaattgaacatggg

SEQ ID NO: 18837 - DNA, 1362 bp, Zea Mays
aagtcgaacagttaattaaagaatcgagtattccagctattggcacggaacctttaaaattctcatcagagttttcacagaactttcttactcagttcaaagcttgctggcgtaagcaaagacttgtttactggagaagtccagagtacaatgttgtgcggttatttttcacggcaattgcagctatcatattcggatcgatattttggaatgttgggatgaaacggtaattctatctcttagccatatgacatttgcttttgtttgtttttttaatttgcgtgtttaaaatgaatatacactgttttcattagttcatagttagagaaacaagttgttattttcatttttgttgcagtctaaaattgttgtttatgatgtgttttccttcaaaggactagaataaaaagaaaacatgaataactgataaagaaggcattggttatactacaagcatcaaaacttcaccttatttatgacccaagtgatgtgccacatgatctttcctgccatagcgttgtccatgttattggttcttattatccctctcaaacagtacaacttgtatatctaccataatgttttgtagtttcggcagtatctattttgtcaaataattattttcactgaaatcattaggggacatgtcctcttggaggccatgtcaagttcctgaataacttatattttataattggggtattttttcttaaggtatcttattttattaataatacgcaatgggggttggtaatattccttttcttatgagtgttagaaaaacagagaaatcggctcagtttttaaaggaccgattgtctctatgctctgtatttaatgttgaatgctgaactctagggttctgtatttaatgtccattgtctctatgctcaaaaataatttgacttcggacttggttttaatgactgggataaaagtatttactccctcatcgagatgtacacttggataatttacacattcagtttagagcacacgattcataggctaatacctgtgtaactatgcagagacacaacagaagatttgatgcttgtcatgggatctctttacgcggcatgcctgtttcttggtgtaaataacgcctcatccgtgcagcctgtagtatcaactgagaggactgtctactaccgggaacgtgctgctaaaatgtactcatcgttcccatatgctgcagcacaggttagccaagctcacatctatttttttctctagagattccagtttctaatatttcttaaaaccaatagggtcttgtagagattccttacattgcagttcagacactgatatttggcctcatcacgtacttcatgatcaactacgagaggaacataggca

SEQ ID NO: 18838 - DNA, 314 bp, Zea Mays
aaatggcccaagggcacatttccctttcatgggccccgcctgttagtgccagtgccccgtggcgctggtcccgactggtcagcccgcctcctcctcaggtcgctgacatcctcgccccacttgtcatccacgctcgctcgcccactgatctaatctcggtcgttcatcatggatctgatggctgaggagaccctgtaccccttcgcgcggcggttttgctaaagaagcccttggttttgtaggaatcaacccaccatccctggttttcgtgctcaggccccagtaatcttgcagattgaaccctggactttttt

SEQ ID NO: 18839 - DNA, 379 bp, Zea Mays
ttcttccaccgatcccgtgcgttggcactccgtcagctcgaatagcggcgccgatctcaacaccggtccaaaccggaggttgaggagttccttgaagcgaccccagggcggcgtgccttcatcctcctggagttggaggaaccacagctgggccacgtcgtccatgttgtaagacgccatccacaccttttcctccggcatggtgcgttgttgtcgaaagtatgactcacacttgttgatgaagatcagcgggtcggacttgccgtcatagcgcgggaactccatcctctggaacttcagtgggtgatccgtgcggtgctgcccatcttggtggctgccggagtcggccgaggaggtgaccttctcctgcatgctatcc

SEQ ID NO: 18840 - DNA, 530 bp, Zea Mays
tgtcccaattcttcccatagtgcagcacacatgccctcaacatgtcttccaaaatctgatttaccctttctgtctgaggatggtacgatgagcttcttattacatgggttccaagtgacttgcaactgctcccaaaaacgtgctacgaacggtgctcctctgtctgacacgatagtccttggtattccatgcaaacgcactatctggtcaatatagatttctgcatacttctctgccctgtgggtggtatgtaccggcaagaaatgagctgtcttggttaacctatccacaatgacccaaatagaatcgtgttgtcgggatgtgttgggtaaacccacaataaaatccatgctgaggtcctcccatttccaagatggtatgggaaggggctgtaaggtacctactaccttcaaatgattggccttgactctttggaaagtgtcgcattcagatatatacttagcaatttccctcttcatcctggtccaccaatacaaagatctgagatcatgatacatctttttactgcc

SEQ ID NO: 18841 - DNA, 394 bp, Zea Mays
ttcaccacagggtacaccaactcgtccaggaggaggaccacgtccagctcagtacgctccacaggggtctccacggacacctcccactcatcaggttgcctccattgccaccccgacgaggcctacaggacagaagaccgaccctacatgcttcaagtggagtcaggttgggcactatgctaatgcttgtccggtggggaattctggtacaccagctcagaacaagcaacagactcctggcaagggatattctatagcgagtgttaatcaagtcagcgcaaatgctactcctgatggtgctgacatcgcactgggtatgttttatattaatgcaattcctgcaacaatattatttgattctggtgctacacattcttttatgtctactcgttat

SEQ ID NO: 18842 - DNA, 880 bp, Zea Mays
attatttccagcagtaaataattagtagaaaagtatatgtttaaatatgaaaatacattttacacctgatatgttatgttcatgcattaatttttgtgtttatatttctatttttatttcccgtagtaaataattagcagaaaaatataaaatacatgtgaatgctatgttgcgtatttttatatcgctataaatatttgagttgcgttgagcttttggactcacgtcgagcgattaaattgtataattggtactcagacacgccaatcaggttgcgttggtaatcaactgagttatgacattagctgaatattgactgcgccctggcaacacgacgcaatatttgtgtcgttcgaacttggttgcgtcatgtgattgctatgtcgcgctctccattaatcggatcactcccgttgagtcagaccgccatcgctgagtcgcgcatttttcgcatgccctgtaggcactgtctgtctgccgtgatcatcgagccacaattgcgcctgttgtgcacgttatgttgacttatcgtgtaccccgattaccgagccataattgtgtatgttgcgcttattatgaaggcttgttgtgttgtcgtagccctgatggccgcacacgcgttgacaccagacactagagcttgtattcgcgtggattgtggtgggttgttcaagcccctgaagtcaatacgcaaccttcttaaacaattttatttggctctatattttatttgactgtgttgtgtggcatcatatttatatatcgccaagtggccataacaactatatcaagctctatagtgcttggaaatctgggaaattaaattgaaatacaatgaaacacagataagttaattatctgttctccactcatgcataaa

SEQ ID NO: 18843 - DNA, 684 bp, Zea Mays
cttgcaggcatttgcggagctgggacacgtgaaacacattgtggatatcagacatggattctggtaattcaagaaggtacgctgcgggtcccactctgccaatgatgggataggggccgacgaatcgcggtgctagcttccctttcacttggaatcttttgacaccacgcatcggggagaccttgaggtagacaaagtctccttcctcaaatctgagttctctccgcctgttgtccgcataactcttctgccgactctgagcttcaagtaatcttctgcggatcagggcaactttctcctcagcctctttgacaaaggcaggtccttccagtgccttttcccctacgttggaccacatgagaggggtctggcattttcgtccatacaacgcttcgaacggtgacatcttgatgctggcctaatggctgttattatacgagaactccgaataaggcaaactggattcccaacttctattgaatgttaacacaccgactcttaatagatcttcgaggaccttgttgaccctttctgtctgcccatctgtcttagggtgataggcggtgctaaagtctagcttggtgcccatagctttctgaaggcttgtccagaatttggaggtgaactgggttcctctgtctgacactatctttcttggaatgccatggagtctgactatctctt

SEQ ID NO: 18844 - DNA, 627 bp, Zea Mays
ggtcaagggcgtaggggaggtcgtgacgatcacgccgatgtgtggatcgtctctggggatggtcggagtaggccggtccacgtgcgcagacgggggagctcgtcggtggcaagggctccggcctatccagggcggtagagttcaattaaattggtcagtgagcttcgctagaggtcagggaagacataggcacgaggaattgaaaaatggctcactagatagctcggttcatgcgtggtggtgggcggccgaagtccggcgagggtgattccgcttctccagtgaggcaatgcctcggctcaagcatggagaagcttcacagcctcccggggaagctgtccaggggctagggcgaggctgggggtcgttagaaaagattggtcacgacggcagtgctcgggcagtgatggcgggcggtggcgctcgctttccacggtgaactctgatgatctctggctcgggcggggctttgggtgcgcgagtgcatacgactaaggcctctaggggcacttatacggctagtccgcgctcggccggtcaggcaagcgatcgaacatgtggcctcgctcggtctggtcattttcgaacgctaattagctcgcgatcttctcgtaactctcccaaatc

SEQ ID NO: 18845 - DNA, 919 bp, Zea Mays
taggaacaggactttagatccagaactcgcacttgctcagcttggcatacaactgacaatctcatagcctctgcagtactttcctcaagtgctattcatgctcttgctcattctaggaatatatgaggatatcatcaatgaacaccattacaaacttgtcaaggtagtccatgaacacactgttcatcaagtacatgaagaaagctggcgcatttgttaatctgaatgacatgaccgtgaactcatacagtccatacttggtgataaatgcggtcctcggtatgttcgaaggccggatcttgagctgatggtagcccgacccttcgagaacatactggctcctctcaactgatcgaacatatcttcaattctgggcacggggtacttgttcttgatagtgacttcattcaaagatctgtaatcaatgtacattctctttgtcccatctttcttctccacaaataacactggggcggcccaagatgaggtacttggtctgatgtagcctttctctaacaactcatcaatctgcttcttgagttacaccaattctggtccagacactcgataggctctcttggaaacaggggcggtgctaggtataagctctatgacaaattcaactttccttttaggtggcatgcctggtaaatcctcaggaaacacatccgggaattttgatactactttgatagcttctgatggctcaatttcctcaatataggtggtgatctggtgaccgcttcctttccttggtctagacaagaccaactccactgacacttcctctcctgataaggacactaacttcacagtcctcttgtcacagctaaggcttgcttgatatttggttagccaattcatccctcggatgacatctatggttacatcccgggtacccattattatcagatcaatg

SEQ ID NO: 18846 - DNA, 480 bp, Zea Mays
tccattacaaagtcctgcggtctggttcaagttacgtagcagcgtgactgttacgcctctttttagcacgagtttgtggcaggggaaatttgccgcattaatagagtttaggaattcagtaggatatagcatgtcaaaatcatgtatgtgttcagacgactttgagattgtgtcgcaactaaggcattgtacaccatgtctagggagcaatgagacaatgtagtcgtttattttatcagttgtaaggttattaggacatacaatggcacatgtagctaagtatgtagggtccatatatctctctaacaaatttgggtagacctcggatatgagggacgcaacggcatcaccatccgtgtgtatcaacaaatcttcaggaatcgtaacccatgtaggttcggactcgtctcctcttgtcacggccggcagagcaccatcgctgatatccaagacccatttgctaaattgttccatgtctgc

SEQ ID NO: 18847 - DNA, 463 bp, Zea Mays
gcactctaatgcatggattaaggttgctgataaattcgtggtgcgtgcatttgctggggagcctcgtgtggtgaaatgttcgtgtactaggtgtcgaaacatgacctgattagacaagtttgacctctccattcatttttgcaaatatggctttaagccacactatctgctatagcgcgagcatggagaggtggatgcccttccggagacgaacacagacgaggacatagaccgaatggaggacatgctagatgacatccgacatgagtatccaacactagagaccgactgaccccgccggaggaagtgcagtagttttacaagttgttagaagcctcggatgcaaaagtgcacgagggcactaacgtgatcgtactttaggtcataatacgacttatggtgatcaagtcaaagtacaacttctcaaataactgctacaacgatatcgtgaagctgattattg

SEQ ID NO: 18848 - DNA, 890 bp, Zea Mays
ctagggatggcaagagcaggttgttctgcttcagtagtagaagatgtcccttcaccaagcttcgacactatggccgtctcaatgtatctcagccggtgtgttaagaccttgatctttttgccctttggcacaacagagatggccgaagcggcagttttccttttctttccctgctttcgcgagggatagcaatagttagggtatacaaaaccaatgacgtcaaaaactctattcaatcttttcttgcctcggcgttcgaaggcctaagtcattgcatcatcttcggcccttgtgtaggccccaagcaattcatcattggttacctcaatactgctcaaccactcatcgtttggctcatcaaactcggctctatatctgaaggtatattttaaatagaccaggccgccctgactagacccggcagcagcctccttcggcatctcccattcactcacaagcggccatactctgtaggcaaggtgttcttgaaccaggtctcttgtgccaataaaagtacacacagtgttgaaacttctctggcatgcttcaatatcgttcccaagagcggtggctggcctcctgatgccgaagcgagaccaaatggggcgttgaataattccttttatatcttccctctcaactaaattactcttaacataaaaccattcctctatccaagccccgggccacctttttcagcatgttagaaccgagtaacttacatcagggcgaggcacgaagccataacaaccaaagttgttgtgatactgctccttgccagtagccttcgtctcatacagcagctcgtgcatgttgcaaaagcaatttgcgcaaggctctagcccttggcttctcacggcccaactgaaaacccccatcctgataatggc

SEQ ID NO: 18849 - DNA, 459 bp, Zea Mays
atcatataggcttactcaaatggatggcacggaaatagggaattcatggaatatagagcatctcaggaagttttacccttagcaagatttcaaaagctatcgggggagcattgtattctgtaattggaaaatatctcatcaataaaagatttcattctcaagggcactcgaactgtttattatcaatcagcacgcttactcggcatagggtgaccactataccctactaacggagcaatcggcttaagtcggcaatgacttaagacggtgcaacatgctcacgcttactcgactaagggtgaccactataccctactaatgaagcaatcggcttaagtcggtaatgactcaagacggtgcaacatgctcatgcttactcgacttagggtgaccactataccctactaacggagcaatcggcttaagtcggcaacggcttaagacggtgcaacatgctca

SEQ ID NO: 18850 - DNA, 286 bp, Zea Mays
aggggagtgttacggatccctaatttggtctggtactcttgtaagattaggtcccgaccctgggttcccatctgcatttgacgaaggaggccctgcctttggctgtggtccttcctggatgaacctgtcagaaagctggacccgtggggaatccagatgggtttccggaggaaggcaggcttcagctccgtaggccgggggacatggggtcccgccgatggtccgcctagtcgtcgcggtcggagtgggagtcttttgcgaagacgtccttcaggtccccttcggg

SEQ ID NO: 18851 - DNA, 609 bp, Zea Mays
acgaactcaagctcacgatggcggatgttgtagtagcacttgccatacttttgggcctagagaagatgctcgcaaacctccacggggaaggtgtcacggtcgcacaggagggcgtccactgcctccacttgagctatccttgcaacgtgtggaagtagagacggtgggggtcggttgtacaccacctagaagggcgtggtgtggagcgccatatgtaacgaagtattatagcaagactacacccaaagaagccagtcaacccaggcgcacgaatgatcccccatggcgcaacagagtacatggcgatcaccttgttgacaatctttgattggctatctgtttgagagtggaaccctgtgctcaaacggaacttgatgtcgaccatcttgaagagggcgtgccacatgggataggtgaaggctgagttgctgtcgctgaaaatggagatggggaagtcgtgtagatgtgcaatgccctcgaagaatgcgtgggtgaccgagacattcatgtacgggtggctaagggtgatgaagtgcgtgtacatggagaagaggtcaacgacgatgggaacaacgaactttccatggaccttagggaggccttcgatga

SEQ ID NO: 18852 - DNA, 428 bp, Zea Mays
cgaaagggttgttgcttggaacaattttacctgaagataatagctccttgacttgtttctctatctcatctttgtgtaagggggaatatctgtatggcctagaattgacaggaacgacattggggatgaggggaatatgatggtcataaaacctattgagtgggagaccactaggttctgtgaacacatcagcataatcatgtaaaagtgcctacactaggggtggaggtgaagaactgactaggggttccaacatatccataatagccatggcaccaatgtcatcacctctgacccacttagccaactgaattggtgtgatactatgaaaatcctagaattgaggtgtgatgccttgcaactcgatcaattcatcgttttgatagaactatagagttcaattttcctagtggcagttcattggactg

SEQ ID NO: 18853 - DNA, 354 bp, Zea Mays
aaaaattaaacgtgggagcaaagcctgcatcctgttcgtccacgtcaccacttgtcttgccagccacacgatctttatctgacgtcgaacgagtcagcctccggttacagcgttagagccttctagacaaagtcgtcttccctagccacatcaggtgattggtctcccacccctcgccgcgtcaaatgaacgctggcaagagctccccacctccatcgtcccaacaaaaaatgcacccttgctcgtgatgcacttccccttactgccccttccctgttgtcgttcctttgcctccaagcagtgatgtcacgacgcatatcagtaggagctatttccttctcccgtccctacccc

SEQ ID NO: 18854 - DNA, 595 bp, Zea Mays
cgttggtagcgtccttgtcaccacagcattcggtaagaaaagcatccgccaggcgatctcctctctgcgtaggttgtgcctaggttcaaattcatttagccggttgggcaaaatggggggggctcaccggcgttgtctggcggccgtgcctttgctcggggttggtggggaagaaaaccagtggccattgatggggttaatcaatggtggggattgggggctggattccggacagcgggggccgtagatttcgaatctggcggttgtgggttgattgggtttcataaaatctgggccatagatctggggatcagcggtgctcagtgcataccggttcgggatctaatccgatccgtggattttggatccaacggtcgaaatcagttcatacctcttcggtcgtgtgttttcgcataagagcccctattctttttcttattcaacccaccatccacgcgcggggtgggtatgagtcttggagaaatatatgaaatagcccctggtctttcacagaatagtgtccccagtccaatcattgaataaaagggataaaacaattcagaaaatggtttttagtttagaaataaattcagaa

SEQ ID NO: 18855 - DNA, 492 bp, Zea Mays
ctcgagggaggagagcatttagatggaggcagtgatggaggcgagggagagcacaacatgggaatgatcccttaatgcagccagtcgctaagtaggttatggggttagccaatcggtggagaggaactcaagagaggactacagcgggacaggggtggcgatggagatgaggtaaagagcgagtgggcatcaaaggccaaccctaatacgttgagtggcttactggagacaaaaaatgggaaaaggtacgtgtaatgggatatcttcggggttaaagggaaataagcttaaaaaccatttccacacttgttttggtaattgacgatcatcacaaccaattgagataaatcaaggaagatcaaccctcaaaacaacatatcgcggaccgtctgaggctctagttctgattgtccgagattttggaaaataccacatgtttttcaccctcttaattctcacttgtaaagttagcaatcaccccttcaatggcac

SEQ ID NO: 18856 - DNA, 544 bp, Zea Mays
aaaatttggaccatatttattaaaaagctgtgcaagtgttaaacactagctcatattgtttgaagtagggtactcatttatttactgtcctgacatagaactctactctatgactggttttacttgaagttgaattcttaaccaatgtggtatactctggagtagatatagaaatagaaaagctgcttaggtatttaaatattgctcatgtgttcgtttgaaatgggctgctcaccagttatgcgtttcatgtgtttccattcattcatgtgtttcctcgttgattaaaaactgcatttgtatgaaatgggctgctcaccaattatgtgtttcatgtgtttccattcattcatgtgtttccttgttgattaaaaactgcatttgtatgattagttggttttctggccttagatttgaagttaagaatatgctgcatttctatttagtcatgcccttgcacttggtaatagatcataatttaatggatcacaaaatttaatggataggagcacttattagttctatacaggtgtgctgatttatt

SEQ ID NO: 18857 - DNA, 1326 bp, Zea Mays
atttcagcggggcgatccctcccaccatctccaacctcacccagctcgtagagctcgagctgtcagagaaccggttcagcggcctcgtgcctcgcgatcttgggaggctgcaggatctgtggaaactgctgctggacgacaacatgctcgaagcgggggacaaaatggaggggtgggaattcatggagtcgttggccaactgcagcaagctaaatcttttcggtctgggtggcaacgatttcaccggagatcttcctgcttcggttgctaagctctcgacaacacttgagtggctttacctagaaaaccttgcgatctccgggagcatcccctcggagatcggaaacctggtcggcctgaaagtacttgttctgacggatactgacatctcaggagcaattcctgatagcatcgggaggatggagaacctggttgagctacacctggacaacaatagcctgtcggggccggtaccgtcatcggtggggaatctcaccaagctcatgaagctatcggcgagcggcaacagcctgggaggatcaatcccgaggaatctcggaaagctcaccgacctcaccagccttgatctttcaagcaaccacctgaacggctcgatccctgaagaaacattccagctgcagtctctttcgctgctcctggacttgtcacacaactccctctccggaccactccctcccaacgtcggaaggctggccaacctcaacacgctgagactgtcaggaaaccagctgtccggccagctaccggcaggcatcagagactgcgtggttctggaggagctcctgctggacagcaactcgttccagggaagcatacctgaggctctaggcgacatcaagggcctccgcgtgctgaacctgaccatgaacgggttctccggtgcgatccccgacgcccttggtagcatacgcagcatgcagcagctgtacgtagcgcgcaacagcctctccgggccgatcccagccgacctgcagaacctgacgtcgctgtccgatctggatctgtccttcaacgacctgcaaggcgaggtgcccgaccgaggcttcttcagaaacctgcctcgctcatcggttgccggaaacgaaaacctctgtggcggaatgcctcggcttcgcctgcatccgtgccccacgtccgcttcggggaagaacagtcggagcaagaggtggccgccgctgaagcatgttgaaatggctctggcgacagtgggcgcagtcgtgttcttggcatcattattagccgcagctactcagctcgtcgtctgtaggagccgtaaacaaaggcggcagcagacgaagaggcagc

SEQ ID NO: 18858 - DNA, 361 bp, Zea Mays
tcttcaacggcgcgtgggcgacacaacgactagctgacgtggcacatggtccggtggcgcatcggattggtctggtgccactcagctaaggaaggctccaatcagaatcctgagtgtgaggctacaagacccggttcagtgtgcactagatcagtccagtgcgttcgtagtcagacagattttggctgcttttacaaggaaggaggcaacgactcttggctcctttggggctataaaaggatcccatggcggctccattcagcacccaagtactccaagagcacaccaacactccgactctttgcaacaaagtgttccagtgatttagtgagacccgagtgacatttctgagctgttctcg

SEQ ID NO: 18859 - DNA, 280 bp, Zea Mays
gaagagcgcggagagctcgagggcaaaagggcgcagtgagtgaagagaatgattgccgcactcgggtgaatcccttttcaaggaggactctcccactcacgccccgagacaccgcagaaaatctcacccgacgcgcaccaaggcgacctagcctctaacacgggggctcgggtccacaaagttatacagctggtgtgcgggtctccgagtgcgaagaaggcaaaccgccacacgaggagcgaaccgccgtgcctcttcatctccgccaaaagcagcggcc

SEQ ID NO: 18860 - DNA, 452 bp, Zea Mays
actggccaccgcttagcgccgctataaattgatggcacggtctgctgcgttaggtcatcaccaagcctgagcacccgctcttgcctccgattagccactacaactctccaatttcccatttcccccaattctgtttccgccaccgtggtagagccctcaccgtggtcagcgcactctaggtctgttcgtgcttcctgccctcttgtttcagcatccttaggttctcctaatgcttctcgaccaattcgattgagttaaactgccctggatcgccgggaacgcgattgattgcccatcgtgcccgctgtcaccgtggacagagcgagttagaggtctgaaagtagaattagttgaggggaaactcttgttagggtttgaatttggtctcagccgaagtagggcatcggtcattgagtgatccggccggtatgcgctcgacgaagctcggttct

SEQ ID NO: 18861 - DNA, 358 bp, Zea Mays
taaaattaatatgacaggttggtcgggctggcctttctctgacagaagaacaaaagataaaactttccattgctcgtgctgtgctctcaaatccatcaattcttctactggatgaggtcactggtgctcttgattttgaggcagagaaagcagtccaggaagcactagacattctaatgcttgggaggtctaccatcatcatagctcggcgcctcagtcttatcaggaatgctgattatatagcagtaatggaggaaggtcaacttgttgagatggggacacatgaagaattgttaaaccttgatggtctttatgcagaacttcttaggtgtgaagaagccgcaaaactcccaaagag

SEQ ID NO: 18862 - DNA, 594 bp, Zea Mays
gaggcacatgcacactacagagtcacacaggaaacagagctacaatgtctcaaggcctcaagcacagatgcagtcgtccagccgagcagaggcagagctgctgcacacacacaggttgtatattcgtgcacttgaaactccctatgggaaacgacagtgaccaatgggccaagaattcatgggctttgatacatgcacacgatccgcaaaatgtaaaacggaataaaacaagaaattcctgatacaatacgggataccgtaaatacgggcgggaaacaccttcaaccgtttccggtcccgttcccggatatacctatctcggttcccgtaccgttttcacattttccagataaaacgaaaacggacggttttaaacgggaatacgggacgggacggtataattcctgtttgttttcatccctagtcccacgtccagaagattctggaaattttgcgccctgcctccgtgactctccacctccccactgacgctctcgctgtgctccgcctctcttccatgcatgcagcatgcttccctcgccttgtggccttgctgctcgtcgtggccccgcctccattgccttttcccctcgc

SEQ ID NO: 18863 - DNA, 555 bp, Zea Mays
cactaataccatgaattccagggactagactacaaatttccaggacctcgatgcaagcctgattcaatgctaatggacggcaggttgataactaaaatatcaggggttcttttgcacatttgcacggacaaaagggtatgaagcatttacggtcgccggattagtagtctacggccactatcagacctacccgagatcgaaccggtacgtcacgtgagtcgttagatacatgatccacggcccacacgtgtgcacactctcttttacccccttcccctcggatcaccaatcaactgtctagattaattggattgaaacgttacgtccatataatcccgaccgttcatctaagatcgacggccatcaagccatcacccagctcacggccgccccgcacggcgacgccgcccccaatcacggcgcaggtcccgccggaggatggtgttgccacgttattgtaccacgaactctgatccagggcgctcaatgcgtagagaactatatagagaacacaagggagggatcattactgactatcgtgtcgtgaagcgctct

SEQ ID NO: 18864 - DNA, 363 bp, Zea Mays
gcgtagtcaaatgcggcatggtggtaagggaacaatcatgtcaacaacggagggacaagccaccaccggtcaaataaatgtggaccgaatgcagagagaaggcgagggagcgatcgaaggagatcgaggagaagccaaaggaggatggagaaatagggaaaagctagatcagggcagagcgatgagccaccaccagtcgaatgcaagcaggatgtaggggtagagaagaagggggaaatggggaggaggcaagaccgaatgtggcatggtggtggggcgtggcccaattaagagtggagcgacgagccatcgtcgatcaaatatagaggatgcatgggcacaaaaggagagatgaaatcaagg

SEQ ID NO: 18865 - DNA, 281 bp, Zea Mays
gataggcaaactttcaaacgaatatctaaaacttcagatccacaacggatcagcatatatatacctttcaatggacattgaaacagttgcgaacagagcaaagtcaaatcacaccggagagatcttggaacagaaatgacagatagagagtgcagattaaaccgggacgacatgcacgcacctctagattagcaatggagcgctgttgaaacttgcaaactcatggtcaagcaagctcaaacggtgggagagtagtgaacggtttgatgccagtaaataca

SEQ ID NO: 18866 - DNA, 770 bp, Zea Mays
gaacaagtgctaatgccttgtttgctatgagagggtgattctgatataccattttgtagacaattttcccttcttttaatttgaaagacccgtgaatattgattgaaatcatgcagaggagctagacgcagactatagacaatttacccttctctcagtttgtagtcaattttccttttttgacgtgttctggcgctagatgcgagctgcaaaggagctgctatattttgttcagcttttggcgtgaagaagctagcagcagcaccgaaaaaatttctgaacctttagctgcagatcatttggtttggtttcttgactgtaggatacaatagtgcatgtttatcaggcttaaaccctcgacaacaccgctcacaagatgaaggaccacctgtacacattcttatctgtctttctaacccacacctctagttgtatgtctgtgagtctttaatctgcagaccgctatctagactttgaaaaatgtgaagtgaattatactacaatttcatttagttttttttcctgtaaaaaaatggacccaacatagatttttgtttcataatgtcaacaactaaatcagctgcataatattctcgtgagcctatttatcaaattgttgatattagtttgctggcctcttcatgaaaggctaatgtctcaacacattttatagacattttttattcccggactacttgatgaggcaccagaaaggtggaagagcgtcttatgttctagataagctagaaaatacaaagccaagtaagaag

SEQ ID NO: 18867 - DNA, 1342 bp, Zea Mays
ttatgaagtatgtgatgaaagtgttgtgtgtgcttggaatgtgattcttgcctttatgattttcacatgaaattttcttctatgagatcttacatggcatggttttcttctttcacataaagttgcgacatatctcaccacctacccataataacaatgtgcagatggtgactactcgccatatcaacctaggagccgctggaacttctggtggtggtaaccaggagggtaatcaagaagtacctcttcctccacctacaccatacacactcgagcagtttttcacccaatttctaggagctcaaaggaatatggagaatttgcaacgaaacatggaagtagagcttcgcaacattgctgataacactcgccatgggcaaccttaggacacacatggagtcaatcagtatagcagtttcaaggattttgtggacaccagatcacctatattcaagaaggcagcagaacctttagaggcagatgagtggattatcaatatggagcagaagtttcatttgctaagactgacgaaagatctcaagatagagtacgcaacacattagttgcaaggacccgtagggatgtggtggtctcattaccgcaccacctaccctgaaaatgctcccatcgcttggcagcagttcactgcagcttttaggggaagctatattccgcctggtctaatggcaatgaaggtgtcagaattcatgagattaactcaggataccaagtcaatgacagagtatctgcatgctttgaatagcttgtctcgctaagcgtcagattatgtggacacggaggccaaaaagattgctagtttcaagaggggtttaagcccaaagatgaagaagagtatgagaatctcctctcatacatctttcaatgatttcgccagtgattgtttgactcatgagaacacaacaatctctacactgtatcaaaagggcgtaagagaaccttggaatctggaatgtcgcagcctagaaccacagtgatggctcgagtagattttaggccagtgctaccaggagcaagattttgcgctcctcctccaaagaagacccaatagcagggatttaaggttcagaaagcttttaaagtggctttacctcttgcaaagattggacacagaagctcaactagaagtaccacccaagtcaaaggaccatgctataactgtggatagacgggacactttgctaagttcggccctcgtcctaagaagaagaatgatgtttatcccggtcgtgtgcatctcaccacaacagatgaggtcactgatggagaaccagttatggctggtacatttctcgtgaacaatcacccagcagttgtattgttt

SEQ ID NO: 18868 - DNA, 384 bp, Zea Mays
ccgagcgggaacctgctggtggtgctggaggagtacggcggcgacctcgccggcgtcagtctcgcgacacggactacgtgaacaaggcaggcgaacgacacgcgttgcatctaactcgtacatgtatactatactccgacgtgcgagtatatacatcgattggtatttgtttagtgaggtgaggccatggcgaggaggagcaagcataccgaccatgccgtattcgcggaccgtatttatacacacgacaccgtacattacactcgcgtgatagcaatggttatactgcaaggggaaggtaaggatggcatttaagtgcagagcggagagggtgggtgcctgggtggtctccggccatcagtgcggcggcaggaccggcagcta

SEQ ID NO: 18869 - DNA, 331 bp, Zea Mays
ccggcgatctcctgccaccggcggccaccatctccggcggtgctccggtgatcttgcgcacccctcctgctccccctcggtgagcagccctcagtcctccccctctgactctcttttctctgtcagttaggcagtgaacaccccttttgcaaatctcttccaaatctgtgaattcctgtgaatccaattgatggaatgagttcatgtacctccattgtgtatccctgcaaacttttagctccttcgggagggcattcccacctcaaatggccatttccctaaaaccctagctccccgcacgccacgtgctcggtgaaatgcccaaaccagc

SEQ ID NO: 18870 - DNA, 1323 bp, Zea Mays
ggactcaggagagtatcctaaaaaaattataaaattttggcggctgaatgcggtgaaagggaatacaaaatacagtggggcaatgtgggccgtgtaatagaaatatgagttgttattgctggccttagtcgtgtatcaagaaacactataagtgaagttaggctcgaggacagaggcacgcaagacaacaatcagcagatattgcgtagcgattcttctcttcttcccaattcctggctgcattctagtggctactctctattactcaagtagcctaacagcagtatccaccgtgcccgagatcgccgccttccccgcgctgtaccaacggctaggcgaaaatcccgcaaggcggggtgaaatggccggcatgggcttgagatgaccccggacagttccttccctgcgaacgatgatcataggatggtggcgatgatgtgccccttcattccaagcaccgttgcggaatcgtggcggccgcgaatgcagccgcgaatgggaatgacatggtcattaggtcctgaatatgtcaaacgatattcaattcacagatgttaatttatgctacaacatttgaaaaaatatggaacttgcttcaatcaatgggatcgggtgattccatcgaccaaaaacattccagttccccctaaccagacccagatagcaggtgtccaccaaatcaaaatctccagatcgaaccaaccaattcgattgcaccagaatctttagtatgagaagaattatggcgcttctacctaagaaatatgtaaccctaaacctatatacagacctagagtgcatctggcaaaccctaataacaacatctgaacatgtgtgcaccaagccggaagcatatcggagacgtatacctgcgtggatggaggtgctcctgccagatcgagctgtcggatgaacaagattgaggctattgccgctcaagcttcagatctgaggctcaaagttgtaacaagcctagggtgatgctagcagctcgcgcctggcttggagcatcgtggagagggcccaacggcgatgtagagcatgagccgatcgactccaacgggaagacgcttgtgtcaagtgctgccggtggatccgctgcctcccgcccttcatggtggaccgcagcttccctcggtgtcccccagcaccaacgccattccaccactgcccaccatgacctgggatcgaagagggacagaaggtggatgctggaggaggaggggctggagtttgggttgtagatggcgacgacgaggaggaagggagccagcggatggcgcgacgtttcccgccagggagggggatgatgttgcagttcct

SEQ ID NO: 18871 - DNA, 448 bp, Zea Mays
ccgctccccaatttgggatttctcccaaatcggttgaagaacaccgaagaatcaagctcaccgtggccagtccaaatcaggtccattcttgccatttgcgttcttgtttcggcattcttacttgctctggatgatcgccgaactgtccaattaggctagaacttcgttagtcaccgggaacgcgtgcagttgtcttcatcatccgcggcctacgtggtcagagcttgatagtttaccaattatagaattaagttgggggaatcatttggggaaggtccaatttggtgttcgccgctcgggggcgccagtacttgccccaattggccggcctacgagctcaccggagctcggccgcgttcgccgtcgtcggggaccccatcctgcgaagaaatagaagttcgggggcgtttctgtaaactgtgagtgactctccgaaatagtgtgcgga

SEQ ID NO: 18872 - DNA, 343 bp, Zea Mays
ttactgttcctcgtgcgttaccgagaaatgagaagacaagtggaggagacagtacaacatcatccatacaccccctacgcatgacagcgtatcagactacgccacaagtgacaccaagacccgcgcctatgttccgattagacggggtaagaggataagatgtcaggagcctgcacaacggccaagaggagatacacgcccagaagatctagcatcgctagctctaccagacgtctcacgcttcttagtaaatcctggacccacctatcgaggctagctcccttgtaatgtgccctcattggactataaaagggatggcacttgcgatacgaggaacacgcac

SEQ ID NO: 18873 - DNA, 423 bp, Zea Mays
caagaagctacttgatcacgtgcaggtcttggagtggcccctcaccaggaagctacatgattgacaaaggcagttgggggctgatcaacagcgaaggattattgacccgagcaggcagcgaacagggcacaaacacaatcgacactgatccctcgccatcgtagaacttcgtcaggaacccgtgcgaagactacaagggcgaagaggggcgcatgactcgacccgtggtgcgtcggcccctgttacagattgggacgtgctggcccacctgccagcctccatcgagggtgtatttatgcggtgtaacaagtggagctaaactgtcctgtaattaccctgttgtacaatatattcagggaatgtagtaggtacctaagggtatgagcgtattttagtttctaaggcattggttactctttaaat

SEQ ID NO: 18874 - DNA, 744 bp, Zea Mays
gtcaagtgagatagactgtgatggtccgaatatataagaaattcggcatgctgtatatagtgacgccacttgtccattgccatcaatattgccaaatattccttttcatatgttgaaaacctcgatttcgagtcccaagttctttactcacatacgcaagaggatggccattctataataaaactacaccaatgcccgaactcgaagcgtctgtttcaatagcaaactgccttgaaaaatctggaagagctaacaccggggctgatacaagagattgcttgagagcagaaaaagcctcatcatgcacactagtccatacaaacaacactcctttcttcagtaattccgtaagtggctttgcaataatcccaaaattccggacaaacttgcgataatagcctgcaagcccaagaaatcccctgagatccttgacattcgaaggaacaggccaagatgccatagcttcaaccttggtaggatctgtagctacgcccttctggctgatcacatgccccaaatatgctatttattgtttggcaaacgtgcatttagagagtttaacataccaacgttgttgatgcaaaatatgaagtacctgctgtaaactatgcaagtgcttggcccatgtatggctgtaaaccaatatatcatcaaagaagacaagcacacccttccgcaaaagtggggccaacgcagaattcatggcgctttggaaagtcgctggggccccagaaagtccaaaag

SEQ ID NO: 18875 - DNA, 1846 bp, Zea Mays
tctctaaatcgttgttggacagcaaatcgtctggctcgtcgaggcttataacatctgaagctttgtccgttacattatcaagaggaagaatcggtgcagcatattctagtggcatgcctctttgctaacctggttcacggtgctctcactcataggcatgcaacatcttgcaactgatcccgagtcctcagttttccaagattggtgggcatcagctttgtcgagagtgcctaagagaggaggttttaactctctggtgacatttgtggcttggtggctgtggaagcactgaaacgcatgtgcttttttgataaggcttcccctagtgtggtcaaaaatcatcgagaatattaaagatgaggccaggctttggtgtcttcccatcccaaacaaccagaagggatctgcttccagcaatgtttaccccgtaaaaaattccattaaatgcagagtacaaaagaatacaccagcagctaatgcatgcagtaaaacgagtgaaaaagaatccatggttgttaattgcatgttgccattattttatttggttcatttcaaaagcttggtttacaaaggccaaaaggatcctctgagacaatagttctaaatgaaaacaggagattgattgtaattgtcatctcaggtctcaccaaatgtagataactcagagttgtgacattaaaagccaaacttgctgcaatataaggatcacgaggcaccatgctatgttgctatgtaccctgacctccatgccaataagagctgagcccttgggtccattgtctgaaattgaatcctagaggtcctatttgcaaaatatgtttttgaaaaaaggactacaaaatagcacctgatcatatatcattatcttccatgttctaatgtaggtattaattggattattggcattcctcccattcttgacattgttcttgttgcaaggattgcataaacacattcaggtaaaaatcggagcctgcacagaaaccaagcactgccaagctcccttgttagttttcagtaagcttttaccacattttctttgtcctccttatttttcaatagcttcccttgatttcagaaactaaatttgcatataagatggaacgtctcaaacccagctagctagtattaatcccataaaacactggcattttcagcaattgatggaaccaatcaatcaaccatgtttcttggtaaaaacaatcataaaaacttgtagcaaagtacatgtacatgtgagaccaagctataacaaatgaaaatgtagacatataattataatcgagaattgaaaggtaagagtatcataattaccagctcataattgctttgcttcgcaatgcctgctgcgttgggatcagaattagttcttaaaccatatgcaaaatctttcagaggaccaacattgatcagagcatctctcacaacaaatgagatcttctgtaaagttttggtgaaataaattagcaatgagcagcagcaaactcatcatgtaaccattaaaatgaacttagacagtagaaaccatatcacctacagcaaatggaaaaatattacagcgcaatagaaggtaaccataaacagatagttaccacacaacagaaagtgttcttcatacctctgctgaatctacaatatttggcactgccttattatgaaaagaaagttcctcaacactagtaacatcttgtagaacatcagagggaatcctctttaggcgctttgagaaaggcagatcactttcaatatcagcaggctgttacacaagtagataaccatatatcagtcaccatgggtcaaggagtttagcatacctcacaaaaaaagctcactgtgcatgtgttac

SEQ ID NO: 18876 - DNA, 522 bp, Zea Mays
ttcgccttcgctggtgctcgaccgcggcggtccgtcgtgctctcgcggtggccggccgatttagcccggtatagttcaccggagtagttccctgtgtcaccactgtctctgctgaagccagccaaggcccttagcgtgccttaagtcccctccccgtggccggaatcgctctctagagttaccccggcccgcccgagactctctcaccgccgttctcccctctctgctcgtggattcatggcctcttccccgccatcgagttcaccgtggcaccctcttcctctctgcccaactccggcgaccccgtagccaccatagctcgcgcctgcctcaactccagtgacctcaccgccgcggagaggagcggcgccacccacaaccgtctatttccccggtctgattccctccatccgattcagatcgaacggcccggaccgcgggataccacttcacgcacgcgcgcctgacagcctagcccacatgtcagtgccagtcgcagccattcaacccccttggtctaat

SEQ ID NO: 18877 - DNA, 943 bp, Zea Mays
cgccgtcgaagcggtgcaggaccgtattggtcggaggagtggagacagtgtatatgtctgatacagagagtgattctgatgaggattgcatgatgctgggtccaagtgggaccgaactgaatcctattgctgtggatatgactgaaaatgggagtctggatgatcctgccaatgcaagcgacgtggagtctttgcagacgcataatctgctagggacgacaaatgttggggtggttgagcaatcagtatatccttcaggaagtgcttcaagttttgaagcaagaatctctgcagatatgtatgtctcgagccattacagttctagaaagggaagcaaagtgaacgggaagcttgttttggagaataacagttctcgtgctgatgctaatgtgggctctgcagttggtaccagtccccgcaaattcaatccatacagcaaaggaaagggaaagatggttgcagaagatactttatcatctctggtctccagtgaggacgagccagatttggatccagtgcattccaaagagactcaggttaatccaggatcagtttctgcttctatggtgtcatatcgcagacaaaaagcaaaagagagagctatcaggttggctcctgaatttgctttctttaaagcagataaagatgagcatagtgaagatgatgatgaagaactagagcctggtcctgactctcaggactggccaggctcattcgtaactgctgcaaggatgtatgaagaaagagaagctaagttgagagctcgagagttgaattcttcaaagctgaacaaatctgcaaatagggtcattgtttggtcgccttcaaaggatgagaagaatccagcacgagctcaagctgccccatcacttacaagcttatgcttaaatacacttgcgaaacattctgaatgtattggaacacttgaaggtattccagagga

SEQ ID NO: 18878 - DNA, 351 bp, Zea Mays
cgcacttacaccagggatcaaatgaagaataggtgggacgccttaaagcgaatgttcacacagtggaaaactcttaatgaaagggctacaggtcttggtcgagaccctcatactggttcaatcagtgcgccagatgagtggtgggccaagcaaaatgaagtaagtagaactttttttcctagactaacaatagtattggacatctaaaactaggaactaccatttggtgcaggcaatgccaggttgtattatgttcaaaacagcccccctagagaatgaggacgagctaaaggttatgtttggacccattgtatgcacaaatgaaagaaccttggtacctggcgtcgagga

SEQ ID NO: 18879 - DNA, 642 bp, Zea Mays
gggcacaacaaccgcggtcgaatcggccgggaggttgacgaggtccggtttgagagcttggtccacagagcgaaatccgcgcgaggaagacgatccagggagcatgcgcggggttagtggctgccacatgggacccatggtccagtcacacgcgacgtggagctttgatgctgggctggcgcggtgaaaatctctggtgggctggcgcgggatagagaaggggttactgggccgcgtggaggaggaagcaagctgggccaaataggtggcgctcggcccattcagtgcacagttctatttttcattttcttttctctcttttttccctttttcttttccttttaaattttcaaatttataagtttgaattcctattcaagttcaaactcctggtagttttgttttcccactaaatactcatcttagacatggtaggggtaaatttatgtattgaatattcacattgtgattattagtgcttctcttttcttaacttctagaatccttttagattttaaatcccactttggacctagacatacctatatattttatacattagttttatcttgtcacaaaaatgcacacaaaatgaaacctcagcatgatgcataatttagttggagtatcatttgttttaat

SEQ ID NO: 18880 - DNA, 665 bp, Zea Mays
ccggatgcgtctgccttgccacaatagacggagtacctcttcccaacccttggaacatataacatctccgtaagtttttcccataaagatataattaggggttcggtccctttccctgtaaccaagaagcacacttataagcgccagccggggaggtccgccctcaaataaacccggcctgttggcctgcgcctgtgtatatcgagttataaggaaggggttcgacccacagaactgttcttatgtggattttaatcatacagtttgcgaccattattgctatctcaccactcatgcagttttattccctggctagtattgtgacatccgagctgagtagccagacccggcagccaggcggtgggatggttaggggtcgtgaagtctcttggtatagtctagtaccgtaagcctacacgccccaccgccccatggccggtcctgttgcgtaaatcaaaggataagaaaataccagccggtggaccctatgggcgcactgctaaaaataccttgccaagactgtgtgcaggtcaagtcccagttgggagctccccttgagggtcacgacatcagctgccaattacgaatcctggtatccagccccgacgcgtcgaagccacatcccaggggggccaagtaccaaggaagaagttggtaacggtgca

SEQ ID NO: 18881 - DNA, 336 bp, Zea Mays
gtcactttttgagattggaaccaaggtagcatatgtcatcttccccatacttaacctccgactgtttgaaagagaaacttccagcgaacaaggctgatatgaaacagcagaattctgtgtgatgtacatcaacgaaaacaaaaatcaagcacttggcatgactacatgagtaagcataccagtgctcttttatatgcaccagctacccattcagctagttcaagggaagctttatcctcagcaggtaaagaaaatcgttgcacagcttcttctcctatatcatagttttccctttgcatgcatctgtcaagaatttgaatggtgagcagtaagtat

SEQ ID NO: 18882 - DNA, 566 bp, Zea Mays
cttagatagttagatggcatggttagagctatacctattagtgagaagtgtttcataggaggtgacttcaatggcatgtaggtacaagtgcaggtttcgacgcagttcatggaggttttgggtacggtggtaggaatcaagagggagagaaagtcttggaccgcggtagcttttgacctattgatagccaacacttcctttaggaagagactcccatttagtgacatataatagtggccaacactatagttagattgactttgtcctcgctagaagagaagacaaacgagcgtgcttggattgtaagatgatacctagggagtgtgttgtctctcaacataagcttgtggtggcggtcttttgttttcaggtgcttgctcgtagggataaacaagccaagattatgagaacaaagtggtggaaaatggaagaggggaaggcaaaagtcttcaaggaaagggccattaaagagggcacttggaaggaaggtgacgcaaacaacatgtgggagaagatgataacctgcattcggaaggtggcctcagaggtgtgtggagcaactaaag

SEQ ID NO: 18883 - DNA, 617 bp, Zea Mays
gtcggtgtttatgactcaactgcgcaccacgaggttccccatgtgatgcttttgagcaggaagacatcattgattgggactcgatggtacgtgcagatgcacgacagatcacacaagagtttataaaggttcgggccgctagaatgcgtaacaccctacttcctattgaggctgagtatttgagtatgagtgatgtataaaggttgcagaggcggtggagtgtgagttctcctaatgacgtagtggtggcgtggttgctgtgagaggactagtgggctatgcggtagtgttgtgatgtgacgagctaagagtagtcattcataggggtacccctatgccttatatagatgaccataaggttatccctttacatgtcgtgatcactctctaattctacctgaaccctccttttatcgtggcatgcaatcctgcttatctggagttcaattgcctttcatctaagctatctccaggtatctagcacttcaggtacgctcaacctccttgcccgaggcttcagcacatgattcggttgtctggtcttcgcctctccgggttgacctcatctagcttggttgcgacatgagggcatgtcttgctaggcaagtcgtcgggag

SEQ ID NO: 18884 - DNA, 690 bp, Zea Mays
accctacagtcgataatgtgcagaggaacctgaagatgagtggtagcatcgcgaagggttgcactcactgcttgaggacccaccgaacgcttgagctgagacacatggaccaccggatgaatggtagctgaagggggcagttgaagtttgtaagcaacagctccaatgcattggacaatgggatacggaccaaagtatttaaaactgagtttatggtttgctcgagtggccaccgatgtttgcacataaggctggagcttgagatacaccatatcgcctactttgaactctcgttcagtccgattcttatcagcttgaaacttcatcctttgttgggctctgtgaaggtgttgtcgtaccaacttcaccataagctcacgctgatctaaccaagtctgcagatcgagttgtgtcgtcgtatcagctgtagagagcccaaagtgtcatggagaccttgcatatagtacctcaaagggagacctgcccagtgaagaatgaaaactagtattataccagtactcggccagagatagccaatgaacccacttctttggacaagcgtgtgaaaagctgcaaagaaaggtttccaaacactgattaacacgctcggtctacccgtccgtttgaggatgataggaagaactcaacttcaatgtggtgcctgataatctgaagagttcctgccacagc

SEQ ID NO: 18885 - DNA, 337 bp, Zea Mays
tgaacatcgagggcagaggttaagatcggtcgatgcgacctgttaggaagcgacagtccggcaatgcgacttgtgggtaagcggtggtcgactgacggtggaccctgactactgaagagtgagctccactacggagggagcgcacagagcgaataggcccagtacaagcagtcacatctccgcctccactcctctagccgccagccaccgctcgcccactccgctcgccgagtcgccgtctcagggtcttgccgtctagccgtctccgcctcctctcgccctctccggtcgacggtcgtggactcatgagttgtgatgggcgctgccgcgctggctc

SEQ ID NO: 18886 - DNA, 1324 bp, Zea Mays
gcagcgggtactgcaaggccatgtaggacgggtgcaagcacgaaacatgttttagaccgccctctctagcgtgcacgaggacgtcatacttgtactgtgaagatgagcaatcacccactattacagcagcgagctcaccattggctggtaagttgtactgtgcgtcatgccgtgtgttacagcctaacaatcgcaacgtcaccttttggtcgccttcttcgtctaaacgttctttagcaaagcgaaatgccgcgaccagcttgttatgctcatctagcatgttaagtaataaacgggccacctctggatccggacgatcatggacatcagcctcattctcaaacatgcccaacctattttgtacctcatgttcagtgtcatatatgtaaagttgtgcaaactgtgggcgcaatccattattgggtagtagcgagccaatgccattgattttgaaaacataaggtgcagtaccgttatttatcgatcgatcaacgacagcacctagtgaggtaaacgcgaaaagggaattgtacgagcggatttgcctaaggaaccgtcgtgcacgactatcaccatcgaatcgcagtaggtaacataagggtgctggtggacatttgtaaggctctaaaacaatcttacctcctctacaacaaagattgtacacaagcctgcgctgcgaaacagcagacaaacttttgacccgttcctgaaaccagaaaacggcgccacaatgtgggcactcgtctgatgggccaccatagtatgagcgatctttgtaggtctctacaggcaaagatgtgtaaatgttgcatgggttactttagaaatatgtagagaaaataatccaggtggtacacaagcacctttaagcagctcgacgtatgatctttcaagagacggtgaggctgcatccgtgctaactataagcagaaagtcgagcataaattcataggattttttacgcgcaccacacatgaaacctaaagattattttgaaaagacatacggtagggaaaaatcgttgttggcacatgctcgttcagcagacgcaagcgtacgacgcattctctgtctgcgatggtgtctgttagcggtggcaaccgttgtaggaaagtcgagtaaggacttgttgcctacaaacggcatgtacacgcatcttagtatgcgtatagagctgtagtagatacaagcagcatgaaaagcctgacagtcactaacctggccacttttgacgaaccagctgagagtgcaacgaaatcgcataacgcgacgcatgtgccggcgtcgaagcggatggctgatcaagtgtgttcatgtgttcgat

SEQ ID NO: 18887 - DNA, 621 bp, Zea Mays
gcaataactcattgcccagcatttctcgtatcgtatctgacccctacttcgagttccctgtgcccggctgttactggtgcatcacgaagaagttgggctaatcatcccaggtgcacaagtcttggtcaacagaaacaggaacaatctgcaacatgaatctgatgattgtataggatgcagatggtgcaggacaaaattctacagaaacaatctagcacagaaagtatcagaacaccaggaatgcaaaaggacacatgagctagactggcaacagacacataatcaggtgcaaatgataatccaggagcacacagacacaggaatcaaatggaccttccataactggaccagatggaatgttgagccacggcagtggggtctataaatcatgaacgatctgaataaaatgataacatagacatgtgatgggtctggtacgtaggtagttgaaagttaagttacgtttgcagctatctaaaatgataaatgccctaccacatctgtctaaaattatagttaacatgtggactttaaagttttttggcagccattaacatatgtgtccatatggctgtcgatatttgaaaaatgcatgtctaacatttgagcataagcataaac

SEQ ID NO: 18888 - DNA, 332 bp, Zea Mays
tatagcttcgggagttatctgataaagaaagatctggaatatatttaatacttcaaccacaaatttgctcagcgggaaccgaaggcctgccttcaaaaagcttcggtaaacaacaacttcattttcctcaggagcaggggcagtgatgtctcctccaaccctcaaaatagacatatcgtgaaagtatcttcctctcatggtgtcaatatgactttgtttaatggtcgattttccgaagatagtatggcttggccgctagggccggtccttagaatcttcatcctcgctttccacatcataatcatcgctgtcatcagaatcttcatacaagc

SEQ ID NO: 18889 - DNA, 593 bp, Zea Mays
gcactctctatcatatttgtatcaggtattgcaactatccttttatagaatgtggcctcggcctgggagttaaaactttaaccttcttcggcttaggcgcgatggaagaggatgaggctgccattttcctttccaacccttgttttcaggcaggaaagcagtaatcaggataaaaaatccaatcacaccaaaaactctattcaacctcatctttccgtgaacgctgaacgctgtggttatagcttcatcctctgccttcgtgtaagctcccagcagctcgtcattggtagcttcgacagcctcaagccaatcatcattcggcccatcaaactaatttctgaaatggtaggtatatcttaggttaaccaagccaccttcgctagaaccaacagcagtctccttcggcatttcctagtcattaacgagcggtcccaccttgtaagcaatatgctcctataccaaatccctggtaccgatgtaagtgcacacagtgttgaaagccataaaaacacttgcacttcgttcccacttgcaattgacggccttctgatgctgacgcgtgaccgtatgggactcttgatagtacccttcac

SEQ ID NO: 18890 - DNA, 574 bp, Zea Mays
atcacattcaaaaaggactccagcgacaacatattctcctttttaaatggtactgttctcacactgttcctgaacccaacatttggtgcttctaccttggtgtgcttactgttgcttgcatggaaaattacactacagcagtatctatactgtcattcaaaatgttgatctttaccagttcgatgtgtacttgctcagtaaaaattgtggaacgtgagactaaaggatactaggcattggaaaattacactacaaccatcaatagtgtcattcagaatgttgacctttaccaatttgatatgtacttgctcaataaaaattgtggaacatgagattaaaggatagtaggcgtaattccggagactaaaccagcctaatttctaagggaggagtcctagctttaatgtatggcaggagctaaggggatgtctgttttctctgcccctaatccaggtcgttatgcttctaggtcgggtcatttattagtttttcaaacaggcgtaatgtttaaaccatgtgctggtttgttatggttgcatcggtgagggattggaaagaagtgtcgataggcaag

SEQ ID NO: 18891 - DNA, 658 bp, Zea Mays
gtcagagaggtagtaatgatggcgttagggccctgcgcggcccatgccagccgtcataatgagtgtgagcagaggtgaccagatgacaaggtgcatgcagacaaatggccttgccacggtaaggcactcggttttaccacggaataacaactccttctcaaaggagccaacgaaagccaacctcaccttggcctataaaaggaggaggtcggccacagggatggggttggagacacacatagacccaaatgaactggagagacgcagacatgcgaagaagacccatgacagaagatgctcgatagaaggcaaacacacacgtctggagaaaccttaagatctggaggccagagccaaggcttagcgtaggactctagttccgtagtctttaggatactcccgcataagagacctgggagccttccctccctctctcgcccacttgtaacccacttgtaacccctactacaacatcgagcaactaaggtaccggtagcacaagccgccgaagactggatgtagggatgttctgctcgaacgagtttaaaccttgtgcccaccgagcacaccgtccagagcctagaacgtagatagaaaattacttatcagagcagaggttcgaaacaccgacacacttactaaaattgaaattgatatc

SEQ ID NO: 18892 - DNA, 275 bp, Zea Mays
ctttttgctctaccagctctccctcgacgtcgaggtcgacccctccttttatagaccaagtagggggtttacagatggcttctcaccagaagggagtgtaacataaacacagtatccacccataaaaattggtcgtgtgttgattcccttgcctgtgtgggttctctgtcgtatctctaatattgtcggtggtggatatgattcatgttggcgagggaagctcgagtgtcatcattagtgattttgtcctcttcttttggcgtcgcggactgaga

SEQ ID NO: 18893 - DNA, 461 bp, Zea Mays
aggtcttctactagagtcgaccccttcctagtcttgaccatgatgtcatcaacataaatctccaccttgtcccgaatcaggtccccaaaggtcttactcattgcccgaacaaatgttggcaaggcatttttcagaccgtagggcattacaacataacagtacaacccatccactgttacaaaagtggtatgcttcctatcctccctagacattcggatttgatggaaaccgaagtaggcatccaagaaggacaaaaggtcgcacctagaggtagagtccacgatctgatctatatgtggcagtggatacgggtctttgggacatgccttattcaggctggtgtagtcgatgcacatccgaagcttcccatttgcctttggcacgatgactgggttggccagccacggatgaagtcctgccgctccatggactgtctccgaggcttctggctcaccggcttg

SEQ ID NO: 18894 - DNA, 515 bp, Zea Mays
attggctatggcatggggtaactcatacgctagagggcatgggaatctgtgcatccacaccgcttgcgggattctcgggtggactctccgccgtgaagtcatggcggtgccgccgtcctctgtttcggttgggggagaaacacttcggccgttgattgttctctgaacgactgagattagacagtgggataccctttcacgtgagcgaatctgggtcgttgcgggggaatcgaacgaaggagatctgatctagatttcattaaactacgatcgtcggatcgggatccagggaccatggtggcataccgattcgcagccgcgctgatctaatctgaattgttcgcatctaatccaacggccgatattgacctgtaccccttcggccatgtaatcttgcataagaaaccctgtctttattaggaataaacccgcataccacatattctattcactgagtctaggaaattttaccccagagaccctgcatttctctgtttttgtcgcgcagtccaaac

SEQ ID NO: 18895 - DNA, 656 bp, Zea Mays
cagggttcgaacctgcgcgggcgtagcccaacagatttcaagtctgtctccttaaccactcggacatatcgacgccatgtttataggaaaacttttagtattatatagcagagtatcttcgtgctggttgttagataaaagaaaaaaactacctcactccttctccttcagaagccaacacagaaaccaattggtcactaatcctgttacatatgctaatagccagccatgctcgtagccgaaattactcgaggcaaaactctggaagtactatcctgaagccttcagcaggccgcaggcgtccaccgttgtgtatacgcaaagggattttgtaggcaaaatgcactagctagtcagcttgctgatgacgaaccttcttcacagttgcgtttttattgcgcccctctaactccaagcgcctagctggcacagctccaaactgattgtccaacctgggaccataaaacaaatagtgttatgtctattcattgtattggaccattccatgcccacgtggttcatggtggaaaagacaggttagaagcaaaggaaaccatatggtggcaaaagacagagttcacaaaccagagagacgccagtggttacttgtgaaatcagatagaagagaagaacatctgaaacttagtgaatacttg

SEQ ID NO: 18896 - DNA, 601 bp, Zea Mays
tccacatcatgcaccatggttctgccctgccccacacccctagtgctccccacgcgcatctccctctctacctcctaggccccctcttccatgcgccaaaaaatggcatccgctctcctagttcctgtctctcggcctccagctcaaaccaacacacatccacatcgtgcaccatagttctgccctaccccatgccatccacatcgtgcaccatggttctaccctgccccatgcccctagcgttcccgacgcgcatctccctctctaactcctaggcccctctcctaggtcctgtctcttggcctccagctcagaccaacacacatccacatcgtgcaccatggttctaccctgccccacgccatccacatcgtgcaccatggttctaccctaccccatgcccctagcgctccccacgcgcatctccctctctacgtcctaggcccccctcttccatgcgccaaaaaatggcatccattctcctaggtcctgtctctcggcctctagctcagaccaacacacatccacatcgtgcaccatggttctgccctgccccacgcccctagcactccccacgcgcatcttcctctctacctcctag

SEQ ID NO: 18897 - DNA, 837 bp, Zea Mays
gtatcagtgtactatcttgttataggtcggttgtaggttgctgcactggtgttggagtaaatctcgtttaaagatggactgacaggttttgcacaaagacatgttaactgaaaagtaaatttcagtatttttgccctactttgaagccccataacttctattatgtgagtctttggcctagggctattgcagcaaacttgttgagcatggttttgtgaacaaactttgtgaaccaaggtcaacctattaccactgagaattggaagaaaactttgctccatgtcaagtggacaggcgtgctgtggactaaactttgtccagttagctgaactggggtcactttggacagagagggaggggccgttgtgatccagctgtacaccggctgatgttgcttgcttgtttcaatttgcttgcttgcttgtgtcgtccttatcatttgtgtcgagatgtgcctggaccatgcatggtgttgtgctatgtggccgcgtgttcacgttcaagctgtgtttaagcagcaaacaccttgcaccttatcctatgtgctcaattcctaaaatatttttgtggactagtcttgtacgtcttctcttcttcacattggctctgaagcctatacgtgtcttcctcaaacaggtgcttaggtcattttccctaccgtactatcggcacgaaaggttctcagcaccctcctctcaacgctcggacgtcatccttctccatttggccttcagccaggatgccagcttccatggtcccacagtgttgctcgcccaggtgtgcccacgtccggccatgaagatcctacgagctttctcccatcctggctccctggcg

SEQ ID NO: 18898 - DNA, 705 bp, Zea Mays
tagagccctggaaaaccctaaaactaaaacccaggggcttatgtgcaaaagtggtgaacctttggactaaagtgtaaaaactactatgtttgaacatatatagtcatttggttcacaaatatgtgaatttgcaagttaaaccctaagttttgggcttatttgcaagaatcacctcttaagcactataaagcctaagtctgaaatcagtgtgttttcttcaactttgagcccttgtatcttacaaattaataagaatttgccctaggttaccacaccaaacttgcagaccaaacaaagtataacaactttgcttaaggttgtgagcatagttgttaaggaatatttggagataatcccacttaaaatcagactgtcaggctggctgatggctgaaacttggtctgacagtgggatgggtcaatctttgaacccggatttaaacaagatccagtgcaagtttgggtatgattcccacaacaaaattgtagctggaacatggggctataactttggtacagaaaacttgcttcgtcactgcaccaaatcgggagtaaattagcgctaaaactgctctgtcaggcgctctgatgaagcagtgccatagtacagtgtccaaaatgggttagattgccagcgccgcgtactcgccgccgacgacctccctgcgccacgattcgtgtcaccgccagtccatgtagtgttcgg

SEQ ID NO: 18899 - DNA, 520 bp, Zea Mays
cctatgcgtcggtctccttgcgcgcggaatcgtttggttgtcacgcgtgccccggtggtcagcggcttctttctcaggattacccgatgcgcgagaatgccgcagcgacgcaacaacctgtacacgcggatcgagggagggggagtcaggcattatcccatttctctggacgagtaaataccgaacacgactctctctcgctcatctcatccatgccccaggaacggtgtcgaagaagtcatcgtagaaagggggaaatcgccactgaagctcgctgggtagagcaccctcgctcctcgacgttagcgccacatctcccattccaagggcatgtccgcgtgtgctgacccaaggtactgaatcaagtgcacctatctcgataaatttagtacctctgcgcctgatgaaagaaactctccggtgtagctaccaatgttgcttgggtcgcgactatgggaggtcgtgcccctgctgttgtcacccagcccctacactagtctctggaacccgccaacttggc

SEQ ID NO: 18900 - DNA, 934 bp, Zea Mays
caaggtttatcctagttcggcaagagaaggccctacttccagcgggggaggggacttgtattatcttgcacctaagtgctcgtagtagggggtacaagcgagtcgagagagggaaggagtcccaagtctctaagtgtgattaaggcgagtgccaatatcaggagcggagtgaggagtgagcggtgaagtgttatggttgaccttacctatagaaggccctgggcttctcctttatagtcgcaaggaggcccatgtgtacagatgtttgctgtgctatttttgtggtcagaggcggcgtctctgagccccgtagcggcatggccggccggaggcgcatccgagccctgtagcggcatggccgatccctgtagcggatgtccgatccctgtggcagcatggtcaatgggatggccttctcctttgagtcgtcctttgattaggtagagagtcgaggctagctcgggagcatgggtgcctacccgagcccgtcttgtacagaggtgcgaatgggacgtatctgagggtgtcgagtcggagtagttgaaacagcgctcaatatggcggaaaagcgtgtggtaatccggtccggtcgtcatcttggacagtgacaccggtcttgtcgtttctgtagcccccatacctttagcagggtttgcagtagagcagccgagcttccctgttggggcagttggccgaggccgtgctcgggcgaggcggggatttctcccgaggccgaggccggggtcgggcgttgcctatagccacgctctggggggttgaaatagtgctcggaatggaggaatagtgccctgtattcgcgctctgatcatcgtcatgggcggtaaaagtagattagaccgtagtcatgtcgtcctttgttgactttggcacctgcggtggggcaggtggccgtacagacagcattaaatgcgca

SEQ ID NO: 18901 - DNA, 1331 bp, Zea Mays
tgggacatgttactatgggattgcgggtttcccaaggcatcgctccgcgcctataaaaacctggcctcgaccgaggcttttacctgctcgagctcacgctggaaaaaatctagtttttacaaccgctcgcctgccctctttgctccttctccgccggtgatctggctcatatcaaacaaaccgcgcgccgccgctgacggtacgtgacaatgtcatcctcttcttcgtctgctgcgagcgcgtcgccggccacaccgtcgtctgaggagacgttgagcgatttggtggtggtagaactgcagctcgaccacaccgtcgagtttgggacctcgaggataatttcgggccacgtgctggagatgcagcgctaaggttactttgggaatggtgtcgggtgggctctaggggcagaagaggtccctgagccggaggggcaattggttgttttttaatcctttttcactgctggtcttcgcctgccgacgcatcgatttgtagtagaggttttgcggaggttcgaggtacaggttcatcagttgacaccaaatgcagtggtggcgcttgcgaagtatgtctgggtcgtctcctcatacggcggacagccatctatggatgtctttgcgaagaattattgtctacactggtagaagagaaaaataggtgataagatagctcaatttcgatcgtgaactttcacactgaggactaggaagacctcggctgaagttgttggcattgttccctgtactaggaataagtggggcaattggtgggacttttggttttatgtggctcccggggatatcgaagggttgtcaagtttgcctcggccatcatgtgttcacattgttatgtggcgtttccacaatttgaggtggcagaagaagatgaagacgagggggcccttcgatatgtggcccgcctgagtagcggaagcgacttggtcgaggagtttattgcctacggggtttggcccctagtgcatggttggcactgggtgaggttaccgcccgcttgatgccaacactggggggccagctactgcgaagtcctgtcttcgccatggatctacgtggccgagacgcggccgcgtttgtgcgtgaggtcgaggccgaagctgccaagattgttggcaaatacgtgccgaagacagagactttgagaagctgggatattcacggttccaacgctaggttgaaccgtgtttttgagctgaatcatttgtcgtacgactcttacccggagggggactctgccgacaccgctgatcgtcgagggaagcaaataaggccctcggccaatgaaggcccctcatgggataaggctccggg

SEQ ID NO: 18902 - DNA, 317 bp, Zea Mays
atgtggagctaaggttttaacatgctcacaacctgacttctccaaaatagctgcaattcccctcacaccagagaaggcacagacgtccccacggtcactcaaaatttcctcaaaagcttcggcttcgctgctgattcactcaattggcccctcaggatcgcctcttatgaagttgtcttcactcgagtacgcgcccacgttggcgaagctagtctttatcttttttacacattccacagatttttcaaaacatctttctttcgatgagcgaagctctgcaactgttttctcccaataatttttccagtaatcactgg

SEQ ID NO: 18903 - DNA, 474 bp, Zea Mays
agttctgtggagtcttgttctatgcagatccacgagaaggtgtgttttgatcagtcctctggtcgctgttcttctggggtgtctgtgggttacgcctggggcatttgttggcatagtggccaagttcgccacacttgaaacaaccattgggttcaactggggtagttgcactgttgttcttggccggtgtgttcatggtgcttccttgacgattctgctggttcccactagacctttgaccggtttgggtgttgcttctctgttggttctgatattgattgttcctctaactttgttgtccagagcactgtgcttgatagttgttgttcccattctggtttctggagcagaattgagaaccttgtgagttgttttgccaggtatttgtgctggtctgcccttggtacttccttttgtgatcggacagttctttccttttgttttcaaggccaattgccatgtttagcaaagtct

SEQ ID NO: 18904 - DNA, 682 bp, Zea Mays
ctgggaccgaccgcgcgatggaagaggaagggaagcgcggggaccgaccgcgcgatggaagaggaaggtaagaggaaggggaagaggaagggaagaggaagggggagaggaatcgaaccgcgtggaagaggaaggggaatcagccgcgctgaagtctggccgcccgtggaagaggaccactctgttcgcgcgtcgtcggtggaagaggaagcgtagggttagggccgctcgccgcgttgcagtggagaagaggaagaggaatagactggatgccggcggccggccgctcgccacgttgcagtgggggagacgaacaggaatggactgggagtggacgcgttgcagtggaagaggaatggactgggtcactgggacttggacgcgtacaggctacgctattatttaaatagacttatagacctcctcacaataccgcagtacagtgccacaacagcccaactcaaagtctgaataccgcagtcgcagacatggttttcggttcttcaagcaaaagaaagcgtgcagatgaaaaagaagatgatgatgtgcaagtcatccaagatgtgcctgtagatatccaagatggtgacgcagacagcggtgacgaagatggggctacgactgcggctactggtatgagacatccactactagatgaaattaatattattggtgttccgag

SEQ ID NO: 18905 - DNA, 427 bp, Zea Mays
gctctttagaaattctgaggcggcgaaagggtatgagtgatatctgaccgcccgatcaacagtggacggcatggattagctctgctatcgaccgaaccggtatctaactcagtttagaccagggatctacggcgggtatctaacggagcgcgaccaatcccagccaccttatcatgactggagggtcctgatctcacctaagggcttcgcatctggaacctaatctaaccgtccgatagctgatcaccggtatcaagtcgtcttctacctcccgttagcacatcgagcagcacccatgtcaccgcaacggagtaagccccgccggagctggctacgtcatcctatgcaccatactgttctaacgagcacgaccgagtaccgatcgccaagacaccgccagccaacccatatgaatctacctgctaag

SEQ ID NO: 18906 - DNA, 362 bp, Zea Mays
acagaaaactgaacctacaagaccttgggcctcgttccagctgcagtcttgtaaggtggtgagaggcattgttaacatggcagtgacgactaagattggagatgggagtagcaccctgttctggaaaaacagatggctgttcggacagcgcattaaagaacttgctcccgtcattttcagcatggttccgaagagaactacaaaccggagaacagttgtggaagctttgacaaacaagagatggatccaggatattcatggagtggtttcctggcaagtgctgcaagaattctatgtttgttgggaggccttggaaggggtgcagctgttgccaggaacaccagacaagcatctctgattct

SEQ ID NO: 18907 - DNA, 407 bp, Zea Mays
aaaagatgaaagttcttacgcaccggccacgctatattgaaccggccacagtgcctgagtttgtcggtgagacctcttcggccactgaagccaaggagccaactcctctgcataatattgtagagccagccataatgccggagttggaaaaaatggaagaatcgagggctgaagagacaaagacattagaaattctaagtccttcagccagagttgaggtgccaatgccaatgcctagggcacaaaaagacctcacaacaactcccaagagaaaaagaatggttaacgtactagatgtgctggaaacaataaaatcttcaagctctacttcgaagatagatgccgaagttccaaagacacaaattgaggccgaagctgccaaaagtcaagcggagactgaaactggg

SEQ ID NO: 18908 - DNA, 526 bp, Zea Mays
gatgaggaagaggaggaggaaatccccttaattcggaagaacagtcggcgctatatagccagtggggagagtagtggtgttccttctccagctttgtctgctctcgttggtctgcaagaattgtctctggcaaattttgatcagactctcaaagatatggtccctgaagatctgttgtcggagccggcagatggtggaatgatggaaatttgtgctgatgtgcctgctgtcgggttagagttatcccgagcagcgtctcgtgcctcatcgaccctggagcacgttttaagagtcaagagactgatctggattgctccgttcccatggaagtggttgaaaatccttcagccttagaggtgactgctacagagaactcggtccccaaggatggcacttgcgtttacccagcccccgagggtgttgccggtggtgatccggctcaggtgggcagcgcgagctatgacccagcccccgagggtgtccaagcgggttctcattctcatacttccatggatgttcacgtcgg

SEQ ID NO: 18909 - DNA, 980 bp, Zea Mays
ccatgcaaagcccggcttggctgggttcgcaagctccagaccacatatggtagttctctgatccattttcctgcgtgcttcaagtatcattctgttggctctttccacctgcccattagctcttgggtgtgccactgatgcatacttgatctggatgctcctttgctcgcagaaatcaaagaactctgagctagtgaagttagatcacaggtctgtgataatgctcttaggtatcccaaacctaaacattatttcttgaatgaattccaccccctttgctaaggtcaaagaggcgatgggctcgtattctatccattttgtgaacttatcaatggcgaccagtatgtgagtatatcccccttgagcttttttgaatgacccaatccacccccaacatgtgaaaggccaggttacaagaatagtcttcaactgttgggtaggcagatgttgttgttttgataagaactggcatgcttcgcacttctgaactaactctgcttcatcattcttcgttattggccagtagaacccggacctgaaagctttccctactaatgtccttaatgttggatgcacaccacattgccccacatgaatttcatccagcatctgccttctagtagccgagtgaacacacttcatggggactcctcctacacctcttctgtatagcagaccccctatgatggtataatgggacgactgtctcgcgatgcattatttggtggccttgtcatctagttcttcctcgtttttttatgtatttgataattgactccctccagtcgttgggatctgtttctgcctggtccaaaatgtggcactcctcagcctgctctgtggtgacgcttagctgctatacttcttagacaaaaaccccaggtggaacctaggctcggctagaccccagctttgacaatgcatctgctgctgcgttccgatccctttccacgtggtggaattccaaaccttcgaatttg

SEQ ID NO: 18910 - DNA, 465 bp, Zea Mays
cgggcgcccgtggtggtgaggtcgtcggcgaggcctacgggtgtaataggtgaagggaaagggtgcgctgtgttcgtggtgaaactcgtgagccaaaccaattggactctaggctaccagagaagggagggagggctcaccggagcggaggaatagggcagtgtgctggctcgattgagctcggggaagaggaagagaggtggacgaagctggtgtgaagaaaactggagcttgggcggtcccttttataggcggccggggaggggggagaggtggcgagcaccggcgacgcttgccgcagtggcgatgatggagcatagtggtggcgacgggatggctcgggaagacggtggtgacgggatagctcggggcaggcgcaaagtgccaattcgggtggtgggcgagtaatggcgaggggatgtggtggagcggtgaccagcggtgatcgcgtcgatagccgatcac

SEQ ID NO: 18911 - DNA, 474 bp, Zea Mays
cgcgattcgtgcctgtgtgaagtggataaccgtggcaggtgaaaagatctggggtgaggagaacgtaggcctgagctggatcatcgtcgtgcccacttgccgtgtggtcagtgaaatatcgtcgtcggtgttcaccgtgatcgcagtgagagacacgtagtcgcctatttcaccgtactatcgtggtcgtggcaagcaatcagttaccatccctgaaccattcccctctcgcgcgccacggtgagcaggccaccgtagaaatatccaggacacggtgaactcgatcccaatccaaaatttgtgataagctcagttgggatctataaattggaggcacccccctgctccgcctccttgttacgcatccaacccaccccaagctagcctctctcatgcaccgtagcccccggtcaccggatttcccccaaattggtcatctgcgccgccgtgagacgtcgcgccgtggccagccac

SEQ ID NO: 18912 - DNA, 713 bp, Zea Mays
cacgaatgcggtggtggcggttgtcggagcggggaaccgagaagtgctcgtcggagctcgggcacatcctcgctcccgcaccccaccgtggtcaggcgtcgctacatcccgggctaccatgggtgaggccgtgagtctgtactgagttcatctccctctccgttgtgtattgccctgccggatcgaaggatagtgcagactatcgcgtggtcggggaagtacgacgatggcgccgccgtgggtggattccggtcgccgtggggcactcacgccaccgtgcctagtctgcctagggtgggagatggttgccggtgaacgttgatgaagcgaggaacatatcagatttgatcgtgggtatttaaaaccctggcggtagatctaggatccaacgacgtagattagatgagggatacctctacgcttaattaaaccctggccgtccgatcggctatgggcagttgggtggcgcataccttctcgcgtggttagatccgagccgtccagtcctgatctggcgcgtgagattagaccaccaaactataaatcacgacgtcggatcgtgatcgtactgccctcggtgcgtaccggttcgttttaagttacgtttaatccgggccctcgatgcgcgatctagcggtcgatcctcacccgtactctcttcggccaggtaataatgcaaaagaaccactggatttctaggggttaaacccgcc

SEQ ID NO: 18913 - DNA, 513 bp, Zea Mays
ccggcgtgctgccgctcatcaccgcccctgttgtcgccaacatgcggctacatcacgtgttgatcgacggaggggccagcctcaatgtcatcagccatgcagcattcagacagctataggtcccggggtcgcggctggggccctctcgcccgttctctagggtgggcccgcaacccgtatatcccctcgggagcataacgctcccggttatatttgggacggaagaaaacttccacacggaaaacgttcagttcgacgtcgtggaggtcaacctcccttttaacgccatcattgggaggccggccctataccggttcatggccattgcccattacgggtacctggtcctcaagatgtcgtcccccgctgggatcctcaccgtgcggggcgaccgcaccgtcgcactagcagccgtcgagaagctacacactttggcggccgagatcgcccggccggacgatggacggagaggcccctcggtccccagtgccagggcgccctccaaggccccga

SEQ ID NO: 18914 - DNA, 874 bp, Zea Mays
cgcgcattaaaaccaagaacagtagggacctcagcgaaaataatccaagacacagtctacactccctatgggacggcgggttgattctcactttaaccagggtctctttagcaattcgcacccgcgaaggggtatacatcaatcctggccgttgaattagatttgaacatgctagattagatctgctaaactgaagtattacacgccatcctagccacctgtggcaggatcgacggtgataggccatctgaccacgcgccccatccgaaacccttggatctccgatcgatggtcacggatgaacatggccgaaccggtattagaatctaatcctacccgcacatccagatcggacggctagaaaattttcccccaacccaaccgcccaaacatggcggcgcgctcccctcacggcggcccgttcgcgggagatcccacgttcacacctcaaaccaccccaaatctctaatccatccatgctacactaagttgaaggtaggacgaactcgatggagggcgaattacctcggtacggtgcggcgacagcactgcccacgcgacgatgtggctccgcggccaattctggcgatggcgacaaattcccacaatgttgggcacgaattcccggcggagcggcttcaacctcacttctccctgcccggagaatccccaggacccaacctagaggtgcgatgggcggcgagtctactttctcccttccccacggcggcgcccacgtttctccctctaccagtggcggacgcaggacgaagattcatagggggccaaaaaaccatataacaaatcaagcaaaggatcgtaaaaaccagcgttacattgaattcaagttttatatcaatacacgatataaatt

SEQ ID NO: 18915 - DNA, 476 bp, Zea Mays
tatggtttaaaaagagaatctgtgtaccagaaatcgagcacctacgccaacttatcttaagagaagcccatgattcatcttattctattcaccctggaagtactaagatgtaccaggatcttaaggaaaagtattggtggtacgatttgaaaagagatgtggctactcatgttgcactatgtgatgtgtgtcagcgagttaaagctgaacatcaaagaccagcaggattgctacaacctctcaaagtaccggaatggaaatgggaagaaatcagtatgaatttcatagttggactaccccgtactcgggatggctacgattcaatatgggttatagtggacaggttgactaaagtggcacactttatacctatgaagacaacctactcaggagcccagttagcagagttatacatgtcaagaattgtttgtttgcacggagtaccaaagaatatcgtatcggatcgaggaacccaa

SEQ ID NO: 18916 - DNA, 705 bp, Zea Mays
acttgctctagcagcacatggtaactggtagattcatcacatggatgtaaaaacagctttcttgaatggtgatttgagagaggaagtatatgtgtcccagccaccaggcttccaagatccagggaaggttaaggtcttgaaattacacaaggccctatatggtttgaaacaggcacccagggcttggaatacaaaattggacagtgaactgatctctttgggttttgaaaaatgcagtgtggaacatgttgtttacagaaagggagctggtgaataacttttggtggtgggagtatatgttgatgatctcataatctatggaccatcagtagtaagaatagaagaattcaagaggcagatgatgcacactttcaacatgagtgaccttggtttgctgagttactacttgggcatggaggttacacagaaggagggtgagatattaatttgtcaaagttcatatgcagcaaagattgttgagctgtgtcacatggctggttgcaaccccactaatactcctatggaacaaagaataaaactcactgctgctaagaaagggactgaaaaggatgttactagatacaggagtgtgattagtagtctgagatacctagtgaacacaagacctgacttatcctttgctgttggacttgtgagcaggtttatggaaggtcctaacaaagagcactggacagcaattaaaag

SEQ ID NO: 18917 - DNA, 833 bp, Zea Mays
ccttaattgacatccatatggataattctacccatttcaatcaaagttattaaaacctggccccatttgaagctctctccgtgctcggtgggtttctgtccaccgcgtacgtgacacgtggctatgtacactcggacccgaaatttctattcgcctcagcggagcatacgattgtgtctgcccccaatttcctccatctaccgccgcatggcctcagccctctgctccaactctcactgtcgtgggaacctgccggactccgtcaccgctcgtcctctccatcagtctactagctagccgcggttccttcactaaatctgtctcctgctcctcgccactccacccccgcctggtcgcaccactcctctagccggccctatcgttggcgcagctcctcgcagcctggcctcttgcctcgtcgtcgtctccctatcggcccggcccgtcgcctctccgtagctgccgttgcagtcggtctaccggtgcaagagaggaggcgcctgaatctgggctaccaccaagccgtttcgatccctgttgatgatcgcttatctgctcacggaaaggagacagattcgtggttaaacatcatgggtgcggcagcaacttcatggggtgttcgaccgcttccgacgcgcaaagcgaacgacgcgtgcgcccaccacctacgatgacccgtggtcaagatccagtctgagctcgcttcttcgtcttcctctccatagagcccgtgaggcggatcatgtccaaggtggtggcggagctggcccgttactctgtgggaggagttcgtcgtggccaccgccgggcaaaacagctctggacacgccgtc

SEQ ID NO: 18918 - DNA, 2178 bp, Zea Mays
ctgaaacaaacatgcccttagacacaaaaggaaacctcctatcactaaggaaactgcaagatcagtaggcaatgatcctgcaggatcacctccatatcagcccccaatcaatcactaccaaaatcaatactaccatatgtaggtggccagcatcacaggccaagcactagccatatatgtctatacacagaatctgtctaacaccccccaatcgaaacatccgtggagcaaacattgagactggaccgaaattcattgaacacggaagacgacattcctttggtgaagacgtcggcgaactgggatgtcgtgggaatatgtaagacatgaaaatctccaatggtgacgtgttcccggagaaaatgaagatcaatctcaatatgcttggtacgttggtgttggatggggttggaagacataaactgcgatgatgtcacaatataccaatgttgtcttgcccagaggagtgtgaagttcagaaaacaactgttggatccatgaggcctcagcaacggcattggcggcatcatgatactctgcttcagcactggaacgggacacattgttttggcgtttggaggaccaagaaatgagatagtccccaagaaaaacagcatatctagaagtggagcagcgagtatccggacaacccgtccaatcaacatcagagtaaacaattagatttgactgagacgaggggcgcacacacaggcctagatctagagtgcctctatcatagtgtaggatgcgcttaagggtagccaagtttggttctctgggatcatgcatgtgaagacatacttgttgaactgcataacagatatctgggcgggtgaatgtgaggtactatagagctcttgcaagactgcaaaaatatgtggggtcggagacaggatcaccagcataagggagcttgggattcacatcaacaggagtagcacatggtttgcagtcactcatgccaactcattctaatatctcaatcatgtacgggtgttcggaaaggaagaggcctgaagctgagtgctgaacatacataccgagaaaatgatgaagcttgacgaggtccttcatagaggattcttgctgcaaggcatgaatggtccgtctcaatagatctatggaagacgttgtgagcacaatatcatccacataaagaagcggatacatcatgtcggtccctttgtgatacataaagagggacatatctgacttggcctcgacaaatccaagttgcagtagatgagaagcaaaccgactgtaccaagcacaaggagcctgcttaagaccatacagtgagcgattgagtcagcaaacatagtcaggaggtgtggagtcctcaaatcccgcaggccgagcacaatgaacagtttcagacagatgcccatgaataaaggcattattgacatcaagccggtggataggtcatccatgtgataaagctaatgagatgactatccggactgtaacaggcttaacaactgggctaaaagttttagaaaagtcaataccaggatgctaagtaaaaccacggagaacccatctggttttgtagcgctcaagagaatcatccacatttaagtgttgaacttgtgtttaaacacccacttgccaatcacaatgttggaccccgacgatcgaggaataagatcccaagtattattggcgatgagagcagaatattccttctccatggtagcacgccagttgggatctgctagagcagctcgatagctcctaggtactagagacagagtaacacctttgaataaagctaggaaccggaaaccgtgcttccctcgagttgtcatgtcgtgccggttggtgatagcaagaacaaccaaggcgctagcaggaacaggtgacgcagggggtgcagctggaacagccatggtgccagcaggaacaggtggcgcaagggcgctggtgatgtagaagtagtcggccgatgacgggagtaaacctgaccgcagaagcgacaaagagcagcaacctgtgtaatggtagcaggttgtgtcagtgtagtggaggtcgctgcaggtgagcctcctgaaggagacacagaggtctacgtaatggtagcaggctgagtcggtgtagtagtggccactgcaggtgagcctcctgaaggagacgcagaggataaccgggtggtcgaacgtctctagactggagcgt

SEQ ID NO: 18919 - DNA, 359 bp, Zea Mays
cgaaaatcaaaggatagcaaggaaaacactgcccgacccagaatagccacccaaggggagacactcttccctcaggggctactatcgaggaaaagatccctggggcccaccagtcagaaagagctcatgggacaagagccaccagattgctggggacctccggtcagtgggtgaataagggaaccgtctaccttagaagcgcccgcccccagataaaccataaggcaccgagcctagggtcgggcgtggcagagctagaaaggggtccaggcagaccgaagagaagtcatttgagtggattcctcacctagcccaagactaacccaccgtaaatgtcgactacatcaactacgcctgac

SEQ ID NO: 18920 - DNA, 472 bp, Zea Mays
tgaatttcttcaggttacttcgggtaaaactttatgcacgaggagagagcagagatttaacttatctgtgtttcattgtatttcgatttaatttcccagatttaatatagttgttatggccacttggcgatatatataaatatacgatgccacacaacacaatcaaacaaaatataaagtgaaaacaaaattgtttacgaaggttgcacataatgtgacttcaggaccttgaacaacccaccactatccacgcgggtacaagctctagcgtatctggcgtcaacgcgtgtgcggccatcaaggctacgacagtatagcaagccttcgtaataagcgcaacaggcacaattatggctcggtaattggggtacacgataagtccacgcaacgtgcgcaacaggcgcaattgtgacccgatgatcacggcagacggacagtgcctacagggcttgcgaaaaatacgcgactcggc

SEQ ID NO: 18921 - DNA, 271 bp, Zea Mays
gcgtaataccctactccattgtgtgatgtattgagcttgagagcttgtatgaacttgtgagtgtgagagtctaagtgtgtctgccttataacgttacgtgcctccccttttatagctcaagggggcatgtacaagggtgctgagccccgacatgtgggcccaggaacataacggatgtaatacttggagcaactaatgatggtcgccagtgcaatctccttgcgccttgatattcgcggtttgcgtagcattggcgtgcagcggaagcttc

SEQ ID NO: 18922 - DNA, 1326 bp, Zea Mays
aaaaaaacaaaggattaataaaagcattaaattattcatcatactggagtttaattgtttgtgcatttaataataaaaaaaattaaggttacattaatgatgtgaattaaggactaaaacctaaatcaaatcttagaatttggaaataaaaatataaagaaaagtatatataaataaatatattttttctactggtatttagatttgtgcagttaagctaaataggaatttcactataaatttgagattaaattcgaaatcaaacaaaaaggagaaaaaaaaagaaaagaacgttaccttggccgtgaagctccagctcggatcgcccagtcagcctgggctggaaatcgtgccctcgcagcccacgcatgcaataccagccgtcggcttcccctacctgcgtgagccatactcgctcgcttactctctggtgtgtggggccgggctgccagggcattagcatgttcatccggtcgctggctggtggacctctctgtcaggctggtcctcaacctcgcaaccgcggccgaacgctacttctgtgttcatcggacaccgatgccgtgtgacaggttgggttgttctcccccgcgacttccacggagttacgaaccagtcgcctcggacctctatcgcgcatatatatacggacagtgccctcctctcaacccagcgcgtcgtcgcattcgcaacagccgagagagagagaaaggagacaggagagaactagtgcgtgagctaagcctgggtcgtgcgctgccgcgctgggcgtcaggtgaatcctccgttcgtgtgcgctgaccggggggaaacagagcttcatcgccgcgcgtcgtgatcccggctggtcgatcgcagtaccaggcggtgatcctggcagcgccacggtaagttgtgctcccataatcttcctcgcccgtatctccctaagcgttagaacttgcgtatggtagatgcgagccgcggcgcgcttgttcaatccgacgggtcgcgccatgggcgctcactgctgtcgaacgcccgtgcgcgtaggtagaagaaagcctactggtcgttggatcggttccctgcggctctgattagaagtaggcgataccccttcacgacaataaatcgcggtcgtcgctcgttgatcaagtggacacgctcgcttgtctgtttgccgcggccgtgatccgttcctggcctctggatctgatctggacgatcgaaaatcaaccgtaccccttcggcccgggaatcttactaaagaatccctgggtttcttaggaataaacccgcactccaagcgccagtggtctgtgtcttgggaaaacttcggttttg

SEQ ID NO: 18923 - DNA, 1217 bp, Zea Mays
aaaataaagaccgccgccacaagcttatgttgagaaacaacacattcactagatatcaccttataatccaagactcactagatatcaccttgtaatccaagcatgctcatttatcatctcttcttgtaaggacagagttaatgtaactagggtgttggccactactatagattaataaatgagattctctctttctaaggaaagtgttggctatcaacaggtcaaaagctatcgcaatgtccaagacttcatctccctcctgattcctgctaccatacccaaaacctccatgaaccgccttaaaacttgcactcgttgtacctatatgtccattgagatctcctatgaaaagcttctcactaataggtatagctctaaccatgccatctaaatcttcctagaaaagactcttaagtctctcatcgtgacctacttgggggcgtacacgttaattatgtttaagaccaaatcacccacgacaagcttgactaagataatcctatctccttgcattctcatatctaccgtgccgttcttgaggctcttatcaaccaaaactccttcatatttatcaatcaaaactccttcctatctatttgcaattgtccctgtgtaacaaagtttagcttaaagccgatattgtctgcctcattcgtcttctaacccttccatttagtctcttggatgcacaagctatttacacacctcctagtcgttgtctcaaccaactctcttaacttacctttaagcgaccctacatttcaactacctaaacagatcctagttggatcgactagcttccttaccctttgtacccgtcgatgatatgaagacccttgcacattttcaatatatatgggcgccgatgtagtgcgtgcgccattaagtagtgacccgattcttgctcacttaacaccatgcccacccggcccttgcatatttaacaccataccggggtttcagtacggcgcgtcgccaccccaacgggtttctttcaggttttgtcttcattagaaaatggctaggtttaacgttagctcatcaagcctatcacaaacatggaacaatatgcctgaatttattctcatggatgaggaaatacaacatttgtccttcagtttttttggccaatgtgcaatagggatggttgccttcactatttagcctgctctaatttttggtcgcaagtctgaagtcccttacacattttttctgct

SEQ ID NO: 18924 - DNA, 916 bp, Zea Mays
cagggaggtaactttggacgtgtcgcgacctcgcggacctagcccgagtctagtaggagataattcaccggtggccaccgtagctcggtcatttccgccaccgtgtcatccatgcctcgctcctccctcactgtatcccttctttacgtggtaaccatgcacgaatggtgtactccgcggccgtggatcgttagccggaccaccgcgcctttaaatagccccgccacccatggcgaggtattcacatctccaccagtgagctcagttgaagcccaaattcgtggaatcctctccacctctcccaaaattggtagtgcacggtgaaaccatagtcctttacggctgtgtagccccaacctcacctcctaattctgcccggaaccgttgcggcgccattttcccccttttctatcaccggcaagcgaaaatcctccgcgccccgtggccagctacttccaggtctgctcctgctcgttttaatcgtgtttcagcacctatatacactcgtgatactcatcggctctgcccttcttgcttgtccacgctcaatcacccagaacacatgaacttgtgttcgatattccccgccaccgtggtcagactaagccagagccataaccactcaattcaatctcattctagggttgtattatgtccgtaatacttgcccagtcattaaattgggcagccatcaccaatcttggccggtccgagcagcaggatcatcgacggtgagcgcgccgtggatttggacctattcggagaagaaatagaactagaggggcatttttgtatgatatcagtgactctagaaatagtcccgggaacgctttccaagttatttaaaatagcgagggccttttcacaaagttggcaccgcgggctcggacgcgcgcgagttctccccgtctacagg

SEQ ID NO: 18925 - DNA, 529 bp, Zea Mays
ttgactaccttgactaagttcgttcttttataccctacgtatttgactatctccaccaaattctttcttgaaaattgcgttaatctatcgtgttgctgaacttgattggatctgaagagaatcacattgatgagttatttttgtaagactagcttctccctgcaaatgaatagcacaaattaacattgttgcttatagatttgtgcgatttagtttttagtatatggtaagtggcataactttgttactttgttagacaactagcaactggtagcttgtgtgtggagtactggaatggacttcactagtctctgaatatgtctcttacatttcatattcttttagtggtagaagtgattatggaggaagctagctttagggtgctgtaatgtgtgagatctgccgtacataattcatatgtcaatatgagcatcagttttcatcactgtttgacctgaaatttgagataccatcatcttttttatagttgtaactccatgatttcacctgtgagacagatcctttttca

SEQ ID NO: 18926 - DNA, 472 bp, Zea Mays
caacgatggagagccacacaaagaagcccatcaacgatgttttcctcaaggttcgctcgctcattccttccttccttgtgctattggcatgtgatcctagctagcgctctcttgatttcatccttatccacgtgaatcctggatcacactgcatgcagatcggattactggaaggccaaaccagctgctcgcattcactggtgcacggtgtgggagctgagagctccgttcctatggccgggccccacctctcttggtcccttgtgcagatacgcagaggtagtgtcccctaatttgtttgtcatgtcccctaatttgtttgtcagagctacttgaggatgtcaatgaggtatggctccgctggttcatcagtattcaataattacaaggcattatgagttagcatgctccctcctgctaagctagataaatgtggttatcaggtctcaataagtatccatttttaaaagta

SEQ ID NO: 18927 - DNA, 642 bp, Zea Mays
ttgtgatgccttatggtctgaaaaacgccctgctaacatttgttcgggcgatgagtaagaccttcggggatctgatccgggacaaggtggaggtttacgtcgatgacatcgtggtcaagactagaagggggtcgaccgtagtggaggatctaaccctggttttcgacaagctgcgggcaacccgcaccaaactgaacccggagaaatgcatcttcggcgtctccgcaggaaagctgctgtgtttcctggtttcataccggggcattgaagctaacccagaaaagatcaaggctatcgagataatgaggcttcccgcccgtgtcaaggacatccagaagcttgcgggatctctggctgcccttagccgcttcatttcaaggttggctgagagggcgctgcctttcttcacgcttctacggaaatctggcccttttgcctggaccaaagaggcagagcaagccttccaagaattaaagcaacacctaacttccctgctgatcttggtagctccagagccaggggaaccgctatacctgtacattgcggcggctgcggaagcagtgagcatggtgttagtcgccgaaagggcgacaccagaagggcagggatctgagaacttggaaccagcgtcgggcgcccgga

SEQ ID NO: 18928 - DNA, 382 bp, Zea Mays
tgctgctcccctcagctgtcggggaccatacaacaccttctcacgatcgttgcactgagcagtgtgcaactcacgctccatggtacgcaaccaatcttccgcgtgcatgggatcagtagagtgggcaaagacagggggatggctcctcatgaactctgcccgcttgtctctgggcactggtggcatctggacttgcactagaggctgaggtggggtggttgctgctgcacctgctgcatcgttgctaaggtctgaccaattgcatgaactgcctgagtttgcatcatgaacatttgctcaactatcatcgggggtggcggtggcaactgctgttgttgggctgcatcctcctggggtgcctgctgttccggctgagcacgcc

SEQ ID NO: 18929 - DNA, 888 bp, Zea Mays
cttacgcaaagcgcccaggccgaaggggtaaggaacgagatcggccgtcggatctataatgcgcggtccagattatatcagccgacgaccaacacccttataaaccccgagccgtccgatcgagatcgatcaaccgcgatttaatttctgctcgatcctattccaaccgctggattcacgattgacgccacacagcattcgactaaatagtaactaatcatgtgcgtccaatgatggatcaacggctaggatcgcgtctccttggccccgccaccggccgacggcggcgcacagaaatatgacggcggcggccattgccgcacccagccgactaggaatctggcgccccaacaccctagaaaaacctagctacacgacgactacacaatactgatgactttggggaggtacttacgatagctcgcgcaggaacttgccccaccgacggcacacggcggacacgcagcgacgacgaatcggcggcgtccagatcgtcctcccaccgattcgacggcaagttagagtcccaccgcgacacgcccgtgcgatcagtgtagacgccgagacaccgcgatacgcagctaaaaccggagcccgcggccctatctcactcgcctcatgaagtgagctcccagcaatggcagcccctggtgtcctgttttctaggtgcgatggatcagtcgggaagggaacgagaggagcacagggagaagcaggtgcttaaataccccagcgagcaggggagaagagatcggatcataccggccacccgcaaaacctgacgatttgttacaagggaggagacgaaactggcaagtggggtccacgtggcagggagtatgcacaggtgaagctcagatggaaaggctggccacttgggcccacaaa

SEQ ID NO: 18930 - DNA, 1147 bp, Zea Mays
tcatagttgagccaatagtaagctcgaagcacctatccaatgtgctaatggatggggagtagcctcaacatcatgtaggttgatattctcgatggcttagggattgcacgctctgcgctatgtcccatctcagtgccattccacgacatcctactaggccaccaggcctacccacttaggtggatcactttgcccgtcacacttggtgaccccttcatcttctgcaccgagtgacttcaattcgaggtggtggacttcctggggtcctacaatgccattcttgggattccatgttacgccaagctcatggccatccccaactacatgtacctgaagctaaagatgcctggtcctcgtgggatcatcatgatgtcctcttctttcaaggctgcctatacttgcaagcaagccaacaatgatatcgcctcaacgctggccgcgacaagagaaccgacagagctttagaaggttatcccctagggtgccatggacactcccctcaggcgatcaactgaaggttggtcaaaaagtgacaagcaaaagaaagcgacccaaaagccatactcacctggtcgtaggggattaagtcccacgtcatcgatgcacgggcaatcgaaactgcctcgtcaaagctaccgagcatgcgcacgatggtctccaggctcccgtcgacctaggatgaagccgcctcgataagtcaccactccttcggctccatctcctgtccttcctagcctttgaggttgaagggggaaggtcctcacggcattctctaggagtaggtagtgcagacagcatagaccctagggaggaggaagggacatcgaccagtgatggctggacctagaactttgtggcctccataagcaacgacaccgcccagatggatcacccgccattgcaacgcccaaacatgaaggggccagcgtggcagcaacagatcaatgaccaccacattcgctaacggagccccgcctaagaaaactgccacgatcgccgctcttggcatctcctggatgactgatgaggtcgtcacatccaccataggaggacagttgtcgtgccagcaagcgcagcagttggaatgaccaaaggagctgccctaactagcgttggtagtatgagggctagagaggttggctccccc

SEQ ID NO: 18931 - DNA, 492 bp, Zea Mays
agaagagcaggggctcagcttcggatggagggtggcgtagctccggcgagttccatgggctccagcgacggcgaactccggcgacggcggcggtggctctaacggcgaggtgattgagagagagtagggggcgagctcgggtagggaggagggagagagaggagctcggtgtgggttttatagaggagagggagggaagaggaagagacggccggggaagtcaatgggcgtcgatgggttcttcatagccatcaatggagggaggtttcatggaggagagtaatgggggagggagaaacggaagcagttgaatctccattaacgaagagagaaaaacggatgcgggcaggtggctcggtcgcggcgtcctgggcttgctcgggcgcggtcggtctagctctggcgcgggcggggcttggctggcgacagggtcgggctcctgcagggcgtgatcgcctgggcgctgcgtcgggcgcggtcgttgctagggcg

SEQ ID NO: 18932 - DNA, 1032 bp, Zea Mays
tgggggcgaggcgggctagctgcgtgggccacgacaggccgcaccgatgaggggctaggccagctgcgtcgctaggtgagtagggagattggtgcgagctccttggccgccatgatgtttgcgtagtgacgaggaagaaggaggcgaagaagagggagaaggagaggatttgtcacctacacatgaagaacagtcgagcaggcacgcaatgaagaggaagacgacgcgaggaagacgatggggctgctcttccgacgacgcgaggaagacgacgaggcggccccttagaccatgaaggcacaatgcatagagaggaaaacgcgtgggctgctcatgtgtgagaaggaagagggaaggggttcatggcaggggtgtacgattgtatagaaaggagagggtatgtatagaaaggagagggcgcgagaggtggttgtcaatttcacgatggctcttgtcctggccgagcgagagagacagctgcgcggcgagttgcacgagatagggttagacagagttagatgggtggtagacagggttagataaaattagacgaagacggtcagagtcggcccgtgggcccaagatgatgaggtggtcgccgaagggaaagacgaggatagaggaggatcgccgaagcgagcagcatgccgttcgcgagaagacgcggttcagtaatctcgcgaaaaggggcacgagatctggaataggttcgacgagaggaagaaatatatatatatatatatattatcgagttccaaaaattttatagttttcacaactaccacattttaggtatttaattaatattagaaaaactgaaattcatatttcatacccgaagaaaccttccgaagattccaaaaactcttgggaacatcctcgatatattttaatctgtaatgataacattttgcactcataaacactatgtatcggcatgaatgcaacaatcaaagttcctctaaggttttattttactaggattttgcatagatataaaacaaaataactcttcactatttagaaaaagaa

SEQ ID NO: 18933 - DNA, 411 bp, Zea Mays
cttgggaaggcgatccaggttgcggtaaccctcggagcggcggccgccgctgctgtccgacgacgaaactgacttctccttcaacgcagcgaggtcagcctgcaaggtggacatctccgtcttgaaggacttcaacatctcgaccatgttggctatggtcggttcagacatggtgggaaggtgagggcggatgctgtggagaaagaaggcgatgttggtgggctaaacgacgtggcggtggctgcttgggggcagctgctatggtggactgggaggaagtggtgggagaggatcgacgtgacctagataccaggttgtcaagggcgttcgttcccaaggatgtcggtccccgactacggagttcgtagtcgcgatccgtggtagacggtagggttatacccccacgccgcc

SEQ ID NO: 18934 - DNA, 447 bp, Zea Mays
ataaatcttattttctctattttacttgttttaattaacacaccaataaaacagtgaacaccatatgtgttttatatttttcttagctagagtatgacaacatctaaccaacaaaacaagtttcatcatttttggatttttataattaaaactatggagagaagcaagttcatttgttttctaatcctattttcaaaaatgaatttctacagccaaaagtttctactaaaatatgccaacatatagatccactgcatagacaatttcccaaggattccaaaaagctctcatttactattttacgatttttctgtgatttactacgattttctaaagttcggcaccaaatctgtgaaatgaaattcgaaaaagaaaaacttcagcacataagtccttcgctgcactattcacctgagtcatgccctttgcacgtaaccccctgctttt

SEQ ID NO: 18935 - DNA, 302 bp, Zea Mays
gaaattcttaaaccctgttagaaaaagaaaaggaaaagcaatgaacattgttggactggaactgggcaggagccgatgagtatcacgagtgtatataggtgctgaaacacgattaaaacgagcaagagcaaacctgagacgagctgaccacggggcgcgggggaaaacggcgtcgcgacggttccaggtggaattgggaggtgagattagggctacacgaccgtaaaggactatggtttcaccgtgcactaccaattttgggagaggtggagaggattccacgaatttgggcttcaactgag

SEQ ID NO: 18936 - DNA, 1133 bp, Zea Mays
gtactacaaagcaatcagatggcaaaatcaatctgaaacataatctataagaaactcgtcgtcagagtcatccgtcacacaaatcttcaacgacgatgtcgttccacttgcttgattgttttgcatttccttcttcctttctcttgtagtaagctgcttctgccatatctgcaacctgggaaaatagcttactctcaccctccacttcatcagccttttgcttgtaataagcggcctttgcttcattgacggctgagacataaactcgtcctcctcctcttgcacgtgtaatcctgtctcagctagcgcgatgagcacacacaaccttgatgtgttgtcctcctcccccatcagctccaccctcaccattttttccacaacgtatcttgcacgagcctcgtctgcgatatagttcacggtgtatccaatctttgcaaataaattaagacaagtaagttagcaacgacaacacaaatacaatgtgcgagcgaaagcaacacatgtttttctcactcacttgcaatcagacaaccaacaagattccccaacatctatttttcggctctagcggcctccatttcccttgcttcctgtgctctcttctcattatccgccttcattctccttcgctctacacgcatcgggctatcacaatcctgtgattcggtatacctacacatttcctgtctgcgatatttgatgtaggaatcgaccagctgagatccacatcacatcttctctcccacgagtctcttcgacctaatcgtatgcatcaccttgtctttaccaaagaatgtctcccaattgcattttctggtctcctacacaaaacaaacaataagtacggatgcaacaatacatctcatgccatcaagaacaaatgtcaaccccttcgtaatctaccatatggccacaaaaataccctacatcaagctccgaaggaactagtccatacttagtttcaacacaacatttgcagagtacaggattggacttgcactcttccgcccgctcattctttttcttctcctttgcctctggctcaggccaatgggacctaggcccatacaaccactctctaaaatacacctacgtccatcgtatggttgcaggaggatacattagtaaatttg

SEQ ID NO: 18937 - DNA, 471 bp, Zea Mays
agtgcctaaatttggtgaagggacctcttctgctgccgaagtagagcaagctgctcccgccattcgaagcgctaaaggatcgactgcagtgccaaaggtgcctatagtcgggtcagccgaagccaaagatggtgtggccaaagagccatagttggaaaaaacagtgatgctgccaaaaaatctgagtccaccggcagaggcagaactgccgaaggtgacaaaggctcccgccacgactcccaagaggacgagaatggccagcgtgctagacgctgtcatggaaaccacaaaggcattaactcctgcccccgcgaagaaagtcgccgaagctactacgacccaggctgaagccgaagctaggccttcagtgtctgctgagacgaagcccactgtaactgaggaaggggctgaacaagaatctctaggtattggcatagctacggagaaagaaatagccgaagaagctaaatc

SEQ ID NO: 18938 - DNA, 627 bp, Zea Mays
gtaatggcagacgaagaatgccaccttcgcaggccttgttgacaatagactgtaaaaggtcagcagcaagaacaaaaataagcggggacagggggtcgccttgcctgacgccgcgtcgacagtgaaattttttcccagggactccattcaaaagaacctcaaaagatccggagccaagaatcatagagatccagtggatccatttattaccgaaccccttgtgtctcaagatctctaagatagcagcatgctccagtttatcaaatgtcttctcaaagtcaagctttagaatgaccatttcttttctggatttgtgacacagtgaaatatattcaaaagcccaagctaagcaatcctggatcgatctatccttgataaaaccatattgattccgatgaacgagctttgtgatcactagctgcaggcgattggctaagatttttgttaaaactttgatactcgtgttaaggagggagatgggtctgtagtcaccaacagaatcaggagagccatttttgggaatgagtgtcacatatgatccgttgatgctatgcatgcagagagatccttcaaaaaatttgttgaataggtcatagaaatcaggggcaattaccggccagcattttt

SEQ ID NO: 18939 - DNA, 512 bp, Zea Mays
aaagccactaatcgctcgcaccagtgcaactctccttcttcggccgccaccgcgccattccaaattcatgcgccaccgcccccggagtctataaattgagcgtgccttcgggtccgtaaggtagtaaagcacccaagccaccaagtcgtgcctccaattgctcaccagagctcgccaatttcagatttcccccaaatcagccaaaataccgccgcgtgaacacctcgccgtggacacccttctgcaggtcagttcaagctttcttaattggtgttctagctttccccatgtcccctgaagctcaccgacccattgggttgaactagaccgccataaattgcctagaacaccttggattatcctcggtttctgctgtcgtcgtgagaagacgtgctccggtccgaatcagtgaaattagctgggggattagtgttgggaagggttgaattaagtgacaaacaaaggagaagtctagccgttgcattttccggccggtatagtctcgctggagt

SEQ ID NO: 18940 - DNA, 291 bp, Zea Mays
gtcctgtcggtgactccaggggtcccgaaggctgccccacatcaacgatggaggagcaccaccatctccttcggggcatccgactgcccccgacaacatggcaggggccggtgtgctaccactcaccaccgcccctgtcatcgccaatatgcggctgcaccatgtgttgattgatggcggggcaggcctcaacgtcatcagccatgctgcgttcaaacagttgcagatcccggggtcccgtttgggaccctctccccattctctagagtgggcccacagccggtgtatccc

SEQ ID NO: 18941 - DNA, 730 bp, Zea Mays
catggttacctttttctaattcagccaattgctccatgttctcctggatattaattggagtggtccttcgcagccaatcctgagtgcaaacaagtgcttccaccatgaatggagtaagagatgtcctgaagtcatcaaggattcttccagacgtgctaaaaactgattctgaagcaacagttgacaccggaattggtagcacatcacgagccaagtgtgctaataccgggaatcttgaggaattcaccttccaccatcctaaaatatcaaacttattatcttctggttcagtatcttcatcaaggtatttttcaagttcagatttgttgttgccaccgccatagttgtgttgttttagtttttgtgcaattaaggacttcatccttccgcctttggactgtcttgcttcttgagaatcattggctggtgttgttgcatcaggtggagcataaagtctcctatattcttcaaacaattgtcgaacacatagtttaacagcagcccaaaccttatgtccattttcctcactaaacatctcttcaatcgctagctttgtgtattctgatagtttgtatcttggatccaaagctgcagcaacaaaaatcagcatgttcatattctctttttctttctccttccccttccctctctcattcacatttctaccagtttcgccaagaggttcatgccagtttccccaatacttatcatacttgtctttcattttctg

SEQ ID NO: 18942 - DNA, 372 bp, Zea Mays
cgaggacaaccgagccaagtggtcgcacccttcgtgatccaatgactcaaatctgctcttgtaggtcacgagggcagaaaaagtcattagtccttgaatcacctcggatagccccgcagtctccatccacagccatgtcgtccagcgttggaagagaccttcgccatctaggtccaacggatggacgacatcccccaactcctgatacacacgattgaagtaattaaatacatatcaagcatgtgtttgcacgctctgggccaagcccaccgaacaaaggcgatcagtagacagttcgctatccgcggtcgctagctctttctgtaagaaggcgacctctgattcggcagacttcgtccgctgcttgaaccg

SEQ ID NO: 18943 - DNA, 349 bp, Zea Mays
gtatgattggtgtggattctgcaatggagttacggaactgaaagaaagcgtggttcgtctccgcgccaaaagcaggcgttacccgatgcgcgtgtgccacggagtaggtacatgtgtccgttgtaactgattcctggacttgaatggagttcatcgggattgttacctagctcgctcgtcttttctccgcccgaatatggactatggtgccaagggttgcactcgattcgaatcgaaaaaaagatagtacaagacagccattatattcaggctagcttcaactcaagaatcatggttgcattttggttccattccagttccaggtgttgaacgctcacgaagcccggcc

SEQ ID NO: 18944 - DNA, 688 bp, Zea Mays
atagaagctgccgaagaggagcttggcccaacaccctcgggggctaggtcacccttagcaccaccctcgatggttgggtcctccttagtggccacctccaaagctgaagctccctcaaccgtgcccagaggagccgggtgactctgatcagtggcgttgagggccagcatgtcctcacgagctagaccgccctccaaggtcaacgaagcacgagagactgtccgggttgcctcttgcccgacaggatcgcatggcaaaggaacatcgtctgggacctctgaacggatgatggaactgtcaacctaaggggactcccataaaaggttctcaaggatgatctcttctaacgcatggtcaaaatcagatgacaacccctggaggctgataagtcctgataaggcctgcatcgggatgtcactgctcctgctgcgacggttgttcttgcgaatcaagggaatttcttctttttcctcctcctcatcctcatcaagcatacaaccaccaaccctagcatcgtcacaacctctaacatcgtccttgagggtggtgctcaccgggccatcaccgaggagtgatgttgaagggccagcatcttgttctaagcatgataaccgccggagccgtttctttctctttttctcctcatcaggcatagttggatggttcgtccggtgtgatcgcttgcgac

SEQ ID NO: 18945 - DNA, 565 bp, Zea Mays
tgcacgatgaccgagagaagattcctacccaccacgcaccacgggtgaagaccttggtccactagctccattcgatgctctgcacttcatattttagtattcctgggcctacctgtcggggcccaactctcttgtatgtgatcctcttagtctataaaagagtgggcacttgcgtagcagggggaggacacacaggaccgaactcaagcccatcttgggactcaagaacggggcattcacacttgaatccctacggaggcaactccaaccaattctagactttcttaactctcaacaatactactcacaaagtaggggcggacccacaagggttctaggtgggtcatggcacaacataaggcaaccagacatcccactaccccccatttcagccccacaatcgactagagcctgagtcgtcgctgtcatcctagcgttcatcacaaccagccagtcgcccccatcaggccatgctgtggctgccaccatgtgttaggagccatgctgatgtcactcactgcacactcccaattctcagcttcccacgcttgtggtctcgcctggc

SEQ ID NO: 18946 - DNA, 403 bp, Zea Mays
ggggccggcgcttaggcgaagattggcgtgcagggcctacaagaagacaagcagtggaagttttggagatccgaaaggaggagcaggagcgttgtggcacaacttgagcaggacgacatggaaaacatcatgcgagcacccttgagcagctgcaggtggtttgcaacagcgccgatgcgctctttgacatagaagggcccgacatagcgagggccgggcttgatgttgggacgggccacaagggaggcggcttggcaatggaggaagcgcagccacacctaattgtcaacgaagaacttgaggtcgcgatgatagccgtcgtagtagcgcttggcgtaggcctgctcttgaaaattccagtcacgcaccactgtcaagaagaggtcctgctcccgcagcatgt

SEQ ID NO: 18947 - DNA, 625 bp, Zea Mays
gaaaagaaactcaaacacggacagactagtatcgaataaacaacatcacactttgaaggagacaacactatatgaacgcacctgcgaaaatcttcaagttcatcacaatgccgcaacacatatcgatgagcctgaataagaagctacttatcaaggttgatggcagtactctttccaataggttcaccagcagcatcaaacaaatacatgtttgctatttcatcagatggtccaggatttctagatggccttgtaaaacgtgtagttccttctataaatctggaacaaaaggtcaagcactcctccatgcaatatccttcagctattgatccttctggttgagctttattcttcacaagtgccttcagcttaacaaaatatctaaatgcaataattgacacatgtaagttaaacctgaattattgattatcattgtgcaaattaaagttgactacatacctctccatggggtacatccaccggtactgaaccggaccgcctagtttaacttcttctaccaaatgcaccatcaaatgcacacttacaataaagaatgatggcaggaaaattctctccatatcacaaagtgtcatcacaatactgtcttgaagctgctccagctcag

SEQ ID NO: 18948 - DNA, 410 bp, Zea Mays
gcgatgtgccgcctcagcatttaatgtgtcctgtccactccgctggcaggcggcgtcgaggccatcctgcaggcggcgtgcctgtccagtccattgtcaaacagtacgcccgtgctgtgaggtgcactgtgaccatcatcacttgtacgtcgccagggaggcttcccctgcacgccaaagctacacagatcacgggtatcagggcgcaagaagattgctccagcaacgggtatcagttgctccaagtattacctccgttatgtccatgggcccgcatgtcggggctcagcacccttgtacgtgcccccttcagctataaaagtggaggcacacaccgttacagaaaaaagccaacttacacacaactcaacttaagtcagctcaatacatcacacaatggagtagggtat

SEQ ID NO: 18949 - DNA, 602 bp, Zea Mays
taccgcctcagggattggagcaggtttcccccgaagagttgaaggggaagtcgttagagaagagagtgaaacccacctccctgcacctccacccctacccttagacctagcccaagttctagccaatcagacccgactcatcgaggtcctcgctcgaaatctggaaaatcaacggccaaatggtggaagaccgcaagacagaatgggggactttctgagactcaaacctcccacgttcgccggatcaagcaaccccctcgatgcagatgattggatgcgcacgatcaaaaggaagctagaagccattggttgcccagaaaatcagcgtgttcaactggctgcccaccaactctctgggatggccttagcctggtgggacaccttcaacgtcaccatcagagatgctacctgggcggaatttgaagcagctttccgggagcaccatgtgccccaaggattggtacagcttaaggaggacgagttccgagaattgactcaagacggaagatctgtcagcgaatatgtgcacaagttcacggagttagcccgctacgcgccagatgatgtcaatactgagagcaagaagatggcccgtttcctta

SEQ ID NO: 18950 - DNA, 486 bp, Zea Mays
tctgcgagtatatcttgattacactttccttgtctaacaagggttggcatcaacaatggttttatttatggggcgcgggtcatgagaccttacctaggccacaacttcctggctttgatttgggccttcccttcgaggctcccatcagttcgtgccgcgacatcacgcccgacgagaaggtctggatccacaatcttttggcagatgtgcttatccttcgagagaagggcatgtcgggtgccgatgttattttgtgccaatctccggtgcggcattgctcctcttaaggctggggctacgtccctgagtcggatggggcccgaccttttgccctaggtgttggcggtctcccgagtgacacagaagttgctcaatggctaggcatgcctttaaggttcgaaaggatgcgaacgggatgtcacggtcgtttgtgttcgagttcgtaagcatttgatcttgttttttattttctccctgtctttgatc

SEQ ID NO: 18951 - DNA, 409 bp, Zea Mays
cctgaagcgcgtgagctcctcgttgttttgcgcgttcgtccattctcgctggcgactgctctgtctctcttcctccttcccgttgagctatcgcacacagtcctcggtggccgcgtgttcgtcgtccccgacgagtctgctccgtgactgctctgtctctgtttgctccgagtctgctccgtgaccgctctgtctctcttcggcagtgggctcgaggattcgatggatagaggacacacaggaaatcggtaaatgtagcgggcgaaggacgagcgctatattttagcggagagggtagcagacgttgctggacggtttccggacgattggaagcgctatatttagcgtaccgaatcgtttacagtctcctgctggagacagcctaaggagtaccgagtgttcctttttt

SEQ ID NO: 18952 - DNA, 572 bp, Zea Mays
gcaggaaatcaaacatgggtccctgcggacgagcgcttcagcagtacccgtcgtcgacgagctaacctccaaagatctcatcgatggagaccgtgtctttgccctctaggcccttaacaaataccaagcccaaacgaaggcctggcgcgaccacgcagtcgtcccaagagaattcaacgaaggggacctcgtacttgtccgcacaacctagacagagtcacggggtaagttggagccaaagtgggaaggaccatttatcgtcaagacgaagtcgtctcccagcgcgtacagactaacaacacaatctggcgaagacctagaacattcctggaatattgacaatctccgtaaattttttgtttaaatcctcagggctaacacgcacttgtaattcaccaaacagtcttattccggcccgcactcttttcctcccggggggtgaggtttttaatgaggcggagccatgtaatatacacacgaaaatcccccgcaaaaaattaaagcaatgtcgaaaaagaccgcatcgacggtcttcggcattcgaccacatcgaagtcaccgcgaggggcagc

SEQ ID NO: 18953 - DNA, 603 bp, Zea Mays
ctagaacaacacttgagaggcgcggaactttaccagagtggtctggccatggtggggtgggtttcacggcggcggaaaacgatttggggagaactccaaatttgtggctctcactgaatggttgaggctgattcgaggtagctggttagcttactaccctacggagtcggcggcgtccgcaatttataggcgcatcgagggtcggtggcgaattcggccgaggggtgttagcggccggtgagctcggtgcgggggaaaaagtagctctcactgtggcagtgattccggtgatcgccggacatgcaactaacgagtcaccacgaaggtgtctcgtgctaagacacgtggtgcgcgacgacggtggcttatcggcgacgaggccatctactcgacgatgagctggggtgaagtgcggcggtcttagccgtagctcaatcctgcctcggatttttacccggtcaagtttatctgttgtacccgatgcacgaatcgcagcacgagatcgaccaccggcggcgactcaccggcaacgagcgagccagctggcggtctgatccccaatggtttactgtaccatggcacatctgcttcagtcgcctgaac

SEQ ID NO: 18954 - DNA, 826 bp, Zea Mays
ttcatatacaacctttgcaatcgaggaataactgggaaatatcttaggattttccgcggggcacgcttgttggttgcctcctcctgatgcctagaaaccatcggttgccatctagactcaccacatgttcgacatgtatccatggctgcatattctttccgaaacaacaaacaatcattgacacatgtgtgtatcttttggtagtcaaggcctagatcatgaataaccttttgtactttatccaatgtgtccggaacacagtggccttctgggagaacaagctggaacaactgaagtacggccgctaatgcacttttactaagaccaaacatgcatttaatctgaaagagccttactataaaagataccttagtgacctccttgcaacctagatacaattccttcttcgcctctattaataaattaaagaacgcctttgcttttgcatttggctcttcattaatatttcctatgatgtcttcatgtatagcacccctgattagcgttgaaactagttcggtcacagaaccactgtcacctgtttcatcatcattgacaactcctgtagcattaccctcatctgaatcatttgcttggtttccttcttcgatgaagctctcatcaaaccctctaataaccaagtgactctgaacctgagattgtgttctgtaggacatgcatcgacatcttgaacatggacatggtgcagtttcccctctagcagtgccaccaaatgtagtttgtatgaactttctaaaaaaattttgccactcatttgtcatgaagtgcatgcgcatccaactcctattattctgagacatggctt

SEQ ID NO: 18955 - DNA, 917 bp, Zea Mays
cttttctttacacgccgagatcctcgacggtgaaccacacagggagccaagctccgacgagctagactgaccggagggagcaaagactggtgcttccgagtggcagacaccgaatcggaccccgcccgcgcatttcccccaacataatttcaccaaaggctacttggtttgctctggccgcagtgaccgtggaccatgcggacagatgcacgcgttcccggcgattggtgacggtctagttcaatcgggtgggtcgacgagcatcacgagttcatgagagtactcaaacgagagagcatagaggatcagctgacctgtatcgcgctggccacggcgaggtcgttttcacggtggcggaaacccggtttggggaaaattcgaaattggagctccctagtgaacgattgagggtgattcttggtggctgggtacttgactaccctacggagctcacggtggtatcaatttatactgatcgatcgcgagcacagcgaattcgagcggcggattgtgatcgatatgaactgggtgagtcactggtggccgcgcaacgcagcttttaccgtggcggcacctccggcggtcatcggacatgcgtagcatgattagccgcgatgtggtaaagcgtttggacacacggcggacgacagtgatggctcaacggcggtgagaatctatccgagtgatcgatgagcaaggggggggggtacggcggctagccggaatagtttactagccgggcttatccatggcggcgtgactccgagcgtcatttgatcaacccgagcacgaatcgagacggcgacggcatgaatcgcagcggagatcgtcggaggcgagctaagctggtgaccttatctatttcagaccactgtaccatggcgaagcccattcagtgcacctgacagtcaaagttt

SEQ ID NO: 18956 - DNA, 506 bp, Zea Mays
cagctcagattccgatttcttccccatgggggagtcacctgctgatcacggggtcctctcctgtcccatccttgactccgctgcttcggatccatcatccggagacccttagctcccaacctcggccactcttcaagcacggatgggggtctgaatggtaaacgatgccagccacctccgtaaagagaaacgtaatcagtgggtaggagccacatccgagagacgaatgcggcgaggtgtgggagggtacgtgaacccactaggtcattcggacagctagaatccacgaccgtcggatgcaaattcggatgtgaacgaccccacgtgtcacccaacggagccttctcaaactgggccgtaaccctgttcccagctgggctgaaatccccaccactggaaaacgtctgcgcgatttcaacacccggcatccatcccgtccaaatttttccttgcaaatcatggaaagagcctgtacgatcatcagcttcaaactcccaatgctccag

SEQ ID NO: 18957 - DNA, 617 bp, Zea Mays
gtcagtttgcaaggccttctacatcatgggaagtccgttcagttacgcagtttggaagttggacatgaccttcgtctgcaggggatcctagatatgtttaaggatctttttcaagagccacagggcctgccaccctcccgtccgtgtgatcatcgcatttgtttgaaagaagggtcagatccagtggttgtccgaccctgtcggtacccacaccgccagaaggatgaaattgagcgtcaatgtactgagatgctggcccaaggtattattcggcctagtcgttctccattctcttcaccagtgctcttagtgcgcaaggcagatgggtcttggcatttttgtgtggattatcgtgagttgaatgccacgactattaaggataaatttccaatcccagtagtagaagaattgctggatgaactgcatggggctcaattcttcaccaaattggatttgcgatcagggtaccaccaggttcggatgcaccaagcagatgtggaaaagacggcttttcgcactcaccatggccattttgaattcctggtcatggcttttggactgtgtaatgctccttcgaccttccaggccttgatgaatgaagtgctctctcagttcct

SEQ ID NO: 18958 - DNA, 624 bp, Zea Mays
agcaacactaattatgtgttgcaagtatcatctgtatatttatttgatttttggccatgcttgtggtatgttgcaatatcatccttatattataaagtaccagttggtcatctattttacatgaaagtcccccacggtcctttgaaataaactcgtacgtcgtccctctagatccagccctcaatccacggtcatctgttgtcccttcctcgagctaaacgaccacccttcctgcgctctaaaccctaggtccagtcgcaacaggtggatcttggcctctcacgctgccatggcctggcagcacccacagccgtagtccctctgcgcgtgcgtccccgatgccaccctcgcttccatccccaccttccactatccccttagtaccatcgacctctccctcttccgtgggttctgcctccactgcgccggctgtgtatagagccgccccacctgccccatgccgcgtcgtcaccgcgttgggagggggcatccgtcacctctaatccaaataaggtaacacccttgcgccttctcatacagaaacaatagtgcattgtctcgatcaatctcatttagctgtttcttgcctagatgttgtgtttgtatcgatgtcttcgtattttc

SEQ ID NO: 18959 - DNA, 722 bp, Zea Mays
gtccggggtctgattcaaaacaatccctaagagtcaggcttccctcgggtggacggcggatttattttataacaacagagggtcttatgtgcaaaatgtggccagcgaagggggtatcggccgcctctagccgttggatgagatctggacagcatagattaactcgttcttcatctgaatcggtacgcggctcacagcggttggattagggatcaacggtggagcaccccaaagcgacagcgccatccatccctcaatcgacgtccaggattcattccacaaaatgtgatgtggttcgtttaatcccgatttccattcctagatcccaactggcctccgtctgcccaaacctggtggcgcagcaccgccgcagcgccattgccggcgctcccaactcctcacccccgcacgccattcaccaaacgattaagcgctactctacgcggggaaaaccatgattcaacttagacggatactacacggagaatatgatctgagcgaggcagccacggtgacccgcagaagtgctcgaagaaagaactccaatgaggaattcgtcgtgctccgaccaccaattccgcccgtgaaggtctcgattacacacggcgcacccaggcgagctcctctagctaccccaccgtaagccgcaatgacgatgcatgggctgccccgatttttcccccacggtactcacggcggtcaattagggctccaactgcgct

SEQ ID NO: 18960 - DNA, 401 bp, Zea Mays
gggtggagaggagattaaagcagggttgtaccagcatctaggagaggaggcagggtgattgagagaagagaaagcacatgagattgagaagagaagaaacaggggaggagaggaagccatgcccgtgcctgctttcgacacgccgccctgctgatttatggtgtcgcgccatgctgtgccgctagctattggtgtcgcatcgcgcctgtgctgaaatgtccttattaagtcagcttactttaaagaaactcttagcagattagacagcaagtagtgaatgtcaaaatagttcagtaattaaataaaaaatagctcagtaagcttcgacgcaatagctcaagaaactacatggcatgtctttggctcattgtgtaaacagtaaaaccaagcacacaataatc

SEQ ID NO: 18961 - DNA, 571 bp, Zea Mays
tggaggggtgtcagatcctgtgattgctcgatggagccaaagaaccaccacgacgccgccattcaccgtcactgggcctctgcgtcgtcttatgcgccggtaagaccagttctgttgtgttcgccattgcttccacttagaaatgatcacattggattgaggaatagcgcgccagggtgatgtatcacgtgcaccggcgatggcgccgtcgcatggtctgggcggcgccaccgtgtctcggccgtgggagagaagatggctttgtggccgtgcgatggtgaacgtgcggctttgatcagctcctgggcgtgtcaccttaggaatgattatgggccgttgatggtcaatcgagtggatagggttacattgcggttcacagggtaatgggaaccatcgatgtctgatcaaagggatgacattgcatgccagtgcgtgttctgttgtggggcgctgatctcagatccaacggcccatgtgccatactggttcggcgtggaggggttttaatcttgatcgtccgtacatgatcggatgaataggaactgctgatacccttttggctcgggaaatt

SEQ ID NO: 18962 - DNA, 506 bp, Zea Mays
gtttaggccaattagtttaataaatagtttcatgaaaattatcaccaagatcttggcgaacaggcttgcaccgagaatgaatgagatcgtttcaatttcacaaaatgccttcatccaaaagcgttcaatccatgataattttctttatgttcaaagagttatcaggaaactgcataagaacaaccaaccagctttattcatcaaacttgacatatccaaagcttttgactccctcaactgggcatatctcctagatgttttaggagctctgggatttagcctcaaatggaggaattggattgcatcaatactgggcacatcatcttctaagatcatgatcaatgggcagtcgacagagacagttcagcatttacgcggtgtccggcaaggagaccctctctcaccttttctcttcatcctagcaattgatccacttcaaaagatgattgagatggcatccgacaaaggcatcctaaaacgagtgctaccaaaaggagcaaagttac

SEQ ID NO: 18963 - DNA, 1339 bp, Zea Mays
tcttttggaaaagaacacggctgaaagggtatcggtggatctcggccgctagatctgatctgagcggtccagattagatagggtttttaagcgaaccggtacgcataatggaccgtcgatcccgagatctgcgtcacagatttaatgaagttttgatttcttctggatcgtccgatcaccaccccacggccctgatttatccaccgaggaggcatctctacttcttatcataaccaccagtcccgagatggacggtgcagaagccatcttcttcatttgttctaggacgcatcagtcgagcacagtggtgccctggggctttgtgtcacgcttctgcctgcgcaagataccagaagccatggggggtggtcgttcttaccttcgatggagacaggtcggctgacaacgaagcgtagctaggtgtggtgtaagccctcccccccacgctcttctccttcctacgtgattccaaacttttggagaaacaatggcggcggcggcaagttcctgtaccaacagcgcaagcacatctgggtcggccccgctagtggctggtttccccaggagcgtaccacagcacagcgcatgacgcagagggagcgcccgaggagggggaagtgccggtcgctcccagaaacatcgcaacacacagattcaatttctgacgaacacgtgtactccatgactcctgaacaacagccgaggacaactcgagcaaaaagggcagtggacaccgagtactgatgggaacgagggcatgctgtgcttgtttatatatccgagcgagaaaatccattaccgagaagctcgggcagaggacgaatcggccgatgcgacggagtgagtatcggtgggatttgttggcaatcagcgacaggcgctgatttggatttggaagaagacgaccctgacgcggcggcacaatcacatctctctgcttcatggtggtggcctcctccatcgcgctgctccatggcgagatgagcacaggcctgcctaacgacgagcgcgcgctaactctgtctcttttcttgccagcgattgattcccagttcttgcctatatagccatggctatggaccggataatgatggggttggtggcagatccgactcacgcggcgtggaaatcggatttagttaggattcctcttgaggtgcgctcgatggggaagaagatatatctgccgaggggggcctaccagtcagcaacagagggagagaaacacgggtgagcgcggcagtgtccgtgcgcgagtccggcatgcagccacccgtccggctgataaggtgggccccgcgttgtcagtgtgcgcgggagcgacttcatccagggccga

SEQ ID NO: 18964 - DNA, 524 bp, Zea Mays
gataaaccctataatctgttttttctcttttggacagcgacatacccggattcaaacagcgatatcttttaaaatataattccaaatcaagcgcataagtactcattagaaagataagacaaagccctacatgattatcatactggttatcactaattatccacgaaaaattcccagaaactgctaatactactgctgttcacccacctgaaaaatctgtttttttttggacagcaacatatccggatttaaacaatgatatctcctaaattataactctgaatcgagcgcataagtactcgttggaaaggtatgacaaagctctacatgattatcccactgattcccactaattaacccacgaaaattcccagaaatccctagaactactgatgtccacccactcataaaattcctggacagcacctctaccgattcgcaaagataaacgcataatccaattgattgcagcacaaaaacaacaaaagttaaacatgaattcaccttaggttcttcccttcctc

SEQ ID NO: 18965 - DNA, 935 bp, Zea Mays
ctctcatctagatcaaagggtattttgaagcgtgaatgagcagtgcgaccttttggtaacagcagcgaagccacaccagaggacgctacagcaagcactattttttgtcgggatctcaaatgcgtgagtatagcgttccacaagaaagttttacccgtcccaccatgtccacatacaaaaaataggcccggcgagcaggagagcgcagatttaatcaacatttcaaaaatgaattgttggtcagcatttagctgcgagacagcagcttcggcagcatggtcacacaacagtaatggttgaggccttagttcgtcgtctatcagtcggttgccaaacacttcatcaccacggaccgataatattggtaggtcataatcagctatgttggcaccactgttagcaaacgtatctgctagtttcctcgaaagcaacgtgaggagttgttcatgtgaagctgtgtagtgcgggttgccaagggcttctttaagtccacgatgtatgtcatcggtaaagtagatccaatatttgtcgaacagagcacgaacattgcaaacaggacaatgaacgacaatggtaacgaacagctgacgaagttgagacgccgaggcagagactacagcctcatcaaatagaagggtccactcgttgtcaccttcgagcaaaccacgagcttcgcacgcctctctaaacgtttcgtacacagtattttggaaggtccttatatcaacgaagctcgttgcgccggaaacaaacatcaagagcatgcgtagatagtaaagttccccagctgttgggtggacgtagtacatgcggccaatcttggcagacgacaacctccttctacgccagcacctaatagaaacgtcccacgaccactctcttgggaaatcacaataagtcaggagacgcgcatcactgtatttcaagtttgtttc

SEQ ID NO: 18966 - DNA, 747 bp, Zea Mays
ctatccgtgcaaaagtcgcctaagggtgcagccggactagcacaacaagtgcgaaaaatcgaagtcttcctcaaaaagactatccgtgcaaaagtcgcctaagggtgcagccggactagcacaacaagtgcgaaaaatcgaagtcttcctcaaaaagactatccgtgcaaaattcgcctaagggtgcagccggtctaagcacaacaagtgcggaaaatcgaagtcttcctcaagagactacccgtacagaaccccacaccaaactgtccgcgcaaagaccaactacaggcgcgccggattgacataataaacacactagaccaagtgcacaatgcctttatgagcatagccggatgcgcgaaggcgcacagcctcatcatacaagctatagttacatatgtacagcgaggacatcacaccttacatcggttcaaccttcggaatgattcccatctccctatagttaaacagcattatcctcagctcctcaccctcaaaaagacttcgcagctccccctcacctacactcgcaacggccggcaaggacaacaattcctgcttgccagccctgcccacacgaagccgaccgctgtccacctcactcaccctacgtttcgcaaccgcccttcgtcgcctacgcccagcactcggaccaggcacaacttcagcatctgcagcacgcggcgaagcctccgccgctgccacatccaaggccgcaaagtaatccaagtcctcattcgacgactc

SEQ ID NO: 18967 - DNA, 495 bp, Zea Mays
tcggccatcggacctgcgatcactgaccccaaggagacagccgggtcgtggctctggaaacatttcaagacgtactctattgccgactggcagagtctgctgccctcggcctccaggtgggcaccaagaatctgatccagacgtcgaaggcggtcagcagcggaatccagtaccgggagcacgtcggagatggacgccggccgcaccaacgctgggatgggactcacccccaacgacaccagtaccgtacttgcctcgccagcctaggaggcgatgcgctgggccccggcgcgttgcttagcccgaaggtcatcgagcgtcttcctcatcacctccaccgcctgggggcccagggctgtctgtgtcgcctgagcagcctacgccgcctggaaccggcgaacctgctcctccagtgcccgctctttcccctccaatcacttctctttctccttggccttgagctcaaactcgaccagcaacttgttccacctttcc

SEQ ID NO: 18968 - DNA, 944 bp, Zea Mays
cgagcttgtactggctagaatacttgatgactggcgttctactttggcagagaccgaattcaagccctaaccatcgtttccactcaactaatttcacgaacggcgatctaacctgctctgtccacggtgatagcgggcatcacggacattcaaacgtgttcccggcgatcctagggactttagctcaattggaggggtcgagaagcattaggagaacctagagatactaaaacgaacaaccagagagtatgaaccgacttggagcaagctagcctcggtgagggctctttcgcggtgatggaaacacagattgggggaaataagcgattcgcggtctatggtggacaattgaagacaagcgctggtgctatggatgggtgattaccctacggagctcatggcgtgctcaatttatagcaggcatgagcggtggccggggaattagacgaagacgcgcggcggtaggagaaataggaggtcactggcgcgcgcaattggtgtcaattaccgtggcaacctctccggcgatcactggatacgcttaacacgactaactgcaacgtggtaagatgctcgggaacatggcgcaaggccgcgaagagtctatctccagcgaacctatccgaggcggccacgacatgctcgggtacgacggccggagtaaaatagcggttggagttcatcccctggcgatatttcttacccccggcgctatccaattaatccgagcgcgaattaccgtggcgatagcacgaatccgcgcgtggctcgtcggcggcgagggcactgagctggcgatctgatcagtgcactgtaccatcgcgcaactcattcagtcagcctgatagaccattttgtagggcttgaatctcgatttttcatgtgatgaattgctaacccaccagtaacaaaattgttgcctgatgatccagctacaatcttac

SEQ ID NO: 18969 - DNA, 670 bp, Zea Mays
cagcattaggaggtcttaaggaggctagaacaaacgaccagagagcttgaactaacctggagcaagctggccacggcgaggatgctttcacgacggcagaaaccgaatcggggagaatgggaaattggagagttctaggggatgattcgaggcaagcgtgggtgctatggatgcgtaattatcctacggagctcgcagtgcactcaatttatagagcccgtgagcggtggccggtgaaatggatgaagacgcgcggcggccggagataacagggttactggcacaagcgcttagtggctttcaccgtggcggtccctccggcgatcaccggataagcctaacacgactaaccgcgacgtggtaaggcgcctgggcacgtggcaaacgatcggcaggctgccaacgccaggagcttatctgcgtaggccgcaagacaagggggtacggcggccagccactcgagttatccccaagcgaagatctttttacctaggagcattatccaatcaccggtgagcacgaatcgcaacggcggcgtgaatctaggcgcacggtcgtcagcggtcaggtgcactgcaccagcgatcatgttcagggcactgtaccattggagcccctattcagtcagcctgatagatcagctttgagtccaattttctcctaaatttac

SEQ ID NO: 18970 - DNA, 334 bp, Zea Mays
caggattagatcgacattaagtcgaacccgcacgtgatacagaccatcggatcgagatctgatggccccgaggcctccacgaccaaatactatctcgatcgcacatcatgcgatcgacgactcaggtgcaatcgacaaagggacattctatttctaatctgagccattcatcaccgatccgaaggacggagttcgtttctacgtgagttaatctcggcccttagctacgagatccacggtggagacgccttcttctacccctcgacctccagagcggcggtgcatcaaccaacagtggtgccccgccggagaatggcgatcacccgcattatcg

SEQ ID NO: 18971 - DNA, 362 bp, Zea Mays
cggcacggacgagaggatggatacgcaagcactagtgacggtgactacggtttgcatttcttggacctgatgcctagatccatgcctgtcctagatgacacggcggacaagggatttgccttcatgccggcgccggccaatctaggcagcgagctttgggtgcagagagcgttcagaaggctacatcggcagcgctgttctgaacgacatgctgcatgtcttggtgcggcgcagtgcaaacgacgacgacggcgacggcgacttgctcatagttgctatggacggggacgaaggaagcatacgcaggatcattccctggccactgggcgtctattccagagccgtcttcgattcttcgttgg

SEQ ID NO: 18972 - DNA, 380 bp, Zea Mays
gcaaaagaagggcggggcgatgttccttacccacgggcggtgctcagggaacctcggcacggcatagggaggctccggttggctggacgacgagggaacgtggcggcggcgaccttcggtctgcacagggaaggagttaggtgcgaacagggcagaggggccggggaaaggcgaaaccgaagcgtgttcccggtgcactctgctcaggcgaagcttactgtgggcgaggcgatggcaaaggcccggcgaggatggctgggtgaggacatggggcaaggagagggtgaatgaggggcaggggcatgctgtggggggtccaaggtcttcacctaggcgatcgggtgacgtgcgcggggcgagacgtgggggcatgggcgcgg

SEQ ID NO: 18973 - DNA, 521 bp, Zea Mays
gcgaacgaccattgctccaacactagtccctcgaggggccagtttaacttggtgagctggtcctaaagtctttttctgggagatgatcgaaacactgccctcgtcagcttgaagtggtcccgagggggggagtgaaatgtgatcgttgaaaggtgacattttactgtggaattgttggtttaccaaggcgccttttcgtgtctataaaaactgttcatggctgcaacggaaagacttttacacgctggcttacagaaatgttggcttctccgcctaagaaactgatgcacgctttctgtttttcttgccgccggtgagctggcccgtgtgaagtagaccgcctgcctccgcatacggtacgttatgttgtcttcttctttgccaccgtctgtcgcgactgcgttgtcgaatacaccgtcgtcggagaagacagttagtgatccagcgacgacagtggagttgttaccagggcacactgttgagtttggaatatcaaggatttactcgggccgcgtgcaaga

SEQ ID NO: 18974 - DNA, 307 bp, Zea Mays
cgcaagtgcgtggctcatctccaagaatctacgcatggcttaggagcacagcaaggccatagacatggtagatttttaccaccaccgagcacagcagataaggctgcctaggtagatgtcttctagttcacttgggaaattttagtgttggttaaagtcttgaacacccctgctattcacctcatctctatctccacctttacacaaaagtgaaacatcgcagggagaaaagatcttctgcagatatttcagattaccctgaacttcattacttgactgaaccttccttgttcaacccccttttctc

SEQ ID NO: 18975 - DNA, 610 bp, Zea Mays
attttgaaggagaaagctggcgaccggagggagagttgagtcacggagccgcgtaacgtggcgtttaccggggtagtgtctcagacgatgaacaagctacccaaggaggtctactacgacgtggtaaggctttgatacacgtagcctcgccggataatggtgaactccggtgatgccagcgcgattgaccgcggtgggacacgacggccggtccggccagcgactggattcaccccgcactggatattttcacctcgccccgacgttatctactcttcccgtggcacgaatctcccaggcgggcgagaattgtggcggtggatcaccggcgtcgagcgcacgacaccggagatctttatagtcactgtaccatggcgatcttcatcatatgttctgacagcgcgatttggagagcttcgttctccctttttcatgtaacaactcggtcacttgtctgcatcaatgttgtcgtctaaagaaccaactacaaatttgttataaagatcttactcagttactcactcaattcttcacaattcgatctccaagttcttccaagttcactggtggccataattcagtcttctgtctcgactgacatccaaacttt

SEQ ID NO: 18976 - DNA, 371 bp, Zea Mays
aagtcttggctagccagaattgtcttgagttccagcctgagtcccttcaggaaacggtccatctttttgctctcggtattgacatcatctggcgcatagcgggctagctcagtgaacttgtgcacatattcgctgacagatctgccgtcttgagtcaattctcggaactcgtcctccttaagatgtaccagtccttggggcacatggtgctcccggaaagctgcttcaaactccgccgaggtagcatctctgatggtgacgttgaaggtgtcccaccaggctaaggccatcccagagagttggtgggcagccagttgaacccgctgattttctgggcaaccaatggcttccagcttccttttgatcgtgcg

SEQ ID NO: 18977 - DNA, 1077 bp, Zea Mays
ttcgtggaactaggtgaagctcactatatagcccgcgggaggattcgacatctgctcatcgctcagtgcaaaccactcaggctgcaagctggaggagtgggggtggagcagactagcctcgaccaacgcctccaaatcctcgacggtaacagaggagatgggccatgggtcacaaggaggaagaatgttgatcttcttagccatcggaacggaggaagaaggcgaggggaagacgaaaggctctttttgcaagaggtgaaaacgacgtatggaagcgagaaggctaaagcggcataggtaacggtctgaagcctccgactcggtcgactttatataggaacgggtgaagccaccgtggagcgaatcgtaacggcttgacggtggtccttttgtatcccgctcgcacacgcgccgcaaatggtcggctgatcgataggatgtagcatcacattaaatggtcgtgcccctccgagaaaaacacgttgagtgtcattccacattcctcctcaaaaggtacgcccttcgccctctgcctctccgccctttatcctctcagtagttaaccggaagaaggcgtcttctgcctcgggcaactcacctcaaaaaggaagcagcaaactagaagaaagtcaacttctgcctcgggcatctcatcttgggaggaaaaaggctaggaagaatactgtttagaggttagaaggttcggccctcggcaaggtttgggaaaaccgccttaggacaccaagggctccaagcccaatactgatcaggggttcgaaggttggcccctcagaagggctccataaccgcctagagcacagagtcagagatgaatatgggtacgcccgtacatggccctagcttgggttgcgacccgaggtaccttaagacatatccgagacccccgggagtgatttgtggtggtatcccattgtaggaaggcatcgagccctcggaccccatcaaacgggttagggaccaggcgaatcacctgcaagtaacttttggggcgtgtctctggaccactagccgactctaatcaaaaggagctcggacccccgctcggattacccgata

SEQ ID NO: 18978 - DNA, 692 bp, Zea Mays
ccaccaggtttcccgctcttaagtcacacgccaaaaaatctgaccaaagtgtatggggggtcctctcccacccgcgacctgaggcttttgcctctcgcactctcggatcaagctaaggatgagcttgagaatctcatcaaccttcttcacactattaagctcttagacttgcctaacatcaggcggtgtgcctttgctaagctagacggctctctccactcagggctcctctatagagctctgaaaacccaggggagcctacctcccacctatccgctttcgtctagaaaaatagcgcccccaaagagtgtgtttttccttggctagcctcaaaagacaaactccaaacccgtgtgaatttgcacaagaggaggatcctagataatgatatctatgaagtctgttctatagctcctgaatgtacctcccatattctcttccaatgcggcggaaccttcggggcttctactatcatcgccatcccctatgatatgcactgctctcgtctccacgagctcgcctgtcccccaacactgcaaggttggggcttcaatggattaattttgctttgctaccgacatatgtggaaacgttggaactctaaattattcaaggacgaactcaactccctgcaccaggtaatatgcgcgtgcaagtcagactcccgtctgtgggcgcaatgcccccgcccg

SEQ ID NO: 18979 - DNA, 403 bp, Zea Mays
aattgccaagtacatatccgagtgcgacacctgccagagaatcaaggccagtcatttgaaggcagcgggccctttgcaaccccttcccataccatcttggaaatgggaggacgtttgcatggatttcatcgtgggattgcccaatacctcccggcaccatgattccatttgggtcattgtggacagattgaccaagtcagctcatttcttgccagtacacactacccacaagacggagaagtatgcggaaatctacattgaccagatagttcgtttgcatggaataccaaggactatagtatcggacagaggagcaccctttgtggcacgattttgggagcaattacaagaatcacttgggacccatgtaatacgaagctcagcataccatcctcaaatagat

SEQ ID NO: 18980 - DNA, 351 bp, Zea Mays
ctttcaactccaacttgtcttcctcggacagttcctaaccgcccaggtgtcgaagatcaaaatccctctcgtccaaaggagtattatcaatttcttttccttcatctggcactgtggccatgatttcttctgcagctacatttgtctctgcagtcacatctgcaaccatatctaacacaagtctatcaatatctgacattgtcgcttcggcttcactagcatctttggcttcggcagcatctttagcttcagcttcggcatccgcaggaatcgctgttttaaccgccgaagctgagggcggtgtttgttcaattgcttgcattacatttacaattcgtcgtttcttttgct

SEQ ID NO: 18981 - DNA, 833 bp, Zea Mays
agcggtagatatgttgaggagtgggtccgagttttctatgcttctgtatagatcgaccccgatcaccagtggatgaggttccgctttgagcgagaggatgttactattcatgccagccagattcgctagctgtttggatttaccgagtcatcgactcgccttcacagcttgtgctacggtacctctgatcctcctcgttgccctcacggtggagttgctccagctacagcccacatcgcagcctgttctgaccgcctttcacagatgggtcacgacgctcaccgacagatttcactccagcggccaagtacttatattagctcatgagacggacgcttctgccccgaatgggttatagagagactaccactcatatccagctctggctacttggtgccctgatctctcattcagattttgatgttgttgacttccttatatgtgagatcgagggcacagtattggatggtcttcgtgcccgacgagagctgtcgtatgctcattatctctgctacatcttcgcgtagctaatccagccaccacagttccaaggcacccttgaggcctcatgcctccactttggttcctaccatccagcccctaaggacccagtgccagtacctgatccagtgacagacattcaggcagaggatacagctttccatcagttcgagactcagggcacaacagttcctgatgatgatgatgaggatgatgatgattttgggattccgcctctgcctcctgtgcctccatgctcacatgatcatgaggtcgggagttcccgtgttgtccctgctactcctcctgttgttgaccctgctctggctgcg

SEQ ID NO: 18982 - DNA, 591 bp, Zea Mays
aactgggccaaccctaggggtggctatatagggtatatacatgggccacatgggcttagcctcatgggcctcatccacatattctaacaattgcgatccttgggccatatccttctagccccaacgattcaaattagggtttctgctcttctggtccatcaacaacgatgtggagcagcgacccggacgtggccactctttatccaccacaggtggacgcaaaggagatgagtaccagccaccccgaaagctggagcgggaggaggtcgagagggaccagagacgggagagaaatgcggcgaagtggggaaaagaatgggaaccaacacgatctgagggaaaccctaactctcctcaaagccgagcgacgaggaggctcccggcggacgggcctaggaagacgctggatcacagagtgaatccacgcctgggttccaacccatggcgagcgcgcgagagcaggatttcccttcactgtgtgtgatggaaaccgattacttgcgtggaccgcgtgtcgcacactaggacggggagagctcgacccatagagggagaagacgagatgacctatgaccgcttcttttttccccg

SEQ ID NO: 18983 - DNA, 413 bp, Zea Mays
gaaaaaattgttttgtttttggtagcttcaacaagtaatcctgctcatgttggatgaatttgcaagcacgccagagtagatctagatacataacacaagtactgagctagtggcctagatataagacaaaatacaccaatagcagcaacactaccattttttgcatcaacagaagaagctggaagaaacattctgttctagttaacatttggcaagaaaggcttagaggtgaaataattttaccaaggaatatgtggtgatggcaattatgagtaggccaacatacctaattttctgaatggagcaacaaatgcaggtagtaactgaattatatccatgcagttttgtgccacacacaatgctttagaaatctgaattgcagatacattatgaagtatatgttcaaagaatga

SEQ ID NO: 18984 - DNA, 389 bp, Zea Mays
cataaagtagcttaagaaccgctatatataatgtacagaacgctttaccgagcgttgctggagtactgtgtcaaccagtacagtataagcaaaccccttgccagggggcttaggtacgtgaccgagccctcggccctggcctcggctctcagcagaaatcaagcgagcacaagtcaacaacaagtacaagaccatactccaagtcataccatctacaggggctcggtgacaccccctcacattatgcagccaactccaggcagtcccccttgaggctataaatagggtagcctacgacttctggagggcgggcgaacactccacagtttctcctccaccacgatattggcacaacctcaatcaaccccagggacttgggctccttccct

SEQ ID NO: 18985 - DNA, 364 bp, Zea Mays
cgatggtaggcgacgacgaagaagcaaggatccctacagacttcgatgaatgtgttagccgccaagatcttgaggcaaacaacaagctcttgaaggagcaaatggaggagacggtccacaagtcagtgcatgatgctttcattgacatgaaccttagcaagacttatgagaggctggatcgacaattgtcccagatcatcgacagacttgctgtgttggagacgcaacaacaagcaccgccaccaccacctcctcgtcctcgtcttatcgatgatgcaatgtttgatgaagaaggtaattatgatgaagcggccaccagagatttgcgcctacgtcaccgtcttcatcaaaacatagaaggtat

SEQ ID NO: 18986 - DNA, 377 bp, Zea Mays
tataaagcatggcattgtgatccccctggcatcacgtcgtcgtgaccttagcatctagagagaagcaaagagagaacctcgaccgagataccgccgccgaggttgattcttgcgtacgacgttgttgggccttcgctgtgaggttaagaaggcatgcctgatcacgccgcatgcgatagtggcctcacggggcaagattgaagacggagcagagccaaattcctcgtcgaagttcgatgcacatggcgaagcagtcctggtctgtgggcgggtgtccttgcgttgcaaatcgccgataaggcatcctccatgatattcgccatatcctacacgtcacgtagcaccagatagttgagtattttgggctctacagcgac

SEQ ID NO: 18987 - DNA, 872 bp, Zea Mays
ttcaccttctaaaactgggtgtgacactgagcctttgtcgtcaccattgccacgatgagcttcggatcgctgccagccactcggaactcgccccaattcccctttctccctctagtttgcgctacctgcgctcaaccatctctccccatgcagtcccggagctatcatcatcaacccgagccaccattgtgtcatcgccaccactgagaggtccctgaggctccccctgatgtaaggaacctctactgccttctccattttccctcccttgctctctattgtgtgcgattcctcgctgaagatagttagcaccgccaccgagtcaccctcaccatgggtcgccaccctctggtgcccctaccttggctcagcccccaccattgggttccccacaccctccccaatcttcttaggccatcccagccgctctaggaccctcgaattgcccacacccctcgtcttcggcaagctcctcgctgcggacgtatgtggcaccacctctggtggctagaggaaagggccgaagttggccacccgatccccgtgttcaccccaaatccaatgatccgatatttaacctgagcctaaccctaaccgccccccagatctgacatcctagacaccgcacccgtgctagcactcacaaatctaccctgggctccacctgccagccgtccgagccctgctccgtgtcctcggccgaggcgagaacccatcaaccaaatgagccccatgcagtgtcctcggtccaagccccgtgctgcatcctcggtcgaagcaagaacccatcagtcgtccaagcctcgcgccacgtcctcgatcgagcgagaatttgttagccatccaagccccgtgtcgtgcacttggccgag

SEQ ID NO: 18988 - DNA, 775 bp, Zea Mays
tacaaagatagcttgtatcttggatcaagacaaccagcaataaaaatttgtaaattcaagttctccttctccattgccttccccctccccttctccatctccttgtcatgttcactcgtagagttccaaagtccccaatatttgtcaaatttttctttcattctgattcccatcagtgtttgcaaatcatctgtactctccatccatgattgaatcagtgcatgcacttctccaatctcatggtaaaatgtttgtgcagtgaaatggagagtagtagagacacgaaagtaagatcataaaagtgctctaaaaattctgccatcttccttgcgttttcccactatctcatcaggatgaccaaaaccatcccttccttcagataggtccataacatacctcatgtcttcgtctgctaattttgtgaacaccttctcatacacaattgcagatttaagcataatatatgtggagttccgtctagttgggacatcagcctttagatatggattgttggttagcttctcttcctctataatttccttaaatttgaacattcttgaaccaccatttctaatgtacttcacagctgccctaacacgcttcactgataggttcacttcttttaggccatcatgcacaattagattaacaatgtgagctacacatctcatgtgcaagtacttgccactagctagattagtggtactcaattgcctcctcaaataactaatacaggtatgattggcacttgcattatcaaaagttattgtcatca

SEQ ID NO: 18989 - DNA, 418 bp, Zea Mays
gtgggaaaaaaatttggccgcggggacagaaatgggaacctaaaactggacgaataattccccgtggatgtcagccgatcagtgcagaggaaacgtgttgcacgggagtggacgacgagagcaagtgctgctgctgctgcctctctgtcggccagttccttcgcgctttccgttccgttcccctaatcattcaccgacgtgatggggagggggagggcccagcccagcccagatgcctgcctggctcaacggcccagacgtcactacgtgactcatgacatcatcccactctttaccgtccgtccggacacacgaaccgaatccatccatccatggccgacactgccaggtgggctatctcccgtcgcttccagccattgccgtcccctctctctctccataagccagccactccgct

SEQ ID NO: 18990 - DNA, 1339 bp, Zea Mays
ggcctgcccacgtgcctgggcttggcgctgccggtgatccagagatatcgaggtcttaccccatccatggcgtcgggaagccgcgtcgcacccacacgctatctcgcctctgcgcggcctgagttgccacgtcacacgcaccaccaccactcgtagtcatcgggcgaaagcacatcccgcgctggcagaggagggggtcgtggctggccacgaagtcgatctccaaggtcgtggcccagtacaccctagacgtgcggctccacgtgatgttcgagaaatctggtgtgtcggcccgcagcttcgactactcccagttgctgcgcacgccgcccacgccgtcctccgagcagcaaaggccacatccaacccttcaactgcaagctcgacgtcgccaatgactccttccgcctcctcactttctccgagaatgccaccgacttgtcgccgcaccacttcattccctcgctcgactctacgtcgttgttgcccgtttccctagctgccgacacatgcctcctcttctcccccttgtccgcggtactcctagagcgtgtcttcatcacgcgcgagatctcgctgctcaacccgctatggatccactctagagtctcctctaaatcgttctatgcaatcctccactgcatcgacgttgacaggactgtggcacgcgacaagtcggtacctaaagccaacgaaaccctaggtgccgcgccactgccccttccctcccaccggcagtgcccagggttcaaatttctcctggctccgccactgggagtaggggtcaatgcatcgccatggtgtaatgtcaactactcatgctcaaccctaattcacaaacaaccgtcacaacctaaaggtcgaggctccaaaccgtaaaagtcactcacgttcagcaggaccccgcaaattcatggaatagaaactaaacaaattgtcaacaaagtggaaggatgtacaaatgcaatggtcaatttgatgcatccattccagccaatgaaagatagcaatcttagagacatccatcccagcaaatgaaagatagcagtcttagaggcatgcatcgaagcgggctagggtttccttaccaacaaaagtagaagtcggtccaaatctagatagatctccaatccgcactgagaaacaatatgtgaggatgtggacaacgacgagaagggacttcgagctttaggttttgcggaacagaatcggaagaaggcggtcgtcaggcaagagtaaagagaaagggtgcctgtaacggcctccagtatcaagaaaccgactctgatactggatctttctcgcgctatatgctatagtcttgacctctaaatataag

SEQ ID NO: 18991 - DNA, 839 bp, Zea Mays
aaaatcgtctaaccgaaagggtatcgactcatgagcaccgttggatgcaagatcaacagcgcagattacatgaactcccttatgaaccggtacgcgacccaggccgttcgatcacatatcaacactcgggatttaaaacggtcccgaaccaaccttgtccgcccacacacagatctgcggtcgagattaatctgagtcgaatcggtacaaagcttctaatctaagccgcccgcatccgaatcaatggcccgcagtgtttcaccctcctccagttatccgcgcggtggcgcagcacaccgacgtggccatgcctgacatacataggtcctaaaccgagaactaatgggtgccatacaaagagtatggcaaggcggacaacatgatagatctctcactgtgattatggcgcagaggctcctggctacggcgtggcgcggttttgcggcggagggcgtgctccagtgaggaattcaccgcacgtcgtcggataatcccgctcgggtataacacgagcacgcgaagggagcactaggagggctctaggaccacccaccccggtcacgaggacgacgaccacgtgaaggcactctagcgctcccctctcccttcccggtttctcaccaattccttgcttgattctctcggctccagtggttgacgacgagatgatcggcagccctaactttatagtctcgaggaagcggcgccacggcatgccccaacaacctccatgagttgggcgcaacaacccccgcagagcgcgtggggaagatacacagtgcaccgacccacgggcccacaatctagtggtcgtgtggcataagcgaccgacaaggcgg

SEQ ID NO: 18992 - DNA, 726 bp, Zea Mays
gctgtttacttcttggacactgtgctctgcttctgattccaaatttatagggtcagtcgtgtttgtcacatgggtataaacctggggaaatggactaggtggtaccatctggacttgacccaaggatgtttgtggtgtaggaccacctagattcatcatagcaaaatatgggttccatggattgcggaagggaaatgaagatgtgtcattaggtccctggggccaggtaggattgctcatgtggcttgtactaccactcatagtagcaggatgggtttggtctaatccttggccctgccagaactaaggatcccacatgggtggtgggaaaatgtggttacctgaactggggccggcaccaggaggtcgaatatgtgagtttcggttgttctcagccattctgggaatgaaatacaggaatcaatgaattggaacaacagaaaacacacttttactaaaatatagcaatgttcatgcattccacaaaaggttcatacaaaaggaacattaacatacatcgcacatgtcctacatcggcaacccatgcatcatagacatcacacataagtttttatttatttggatgcattactagcactaagactctactaggtaccacatttacaggttccaaatgctatacctagtggacctgtcggagtcgtacgagtcattgtcactggcctcatacaattctggtgaggaagggggagtgaaagaattttg

SEQ ID NO: 18993 - DNA, 738 bp, Zea Mays
cgggatgtttgcactccgagctggaccgaatccctcacagaccaggatgtggctgaggcaggggttctgctagctgaagttggattgttgaaggagagaggtctgattgcagaggctgtggttgctgactttgtcttcaagaatattcagccattgaaggacagggcatacccgacctatctgtaccgaggcctagctgactccacccgggtcaccaacagaagaattcctgctgtggacttggtgagctggctcgaaatgatactcagaggcaaggtatcaaatgttggtgcccctgttgcatactcggcctggaacctgcctccttccaaggcctttactcatttcgtgtcaaatcctcctgctggtgatggcggtttgggccttagagtgcaaccctctgccgaagaagttagtgctttggttgcttcgcttgaagaaattcctgatggtgaacggcaggttcactttgaggtgcctttggatcccagtgatgcagagataagtgccatgcttgatatgttagccgaggattcttctgatgccgctcctactggaacattggtggtggcgcctctcccggaagctagtaaagccttggacattcagaggcctgacaatgttcgcccgaagcgcccttgccgagccaatcagcctgcttctcctgctgatgggcagaaaaagaagaagagacgtcttcggcgagtgtctagcttggatcgggatactggtccttct

SEQ ID NO: 18994 - DNA, 315 bp, Zea Mays
gtcctcgtcatcagataattgaagggattgccaaacttcctcaacgagatgaagttggactgaatcagcacatcggtggccacaggaatattgcaacccacacttgtaacagagcccttttgccttgcggtaagcatacaatgcagtcaatttatcttcaaccgtggagggtttagatgtcgatgtgtccagcttggctgaggatggatttttgatgtccaaggtggcgaccgaagaagcatatggcctcggtacacctctggcatacgtcttggtctcgtgaggcttgtgcgcgtcgtgcacctcctcctgcaa

SEQ ID NO: 18995 - DNA, 432 bp, Zea Mays
ggctagccacgacctagctgggaatggccacagcctggccgagaatggccacagccaattgggtcggttggccaggcatctcgcgtgaggtcgtaccgagttggccacactagccgtgctcgaggaaggcgaggcatgggaagagggacgagatggatggttgttgctggatggacatagctcgaggcagcggtcaatcactgggcatatatgggcatggctatgagggagcaggggcacccagagagcggcgcggtgtggctgcaagtggcggtaggtggttgtgtgcaagggagagggtgcaggcaagtttgaaaggaggtagggacgtgggaaggggggcgtggcttaggcgtgggggtagtgtggcagaaccgcccagattattccagcttaagtgcccaacactagtagagatcttatcatcgatga

SEQ ID NO: 18996 - DNA, 882 bp, Zea Mays
atcaaacttgtagagccatgtatggagaacaaatttgcttgagtaatcaaacactagtgttacacaaaaatgggagatatatgaggttgaaaaggcaccgtgagtcggcctgataggtatttattcactgcatctgatttgggtcacggttcagtgttgttgcaccaacttgagcgccctggcttgatcaatccgtgagtatttttgacatagtcattatatcaaaatgaaagaacattgatcaaggtacaattttgatacagattcgtctgcgagcaaccacatgaaattaggagcagtagccacttgaattcgagctggtaggcgcagtgttcaccatggttcagtgaacctcgctggggataagaacgccaccacggctgaggatcggacttgtggccgcagtaaaaatcttccgcgacgtggcgtataaaccatgaggtggcactgtccagttaatcggtgttcactggacgctcgctgcggccctgcccgcgtgggtgagctcaccagcgcaatggaagatctttgaatctcgtccacctccggccatccccatataaattaagcccgagcgctgcttcttcatcgcatcacacacacgagtgcttgcgcaaaccacccaatttcaccgagggactcagttaggccataatctcctcaccgttcttagcaccgcagtgaaggaccccttcatgggcagccctcctcgggtcagtactcacccaattgtctcttgttttagcttgtatttagcctcctattgctctcggtgccggccaattgaattttaccaaagcccaaacgctggaacaccatgtagtcccgtagaacgccgccgcgtacaccctctctgttgacccgctttcctaccctcgttcg

SEQ ID NO: 18997 - DNA, 837 bp, Zea Mays
tgaaccggtacaggatcgccaccgtccatttacagatcaacagcctgggttttattgaagagcgccctgattccagccactagatcccgatcggagggtcccgatcgcacacgagaaactctacatctaggatctaatctgtccgtccgttggtcgatcaatggctggtcgtcattctcctaccacagtccgagctgggtgacgatgcctaggtcatcttctacccctggcagcacccacgcggcggtgagtgagctgtgagcaggtgctccgccaacctagtaccagtgcacgctaccctcctatggcaagcgctacgtagagcggatagcaaatcaaaacaaaggttctctacacttaccagagatcacgtcgcggagatcgacaatcatggcgggaggcggtttggcggtggtccgaggactccgacgaatagttcatcaggaatggggcagcgtttcccacggtgacacgagcgacagctccctcacacacaagcggacaccatcggcaaggatccatggcggctgcagcccactgctcctcttctctctcccgtactcacgttcggcagcgaggccgagcacgtacacaggcaccccggcgaccaaacagagtgcccagtcaagaccttggagacgacgaatcacgcgaccgatggaagaagtagccagcaccgagcgactgagggccagtggccatggatcagggagtggcacgacggagcgcagatttgtgaatccacagcactaccgacgagggaggagatggataaaaatgcactgccgccagcaggggctggacgaggcgcgaggcgagctcgggaggataaactcc

SEQ ID NO: 18998 - DNA, 335 bp, Zea Mays
tggcgaaggtaggtggtttgtggctcatgaactcccggtgcttgtcgcggggtggaactggtggtggtggaggaggcattggtgcttgttgttgtcgcatcattctctcttgacacatttcctccctcatctcttgcctttcctggcgcatctcttgatgttcctgccgtatctgcgcttgcattttcgtcatagtattggccatttgttgcagcatttgcatctgggctgcaaccacaggatcagtcccggccggtgggggatttggaggattcatctctgcttgttgttgtctaagcaccctctggttgtgtgggttggcaggtagatcaatt

SEQ ID NO: 18999 - DNA, 535 bp, Zea Mays
ctagtttgaattgaaggctcggcaagcatcacagagtaaccagagtgctcaaacaagggagagagagcgatgaactaacctggaaagggctggccgcggtgatgggtggtttacggtggcggagagtcgatttgggggaaatatgaaattggggagctgtggggaatgatcggagctacgagcgggttctctggacgtgcgattacctaacggaacgggctgaggcttcaatttataggatacttaaacggtggtggccaatttggtcgagcaacgctggcagtcggagatggagaagaacctggcgcggtgaattcgtgtccatcgctgtggcaggctcaccggcgttgataagacagtggtagggagctacggcgatgtggtggaagggttgagacacgcggcgcacagccgggaggcggcgttcaccagcgagtttatctgctcagccgtagggtagaggggaaagcacgagggggggtcaccggagtggagcccagctcaccggcggtgaagattccccttaccccgcgac

SEQ ID NO: 19000 - DNA, 688 bp, Zea Mays
aaacccgtgatgggaagtggtagtgtttgaggcgttctttgaggttggtcttcgctttccatgccacccatttgtggccgaagtaatgaaacgtttcaacgttcaattgcatcaactaacgttgaatgccattgatgcattgtctaaatatgtgtgggtgatgactacgtatggcagagaacttttgatcgaagtctttgtaaagcattactatctccgtggcagaagaagactatgggtggtagggtgatgcagttcgggagttgtactttcgcaccgaagaccgagaagacggggaggtgaagtgtatgaacttgtgccgtgtgcaaagaacaagtggagcaattggttcaagtcttgcttttatgttgatcttggagaaaatgtacctgttgtggctcgaccagcggccagcgttttggtcacccatgactttgttgctttccttgacttcgaagtcggggagaatgattctgatgaatgggcactgtgtcgtgtgagggtgatgagcagcgatagagatttggtcgaagagtatattgagtatcaagtgtggccactaagcggatattggacagttagtgaagttgtgtgatgaaggatgttgttgggggcctgcttctttgtcgaaggtcctctaagcagaaacaccttcgaaagatcggcatacaagcaaatatagcgcgaa

SEQ ID NO: 19001 - DNA, 537 bp, Zea Mays
gccatcttgtcatcggaagcacgaattctgcttggttcagtgcgcttgacatcatcaacaagataaacattcttgtcactctttggtggtagcagtagaggcagaggttgctttcccaaacttgattcaatactggcactgatggacgacggaattccatctgtttctcaggcatggccacctcttcctgcaacaatgcgagaacacaagcagtatcgacggaagatgggcgttgcaaaagcatagtagcacgaatatctgaacgcaatccatccacaaatcgttgcacaaaatataatggatccattggtttgtcgtacgccaccaaattatccatcagctgcgagaactgatccacatactcggccactgaaatagtctgccaaatacggaataatttgtgaatgaacgcctcatgttcatccttgccaaaacgttccagcagcaagcggcaaaattcgtgccaacccaacacacgcgatgactcttctagagaagataaccagcgcgccgccaccccaacaaaattcatgtacg

SEQ ID NO: 19002 - DNA, 422 bp, Zea Mays
agatgctcctttcttcctcaactagggtgctagtaaatggagagccaggggaaatcattcatcaccatagggggctaaggcagggggatcctctatccccaatgttatttattgttgttatggatgtgctgaattctcttgttttaagagcccaagaattgagtcatttacaaccagtgttaagaagacgaaatgggcaacgtatctctctatatgctgacgatgtggtgatgttcttgcagccaagtagagaagaactcagtgtggtcaaagaaattctgagaatctttggagatgcttcaagacttgttacaaatgtgagcaaatgcagtatgacgcccattcattgtgaggaacaagacatggtggctgcacaggagttatttccttgtactgaggtggcttttccattcaaatacctg

SEQ ID NO: 19003 - DNA, 411 bp, Zea Mays
attttgatgaggtatttgagaaagtgaatgggtccaatgttcgaattgctgctatttgtagaatgtgtaagactcgtttatctgctagatcttctactggtactgggcatttgcttagacaccagaaagcttgtaggaagaaggttgatcacgctgctagggtccagtctcggcttgctttcaatcctgatggttctctacacaattgggaatatgatcctatttttgctcgaactgagttgtgtcgtctgattgctaggcttgaccttccattaggtataggtgagacacatgcctgggaggattatattgcccgtgctcataaccccaggtttaccaaagtttctagacagaccaccactagagatcttctcaagcttttcactgaacgatgtaatgtgcttatcaatt

SEQ ID NO: 19004 - DNA, 859 bp, Zea Mays
gccaaagttgccttcgcttacaatgtctcaccaaccgatccaaaaaccaccatcgagccacaaggcgagggtcatgccacgaaacaaaagcagttaccaaccaccaccgagccagaagaaaaagtccatacctctagcttagacaccccaagtgacacccacccaatccaaaaagccatccctacgaagccataatctggccagacctaaccaagaacatgtcattagtccccctaggcttcctgctaggaatgcccctcctacataacggtcagtggctccctctaggaatgcccctctagacgacgactacgaagacctacataacggtctagaccttgacatcaacaccaaaaaacaacttttagtcaggagccttcgcatgcacaacagtaatctacagaagcaaagagatgtcctcatagccaagagacaattcaacgaagtctaggccaggatacataaccttatccaacaaaagaaagagcgcctccaggctctcgagcaagaaatctcataactacaggcccaacaataaccaacccacccttcgcacagtagagcaagaccgaacaatcttgacgaagttaggcagactttgtagattgatgcctttcaagctttcaattttactgatgaaaggtgcccactttcagtcaggctgcaagcaacaccctagttgtacaactatagagcagggaactagccaaaatacaatggaaaagtcgacccctcgcaattcatcatgagctaccaagtagtagtggcctcttcagggggcgacgacaacgcaatggcgaagtcattcataatttcccttgagggtctcgctttaacatggtactccacattgacctca

SEQ ID NO: 19005 - DNA, 466 bp, Zea Mays
aacaaaggccagagaagacggcctacatgaaaattttggctgttataacttcgcgtatcgcaaggatacgaaggccccgatcctcagctattggaccaaatggccaactggctggaaaagtgagtggttttatatcaaggctgatgagaaaaagagggagaagttgaagacactggtgatgagccctatgagcttaagcttcgggatgactagacccttgtgcaacatgaagccagggttaccatgccagctagccgtggcagaattcagagtggtggagtaacagggttaccaaatggccaactggctggaaaagtgagtggttttatatcagtactagggatccagtgcaagaatacttggcaaacagggtatcttcaacattgagtggttggagtatgccgaagctgaaaggaacgaagaagaaggatgaacttgtccgattgccctatcgcttcaaatttga

SEQ ID NO: 19006 - DNA, 621 bp, Zea Mays
gtcggttatgatgctgttcggtatcccgaacctgaatattatgtcttgtatgaattctactgccttaactgaagtcagagaagcaatgggcttgaactctatccacttagtgaatttgtcgatagcgaccagtacatgagtgcatcctccttgagccttcttgaagggtccaatcatatccagtccccagcacgcgaacgaccaagttacaggtatggtttgcagttgctgtgctggtaaatgctgctgttttgataagtattgacaagcttcgcacctctggactaactcggctgcatcactctttgccgttggccagtagaaaccagacctgaagaccctcccaactagagtcctggatgctacgtgtatcccatattgcccagcatggacctcatctagcagttgcttcccagtagctgaaagaatgcatttcatgaggactcctgtcgtgccccttctgtatagtgtttccccaatgagggtgtagtgagttgactgtcttgcgatgcgctctgctgcatttttgtcatctggctcctcctcattctttatgtatctgatgattggctccctccagtcatcagaatctgactctggttggctcagaatattgcattc

SEQ ID NO: 19007 - DNA, 712 bp, Zea Mays
ctcccccgtgaatcccgcaggaagccacttcgtggactgtggcgcacgtcagggaaggctcggtcatgacctcgggcagacttccgcctcgcccgagctcggattggccctcgatgtccgtaacggaggatgtccccaacttcatcagacacagtggggctgatgcacctcttaagcagcttttccccatacctaaccttgtgtcaaccactacgatatgggcgacccctcgcgagggggctttggaaagtgacctagccttcggctttgacctcggctctcagtgaaaaacaagcaggcacaagtcaacaacacagtacaagaccataccgtctacaggatacgcaagacaccctctcatagtatacagccaactcccgtcctccaggaaacacccattgaatctataaataggacaatctacggcctctcagggcggcagtcgaatacttcacaagtcttctcctccactcggtattggcacttgcctcaatcatcccctaggacttgagatctttccctctcacgttgtgcttgtaaaccctactgcgagcacttcagtgcgagtaatataagtctcattcccgtctgctggaagtaagacctttcctagcccgaaccacgatagacgacttgtgtcaactcgcatcaccatctgggtctggtgcacgcgacactatttcactagttggttatgtccatggatccaaac

SEQ ID NO: 19008 - DNA, 616 bp, Zea Mays
taaaacacttcgtcgtaaagtagtgtgttagttgtggtaaatttaataaagcgtaaaacatgcttggtaatttccgcagtcggctaaggggttagtctatgttaaatatattttatgtattcatcgtggtgtaggatagtgtgggtcggaaatataaattatgtgacatgtgattagtgttttaaagacgaggtgtgcaaatgatcggttagtgtttcacttgtctagtcgataaacgttgtcataaataattgtgctaaaatttggtcatgagaatgcagtgggcacgtggtgtggttggatgtgataagtagattggaagtgtgggtttgtctgagcacgatgttgtcaaacgtgtatgtcgaaatgtgttgtagtagtgattgcgttaagttgaactgaagtgtctcgagtgcacgccacaatatggttgtatgcgagacatggtaaaatagagtgtgctcgacatgaatgtttggtcgttataggtagaaattgtcttggcttaattagagaggtggtgacatgccaaagtagtcatcacttcctctatatttataagtcgagccaatacaccttatgtgtttattaaatttcacatcacgcatagtgtacg

SEQ ID NO: 19009 - DNA, 467 bp, Zea Mays
cagtggttggtgtcctactttggtcgaaaccaaattcaagttctaaggaccatttccccccaataaattttacggttggtgatctgccaagctctgcccgcgaggacagtgaacggcgcggacatgtgctcgtgttccaatcgattggcgggctcctagttcaattcggtggtttgtcaagcatcaccaacatacatggacataagaacaacgcgcgaatcggatggtgtcttaccagaacggactgaccacggtggagtggtgctttacggtggcggagaccaatttggggaaaaacgacgttgcgacggctctgggtgaaattggaggcggggattaaggctacacggccgtaagaaactatgctttcaccgtgcgcaaacgatttgggcaaaggtggagaggtcagtgcgaatttgactcgatttggtttactgttatgtgggtgatgaccgagcctcgccgcg

SEQ ID NO: 19010 - DNA, 1027 bp, Zea Mays
aatgaggcggagccatgtaatatacctgcaaaatcccccgcaaaaacaaaaacttagacgcaacatgtcgaaaaagaccgcatcgatggtcttcggcattcgaccactccgaagtcaccgctagaggcagcacagactaccctcgcgtgcgacactccgcgcaaaagttgcctaagggtgcaaccggaatagcacaacaagtgcgttaatcgaagtcttttatttaaaaggcattccgcgcaaaagtcacctaagggtgcagccggaacagcacaacaagtgcgttaatcgaagtcttttatttaaaagacactccacgcaaaagtcgcctaagggtgcagccggaatagcacaacaagtgcgttaattgaagtcttttatttaaaaggcattccgcacaaaattcgcctaagggtgcagccggaacatcacaacaagtgtgttaatcgaagtctcttatttaaaagacactccacgcaaaagtcgcctaagggtgcaaccggaatagcacaacaagtgcgttaatcgaaatcttctgtttaaaagacactccacgcaaaagtcgcccacgggtgcagccggatcaacacaggcgcgcgaatacggccaacaggccacatcatacaaattacagttacatacactcggtgagggcatcatatattacatcggctcaaccttcgggatgatacccatctccctgtaattgaacaacattatcctcaattcctcaccctcaaaaagatttcgcagatccccttcacctatgctcgccccaatcggcgaggataacaattcttgtttaccaatccggtccactcgaagacgaccacactccatccccatacgacggcgcctaccacttcgcgaaaattcacccacactatgtttcgccaccacccttcgccgcctatacccagtactcgcactaggaagatccccggcaccctacacacgcggcgaagtgtccgccgcagccacatccaacgcagcaaaataatacaagccttcatccgaggactcctcc

SEQ ID NO: 19011 - DNA, 438 bp, Zea Mays
aacaaggagttctttggttcaagaaccgtctgtgtgtaccaaaaggagaggcacgggaagtcctgctcaatgaagcccacaactcagcttactccatccacccaggaaccaccaagatgtacctagacctcaaaaccagatactggtggagagggatgaagaaggagatagcacagtatgtggcccagtgtgacacctgccagcgaacaaaggtcgaacaccagaaacctgcaggcctactgcaacccctcccaatgcctgaatggaagtgggaggaaatcgacatggattttgtaaccggactgccccggacgcaaaaaggaaatgactctatctgggtaataatagaccgtctcaccaaggtggcccacttcattccactaaaaaccacttttggaggagccacccttgcccgaatatatcttaaagagatagtca

SEQ ID NO: 19012 - DNA, 374 bp, Zea Mays
gaagggtgagcgtcgttcgccggagagcgagatccgcggccatggacgcaggggtgtgcacggcgcagagatttatgcggattcatgggggaaatcgggatagaggtggcggcgcgcttatataatcctatagaactcagcgatggccgaggaacccggagcccaccgtgaagctgttgcgagaaatctgggagtgggagttctgcgagttgctaggctccgaggaagacggctgcatcgtgcgggtagaagaaacacagtgcaggtgggcccggttcaccagtgggagagttccgcgcctaagacggacgcctgaggctgacggggtggtcccggttgtcggcgccaggtccaaagtgggctgcgcacgtgag

SEQ ID NO: 19013 - DNA, 646 bp, Zea Mays
ctcgacttccttatttattttacatgagtacattacttaaactatactactctaattctctttgtccttagctgctctactgcccgctttagcagatcgttcatctgcaagattcatcgaaggaggggcctcaaaaaggtccaactcgccattaggtcctccatcaggtgttctagatggtctggctcccattgctgcaacttctggtggcacgctcggatgcagccggtcatacaatacgtgcacctcttcatgcagggtgttgcaatacgcttacaggtttttcagggatgcgctaaattctgctacccaggctagagctttggcttcacaatcccaggcgaaagagcgtgaatttacggcccaatcaatggtcgtatcgcgttccgcaatttcctgctgcaggcgattaacttgtgctgatagttcagcaatgcggcggctatcgcgcgcatgctccctactctcgtggcgtagttcagacctatgtcgctccactctagcctacaaatcccctattgggttgttacttccacttctgcttccttcatgtctagaggccagctgatgtcggggtacaccatgcggtcccgttgctttgcgctgggtagtcttggttcgcgccatatctccataagagggaaaa

SEQ ID NO: 19014 - DNA, 656 bp, Zea Mays
cttggtattggtatgctcatctccttgaaatctttcatactctcatcttttttatgcttacctttatatcccaaggtctgtttaagatatttcattctacatgctcttgaccacctttgttcctcatgatccatgagcgatcgttctattcctcacatccttatcgttctcatcgtttccatataacttccctcggtaataatttcttttacttcaaccattctgttggaaccttacctaccttacccgtgattgttttctgcatttcgtcatttcacgagtcttgccttaactcaatcatttgtcatgccttttgttattatcaccttcaccttagacacctctatatcttacttgatgcttgtctcatacctgccctttaaaatcacctctcttccgtcttattctgagagctatactttacctatctttaccttggtcgtatgctcttctttggcttgcgagtttgtgacttcgtcctttgttgtgcttttgtttgttattgcccccatctatcccatctctcgatcttaccttggtgattaccctatgcccgttctctgaaatctccaatccctatcccaattggagagaggtgttttgcttatctcgcccttggcaatgtcctcttcttcaccgcatgcaggccttgacgt

SEQ ID NO: 19015 - DNA, 1053 bp, Zea Mays
ttgtcgcatagtcatcctgcggcgtcgccctcctcctttcccactcccaccggtacgtattcgcggagtggcggtccttctggaccggatcgatttcgtagcttgctccggcggcggattgttctgccaaatctgatgcttaacattaagttagctggggatttgtttcttgcccggtaacctgttactcgtaatataatttgaatcttcaatcggtgcttcgactaggttcttcttgacctctcgagatcattctgcccaaggtgctcgatccccagaccagcgatagggaatgtatgatgactaaatatcggtgccatttccttttgttgcataattgtttgtttgtttaggaccggggtctcgaatttccaacatttggcttcttttcaggttgaagactgtttctgtgagattgtcgcgagatgacagtctccggccatgccaagcactgctgtctcggtattcagaaactgttgtccctttgattcggaggttttgctcgacgcccattaaggttgaggaggtcgccaacatcgaagctgatggaaaggtctcatatctggatgccgctgctctgccctgcgacaactctgactgtcgtggtgagcccagtcatggcagcaggccatggacgaaacggttgaagcattatggaccttctcagaagggaaaccgtaaccatcatgaaacgaaactgccaggcagtggcagggatggatcttctaggaagggcagccaccctcagaagggtaaaacgaaactgccaggcagtgggagggatggatcttctcggaaaggtagccaccatgaaacaaaattggcagacagggatgaacttattcagaagggaagtcatcatgaaaaggaattggcagacacacccttcaaaccttttcttttccagattgtattggatacttctatgagttctcttatgcctgtacttgacggatgggtgaaaatcggtaatcgtctggaaagagataaagtcaatatggttttgttccatctgaggaagcagagaatgtataacaaggctctgaaggtacc

SEQ ID NO: 19016 - DNA, 715 bp, Zea Mays
gcggagtaaagatcttggcactagataggctcgggctcggtcgcggatgagtttcatcgtacccacttgctcgtcgatcagccgggatagacctcgctgctgttggccacttaccactgtgcgccacgtgctcaagcgttgtaccacgttgctgtgaatcacgtcttgcatgcccggtgttcgccggagagccgccacggtgaaagccactaagcttgcgcgccagtaatcttgttcctctccggtcgccagcgcatcttcgcgaaattggacgccgcagctgagggagcctataaattgcctccctcgcctgctccgctaagtaattgtgcacccagtaaaccaaccctcacctcagatcgtccaccagagctccccaatttgggatttcccccaaatcaaccaagaacactgtgcggtgtgacctcgtcgtggccaaagtgtttcaggtccgttcatgtccgttgtcctcttgtttcagcacccttactttctcctgatactcactgacccatccgatttagttaggtggtcctagatcaccgggaacgcgtttactcatctgatggtccgcgctgtctccgtggaccggataatttggagccccattagtaaaattgagtgaggggaaatgattaggaggggtccaatttggtgtctgccgcgcgagagcactggtcgttgtaggattcggccggtataagctcgccggagc

SEQ ID NO: 19017 - DNA, 441 bp, Zea Mays
cgcacaaagaaagtaggaacaggcgttgcgatcccaggacgcaagtttcatggaagtgacatacagatgattattgcagggtagaagtgatgacggtcgtccaaggatccgaggacgacatgctagacatcactgggcccgaaggaatcgagacacttggacaagccataaaaaatttcatcctttagcctcgaagggatgtcgaattggttgatccaccaatgtcgtcgtcgtctcatccccaaccatctccgtctcctcaaactttagtacttgtacatccatcatcacctccacaatcttcccatgctactcctcatcctctttctaatccatcgtctctgccataagcatcaacatttaggacaccaccaccttctccacagccatcaagggattcacggcaatcaaagaaatctaaattccctgtaccaaaattgg

SEQ ID NO: 19018 - DNA, 540 bp, Zea Mays
ggggtttttatctgggccatgaggagccaaggactggaaccagatgcaagatgcttttgcaatattcatgagttgtcttttgagacataggtaactggaaaggaatagtatcacaataattttggttgttacggcttcatgcctcgatataaggcgagttatcctgtgcccacgtttcggaagaggtggctaggctcttggatgcaggaatggtttttacgtgaaaaatgacctgagtcatagggaggatgtgaaagggattattcaacgccgtatatggtcttgtttcggcattaaaaggccacccactacacttaggaaagatgtgcaagcgtgccaggtggctttcaacacagtgtgcacctatattggcacaagagacttagttcaagagcatattgcatacaaagtatggcctcttgcgagcgaaagggaaatgccgaaggaggccgccactgactctagccagggtcacctggtttacctgaagtacacatttcagttcaggaatcagtttggcgagccaaatgatgattggtt

SEQ ID NO: 19019 - DNA, 657 bp, Zea Mays
attttattaagtaagtaagccctagtgctacatgaaagtgggagaaaaatagacctgaagttggtctgtcagtcgagtgtaaccctgaaattgtgtctgacagtgaacactgaagaactttggagtggatttgtgcttaatcctgtaagcaaatggccagagtttctatagtcaattatagctggattataggataagaactttgttatagagggattaacaagttgccacgtagaaatcagagattaatgccctgcaaattgctttgtcaggcagactgaataagaccctgatggtacagtgaacaaaaaatcttcagatgcagtgaacgtgctgccggtgagcttcgcgccatgatcgtcattgccgttgcgattcatgcttagtaaagtgcagataactgctcagggtaagaaatatcgcgttgaggatgaactcggggcactgtttcgccctgttgtcgtgccaagttgcgtcggtgacgtggccgagcggccgtcacaggaatatgcaccattcactgcggttgcgccatgcctcaggccatttaccaagtcgtcgcaagccgtagtgactacccagtaaccgccatagctcattgcccattgaccgccacggcagaccgctacgatgactcactctcattcccggccgtcg

SEQ ID NO: 19020 - DNA, 794 bp, Zea Mays
aaaactttaacctttttcccttcggcgtggtagaaatagccgaagaagaagcctttcttttctttccctgcttttgcgagggataacaatagtctgggtacacaaaaccaataacatcaaagactctgttcaatatcttcttgcctcgccctccgaaggcaactgttagggcatcatcctcggccctcgtgtaggcaccaagcaactcgtcgctagttgcctcaatgcaatctagccagtcatcattcggctcatcgaattgatttcggtacctgaaggtatacttcaggtaaactaaatcatcctcgctagacccagaagcagcttcggtcggcatctcccagctgcttgagagaggccacactctgtacgcaatgtgctccgggaccaaatccctggtgtcgatatatgtgcaaactatgtcatacgcagcttggcatgcttctacgtcaatcccaagagcaagagacggccttttgaagccgaagcgagaccaaatagggcgttgaatgatacccttaatatcttctcttttgaccaggtcatttttcacataaaaccacccttgcatccaggaccctggccaccttttccgaaatgttggaactggatagctcgcaccagaacgaggcacgaagctgtagcaaccaaaattattgtgatattgttctttgccagtggccatcgtctcgtatgacagttcgtgaatattgcaaaaaacatcttgcatttggttctaacccctggctcctcatggcccaaataaaaatccccattctgataataacctcggg

SEQ ID NO: 19021 - DNA, 518 bp, Zea Mays
ctgcgatctgcgtagcattagcgtgcagcggaagcttccctgacaacgtacgagtgatgatgagcacagtgcactccgcagcacgggcgtactgcctgccaacggaatggacaggcacgccgcctgcaggatggcctggtcgccacccgtcagcggagtggacagggcacattaaatgctgaggtggcacatcgcctgtcagtggaatggacatggctcattaaatgtcgaggcggcacatcgcctgtcaggcggtgtgtcttatccacaataaatgtagcgacgcgcggcccagaggccttacgtcaggctccgcccgctggttcacgtcacgggcagtaggccacgtggcagcatcgggtctctgcctgggtgggaagtagaagcgtacatggtatggtccgaacacgtgttggctccgaacccccgcgtggccttgattaaggcctgggtattctttatcccagaatcctgggaccctgctgagagtgtcccggaccccatacagagaggtccga

SEQ ID NO: 19022 - DNA, 384 bp, Zea Mays
tagtcggggaccagctatacaagaaggggatcagtcaacccatgctaaaatgcgtcaccgaaaccgaaggcattcagatcctacacgaagtccacagcggaacttgcggctcccacttagggcccagggccctcactgccaaggtgatccgtcaaggattttactggcccgctataatctgcgccgcgaatcgagtcacgaggtcgtgcaaagcttgccagaagttttctccccgctggggcaacccttcgcagttcactaagctgactgcccacacatggccacttcaacgctgggggctggatattgttgggccactacctatggctcaagggaacctcaagttcaccttcgccgtcgtcgaatactttaccaagtggatcg

SEQ ID NO: 19023 - DNA, 839 bp, Zea Mays
cggaaaccgagaacattttgatgtgttcatgacgactcagggtagtctagcacaattggataggtttacgagtaacaggagacttaatggaggctagaacattaagtaatttggtatgtactaacccaaggagtgctggccacggaggggtcccttgcggcggtggaagagaccgattccagggaactccgatgatctctaagggtggtggaccaaacaaggtggctagtgattcgttggcttcgcaactaagggacaaagagctgtgcttggttgatttggatgaagggggtgagagcgtggtgaatttataggccagtgagccaccatgatggccatggtgataaccatcaccggacatagctggcgaccaacgacaacgtcgggcgctgccctttcccatgagttcaccacgtgccgccgcgacagtaacgctgtcaaatcggtgagggtgtggatgaacggagaggagcagcgccggtgaccaggcacaaccggaaggatcagtggccgcatggcggccggaattattaccctccacagcgatgatcttacccggatcaagaatatcgtcgcgaaaagatgctcgtcgagcgcttaaccggatcacggcgcaaatcacggcgtggatcggtgccggcggcgagatgcgcggtacctgagatttttctgctactgtaccattggaacctctattcagtcagcgtgacaaatcaagtttgggctggattttctcctgattttacatggcaacaaggccatcattctgtagcaaagttgtagcctaatgatccagctacaatcttactacaacaaccatagccaattactgactggat

SEQ ID NO: 19024 - DNA, 657 bp, Zea Mays
ctagcactcatttatatcataaaaacctattttctaattcatttattcattttaacacgccactggactgagcctcaattacaggaaagtccaggggttaatgcgcgaaaagtcccaagacacagatctaccccgcggtggatggcgggttgatttctaaataagccgagggctcttttgcaaaaatactacggcgatgggggtatggttcaataaggaccgatggatcagatttgaacgcgtgagattaaatcgagccccaccccaaaccggtttgctctgcagaccatcggatcgacgatcaacggctcggattcaaagtgccgaagggatatttgcttcttctaatcttgatcgtcgcttgcgaatccaacgacccgagatttaaaacactcagatcaattgtcaagcgcccgatccagatcagacggccaaggacggatccgggtgaaacgttatctagagcgtccaattgaagatataatggctagccttctttctcctacctgagtccaagctgggcgacagaaggcatgttcttcgcctgcatctccgcccacagccgcttcactctcctccacgcgaccaccagggagagcggctgcacagccacggacggcttcgtacccgaatggcgcgaggccgtcgaccctccac

SEQ ID NO: 19025 - DNA, 437 bp, Zea Mays
atcagctcgggctcgggcgcagatgacattcaccgtacccacttgctcgtcgtgcgaccgggatagatttcaccgccgttgatcgctcaccgttgtgcgccacgtgcttaagcgctagcccacgtcacggtgaatcatggtatgcatgtccggtgatcgccggagggctgccacggtgaaagccactcgtcccgagcgccagtacctctttttccctccggccgccaacacatcctcatgaaattggacgccaccgccgttggaggctataaattgccgcccccgtccgctccgctaggtaattgcgcaaccagtgaagcaactcgtgcctcaaatcctcccctagaactccccaatttaggatttcccccagatccctcaagaacaccgtgccttgggaccttgccgtggctagtccaattcaggtccgatcctac

SEQ ID NO: 19026 - DNA, 317 bp, Zea Mays
tgaacttgggcggggaaacgagcaaaagaaaacagaatagaacaaacgaaccggtacgttgtgtagtcatgtaattagtggcatggtggctaatttggtaccaatacaaaggacggcggaaacatgaattcgtgaacccctcttttgctgctccaccaaattggagttgaggtaaactccatgtttttttccaggagcggaacggggtggagttgggagtgtttgaccactaatttatgcagccgatcagtcccaaacaactccttagtaaacgaggcttcatgactggttaagcttctaatgatggtttctcaggg

SEQ ID NO: 19027 - DNA, 1088 bp, Zea Mays
ctcggcaacattcttttcagtgtgcatcacgtcaatgttgtgtggaaggagcaggtcatcataataggggagccaagtcaagccagacttatgtgtcaacatatgttgctcaccatatcccacaaaaccaccttctatattggccacgagcccatctatctattgacgaatttcggcaccagtcatcgttgcaggtgggcggtctgtcactacgacacctttcataaagttctagatgtctaggcggaatggatggtcaggagggagaaattgtcgatgtttatcgaaggacgaatatttgccaccctttttcaaccaaatgaacctgagagcttccttgcaaactaggcatgggaacttaccgtgaacacaccaggcgcagaatagcccatacgccggtaagtcatgcatggagtactggtaccaaacatgcattctgaactttgtcttcgtagctcgatcatacgtccataccccttcctcccaggcacgtaccaattcatcgatcaaaggctccatgtacatgcccattttattccctgggtgttcgggaattatcaacgacacgaatatattctgcctttgaaagcacacaccagggggagattgattgggataacaaacacggaccaacatgtgtacggggcaacgctcattccatagggattggacccatctgtggccaacgcaacacgtacattacgagcctcttcgtctttctcacggtgaatggcatcaaagtgtttccatgcttcaccattagatgcgtgcaccatcttgtcaggattgtatcgttttccatttttgtgccatgtcatctgtttcgtggattcctctgtcatgtacagacgctggatcctaggtatgaacgaaaggtgtcgtaggattgtcaaggggatgttgagctgcctcttctgtccatcactagagtctacctccatgaacctagacgatttacacttgggacagtactttgtctccgcgtattctttcctaaatagcacacagccctttggacaagcatgaatctgctcatacgtcatcttgagtgcacgaaggagtttctgtgcctcgtacatgctctttgg

SEQ ID NO: 19028 - DNA, 735 bp, Zea Mays
gggagaagcccaaggcgacgcgcggctcggtcaatgcgtaggggacgctgaagttgacggccggtcggactcgtcgttggagacggagctcgcgacggtgggtggattgcctagtgttcggccgccgcggtggagaagaacgagggctcggtctctgcggtggagaagaacgagggggcggcgccaccgcctccgtgattccgggtcccttccctggcgacggcgtctctgcggtggagaaggcgattccgggtctctgcggtggagaatgtgaatgcgacggcggtggaactacgggaggagaatctctatgggttcggtggtcgcggtagagaagaagcccacgacggcgattaatctagggttcagcagctgcggtggagaagaagcagacggcgacgattgagctaggattcggtcgctgcgagcgttacgagtgaggtgagctgaaaaaaatgtgtgctcggttgctggattcgtgggcccgatacacgtaaactgctgcgcgaaatcaacgcgaaggcccatggaccgacacgtggattactgtatcgtaaaaggcaacataagacatcgtaatataaatatttatgtggggactagtacgactgcccagattgcgggaacagaatcttcccgtgggcccggatgcccgaaacatgtgcataccaaaaaagtgtgtaaaccgtaatacgattgagcataacacatagttataattgacgtatataggag

SEQ ID NO: 19029 - DNA, 2065 bp, Zea Mays
tttgcagaggaatttccttaaggtcgcaattatcgagagcttgtctgaacaactgcataaggcgatgatttattctagaattatttttgtcactagctttgtatgtgcaattgaaatcaccaaggatcagccatggggaagacaaaggaggtctctgatcgttcatctctctaaggaaggcaggcttgcggcttctacaggttgggccatagacgactgttagggagaaggaagctcggcgatccttaagtgtcacacttgcagataagtggaactccccaacagttacattagacaggtctaagacgtcactatcccaaagcaaaaggatgcctccctgggttccactatttccttcagcaggcttgaatctgaaattgttgagctttggccctcctagagcatctgctgtgaacctatcgattgttgataatttagtctcttgcaaacagacaaggtggcaggacgtggcagagatcaattcacgcaccgcatcgcggcgtgcctgctgatttagccccctaacattccaagagaggatgctaaaatctgacataattcatggatgaaccccatactgctagcagcacacaattaacagttgttaaattaataagggccatcattgccttggaatagtattctgcaacaaggctggaagctagcagcagcgcaacatatccggagctattcgcaattgaagctgaacctaagatgcagtacaacatctcgaccaaaataaaacccacaaccagcagctcagcgcagccgattgcaaaagggactaaaactgagttgcagtacatcatctaaaaccaaaatacacccggacaggctggcaaggaatcagacagccaccagacgtgctgcagcattgctccttgcttctgcttgcagattgtccatctcatcctgtatttcttctatagcttcacctgcaattcccatcagtgccttgtcaacgtgttcggtgtccggcatatgaatgttgaacagggattccaaagctgcccctgcctccttagataatggtttctggaaccaagcctgaaagtcctggaaagcattatcaaaattaggagttccttcattcgccaagaggccaagtttgcgacagaggtagcgttgtgcccgctgcatgatcggcatatgagggccattagcgagtctagcactacgacgtaccgcagagaggttgaataagcgtcgatgtttagtgttctgagctattgatgcagcagctgtggccacaacaggtgtttctgcaggcatcaattgaggcagcataggtgaatcaagtattgcagcaactggccttacaaagagattgctgaggagagggccctgcgaggtagttggtgccccaccctgcagaacagcagccggttcgaagggagcaccatctgcagaacctgcattagtaacaaaactggtagaagacagtagcttgttgttgcccccaacctgcaacacaggcaacccaacctgcctaggaaaacctgatgacagggaagcatggagcctatcaaacgccagcttcacagggatcagctttgcgcattcggggtttatctttctcttgcctgccatgtcacctaggtctccctcatcaaccacgggtcggaccaggcttgttccccagcgttggagcagcgccgcctttggtagacgcagcccgcacgaaacctgccatggggagaaattgcagcctgcattgtaggcgtcggcggttcgttgttgttgtcgtcgcgtgacttttggatggcagagcagcagctgtctacagggagactctcccgagcaggactccgtgggggggtcgttgattgtgtacgtcgaccagcgccccggggtagatggcgcgtaggctgcgcccacgcgtgccgtcacgcagctggtgcgtgagcccagagtgtggacgggaacccatgttcgccacgccacgatctggggtgccgacgtgggacgcatccgctggcgtagcagcagcttggcgaggttgctggacctgccttacacctccagtcccgtcaccggacatgtacctcctggaagtgtagtgtag

SEQ ID NO: 19030 - DNA, 458 bp, Zea Mays
gtggtaccaccgctgtccaaccgtgaatcacacaaaaatgcatgttgtgcacttgaacatggcgtgctggtatgacgttcgccggtgggagcaccgcttgttacccagcgatgtatgcctccaacaacgcatcatcgatgacatggagaacttcacgcatattgtggatgcaaagagaaacaatttgctccataccattttttagataatggaaatatcatctgaccttggcctcaaatgaggttacggccaattattacatctagcgtcagcatagtgccaagacccctcctatgactataccaaagaacaccaactatggagccaaagctactacaaagataaacgcaacgaagacccccatccaaagttgctgaagaactgtagtagcaccctttccacattacgacatgaagacttaattaacgcttgatcctcccttctaggttgaagctgtg

SEQ ID NO: 19031 - DNA, 636 bp, Zea Mays
ccaggaagaagctctatggcaaactcaattccgctcaggtggcatacctggtaaatcttttgggaacacatccggaaactctgacataaccttgatagtctcgagtgaatctgcctccttgctatcaatagccatctattgacaacctcctttccttggctcaggtgagactaactcagccaccacttcttctcctagtggggacatcaacttaattgtcctcttatcacagctgataattgcttggtacttatctagccaattcatccctaggatgacatctattctctgagtacccattactatgaggttagcgggaaactctatcccccttatttccacacttacattcaagcaaacactatcgactcgaaccttaccaccggctgaatcaatttgaatgggtgttgacatggtagttattggaagattatgcgcttctacccatgatgcagtaataaatgaatgtgttgctccagtatcaaataatacttctgcaatattttagtcgacgagaaaatacctactatcatgcctggtgtttcttgaactgctttagcctccaaatggttcagtctcccatggttgtagcgtgtctggacgtggttgcctgctcctggctgagacacattctgc

SEQ ID NO: 19032 - DNA, 452 bp, Zea Mays
gccacacaacacagtcaaataaaatatagagccaaacaaaattgtttatgaaggttgcgtataatgtgacttcaggggcttgaacaacccaccacaatccacacgagtacaagctctagtgtctggtgtcaacgcgtgtgtggccatcagggctacgacaacacagccagccttcgtaattaatgcaataagcacaattatggctcggtaatcggggtacacgataagtccatgtaatgtgcgcaacaggcttaattgtgactcgatgatcacaggagacgtacagtgcctgcagggcatgcgaaaaatacgcgactcgacaatggcagtccgactcaacgggagcgatccgactaagcaagaatgcgacatagcaatcacatgacgcaaccaagttcgaacgacataaatactgtgacgtgttgccagggcgcagccaatgcttagccaat

SEQ ID NO: 19033 - DNA, 864 bp, Zea Mays
gcagaggacaagattggacctgaatcaagctagccacgacgaggcccttttcacggtggcggaaacccgatttgggggagatgagcaattcgtggtctctggtgaacaattggaggcaagtgctggtgcttcggatgggtaattaccctacagagctcatggcgtgctcaatttataggtcccttgagcggtggccagtgaatttgaaggagacgcgcggcggccggagagaaggaggggcacgagagcagtgattcgtggcaattgcggaataagaagccacgacggtcactgggtgacgatcacatctcacggcgacgtgtctaatggcttgaggtgtggcacaatcgtggtgaagggcgcaaactccagtgacggccgcaaggccacgttgccggtgcaagtggtcgaggaacagcgaggccacagtagcccgaactcatccgcgacgtgatctttttacggtcgagcccaatctacttccccgcggcacgaatcacggtgaccggcatgaatccgagcgcacggttcgccggcggcaaagttatctgatcctgggatatttttagtattgtaccatcagaaatcctattcagagctcctgatagccagatttgtagtgcccagatcatagatttttgtataagaacttgctaatttgtctgtagcaaacttgtagcccttcatactagctacaattctgctatagcaacaacccccaatcgagcaacagatcctgctcaaattcgagccaaaagtctggccaatatcactggtgacctaatttcagtcagcaaagtgattgacagcacaactttgggcttatttttctccaatttccattcagcaccagtgcttagtcac

SEQ ID NO: 19034 - DNA, 498 bp, Zea Mays
caacacacacacacacacacatgcgtatgcgtgccgtggatggaagggcagggaaaggataggccgatcgagaggacgcatgcatatgcgcggtggcacgtacgtagctagcccgacatgcaatattgcgagtgcacgtacgtagggcggcggcagccttagggttcaaggaaacgggcgataggttctataagctagcccgatcgatgatgcatatgcagctgcgcactccatacgtcgccgttaggattaggatcaggaacaccgctcctgtctgttcctcctgttcaatgcaatgcaatgcaattcaatcaggcccgcccctctctctctctctcatcttatgtctgatggggacaccaaggacaaaactctctctctctctctctagatctctactctcccactgaccgaacaaagtgtggggcacaaccagcagggccttgatgtctcctagtaccatcaaatacatgcagtactctcctcctcctacaccac

SEQ ID NO: 19035 - DNA, 471 bp, Zea Mays
gtagaacatagaactctgtattctttatgctgtgggatcacttactcgttttgttcagacagaaacatgcaatttttgccttgaatctggacaaccgatggagggtgcagagtagacagttgacagtagcacagtgtgttggacagttggactgcaggccagctgtagcctatagctgtaggagattggaaataagcaagcatgctgcacagtgtagggatcgtcgcagtccaatctcctgttcgtctcgagagaactgcatgcatgcgcgtttcgtcaagatcaacgcaagtacgcaacgttggctctgacgcggattttaatcggtgtcccactagctgtgtcatgcatgccacgcggcagttccatcccccccaccaaacacacacacatgcataccatggccctgcaaggtcttcagaggttctgttttacaaatgtactaactgataagagcaatctcagattctc

SEQ ID NO: 19036 - DNA, 788 bp, Zea Mays
taccgctctgccaagtgtaccactcagggaagacacgatacaggatgccccgagcctcctcgtgtagcctatttgtctcaaaatatgctgtgagcattgacctatcagcacctggacggttgacgactcgctcgaccatttggcgctcgtgaaacgccaccatgtgcatgtttggaagatggagctgcaactgcatcacaggtggagagttctgactaagctcaaagccgtatatcctccataaggcctctagaggggtcaccaccttgcatctctgtactgcttgatctcatctacatcatcatttgccttgctcgcatctctcataacaacagacgcacgatcatggcctttgtatatgtacttgaacaggtatttaatagccttgatgctcccgcacgcctcaacattgatgtgacagttgaagagccgaaggaggtaagggttgtaagggacaacccatctattgtccaattcgtatcctcgaaccttttccttatgcccatcgtcacgatgtctgtaaataggatatgaatccttcccctgcaaagttgcgtcatagaaaggccgagggtaatgattcttgcacgatgcacgacccttagtgcatgggcagttaggatttagcgatccgcactggccatgcatcatatgcttgataaccatctttcgtagtttagggtactttttgtctgggatctcggctgagatcaaaaggtcatactgctcagggcacgtgagcttgtacttcctctgcatgattagtagaaaatgggcatggggcaaac

SEQ ID NO: 19037 - DNA, 659 bp, Zea Mays
cggggtgttcaaggactcgactaatcatgaattcgtcgccgtagtggagactccgctgcgggatcgcgacatcacgggggcaggagaatcttcggctcacatcgaggtaaatggtataccatcctctccgcttttcgatgggcatcgcgttggggggcgcagattaagctttggggccttgtggtgtggattggcgggcggtccggtggtgggctaccgtgcttggggcgtcgccgccgtctggttgttcggtgagagagagaagacgaaccgtgagccgttagattagagtcgacggcccggattagatgccgcataccgtttcgattagataggattcggaccgttggatctggcgcgtgcggatcagattagatcgggatgccgatttgatcgcgtccacccatgaccgtcgattggcgatccgatggtggggaatcggatctaaacttcattaaaccttggccgttgatcttgaatcgtgcgtatcctgctccgtaccggttcgggggaagcgcagatgtaatctgggccgccggtttctaatcgggcggctgtgggcttctaataccctttcggcctgacacattttcttatgagtccctacagtttgttgatatcaacccgcaatccaccctgtatagtgctttgtgtctcgg

SEQ ID NO: 19038 - DNA, 345 bp, Zea Mays
tgaagttaaaaccactacgggttaatatgccacacactgaatagtaagtatttccttattttaaataacattctttccgtataactggcttgaacaactgacggatagaaaacatttaatattcaacaataaaataccattgtgtcattgtgtggctggattggattgctctgcggctgcgacaaaaagtggaaccaaccatcattgcatgcatgcagatgcttgatgcttttggtcatgactcatgagagagaatggtcaatggtgtgtgtatggctgtgcacatgcagatgcacttagtctgttggacgcggggacctgaattaaccggttggctgttgtgtg

SEQ ID NO: 19039 - DNA, 524 bp, Zea Mays
gtttgcacgtacctattttaggttgtcggggtttgaaggtatgtagtcgttgctgcctctggtcactgccagaccgtctgcccacactggccggactatccgccggagatctggatcgtccacgcctttgggctggaccgttcacaatatgcagaataggggccctggccccgccacctgtctgcgcctgcccctagtgttggaggacttgatggtgatcttcagcatctctcccccatctgtcatctttttagtaatgacttccctagagagaattttcctattttcatcgaggacctgaggatcgctaatgaggataccctttcccttttctttatcgaccacctctggccgaaccaagattttcttaccatcaaaatctatggtgttaatagggaagggctatttatccacctgcatttcttaaaaatttaacaggccttcgttaatggcctattgaattcgcgaatgaaatacattgcgttctttagtggcatgagaaaacgaaatataccatttaaaat

SEQ ID NO: 19040 - DNA, 531 bp, Zea Mays
cgccgagaggccctaccgctagctcaagggttcatacctcgagttcaaacgagtcagcgattcatcgatgcaatcgccccggtcacgacgctatcttgccgcagagttccgagcgcgtatcaacgacctcgctcagtcccccggcgactagcttcttctccctgcgtgtacacggatgcaatggaccttccaagccgatactcgaggctggatcgacgacgtaggcaggggtggccatagcgacggtggcgaccaccgacttgtcttctccctttctgtcttcaacttgtgctgacagcatggagagggagcatagatggggcgcgtcgagcggaggctgctgtggagggagctcgagggttgaagggagagtccgcgcagcgcccgtatttatgcctgagaaggaagggatattacgattcctgccagcgcagatcacggattccgtttggtggtcggcgagtatatcacggggtgcttccattgaacttggccgcggagtccacgacggaggagatcccagtagcgttg

SEQ ID NO: 19041 - DNA, 436 bp, Zea Mays
gcggaacgggcgaccaagtctctgacaaacaacctcatcagagactggcataagagaaggtcgacccaatgatacgagcccgcatcagcaggacaagtcaggtcatcaccaaactacgtttgggcctcgggtacatcgttgaaatttctctgacagacgtcagacaacacctcgccacatagtgtctcatgcgaaccaccactgacggataggactagtcaatcctagtcgaaggaatctcagcatcgaaatgtccacagtgactaggatatctggaaagatgtaacggatacaccataccgggtgtatgcctatgcacgacggcaagtgacgcaggcccatgacgacaggcaaagctacgctacatgctactgtgtcatgggctaacccacaggacccaccgagcgccagtacgaagatatcagcagcagactca

SEQ ID NO: 19042 - DNA, 377 bp, Zea Mays
gaaaagcctaggataagcaagtttatgatgggaaataattccatgttgagtggtaatgcatctgaagattgtgtttgactcctctctttccttgacgaggttgatattttcttctccggtcttgagctcattgattcgcggtgactgcatatcatcgggggtgggggaatgtggttaagatagatttggatgagataggctacatgatgtaggtctaaagttcatttgatgttaggtgggaatagacagatttatgcaatccatcatgacactattggttgggttagctcttatgttcacggttgagttggtctaatgcactaattttaggtttaagtgcatgaggagagaacaagatttataggagtaggatccag

SEQ ID NO: 19043 - DNA, 521 bp, Zea Mays
caagtccacgagccgagcacgggtgaggtgcacaaaggaaaggcatccatgagttacgataggaggagatcgctagggaggaaggcgagcaaagggaggaagacgaacagaggagtgtgtgatggccgccaaggaaggaaaaaggcagatgcttaggcacaaaattttggtaagcgtaaccgaacccaaatgccctcatgctctgttttatgcgtaggaacgagaaacccaagtggtgcctgaaaggtgggctccccgcgagctacctaggaggatccgccgctccaggataccgccgcctcggatgtcgagtggaggactgcgcgttttgttgggcgcaaaccgcatcggacatagcttcgaggcagcacgcgacaggagaagcgacggcaacggggaaggacggttaaccacccagtcacaccacttgagcacgaaacgcccaacgagccgttttgcatcccatcaagacacccacgccaagcagcatcatgatgacccctattttaccgtgctaccct

SEQ ID NO: 19044 - DNA, 411 bp, Zea Mays
cagctggcgagtggcgactgccgtcgattttcccgagaaccaaaccgtcttctttctcgtgtttggttcgcatcctcgacaaaatcaggtgcaattggtagtacgggaaagctatgaatatatggggccaacaagtcgtgaaatctgcaccggtcgtcgtcgtgttggaaagaaatcgcgagtctggcctccagcggccggtacctacatcgtccaaaaaaggaatctatttctaaatcttgtccaaatcaaactatattatctccaattcggaccataaaaaataatatccatatgtatagttacagacaaaaataataacatattctactcgtatatatctagtatcttggtactgtttctggtcaaacttttaaaaaagatttgattaaaaagctttatagatctttt

SEQ ID NO: 19045 - DNA, 337 bp, Zea Mays
gttgcacttgtgagattgtattgacttgtaatcgtgttggcgtggtacttggatgggatggggacctcgcttcccgcgggcgatatcgaacgcttctggcgcgtactcggctgtgcccttaggcggcttttgttcgactgtttcagatagtagagacttcgcacccttagggtgatttctcgcgcttattatgcatgttcggctgcacccttaggcggcttttgctcggacgtgtcttgtagtaaagacttcgcacccttagggtgatgttgcgcacttattgtgcatgtccggctgcacccttaggcggctttttcttggatttgtcttatagtaa

SEQ ID NO: 19046 - DNA, 604 bp, Zea Mays
atttttgtattaaatactcaatttctaatttatttatacaatttaactaggcactggattgggccccattttcggaaaaggccagggaccgtagcgcaagatatcctagactcagagcatagtgaatatggacggcgggttgatactaaaataacatagggtttcttttgtacaatacgctagccgaaggggtatccagggttcctggtcgtcggatcgggcacgaacggcccagattagatcgaccctggttaagccacccgatcaagtgtcgtccacacatctaggatcttacggtctggatcgcatctctatttcccccaatccacaccatccaacatggatcggccggccagggacccttcttccctatcccccaaccatggtcgttcattctaaaatccacgacaatagaatcttcttcctcctagtcgaacgcccagatccgcgacaccttcttcaacctccggcgcccagagcccctgacgcagtcgtccgccctccatggtgggacctccacagtcgccgccgttctccactaagataccggtgactcctaggttccatacgcgccataccccacgactgtcgggtgacaaactat

SEQ ID NO: 19047 - DNA, 579 bp, Zea Mays
ctaagacttaggttacactcagggtggacggcgggttctattttctattttccaagggactcttacgaaaatatgtattcgcgaaggggtatcgagctaccagggccgttagattagaggtgaatggccatgatacaaacatgatgtaatgagtggattggatcacgatgccattagagccgccaaatccgaaattaagggttcagattttaaataaccgcgatcacatcttaggcgtccacagccggatcaacaggcaccacaacacaacccaaaacgatacttaggttcaatctcagtcgttaattccagattctacggtcggcggctttcttccctccccggtatgccggacggtggcgcagagctccccctcggcggggcaccatggccggaaaacccccaagggctaatggcgcattataccaaaattcgctaagcgcaattcgtagtctagacactagcgaactcgtgaagggaactctcactggtgatcgaagtcgtggcgagcctgccctcggcgcgccgcatttcttggtgttcgagcacaaatttcggccaccacagcaacgatctccc

SEQ ID NO: 19048 - DNA, 432 bp, Zea Mays
cgaagaggttgcgcccgaagacttgtccgctcgacttgttgtattaggcatcccatcggagggcgtgaggcggcatgtgcgcattgtttggcgcaggcgtaatcataccgctgcacttagacgtgatcgttgtcttatccaccactgtgctctactggtacaacgtgggttggcacgcgcattaaatgcacctgtcccatgcccattttcgagcacccttgtcctatctgctcgagaccggctcgagcgagacggactgagccgaggcgtcctcgggcgaggcggagccccgctcgaggtgggaaaccctcggggggtgtctcagctttttataggtggctcggctatcacccgtcgggagtttagtccttatttctctaggtgcgtttgttaagtggtaattcaggtgtccctaattatcgcccccggcag

SEQ ID NO: 19049 - DNA, 688 bp, Zea Mays
ctcggggtaagtggataacgtctcggggtagaaagatcatcgccttcgttgagctggacaccaatccagctagccgccgtacctcccccttgttcaccgatcgctcgggtaggatctcaccgccgttgatccctcactgccgtccgccgcgtgtccaaacactttaccacgtcgcggctaactgtgctacgcacgttcggtaatcgccggaggagcagccacggtaatagccacgttgcgcggccaccagtgactcacccagttcatacctatcacaatccgccgctcaaattcgttgtactcatgatcaatctctataaattaaagccaccataagctccgcaaggtcatcacacacccatccactaagaatcactagcaatcgttcgtcagagagcttgaattttggttttcccctaaccaagtttccgccaccgcgaagaacacctcgtcgtggccagccacttctaggtttgttcatgccctctgctaccttgtttcagcattagtgtgcttccctgatgctcatccatccacccaattgagctagaccgccaccaatcaccgggaacgcattgttctttgggttatccgcactatcatcgtggtcagaggcaattaggtagccattcatgcaattgacttaggggaaacactggttagggcgtgaattcggtttcgaccgaag

SEQ ID NO: 19050 - DNA, 726 bp, Zea Mays
aggaaataaccaagagaaggtcgtcatagagactgggcacattgcaaatctgcggcggatgtgccttgtggccaggcagacgctgcccgacatacaagtcaagcctacagctctgcaacgactcgtttcacttcatctcatcagtgaaacggacgattattgtccttccgccaacgtcatctgtaaagccaacccccaggacgacaacgagccggcgccgttcacgagcctccaggaagtctcgctgaatgctacggtacccgaaaatttaagggattcttggcgtaatgctgcaagggaccatccaaagaggccacgaattctcttcatccaacaccctcaccgtgcgggataacccgtacgtactcctgtttaacttgcttattactctaattatattaatactgctcattgttcctgtcactttgctgcctcttggtcgctaattacggcgaaaccgctttgatttcattttgcagctatatgttcttcgtttgaaacctccaagttcgatctgtcactttctccacgcagtgctcctgcttcttcaagattgattcgtctccttatatattatacttgcctccaccttcattcaaataatgtttgattgtattctttttgtatactgcggttttgtatccgttgaggtaatttttcaagctgttgagcactaaaaatagcacgaacggtctggccctgaggccggacggtccgtggtcctga

SEQ ID NO: 19051 - DNA, 575 bp, Zea Mays
gaacaaaacccttgcttatcatttctgcaagatgcgcatatgcacggtcaacatttgccgccttgcacaacccatcaactagaatgcgataagtatacaaatcaggtttatatcctttgctgatcatttcaccaaaaatcttttcagccatttgcatattcagcttactagaatacgcaccaatcagaatgttgaaagtgtcagctgttgcagagtaccctttctcatccaacttctgaaagagtaggtatgctccatcaagatcaccattcctgcagaatccatgaatcagcgtgttgaaactaactgcatcaggaaccaacccatcttgacacatcctgactatcacgccagaagcctcttccagttgattaatcttgcaaaaattttctatcagtatgttgtaagtaatagcatttggccggcatcctttaagtatcatctcttcaaatgtttcattgacttccttggctttgccagctttgcagagaccattcaaaactgagttgtatgtgataacatcaggagcaatgccatacgtccacatcctttcaacaagctgaagtgcactgtcc

SEQ ID NO: 19052 - DNA, 665 bp, Zea Mays
caaagcatttttattccctaaaatgaacacattatcatgattatagttgcatttatttaatgtgcatagaaaaacaatgtaataacagctttagttgagatagtgcaacaattgggttatgattctagtgtaatatttttcagatctactaaccccttgatacaagatcatgccaggaatacttcaaatcatggagttgcacaataatattggttggttcaactaaaggcctaatctgcaaacgtgtaagaaaaggtatgagtattttttatcatcatacaaaacatagaacaaacataaactttctgcaagttgttagtagagccacctggagaaaatatgcaaaagtaaatttgcatgccagtatgacgacccaaaatatcacgtatctgcttaagaaaaaattgtcacaaacatataacacaacacacttgaaaacaataagtgagaactagtcactattcagagaactgatgtctggtgagtatataaatgacggtatggcaagtaatcaaaaatctactaaatggtaatatcttggtcaattgccagtaactgttaaaggctggaagtaatcacactgagcaattgccactaactgttaacatcaacatgtaaatgaaccaacaagggtatgtcaagctattttaacgcaattccaaatt

SEQ ID NO: 19053 - DNA, 528 bp, Zea Mays
ccggacatgcacaacaagtgtgagacatcaccctaagggtgcgaagtctttactatcagacacggccgaacaaaagccgcctaaggacgtagccagatacgcgccaaaagcgttcgatatcgcccgcgggaagcgaggtccccatcccacctaagtgccacgccaacacgatcacaagtcgagacaatcatacaacaagcgcagcacgcgatgtcatcatagtttacatacacaaaacgaagggcccgtcggccacattgcataataatacaaatcacattttgtttccctccctctctattgcgaaacgggggagggcagtgttttcactaactatcgcaacacgagagcgaggccagcaaacatgctacatcgtctcagccttcagaataagacccacctcccagaaattaaacaacatcatcttcaactcttcgccttcaaatagattccacaaatcgccctccccaatacatgtcctggacatcgaggatagtaaatcgcgttggctgcctcgatctaatcgaa

SEQ ID NO: 19054 - DNA, 348 bp, Zea Mays
cacgtgcattaaaaacaattatatgatataagcatagttatggcatttgagaataaggagttagggacaagcaaagcaacgtttaggatagtctacacacacgttgcatcaaggggtggggtggagggagcgcaaacatactcacctggcgataggaattaaattgccgaacaagggtcagcccgtcagagttactcatctgaacttctgaagcattgatgatagcaggcatcaactccaaatctggcgagacatagtttcataggctactcaaacaaacaagaggtcaacgattggagtagggacataacatgagaccaaaactgaatacttctgtcacacaaaatt

SEQ ID NO: 19055 - DNA, 554 bp, Zea Mays
tggacatgcatcctatagcgtctgcgatcaccggttacacagagggtgtatctgttactccccccgcggcatcgagggcacctagacatattgatgagcacacaaaaatggcagacgtggtcggcgcacataagcacatccccatgagacatattgggccgcatgaacaggacacacctcatattcttcaaagccatgtaagtccttccaattatgatactattattttcttacatacttttttgtaatgttgtacctatattacgttaggattagtcgctattgaatcgtaaatgttaaatttctgtgcacagccggacaatattgatataagattgatacctaaagtcggtatgacatttagtaacgtggacgaggcgtataatttttatagtcaatatgcatacgaggttggatttccgttgaagaaatatagggagcggaagaattgtaaatggttgaattgttcaatggaaggaaagaatgctgaaagggtagctggaaatccaatgatacgtaacacatgttcaaagcgaacacaatgcaaggctggg

SEQ ID NO: 19056 - DNA, 847 bp, Zea Mays
tcggccgtagttctcgggtagttgtaaccatgttgccagttgttgatccctatccccgagtataaagctaggctcgcccctcggccaactccatcaagcttcgggttggaagaacgtcgtctctcgcgaggataccgaagactggggtaatggaaaatcgtcgtcaaggttcgaactcgcgaagtgccatcgcctggggctcgaggagttgtgcagtcgcgtcgcgggggcgtgttcaagctgatggggggaattggaaggcagtactaaacctctagatgaccttaatttctcgacggtgtgcgcagatcacggagaacccgcctcgcctcgcaaaccagccacaccaccatctccaaccaccggtaagtcgcttggaacttgctctattggacctccgcctcacatatccgtagtttcagacgccggcgttccgggatggccatcaccggtgtgggcaccaccgtgggcgtgtgcgcgccgccgtgaggttggggtctgaggttggggatggtgtcataaccgttggatcgatctctgatgctccagatttgatggggtcggtggacacccatttgcttgatctggtccgttgatggaatcgggcggatgaagttcttccacgtccggctgaatcttgggccattgatctctgatcctagcgtccagggtgcataccgattcgtaataaacactgatctaatccgcatcgtcaccttttaatcggacgattctgggtgcaagataccccttcggtctgtgcattttgcagataagccctcgagattttaataaaacaacacgccgtcccctgtcagctagaagtattcacagtcgggtccctaga

SEQ ID NO: 19057 - DNA, 425 bp, Zea Mays
aaaaattggagaaaagcaagcccaaagatggtttgtgagtcagccaaaaacctgaattttgatattcagtgacatgggatgaactttgggagtcttttcgaagatgatccagtaagtgtttgagcatggttaccctagcaagattgtagctggtttattaggctatcactttgatacagagagttgattcagtccttatacaaaatctggagcaaattggtaccaaatatgctctgtcaggccaactgaataagctgcgccatggtacagtgaacgggatggatcgggttcagataacctcgccgccggcgacctgtgcgcccggattcgcgccgacgtcgtgattcacgcccgaccgaactcagataagcactcctcggtataaagtatcacgctggagataaactccgaccattgttctcacc

SEQ ID NO: 19058 - DNA, 489 bp, Zea Mays
ccggggtgttcagttcgctgatgtctccgtaggagcgaggggtggaagaagacctgggggccatagatctcctaactgacggctctgattaggacaccatcgtccctggccattctgtgctagatgggcttgtgtgcgccgtcagatcgagagcgagcgagtgagattagaagctggaataccctttcgatcatcgaatccacgccatagatctcggggtgggcggttctggtgtaatcaggacgtggccatccctcgaccgttgatgcatgatccgagggccacaagtgtgaatctgttcactttaagttagattcagtctgggccatccggatcagatcagacggctagaattcggccatacccttcggccagaccattttgcacaacaatccctgtgttagagggaaaacaacccgccgtccctctccggttgaatctaatcacggtttggtccctggattcttatgaaacgccccctgaacgttt

SEQ ID NO: 19059 - DNA, 279 bp, Zea Mays
cataccctttcgtattttgatgttggttcatcgatccatggattaacggcgcaaatcaaatcaaacattacccattcgttgcgttaaatcagaaccgtagttataaaatcgtgcggtggtagtcgcacgccagttcggccttatgccgatctgatccgggccctccaaacaagatccaacgacttagatttcaccataccccttcgccgtccacattcttataatatagagccgggagcaaaggtggccgctcgcgctatccacgtctccgtttatttt

SEQ ID NO: 19060 - DNA, 905 bp, Zea Mays
cgatgacgaggtacacacaaccctgatcaatcgcctccgatggcgatctgatgttcaccttttacctttggttcgtattcgctgagcatccgatcttcttcatctatcgaggccagcattttttgtttctttttttttcttgctcggtttgctttggatcgagggacctggggatccgccgcccttcttcgtgcggcgtcatccagtttttacccctcgaatacggcttgcaggcgcgtcctagccatctcgctctctgcataatcctctgcgagacccgggctcgtatgccacattcgtcgttgtcaaactaaacaaaaaaaataggcttttgtcgcgaagatcccagcagagaggtgcgctgatgcctccctaacaatcataatcttcgcagagaaacgctcatgatccgtggtttcgtggatgtgtgatttggatttttgttccattacatctgtttccacggcgacattttcatgattactgcagcgaactgaacgagggacctatggatggactgctctttgtccgtgttgtgccgtccaagtttgccttcggatagtaaaaccagcaatctggtcacgagatctcgcaagccttttcatgtttgtgggaatggtgtgccaatttgccaaattttgggtttctatcgttatcttcataggtcgtaattttgccaggatatagcgccggaaccccatactgaggtcgtcgttattgcagtcataagcgacgatgaaactttgaacagaccagaatgttcttgcagtcacaagtggttgtctaaatttggatattgaacagaattacttccagttgaacctaccgcttcaacaattggcatacttgcctgagtggctaacgatccatgcaatactgcactattattaattggagcccgagac

SEQ ID NO: 19061 - DNA, 453 bp, Zea Mays
agcaatgtcgtcatagtttacatacacacagcgaagggccaccggccacattgcacaaataacacatcgcattttgttgccctccctctccattgcgagccgagggagggcagcattttcgctcactaccgcaacacgagagtgagggcaaacatgctacatcggctcaaccttcgggataaggcctgcctcacgaaaattaaacaacatcatcttcaactcctcaccctcaaaaagattccgcagatccccctccccaatacacgtcccagacgtcgaggacatcaaatctcgttggccaccccgatctacccgaagacgggttcgttccatccccatccgtcgacgccgaccacttcacgacatctcgccaacattatgctttgacaccacctttcgtcggcggtgcttctcggtcatcgcaccagccgggggatcagacgcttcgcgcac

SEQ ID NO: 19062 - DNA, 661 bp, Zea Mays
aaataacataaaatggttgtccatgtgcgagaggagtggtgggaaatgcatatatgcatatgagggtggagtggtggttgtcctagccgtaaaggactaatggtgatggtggtatttcacctagcagggcgggccaagtgtaagtgttgttggtgtggtcgaagcgttgagtagggaagttataactagagctaacagagtagtggctatcatcatcaacaaaaagcaaaaccaatcgattcaatcacttctcatctctcgttgtgattgaagtgcttcatggtctaaatcttgtgtggcatggctaaactaactctccccagtgaatccccaacccaccatacaactccccccgacataactccatacaacatcactaccccactaccatatgttccaccacctgtggcattatcatcgcttccatcccattactaccatcatcatcttctccgccatcacgtccactagggttaggtgtgctatcgtcactcccaatctcttcctctttatattcattagtgaatatgaacttttccctttttgttcagatggaccaagttttgccttcctcttttcaaggtgggtgtcaccaatagttgtatctgctcattcctcaacatcctctgtgtcaacatgagaacgggcaatggatataaac

SEQ ID NO: 19063 - DNA, 586 bp, Zea Mays
ctgggctgttgtctgccttgccaactcatcactccaaatggccaacttctagcatcctttgaggctcgacacaatgatttggtttggtagtctataattcatgtcgctcgacatcaagtacgacatggtgctcctcccacctagacacatggctgacactcaggggcatccagacatctacccctgtcctcctcgccgtaggaggcagagacggaacaaccgcaattgcaccgcgagcaacgccccatgcctagtcgacgctcctaggctggctaacgacgaagactccctcgcaagggacctgacgaacgtcagcatcacgtccggagcatcgacgacaacacacgtcaccctagcaccgactctactggctcctccccctatggtgtggggagcaccagcttcgtcggctccccatacactacgtcgagtcgcgcaatctttgtcgtctcccccacctgcgagttgggaggcgctagcttcatcaaggctagagatgttggcttcgtcagtggctaggggagaaccatcaatgttcagccctattccctttcaaccgagcttcgacacaagcgccttcaccaac

SEQ ID NO: 19064 - DNA, 471 bp, Zea Mays
atgaaccatgtagttcttatttgcttgtgcttcctccttgtatttttctaactgctctttcaactggaatagctcatcattctcctattggtgaccaagacaccaagtatcaggaaatcaacaagttaatacacaataagctgcataaaataatcatatggaagtaattccaataaaaaatctagcattatttgttcagaaataacggcaaaaggaatacatcagcatcaccactccaaaactaaatctggcgcattgcttctcccttcctgttagtttctgcagctcattctcaagtttttgtgcaagcatttgtacctcttgtgcaaggtttccatttctctctcgttctgtagttgtagaacagagctagaacttgtagagtcagtctggagcagtagcaaccatgaggaagaagtgatagcgacagtgagccatggccatcgactttcgaggcctggccgaacgtgc

SEQ ID NO: 19065 - DNA, 316 bp, Zea Mays
ctaagatttcagggtttctttagtaaatatgcctaggcgaagaggtatggtttgatctctggcgttggatcagacttggacacgccagattagaacgatgtatacgcgaaccggtaaggaattgcgtccgttggatccgccagatgcggctcggatttaattacccccaattccatcctatccactggtgactagatctacggtcaggatttctcgttcgaaggggtaagctatgccctaatccgaaccgcagatcgcacgatcgacggcacacgctgcctcttccttccctcgccgcgcagctacggtggagact

SEQ ID NO: 19066 - DNA, 929 bp, Zea Mays
aggaaataatcgaaacaattataatgacaatgaggtgatggttctgaaaagcagcactatagatgctcgattaagtgttagcgcagacaatgacaaactaattgctttgcagggctggctaacaacgtggtgttgacggcatggtagtttaaagtagacgacatgctgattactctgaaagtttgtagtcagtggcagagctccgtaaaaataacgccccaggccactctataaatataatgatgtactactcgtcttttaattttttgcactttaggggtagaaacatttaaaacaattcagtggaactgtggtagatagggaaagagaatcagacattcaggaacaattactcacaataaaggagaatcacgggcacatggcagcagacagtcaactcagcacacagcgctcgccgctcaggtggtcgttgcccattggccagggaggtgcgctccgcactcgactatgaataagaaaaggaagggaatcaggttgagaaagttatatagtttggaagaagatgtaatggcagggacagatttgggtggtggcgcggcgctagtgcaggcagtgcgcgtcattgctacagggtcgcagggacgctggaggcaggctggcggaggtggaggtcggactggcagtggcggatgcctgagtcagagcccgccggaccgactcggaggttgctgccttgtgctcttgtcggattcgtagagcctgaaggcgtggagagcgatagaggactgaatggaggcggcacgccgctggaaacataggaaacgcagccgcgcatgtttacgaaataattggaagaggcgactaagggaggctgccagcgctaggctcaatcggtgcaagcagaaggtcttttgggccacatttttgggctaaaatatattttaggctagattttttggttaaaaaat

SEQ ID NO: 19067 - DNA, 327 bp, Zea Mays
cccctctatcacaaattatgatgtccactctctttgaggagatggtaaactagtgctcctcccaagtgcaatggaggccactagcctaggccatggctcttcttgatcggccataagaccccatccaggtaagtatgtttcaaggccgcacctctatgttcctttattgcattacccgctcgttttccctgcatgattagccgatgcggcactttccaatcggctaaacacatggtgcattcctcttgggcttgccttatcaatacgtataggcctgcctcggcccacctaggaaaagagccaacctgtggcccttccaggttccag

SEQ ID NO: 19068 - DNA, 1142 bp, Zea Mays
aggagctccggcgagctagcaggctggtcgattggggaaaggactgacgcccttcttcagtcgaaaccgaattcacgccccaaccattgattcccctaagttaattgcacaaatggtgaactaatgtggtctggccacggtgagcgcgcggatgaaccaaagatccatgcgttcccgacggtcagtggacccctagtctaattggacgggtcagcaagcatcgtagccatgtgagaattcttaaacgtgggagagggagggttggactgaccggagtacggctggccgcggtgaggttgggcttcgggtggcggagaacagatttggggcgaacgtgaaattggagagctatggggagtaatcggagctacgcgtgggttctctggatgcacaattacctagcggaactggctgaggctttaatttatagggagcgacagcggcggcggtcaattcgagcaggttgtgctagcggccggagaggagaaagttcactggtgcgtgcgataggtggtgaacatcgtgtcaaggccttaggtaatagaaggacagtgtgtggtaatcaactgcgacgtggtaagatggccgacggcgtggcataactgcaaagaacggcggcacgccggtgatggccgtgcggccacgtcgccggtaagtggaggagcgaacgagtggccactgtgctccaaatttatccaggtgagatcttttcagggtgagcaaaatccacacggccgcgacacaaatcccggcaaagaggtcgccggcggtgaacatccggtgttggcggtcttatccatatccgagcactgtaccatggcgtttcttcagtcagtcgacctgacagagcatcttggagctcgatctactcctgattttgtgtggtgacccgactagctctctgtaccaaaactatagacctatagttaatcttcaactttgccatggatcttaccataaaatagttaccgaatccaactcaaaatcaggttcaaagtctgtccaatttcactgttactggaatttcagacttcaggcagtctgacagtccaacttcaggcccaattatctccagtttttccttaacaacaatgctcacacctttaagcaaagttgttctcctatgattaggctataatttt

SEQ ID NO: 19069 - DNA, 452 bp, Zea Mays
caggatcctagatgaggcaatggttctatgttaagaatgatttggttgagaggaaggatgtgaaggatataattcagcgtcccatacaatcacgcttcgacatcagaaggccttcgatcgtgaatagtgataagtctcaagcatgtctggtggccttcaacactgtgtgcagctatattggcaccagagacttggttcaagagcacatagccttcaaagtgtggccccttgttaatgaatgggaaatgccgaaggaaaccactgctagcttgagcgaaggtgacctggtttatctgaaatatacctaccgctacaaatgtcagttcggcgagccagaagatgaatggctcgaagccattgaggtgactagtgaggagttgctgggggcttatatgaaggctaaagatgaagccatgaatactgtctttggtgcccacagaaagagaaggctg

SEQ ID NO: 19070 - DNA, 301 bp, Zea Mays
atgcttggtttaccatatttccgcctggtcttagccaagttggcctcaccggagtctggccgcaccccgcatcgtgactggccgatttagactcacgctgtgcccctgcgttggtctatagtgttccccttaccctaccgaaagcaattccaggccttagctcgctcgaaacccctccccgcggtcgggattcctcgccggagttgctcgacccgcccagagcatctccccgtcaccgtccccccttctctggtcccgttctcacggccggagtctcgctagtgagttcgtcgaaccttcc

SEQ ID NO: 19071 - DNA, 280 bp, Zea Mays
agataggataaggggtgcatacatgctcgggtccatttgttgggaacaaatgaacttaagcaattggtgagcacattgttcatgtgatacatggcgaggttcagcagactggaaatatttcttccaaccagttcattagttgcctaatatgtatatgtgttagtatacaatggcataaatgtgtatgtaatatggtgtacatatttgagtatgataagaaatgaaagggacatgacttacttctgtcaaagggcttttgtcgaactttggggcaccagag

SEQ ID NO: 19072 - DNA, 468 bp, Zea Mays
ctgaaattagtcggcccagtcgttcaatcccaccgcgccagcccaactctatccctgtgcacacctcacttacgtgtgggtcccagttatcagctcgttatcctcccctatctcttctctgcgtccccaacggatcgcaaagcaggcggagctcacagcgagttctcaggtgaaatctccgcgcccgcgaagtcaggctctatcgcgtgggccacccaggaccgcgtcagtcccttcccctccgctgtaaccgaagccaaagctgccgccgggtcgtccgcatggtggttgtggctagcttccccgccgatatttgctctaacaaccgagctccgccttcggcttctccctgctccttatgtaccggcctcgcggctttcccttcccctcatctatgaaccccggaccactatcaaagcagagaggtgaggtcgagagggatttacagaaccgagagattgaggacga

SEQ ID NO: 19073 - DNA, 563 bp, Zea Mays
gcgagaactcgggtatcaatcacccgaggggaacctcaaggacgtcttcactagagattctgactctggggatgacagcgaccgccgcaagaagttgtacgtcatgtacggcggaagctgggaactcacctcccgcaggaacgtcaagtccctgcgctgtgaggtcctgtcgacaactccaggggtcccgaaggctgccccacatcaatgatggagaagcaccaccatctccttcgaggcatccgactgccccgacaacatggcagggcggcactcatcaccgcccttgtcatcgccaacatgcggctgcaccatgtgttgattgacggtggggcaggcctcaacgtcatcagccatgctgcgttcaagcatctgcaaatcccggggtcctgtctaggaccctcacgtccattctccagagtgggcccacagccggtgtatccccttgggagcatcgcactcccggttacattcgggagtgaggagaacttccacacggagaacgtcatgttcgacgtcgcggaggtcaacctcccctttaacgccatcattggcaggccgac

SEQ ID NO: 19074 - DNA, 590 bp, Zea Mays
gcttggtgcgtcgtctggacgatgatctccggggtgcagaggccttctcagagcactattctattactgagagggatactgccaaggcagccatgcaagatgcagcacagcatgcactttctcagttatgctcgttgtttagcggggtagctgatggccttgacctgaagtactaccctcgctgtttggccggcagtgctggaggtgtgattgtctagcctgttggtgagggcaatcccaggttgagaagcatggtcaacttggtcgacgtgctcaacacagagttggaacacgcccttgacgagttgggcaaggttcgagcggaggttgtggagttacgtgatgaatgtgcggcacgccgctatctggatggtggttctcctgcccctgtcgggattcagcacccttaccattcaccgccccgtggtcgcttcgactatggtaccccagactgcaggacccggatagatttggatccctagatcgatggagtcagaatctgtaataatgcttagtttggtgtcttagtctagtcagtcttagttagagttagtttgcttatcatatgttggatgcttgttatgatggac

SEQ ID NO: 19075 - DNA, 400 bp, Zea Mays
gacaccactactttccccactagctatgtaacgccggctgttcttccgaatcagagggatttcgtcctcttcttcatcatcctcatcaacaacacggacaacacaccccattggggtcagcgtcaaacgggtcacacccattgggatcagcttcagtaaattcaggcacgggcacttcctcagcaacaggagtagaaggaccggcaccctgatctaagctagacacccgacgaagacgtctcttcttctttttctccccctcagcaggaaaagaggcttgattgactcggcaagggcgcttcgggtaaacattgacagacttctgagcgtccaaagctttgtcagcctcagggatgggtaccaccaccaatgtttcagcaggagcggcatcagaagaatc

SEQ ID NO: 19076 - DNA, 525 bp, Zea Mays
tcttctttacgtgctcgccatcaccccctctaggcttatcaccgaccaattttaggttaggggcgtccgggcatcggattgcgcgaccgccggcgaagctccgccgtgggtgggcggcgctgctgtccacaccaccgtggggagggagaagatctctggatcgtgcatctgctgatggatggtcacgattagaatagggaaaggaagcgcaggggccgttaatcgatggttggacggcgcagattagatcccaggtgtcggttcggccagaagaaatccaagccgttgatcgatggatggaggggcgtgaggtgatcctggcgttttaaaatccagggcattgatctcagatcctagggctctggatgcgtaccccttcgtcatctaatcgggactcttgatctttgatcgagcggccagggcacatccgagttacaccaccttgacatttttccaatggagcccctcgtcttttgcgtaatcaacccgtcgtcctatcctagtataaagtaattgcggccgggc

SEQ ID NO: 19077 - DNA, 372 bp, Zea Mays
caattacccgtactgtaagattcgcatgtctgcgtatcttcagagcatcagttaccgggtttgggaaatttgccttgatgcgattttcgatgctacaagtgaccggatcactccaattcaaatggagttccatgattcgaacaacaaagctcgaaacgctttgttctcgtgtctctcgcttggtgagtttgagtgagttggacatctgactacagctcatcagatctggtctaccctcgagagattccatgagggcaacgattatgtgaagaccagactgtttgagacatataggcgagagtacgagaacttcacacagttggctggagagaccattgattccatgttctccaggttccagtcaattgtgaa

SEQ ID NO: 19078 - DNA, 639 bp, Zea Mays
atcatgataaggccatacgacatcgatccttcgcagtgggagatctcgtcctccgccgaattctaacgggggagggacggcacaaattgtcgccactatgggaagggccattcatagtagcagaagtcactcggcctggatcatatcgtcttactcaaatggacgacacggaaattgggaactcatggaatatagaacatctcaggaagttttacccctagctagatttcaaaagctattgggacggccttgtattctgtaaattgggaaattcatcatcaataaaaagactccattctcaaaggcactcaaactgtttactgtcaacctgcacgcttactcgactcagggtgaccactataccctactaacggagcaatcgacttaagtcgacgacgacttaaggcggtgtgacatgctcacgcttacttaactcagggtgaccactataccctactaatggagcaatcgacttaagtcggcgacgacttaaggcggtgtgacatgctcacacttacttaacttagggtgaccactataccctactaacggagcaatcgacttaagtcggtgacgacttaaggcggtgtgacatgctcatgcttacttaacttagggtgaccactataccctactaac

SEQ ID NO: 19079 - DNA, 432 bp, Zea Mays
ctgtgggctaccattgtggaattgggggctcgtgaacctggagaccatttgccgctgaccgaacaccgctgtgctgcaccgccgtccgcctggtgtcgtggccgggaggaaccactccgagatttcctgtgagaaccttctacactactaaaccatgtccccaatttcgtgttgcgccgtttaatttgagtttgggggtgtggagcaccggattgtgattcctctggcgaggtcgccgccgtggccaacgctgtggccgtcgtggcgttggaggggaagaggaaattagggccctggccgtaggatttgagttggacggtagagatgctgttcatttataatccaagggatcccgagccgtacatgttcgattctaatcagagccacgcgtgtctgatccaacggctctggttgctccttaccccttcgctg

SEQ ID NO: 19080 - DNA, 337 bp, Zea Mays
cggggcgcgccacgattgttcgcaccaatgactcatccttcgtctcggccgccgatcttgctgcgccaaattggacaccaccgcttaacctctctataaattgaaggccgagtcagctgcgctatgttatcacgaagccgaagcacccgctcccaccctcaatcgatcaccagagctcacaaatttctgatttcccccaaaccgggtttctgccaccgtgaaaacgacctcgccgtggccagcacaattccggttagttcatactgtttgctcctcgtttcagtgtactcatgtgcctgtgatgcccgtcggctaacccgattgaactagaccgccg

SEQ ID NO: 19081 - DNA, 594 bp, Zea Mays
ttttcagccaaatttattttatctcaaataatcaagcaagcacagaattgaccatgggatgggttgtcgcatgtcagggggaacaagggaaggatgatagcttggccatgtcatgttagcatagtataggcagtacatcacaagcataataacagagatggtagatgagcaaagtgtttcctatatcccctcatgtagatataattgtagaaatgccaatgacagagcatcttgtctttctcccgagcacgacaaagagtcttctaaggtgttgctgtagaaaaaagggtgccaggcctttccagaaaatagagtttgatctatagacagaatcaatacaagaccacactggagtactcgctatgtagaggtcagttgccagcctcctaccaaccgatagccaggatatgatgatggtattgcagaattctacaccacactttccattctagtagttcagtagcttgagatcagaattctagaactaacatgttcctcagttcagcctacctgcagctgttgtgctcttattcattcatccaccagagcccaggaactaaccaatggctctatgcctctataactggcatcaca

SEQ ID NO: 19082 - DNA, 867 bp, Zea Mays
ttttatttaaaagacactccgcgcgaaagtcgcctaagggtgcagccgaaatagcacaacaagtgcgttaagcgaagtctctcattaaaaagacacttcgcgcaaaatcgcccacgggcgcagccggaaccaacacaggcgtaggaatacggccaacaggccacattaccatacaaattacagttacatacacacggcgagggcatcacatattacatcggctcaaccttcgggatgatactcatctccctgtaattgaacagcattatcctctcaccatcaaaaagattccgaagatccccctcgcctatgctcgccccaatcggcgaggacaacaattctcgtttaccaacctggtctactcggagacggtcacactccatccccatacgacggcgcctaccacttcgcgaaaattcacccacactatgttttcccaccacccttcgccgcctatacccagtactcgcactaggaagatccccggcaccctccacacgtggcgaagtctctgctgcacccacatccaacgcaacaaaataatccaagccttcatccgaggactcctccatccaaggaaacgaacttccagattcaccatcagactcaaaacactcagacacagaaccaaacaaactatcatcggcaggcactatggttgaggccgccacaaaatctgtattgacagcagcggttgcttgcgcaggcccaaacgtcggaacctgcgcagcaaccgaggttcagtatcacacagacaaaagtttacacttaaaatccctaacccctattccgccacctacgaaggcccggccgccgccgcggggtcttcggtagctggttcgcccaccgccttcgaggcgtcctcac

SEQ ID NO: 19083 - DNA, 405 bp, Zea Mays
agcccgagccggcccaattagcgcagaaacgcgccagcgcgtgcccgcgctacgggttttgcagaaaaggccctgactaacagaataacctaaagcggggtcagagcactgtttcggcgagtcgctgacattcgcagaaagacccccatacttctaattcttctccaactacacccctgtccacggcgcgctcgccgattacccctgacgtggcttgtacaggccatggccggcgatgattgctcaagctaactatcggggaggctttaccgacctaagacgatctatgaacaaccattaattggacaggaacccctctgggagccgtctgcccacgatcgtggcggacaccgagtttgtgagcacatgttcccgccaaaccatggtcgaatagagcaaacagac

SEQ ID NO: 19084 - DNA, 623 bp, Zea Mays
cgtacataaagattgagagctctcgtttagatttcatacgcaagaatcaggatcggttaagggcagacctgtactagggcttggtggatagcatgctagatggagatattagagcagagaaggttggcaagcgaactgtgctgtcgacgttgtttattggcggtcctcatgacatgagatgtcggtatatggatgctatggctctggtgcggacgtttggtaaaccagacgtaattcttaccatgacatgtaaccctaactaggatgagataagtagggagcttctccctgggcaaacaccgtgagatcttctggatcttgtagtgcgtgtctttcatgcgaagctacaagagttaaagcataggctgactaaacaagatattcttggtaaggtccgagcctacgtataatgcagaggaagtacaagctcacatgtcctgagcagtaagaccttttgatctcagccgagatcccaagcaacaagtaccctgaactacgaaagatggttatcaagcatatgatgcatggtccgtgtgggtcgctaaaccctaactgcccatgcactaagggtcataaatcatgcaagaatcattaccctcgacctttcagtgacacaaccttgc

SEQ ID NO: 19085 - DNA, 764 bp, Zea Mays
ggttaccctaagtcgagtaagcgcgagcatgttgcaccgtcttaagtcattgccgacttaagccgattgctccgttaatagggtatagtggtcaccctaggttgagtaagcgcgagcatgttgcaccgtcttaagtcattgccgacttaagccgattgctccgttagtagggtatagtggtcaccctaagtcgagtaagcgcgagcatgttgcaccgtcttaagtcattagcgacttaagctgattgctctgttagtagggtatagtggtcagcctaagtcgagtaagcgcgagcatgttgcaccgtattaagtcattgccgacttaagctgattgctccgttagtagggtatagtggccaccctaagtcgagtaggcgtgagcatgttgcaccgtcttaagtcattgccaacttaagccgattgctccgttagtagggtatagtggccaccctaagtcgagtaagtctgttgattccaagtctagtcgaagtcaattgataaccaatagtgtgaatgcctttgagaaggaaatattttattgatgacgtattttccaattacagagaacaacattgctctgatagctttttgagtcttgctaaggataaaacttcctgaggtgctctatattccatgagttccccactcccatgccatccatttgagtaagctgatatgatcctggccgagtgacctccaacaccatgaatggcccttcccatagcggcgaaaatttatgtcgtccttctcccgttagaattt

SEQ ID NO: 19086 - DNA, 465 bp, Zea Mays
ggatttttagcattcttttggagttgctctcacccctagattcaccaaaaataggttcactccacaaaaagttagctaaatggtctagatgtaggaccccatacgctcgaacccagatgcaataaattagcgaatttgagagccaaattcaccattacgatgaagctcttcaaaggtgcgccatcaactcaagttcgatggattttatgaaaattgcccaccactattacttaccccacgtttcacatcacttatttctttcacaagtctacccccaccatgatagttagtcgtgcccctccaccgaccggatgtgccctccacccatgcctttaccagtagtgccccgccttgactggtgtgcgttgcccgtgtcgattcaccatacaaccataccgtactcttgaccaatcatgcctcacccatccctatcgcccgccctaggtgatcttctctctctccctt

SEQ ID NO: 19087 - DNA, 724 bp, Zea Mays
ggaatcttggggccattcaccgagttggagtaggtcggtccgggtgccttcaactgagggcagttattcttgaagtgactggggtctccgcagtgccaacaggcatttgctggcggttggttgctcgcaacggagggttcctgaagggagctctgactctgctgactgtagcgcgatggagtgggtccagatggtttattgaagcttggccccctgggtgggagcccaaagggtcgagctctctggtgacgttcttgctgttgagctcggaggacttggaatttcctcttgaggtgccctttttcttcctcttttgccctttccagttggatagccttgttggagaggtgagagaagttgaggaagtcctggctggcgaggatggtcttaagctcgggtcttagtcctttcagaaaacgggccatcttcctggactcggtgctgacatcctcatgcgcgtaacgggccaactttgtgaacttgtgcacatattcactgactgttctcccgccttgagtcagttcccggaattcatcctccttgagttgaactatcccctggggtacatggtgctcacggaaggctgattcgaattctgcccaggtagcatctctaacggcctcactgaaggtgtcccaccatgctaaagccattcctaaaagctgatgagctgccagttggacacgctgattttcgaggcatccaatggcttatagtttcctct

SEQ ID NO: 19088 - DNA, 626 bp, Zea Mays
ctgtaacagacatgttacctttgcgggtcattgcaagtgcgatcctcgtgttgacggtcctcgcacgtgaggaagatgcgtacctctgcacaagttctccatacacctctttgcggtgtttcgagtgtggccacttgggccatcacctcccgtgacagcgacgtcatcaggaacccaagcacctactgttccatggctttccaggcagcatgatcggggttgggcaccttcttgaccttctctccatccttggctttctctccacccttggcttcaagttctccaggtggagtgtcggtgccgtcgagatagccctgcaactgtgctcctcgcagtatgggcaggacctgcgccctccatagagggaagttggtcttggtcaatttttcagtgatgacctgaccgaacaatggagatgcgacgttgagcgccgaggagctcgccatgacgacgggcaagactcaggcgacgctagatgtatttttgtgggagttggctctgattaccatgaaagcaaccagatatgtttaggaagcgttctcacctctccagaggccgcgtagctttgttaatgtatgcagagaagagccctctatatggcgtacaaatcaccaaccgaaatcaag

SEQ ID NO: 19089 - DNA, 503 bp, Zea Mays
gccgagtacatgagctacattaccatatgaaggctagagaagacgggctccatgaaaattttggctgctataacttcgcgtatcgcaaggatacaaaggccccagtcctgagctatcggtccaaatggccaactggatggaaaagtgagtggttttatgttaaagctgacgagaagaaaagggagaagctgaagaagctggtcatgagcccactaagcctaagcttcgggatgacccgacccctgtgcaacatgaaaccagggttaccatgccaactagccatggtagaattcagagtggtggctgagcatatcagtaccagagatctagtgcaagaatacctggtgaacagggtatctccaacattgagtaattggagcatgccgaagctgaaaggatcaaagaagataggtgaacttgttcgattgccctatcgcttcaagtttgagaagcaattcaaagagccctgccaggaatggttagaaatgattgaaactatgtgc

SEQ ID NO: 19090 - DNA, 308 bp, Zea Mays
gatcaacgaaagcacgcagccttcacacattacattggctcaaccttcggggtgatacccatctccctatagttgaacaacattatcctcaattcctcacccacaaacaggcttcgcagctctccctcacccacactcgccccagccggcgaggacaacaattcccacttgccagtcccgcccacacgaaggagaccaccttccacctcaccacaatgacgcctatcactttgcgacaactcactcaccctccgcttcgccaccgcccttcgccgcctatgcccaacactcgcacccggaggatcgtc

SEQ ID NO: 19091 - DNA, 391 bp, Zea Mays
tgtgaccgaagtcagattgacagcgcgtgcgtcgacagatgcgctgaattaatgcggtgcgtcagcaagcatgctaagatggcgccccaatcactggtcatgccatgttgaggcgaagtacaagctttggccccacctgcaggcttgcatcctcccctaaggtgggcccaggggccactgtcgtaccctgaaactagggtacccctcactactgtataaagatgcagtgcccacgcggctatctcttagtcgcgtggtaaaggtgctgagtgtgggaccaggccatgactcgcccagtcttgggcgactactctgggtccacatcagcgcccgactccactacacgggcgggtctggagccgccacgtgtccagagaaggtgatatactcc

SEQ ID NO: 19092 - DNA, 813 bp, Zea Mays
tttccccttctcccctctcgacctcgaaatacctcggaaggattgagcgccgccactttcgtctgtagacctgccgtcgccggtgaactccctcggtgcgggaggttttgtttcgctgcgtggccatgtgtggtcgtaatcatccaaggaagacgcccgcgccttctattggtgtcgtgcgtcggtgtggagggcgaattgctcgccgccgtgtcaactgcgggcgattttccgcttcgtgccgtggtaggcttctccgccgtggccgtctgccgtaaggtaccttctacatgatcgcctcgtcctcaatttcgttttgcgcatgaagtcaaccgcatccagtagccggaacggtggaattcgggtggccggcgaagagctccgccgagcggaggtgtctctgcgcgcgccgccgggggggagctggctgctggcgtaggattgatgacggaccgatggtcgttggatgggaaaggagcgcccgagattagatcgtgtgaaccgttgattcctaacccttggatcataatcggacgataggcgcgtagctctgtattcattaaaccgcggccgttgatcttggatccggtgatcagaatggatgcgggttattagccggcccagatctaatctggtccgtccatttcagatcgggcggccagaacctctcgataccccttcggctgtaactttttactaaagagaccctgaactatgcagaaaacaacccgccatcctgtgtgactgtgctctgggtctcagatttcttgcgcgccagcccctgcactttccagaaaatagtgcccagtccag

SEQ ID NO: 19093 - DNA, 524 bp, Zea Mays
gtgcgaggtttaaactctagagcttgtcaggactctgttcataatttgataaactcctttaatgctaatgtggtttgtatccaagaaaccaagatggctgagatctctatgcatactaccctatccgcacttgggagtaattttgtgcacaagttgtttcttccctcggttggaactagtggtgggattctcgtggcccggaggaatgaaattggtccagccagcgcaactcgggtggatcaccatagcgtgacaattcggttcagtccaagagatcatcttccttggtggttgacttgcgtgtatgggcctcaaggcgacagtaacagaattcagtttatgcaagagcttcgggatgtgagatctgcttgtcctggaccttggattctaatgggtgattttaacctcatctacagagatgaagacaagagctctggcaattttaataggcagcttatggagagattcagaaggttcattaatgatctgggtttaaaagaattggctctgcatggtcagaaatt

SEQ ID NO: 19094 - DNA, 542 bp, Zea Mays
agaaggctgaagagagacaattgaaagatgtgaagcgcattgctgacttggagtatgtgctgtccactcaagtgaaattgcatagaaccgaagtgcaagagttagaaaagaaacttgacgaagtaactggaaatttcaatgtggaacaaacaaagcgtgagatacctgacatggaacggttaagggtgcagaaaaatattgaggagcttcgtcaagctaaagaggaatgctacaatgttgctaaggaatgtgctacaatttgaaaaatagttttactaaggttggcgcattctcctcagagcagaactctatccgcggtgattctgatggggttatccagtggattaatggcgaagtcaaagattttgaggagattctcagtgatagggggacttctgcgcttttgttggtgcccgtagggccatgtcggtccttgaaaaggtcagttgcgaacatgccaaggctgtggtcaagccaggattctcgctctcagctaatgatattagaaacccttcagccgaagtcactgcactagatggaaa

SEQ ID NO: 19095 - DNA, 289 bp, Zea Mays
gccacaccactctcatcaagggtcggcagccggaccagcaccgctgaccgcaaccctgggtcgtcgcagagtggtgaaatgccctggggaggcatcaaggatttggggatgaaagcctcaccggtaatccccctcacgaaaatttccaactcctcccaggtcaggtcagtcctaggcccgcgcaggatcctaccaatgtcactggagccggtgaaccaacatcacagacgcggccttccctgcagtgacatgactcggcgcctcaggaaatcaccgagtacgtgcattg

SEQ ID NO: 19096 - DNA, 720 bp, Zea Mays
tgaatgggctttcccatggtacagtaacctgaaacggatcagatcaagcgctcagctcaccgccgacgatctccgccgtgattcgtgttgttggcttctcgattcgtgctcggggtaagcgcataacgtctcgggtagaaagatcatcatcgccgttgagctggacaccaatccggctagccgccgtacctcccccttgttcaccgatcgctcgggtaggatctcaccaccgttgatccctcactgccatccgccgcgtgtccaaacactttaccacgtcgcggctaactatgctacgcacgtccggtgatcgccggaggagcagccacggtaatagccacgttgtgcggccaccagtgactcaccccagttcatacctatcgcaatcctcgctcctcttccgattccggtcgacggcctataaattgagcccagattctgcttcttcaccacatcccgcacctcagtaactgagcaatcggctcaatttcaccggagaactcacgcagcccacaaattccctcctccctgtacttaactccaccgtgaagaactccaccgtggtcagcgctcttcgggttagtaacttctcaattgctccctgttctagctcgtttgtagcctcctgttgctctcagtaccgaccaattgaagtttggccgaagcctttcaccggaacacacacctgctctatagaacgccgccgtgacaccctctccg

SEQ ID NO: 19097 - DNA, 465 bp, Zea Mays
gcctcggccgaggggtcttttgtatcttcaatagaaaacgcaacttcggcttgggccagaatcttcacatgttcgcatcctgccttctctaagatagtcgtaattcccctagcacctaagaaggcgcagacatctccgcggccactcaaaacctcctcaaaggcttcggcttcgtcgttgatccattcgattggaccttcgggatcgcctagtacgaagttgtcctcatttgagtatgcgtcaatattggcgaagctggtttttatcttttgtacacatgccatagatttttcatagcatctttcttttgaagaacgaagctccacaactgtttttcccagtgatttttctagtattcactggcatctcggtcagcttcggcaattgcacattttattttttcttctgccagctgttttcgaagatcttcaatttcgcatttctgggtctcagattgggcttttg

SEQ ID NO: 19098 - DNA, 389 bp, Zea Mays
cacacgggtatgatgaatgggaaaagccgcacgtatagcgcccctcggaccgagagtaaacctaggaccaaccagggtccgagggacctaacgaccatacacgttgtaggaactaacaggccgcaaagcaagattacaggagatcacgaattatttcctccaccaacaccaccccaagcacggagttcgccgcagcgtcaaagccgcttgttaggagttccaagtccgctgacattgtctcggcaggtaggccaacaacatcatgaaggcggccaccgcagtgaagttgcgcaatggtgaaggtcgtcactgcgccacagtgaatcatagactccacagcctcgcgagcatgctttggaatgtcaaggagacacgacctctgattcctc

SEQ ID NO: 19099 - DNA, 529 bp, Zea Mays
ggtttagatacacaccaaaataaacaaactttttgtatagttagcgtggacaaatctaatgaaaactaggttttgatctatttttgtctcggcgctgcactgcttagtccactattcacctgagccatttgattctcttccccagcacaagcccgctcactcgcttcttcggtcatcgactgactagtaagtcggtgacctaacccgcccgctgcaacgcaccttgccttctcattactcatcagctcgtcgactcaacgggatcctacacacaatattggtattttgcctcctagtctgcaccagcagatgggcaagctgttggtgggaccgtggcgtcacttgtccctcgctaacttattagggtcccaccgcgtcgtcgcaacacgacaatggctgtcgcttgccgtcacggtcatctatcgctacctcgcctcctgcactcgctcctcccacctgtcgtcgtctcaccaacgccatctcacgacaaattcgatgactcgccagaacgacgcgtcgatacggctgc

SEQ ID NO: 19100 - DNA, 319 bp, Zea Mays
gctatatttgcttcggcctctgatgattattggttaattaagggcacacgatcgatcgacagagatgtgaatccatcaacaacgtacgtatgtcgattcatcatcattgagttgaatccatcaataaaccgcgcctttgcttggattggagctcatttctgatccagctgcaccaatggacaacgcgcgtactaaacgaccattaacacatggctgtttgtcctttcctccctgatgtccatttccgatcccccatgtctcgctgctctctacatactgttcccagcatgcacatgtgtgtgacgatctacttgctgca

SEQ ID NO: 19101 - DNA, 800 bp, Zea Mays
ttcttctagtttaggttgttgtggttgaatctagtggattgggggatgttttgtgggggtgggggtggcggcagtagttgtagtatttctcagtttggtaactgtgggtggaatcattgttagttgtaattttgattttggcggggatagggttgtggcatgttttggtagtgtaggggggtattatggctcataggtgtgggctatagctcaggggttgttgtctggggccactccagccttgcgttctttggcttccttcatgattggatagtctcttgtggagtgactagtgtcttcaccatggaaaacacagtagagcctacattgctgcagagaccctatgccttgtcctcttactgtgtcgcccccagccttgttgcagagggtagtcacgatgaggggtgggggacttgaccttgttgctgttgatttgctatgttgtgaacttggagctgttgcttgttattctcctggcgtgtgtggtcagactgttgtcctctcgtccatgatccgctggactgtgatatctctttcgatttgctttgggacttcactttcctaaaatgtagctcattggatcaggcgtttttttcaaagtgctagtataactcttggaccatggatgggggggtcagttataccagtagagggatagctcagctagcgcatcagttttgggtatataaccctcgaagttgagcaagaacttgtctctaagggtcttccatgaatcgattgatagtgggggcagccttgcgtaccatgtgaggggcgggccttccaaggtgatgataaat

SEQ ID NO: 19102 - DNA, 411 bp, Zea Mays
cttgaactaacctgcagggagctgaccacggtgaagcgttcacggcggcgcggaaaacagaattggggggaaaaggaaattgggatgctatggtggacgatcaggggcgagagctagtgcactgcgtgcgtaataacctagcagacctagttgatcactcaatttatagaagccaacagcagtggcatccaatttggagaaggtgtgctggcggccggagagagggggagtttactgacgtgaactatcgtggcggtcactagctgaggagctacgacggtcattgctgagttattatggctagcaacgacgtggtggaagggtcacgacatggcgcaacactacgactggcgtacacctcggcgatggccgctcggccacatcgccggcaagtgggtacggcgtctgagc

SEQ ID NO: 19103 - DNA, 615 bp, Zea Mays
tgccgaaggtttgaaaaacaccttccctgagcttgttgtcgaaaaacaattaaaatattccaaatgtcgaacggtccaccactcagccagtgtaggtggtgtggcagttcgccttcttcccctgcagcactatataaacagacaggttggtgaggagttaccacagcattcattgccattgcgctgttaaaaatcttaaccaaagccgaagcttttctggattgttgtctgcagacatgcgcttcgtcattcggaatcaacttcagcttaaggaaccgcgaaacttaagacggctcgagtgagatccaccgctaaagtgtcccgcgagggagatgatgctgagacagcgccaatatcagaaatgatgaggcgatcaggtctagtgatatcagaagaagctgtttccgaagatgaagctgccgaagctgagcagattacaactgaagatgggagtgatgataagctgaggaagactacaatattttgagcccgtcgaagccaagccacatcgaatttggaaaatctactatgacggcagaggacatgattatgatgaagaagctgggttattttggagaagctgagagcaaacttgtccattttgctgtagaggaa

SEQ ID NO: 19104 - DNA, 537 bp, Zea Mays
tggatagtgatagatattgcgatacaatcggtggattatgcgaaattaaagcgtaaatgggagggatggggatggggcatggcgaacctgaaggcgatggtactatgcgaaagaatgtagggaaatggaacgaagaaggagagggggaaatgaaccagggcggagaacggtggagggcaaacgatgaagcacgacgattagggcgagtgggggcggtgggggtggtcgtcgatggcgatcgtaggagcgggtgacggcgacggcgaggagcggaattttgagggtttcggtggggccgcgatgagtgggttgattgtggtcgggtgggtcttggacattgaccatattggctcggtcggctagtggggagcgacgcataactgtggggacccatagtgtgcgcacgatcagttggtcagtgtgtgtacgtcgtgttcatatgaagcataaagtgttgtgcaaaggatcgtaaatagtttatacaagcattaatcccgaaccacaccccggatgtggtataaattgttgtgtgtacat

SEQ ID NO: 19105 - DNA, 883 bp, Zea Mays
gagagttgtcgtatgttgtttggagcctgagaactcaacctagccgagctctgcatggaaacactcctttcttcatggtctatggtttggaggcagtgctacccgctgatctcaagtttggggcaccgaggtaaatctttgaaaacatagcagaagctgaggctactagactggaggatgttgatatactagaagaagaacggttgaatacggtgattcagtcagcccggtatcagcaaactctgaggcgctaccatgacaaggccatacggcatcgatccttcgtagtaggagatctcgtcctccaccgaattctaacaggggagggatggcacaaactgtcaccactatgagaagggccattcatagtagcagaagtcactcggtctggatcatatcgtctcactcaaatggacaacacggaaaatgggaactcatggaacatagaacatctcaggaagttttacccctagctatatctcaaaagctattgggacgacaatgtatattgtaaactgggaaatatatcatcaataaaaagacttcaaaggcgctcaaattgtttactgtcaacctacatgcttacttaactcagggtgatcactataccctactaacggagcaatcggcttaagtcggcaacggcttaaggcggtgtgacatgctcacgcttactaaactcggggtgaccactataccctactaacggagcaatcggcttaagtcggcaatggcttaaggcggtgtgacatgctcacgcttacttaactcagggtgaccactataccctactaacggagcaatcggcttaagtcggcaatggcttaaggcggtgtgacatgctcacgcttacttaacttggggtgaccactataccctacta

SEQ ID NO: 19106 - DNA, 715 bp, Zea Mays
gtgggcgaggtgggagggagggtggtcggaggtagaggggacgtcgtcgggaaggcaggagggcgaggtgggactgtgggagggaggctggtgggaggtagggcgggtagaccagtgaggtcatggatgagaggatggcggaggtggggcccaagcatgtcctccgctgtcactaaaggatgacctcacccatgcccctcgagcggtgtgacagacccgacgacatggcgagaggtgtatgcggacttgcggaggacgtgaatggctatcgggtacgtcgtacgctggaacgtggcgcggaagagggaaaggcggacatgacgaagctcaagctcaacgcgggcagcgaacggaaatctcgggtccgggctgcagggcacgcgtcagcacgtgatcggctgaagacgcaccgaacaaggagaccgctccgaaacgcttcaggttttaaggaaccagatatcaataagttgtgctccctgcctcgagcaattattattatggatggagttttcacaattcacttgtggcaacaactgctcatcctatatatcacccgaaaactgatggccaaatcgagaggctcaattaggtgtttagaaggcttcttaagatgtggagtccactcttgtcccatggaatggagtaagtggcttccgcttttatacgagtctgtcttggcccttgggcacacagttgggcattgtggatcggatcc

SEQ ID NO: 19107 - DNA, 363 bp, Zea Mays
gagggcaccccatactacatcggctcaacctttgggatgatgcccgcctccctataattgaacaacattattttcaattcctcaccctcaaaaagattccgcagatccccctcaccaatgctcgtcccaatcggcgaagacaatagctctcgtttacccaactggtctactcgaagacggtcccgctccatccccatccgacggcgcctaccacttcgcgaaaccttgcccacactatgcttcgacaccacccttcgtcgtcggcaattggtcctctcactaggaagaccagccacctcgccaacctccacccgcggcgaggactccgccgcggccacatctaacacagcaaaataatccaag

SEQ ID NO: 19108 - DNA, 304 bp, Zea Mays
gcagcgtgagtagcgcaatatgcatcccaccaatccgcagctcggtcggtgaggcgaccctatgcatatagcaccttctctctgtcagtacattgggctatgttgagcatcttgtccatggactttagctagtcatcaacttgtagtggatccacagagttagagaatgtaggtggctagtgactcaaactcccagtgcttatccctaggcggagctggtggtggtggaggtggtagttgttgttgttcctgccgtacttggagcatttcttggcgttcttgcctcatttcctgccgtatttcc

SEQ ID NO: 19109 - DNA, 286 bp, Zea Mays
tgttgacggctgagaggatgcagcacgaccagaagaagaaggtcacagtcttctctctgatttcgtggtggtcttgtttgccccccttgcctttccggatcgaaatcttggtgtttagggttctctgtcaactcttacagcttcgtgtatgtatttggtgtgttgcaagcttcgtcctcgctgtggtttttcgttgctttagtgatcagagcagttttgcatctagaaatctccgtggtgtctgctgtagccgttttcttttctgatccgtggaggattaaattta

SEQ ID NO: 19110 - DNA, 620 bp, Zea Mays
accacctgacagtgcagattttgcccaatcattccaatgactatatgggaagatatgggctataaatacactcccaaccaataatttgaagatatgggctataaatacatctccacatttagtgtaagactatacgttttgcagggctcgtgccgcttcggacgaagtgccagggagcatgcggggagaaaggggggaaaggtgtcaacgacgaacacagtggttaaccacaccatcacgccacccgtgcatgatacggtgagtaggccattttgcatcccgccaagccacccacgctgaacggcgccatgatgattttgtttttaccgcaccgccaccacgactgcctcgaccaggtaaaaaccgagattctctccaactccccacgtggacaagggttgggtcgggcaagctcccagcgagtcacaagccagataaccggcccataggtcatttgttcggtccgtagtccaaggtcgtacctcacattctcctgcggcaatctagctgacgaggtggccacgaggcccccttctggtcagccagactgaccagaaggccgatacgggatagaataatgaaggactaaatgagatgccctagcgggtcgagccccccag

SEQ ID NO: 19111 - DNA, 404 bp, Zea Mays
gcgtataatgaagaaacgttcatggagtaataggcgagcgcttaatggagacatacgagcggtcgcgcgggagaagaaacggccgaacacaggcatgcagacggagacaacaggtggcatagtatttgtgtcgggcttcaaatgatggcggcataacctggcaattgagtgtaccagagaaattggagagaaggtgaatgggctggatgggacccacatgtaaagaatagagagaggaggtcacgtacgtaagtgagatggctggttttcaaagcttgagaattggaatggtgggacccactagtcataggtagaaaggaggggagggaggggaatgtgtatgtgacggtggtaactggaccgatcggctaggatggtgatcacgcatgttgtttttgtttttt

SEQ ID NO: 19112 - DNA, 1641 bp, Zea Mays
actttgggtaccttagcgaactttatcctgtatagctatttgtcagagtccatactatggttaacttgggttggctactatctgtgaataagggagtggagaatatagagttttggatggttactccacctggcctgttatacaagctaaaccagccttttgtgttaagacatgtatgcagatttggtgccactctctcattttcccctcaattattttactcttcatagcatccatttatacatgaccacctacttgatctcatatatttcaaaagcacacaatagatggtgtccgtgtcatttttctgtcatggatttcacaagtttagaacttatcttttgcacttgatcaaaatacaccatagcctcattcaacagatgacatccatgtcattttctgtcatgcattcctcaagtttagaacttaccttttgtggttgatcaaatacaccatagccattggatcgaaatcctggtcatatggagtcgccaccacagccatacttcatcaagcttttgatcttcgtatttttctttgtttcttgtttttattgcctgagctccatgtttttgcttttgcttttgagtctgtggctgttgttgtggttctgatttgtggggcttaaggaagccatcgcctttgagagaaccagatggcttcttgctcatgccatctcagttcagttgcgggcatagggaatcgtcatcctctctgctttgtcccatccttcacatagtgtgctattgtgagatggcagatgagtttttgaacaaatccttttcttttaagttccttttttcagtgagcagagccacatttttttcctttccagtgcgatcggccgcgtggccatagacaatcccagacaagctttaattgatctgtgctcgtctgataaggcctagactctttggagtcgcttgtcgatttgtctatctggctctctttgatatgctttgaggtggacccatgtggctctccacatattctttgatatgcacgcctactgctctgtgtctgacttctctgtgtgctcgaaactgagtgttgatttgcatacatgattttcataataccagattaattcgctgagctgtggttttgattcatggaaggccatgattgatgttcactaagagattcgctgatagcgccttcatcggggagttactttgttagtaactcaccacaaaaacacttcattgttgctgctcaccgtaacacccacaagtgctttaaattgaagatcaaggaaccatgcagctgatgatgtaactaatcaatggtggcaatgaaacgatgaactatcaaacctgcaaaagaaaaaccatagcaaatgggtaggttgttactttattaggcttttgagtccccttagacaggtttcaaagtatatatttttattcatccttcagttctgttgactagcacttttgacactccttactttctgcgagtagacatgcttgccccagagtgactatcatattttaaaagtcaaagagcactactgaaaataatcatgtgtggctcactaaacaattaataaaaaattgaaccttttcagtctgtacaacccagctgctttagaaatcagcccctacttagtgaaagaatttcataaacgctctccactat

SEQ ID NO: 19113 - DNA, 386 bp, Zea Mays
ggaaagaccaatgtggtagcagatgccttgagtcggaagttgcaatgcaattgtgttctgatggattctcgtattgacaccttgtgtgatgagttgtgcaagatgaagattgaagtaattccttctggtgctttatctcacatttctgttgagccagctttgcaagaccagatcatcatggcccagctcagtgacaagggggtgcagattatcaaggagaatctccatcagaagaccgagaagtataaatgtttctgccaagatggaaagggtatattgtggtttggaggcagattggtggttcctaaaaatgaggatctcaagaagagaatcttggatgaggcccatctctccaaattctccatgcatctgaggagcgccaaaat

SEQ ID NO: 19114 - DNA, 804 bp, Zea Mays
ctcggagttgcgtaacggccgcgctcctacacgtcttaaagaccacgtgtgcgcccttgccctgttccaccatccccgagaatcacctgttggagcgttgctgcggaccgtgaagggaggcggccgctgctgcacccgttcttcgccggtgaagcaaattggggcgcgtggttggccaacgaccttcgtcgcgccctagagagtgagattggcgtcgctacggaaccaatcgggttgcgaatccagtggatttcctcaccggtgtgggcagaacgtggcaaactcgcccatcaccgtgggtggagtgctctgctgccgaatccccaacgaggtacctcctgagccttctgtaatcgccttctcgttattttggaaccatcgtatgcgtgctgctgtgcctcactggtattccggctgtggaccgaccatggcgccgccgctagggaccggttcgccgtcgtgggcggggtcggaggggggaagatggacctcgtccgttggatcctagccaacggttgcgattagatagtaggtataccgctttgggcgggggaaatcatggtcgttgatctctgcatcaacgaattagattagatcttcaaataactcttcgaccccttttaaatccgcttcttagatcggtgatcctgcagtcctggtgccataccggttcatcacctgcgaaattaaatctgtgccatccgtgtgtaatcaaacagccaagattagtcaataccccttcgccgtgtacatttcttaaagaacccctgaagttttggggtatcaacccgcagtccaccttgg

SEQ ID NO: 19115 - DNA, 546 bp, Zea Mays
cgggctcgagaactggtctctaagggccaaatggtgcattccatggcaggcaggcctggagatggcactacataccaatccatccaaccatgggactttgcgtttgtgcccttaaatgacatggcatcgagggtacggtaaatatattctcccacttggttgagtttcttgcttcgacggaccaactcgttagttttcatttgaatttgaatgcataatacatattcagacactggatttttcacacacacttatgcttctgatttgatagggtgtgatcagtacagagatgctagattcgttttacatgccgctgtatgggccttctgataaggagttgatggagatcatacaaaacaaagggtccttcgagatcaacgatgttcaggtgcacgaacagatgagtggcgtagacaagagcctgcagaccccaaagatcacggcgctctgcgttcgagacaacgatcgtccagcattttggacgctcggaaggagtcatggacgagttcgtgagaaccaactcagcatgacatgacaagcccgcgc

SEQ ID NO: 19116 - DNA, 436 bp, Zea Mays
acacccctaaccacttgaacccctccagagccccactcagtctcccctccctcatttgcatgcccatagagccaaggccccatccccgcgttgctcgcatgccagggaagaaccgctgccgttcaccgtcgtcccgagcctcttcctccatcgacgttggggccccaccatgcctattgccatggtaagcctcaccccaatgcccgcaactcatgacatgccccaattttccccctctccttctgatttgctctgtacacgctcacccgtcgtcctccgcgtagtcccggtgccgtcgttgtcgacctgagccaccgatgtgttgttgccactgccgagaggtccctaaggtttgccgtgaggtaaggaacctcccccgcccctccagttccctccctcgctctctgcagcgtgtaattgcacatcggagttccca

SEQ ID NO: 19117 - DNA, 368 bp, Zea Mays
acagtgccaccgcacgcatgctcataacattcacccttcactccaccactgcaccctcatcacttttcttgtccacgagctcatagtagatggagacagtgagacagtggtggccacgtcaactaggtgtctgactcgaatggcgaggaagacaacaaaggcatgcttgccgtgtttgagatttggcaccatagatgacaaatggacaatgcaaggaccatcagaagtgacgccgcgggggaccatgcccttgttgtggtcttgttcacagagactacatagtcttgtcttggatctatctattgtttcaatgagtttgacagcaatgtaatcttcttcggcatcaacgatcttgtgatggacaacga

SEQ ID NO: 19118 - DNA, 507 bp, Zea Mays
ggcaaatatttccatgatacaactatagtgagggctggaggagagaacattgttcctcttcctgaagctgacgaagtggtagttttcaaaggttcgagatataccttcatcagcttacccccgaagctttaattagaattggggtttttatttaggcaatgaggagccaagggctggaaccagacaccgactacttctgcaatatacacgaattatcttatcagacgaaggcaatgggtaaggaatagtatcacaacaactttggttgttattcctttgtataccgctctgatgcgagacgccctgtgccaacgtttcggaagaaatggccaggatcttggatgaggcaatggttttatgttcagaatgatttgattgagagggaggatgtgaaagatataattcagcgtccgatacaatcacgcttcagcattcgaaggtcctcgattgtgaacagtgataaggcttaaacctacctagtggtgttcaacactatgtgtagtttca

SEQ ID NO: 19119 - DNA, 352 bp, Zea Mays
gatttagtcgcttaaaatctactccgttgatgggggatccagcggttgggatcgcgcaccggttcacttgtgtcgcgatttaatccgggccgtttaaatccaatcaagcggccacgatcctcccgtaccccttcacgggtcaatattgctaaagagcccctctgctttcaggaaaccaacccgccgtccacatacactgttcactgagtctaggattttattcgcgcagccccctgacctttctggaattcgaggcccagtccagagaacatataaaataggtaaataaatacagaaattgatttttaatataaaaagaattcctaaaacttgtttatgccatagaaaattc

SEQ ID NO: 19120 - DNA, 479 bp, Zea Mays
cagaagtctgctgaacccaatcaggaccaaccagggatctctctcccaaggtctcccagcacagaggggagatacatcgcctgccatacaaagcctcaaatggtgccatcttgatgctagcctggtagctgttgttataagcaaactctgccaatgcaagatgatcttcccatctacccttccaagacagaacacaagcacgcaacatatcttccaaggtttggatcgttcgctccgactgaccatcagtctgaggatgaaaagcgacactaagagaaagcttggtgcccaatgcactgtgaagactctcctagaatttggatacaaatttggagtctcgatcagaaacaatggacttaggtaccccgtgaagcctgattacttccttcatatacaaggggaccaattctgaagctgaattggtggtcttcatgggaataaagtgcacagacttagtcaagcgatccactaccacccaa

SEQ ID NO: 19121 - DNA, 372 bp, Zea Mays
cctgtcagtcgggttgccgcaagagaatgtgaggtacgaccttggacgtgggaccgagcaaatgacttatgggtcggtcatccgacttgcgactcaccaggagctagctcagcccacccctcgctctatgcgaggatttgaattttggtttttacctggtgcgaggcagctgcagtggtggcgtgatagaaacagaatcatcatggctccgttcgatgtgggcggctcgacgggtcacgaagcggcctactcaccttatcacgtgcgggtggcgtgggggtgtggttaaccgctctgtccgtcgctgacacctttcctcccagcgctccccgacgcatcgtccgaagcatcgcgagccctataaaatgtata

SEQ ID NO: 19122 - DNA, 385 bp, Zea Mays
cgaaaggatatggtggcataccccacatctgattcgggatatatggtggtggtatgtatgtataatgatatgacataggtgtgtatgggagtggaggtgtccatgcatgtacgttaggtcttagttggacattatgacctcccgtcctttctgattggtgaggtgatccaatcggcctaacctgctgtcactcctgggtgggtaagcgagaccgctttggtggccggtcactgggtccggccttctttttcacatatttagacaataattgatcaaaggtcgggctggatttgaccaactgaccagtggccttgaatgtgttagttttccacatacctatttctggtcgtcgtgttttgaaggtacgtggtcgtgtcgctcctcg

SEQ ID NO: 19123 - DNA, 539 bp, Zea Mays
aagggcagaagaagaggcagcttttcaggacgaggaaacgaccaaaccaacactcatcaacaaacattcctaaccgactccagtaactaccagcaaaaaaaagtagcggctgatcccagagatttttgtgcatatacttctttttttacaaaataaaggaggaacattttgagcacagggggaaaaaaatgggatgcagatttgagaggaaaaaaaagcttcctcgacgcagaaagaattccaggttctggaattgttctcttcaaaactgcgagggggggaaaggaggacggataggacacaagagcggcagctcaccttcctctcctgcctccggcgccggcagtcgtagctcgcgcggcacggcgtgcggcggcagactagctagtggtagtggagcaggaaacgatcgaatcgctctttctgttttggccgctgctcatcaaagctgtgcctgtgtcctgtgagcaaaagttgcagcgaactgcgatgcagggcaggggcagcggatttggtttgtccttaaaaagctgcagcag

SEQ ID NO: 19124 - DNA, 2169 bp, Zea Mays
gttagattagggtttcaaacctgggttagaattttgggatgttacaaacctaccccacttaaaggaatctcgccctcgagattcagacggggctcgagaaaaggtaagggtattccctcctcagagagtcctcactttcccaggtagcttcctcttctccatctctgctccactgaaccttacagagtctcacttctgagttgcgggttcttcggactgctgagtcgagaatcttcattggcttttctcggaactggaggtccttttgaatctgaattgcctctgcctcgatgtggttttctggtacttgcaggcatttgcggagctgggacacatgaaacacattgtgaatgtctgacatggattctggtagctcaaggcggtatgttgcgggtcccactcggctaatgacggggtaggggcctacgaaacgcggtgctagctttcctttcatttggaaccttttgacaccacgcatcgggagaccttgagataaacgaaatctccttcctcaaatctgagttctcttcgtctgttgtctgcataacttttctgtcgactctgagcttcaagtaacctcttgcggatcaaggcaactttctcttcggcttctttaacaaagtcgggtccttctagtgtcctttcccctacattggaccacattaggggggtctggcattttcttccatacaatgcttcgaacggtgatattttgatcctggcctgatggctgttgttgtatgagaattcggcgtacggcaaactggactcccaatccctatcgaacgttaacacacaggctcttagtaaatctttgaggatcttgttgactctttctgtttgaccatctaactgggggtgataagcggtgctaaaatctaacttggtgcccatcgcttgctgaaggcctttccaaaattttgaggtgaactgcgtccctctatctgacactatcctccgtggaatgccatggagcctgactatctccttaagatatatccgggcaagggcggctcctccaaaagtggttttcactgggatgaagtgggccaccttggtgagacggtcgattattacccggatagaaccattccctttttgcgttcggggcagtccgattacgaaatccatgcctatttcttcccacttccatttaggcactaggaggggttgcagtaggcctgcaggcttctgatgttcggcctttgttcgctggcaggtgtcacaccgggccacatactgtgctatctccttcttcattcctctccaccagtatctggctttgaggtctaggtacatcttggtggttcctgggtggatggagtaagctgagttgtgggcttcattgagtaggacttctcgtgcctctcccattggtacacacagacggttcttgaaccaaaggactccttgttcatctgtcctaagatccggaagttgctccttgcgagctctctccataagtctggctgtctctgcgtccaggcattgagccttgcatatgagatcttctagcattggcttgacttccaggctaccgttgtctcccagacatgcatttagctgagctgattccttcttccaatcttctaaaaagttggtccccttaatcccaaaaggttttcggctgagggcgtctgctaccacgttggccttcccggggtggtaatggatttcgaggtcataatccttgatcaattcaagccatcttctttgacggaggttgaggtctggctgagtgaagatgtacctcagcctcttgtgatcggtgaagatgtggcatttgttcccaatcaggtagtgcctccatattttcagggcgtgcactatggctgccaactccaagtcgtgggtggggtagttctgctcgtgtggcttgagtaagcgggatgcataggcaataactttctcattttgcatcaagacacaccctaggccttgccttgaagcgtcactgaaaatgacgaagtcctggtgtatatctggtagtgtcaaaacgggcgcggttgtaagcttttccttgatgatctggaaacttttctcacattttggagtccacacaaatttattgtcctttttgagaagttcggtcataggtttcgctatgctggagaatcctttgataaagcggcggtaataccctgccattcctagaaagcttcgtacttc

SEQ ID NO: 19125 - DNA, 436 bp, Zea Mays
cttaggtgtagcgaaaattagcaccaccatctcctttctttcttttatcccgagagcagcagacgagtcgtacgtatgtgagcctggtatgtatatatatagttagttctggcattgttattctcgacggatccatgttagttgctagcatctagtagcgcgtacagctggtagctcatctgacaatactggacaaccttagcttgctacacacaccacaacacctctcacagcacctgtcatagcacacatgtcacagtacatagatcggacatgcttgtcacagcacgacaccatgggctggtcggtgccaattaccatataacgcacaacaggtcgtggctttcacctccttacgatgaaccaagtgcgccggttgaaatggaggctgacgccaattaccacagcaccgacccctaccacgtagactacaaat

SEQ ID NO: 19126 - DNA, 405 bp, Zea Mays
taatagaagaagaccactggaatttgaagaaggagattatgtgtaccttaaggtgtcaccacttcgtggaatgaggagattcaaagttaagggcaaattgtcccctcgctatattggaccattcttgatctttagacgagttggggagatggcataccaactcgcgctacctactactctatcggatgtgcataacgtgttccacgtgtctcagctcaagaagtgtctccgtgtccctgaggaacagttaccaacggaagagcttagtgttcagggtgacttgacttgcacggagtacccgatcaagattttggatacattgactcgagttacaagaaataaggtgataaagatgtgcaaagtgcaatggagtcaccacggtgaagatgaagcaacttgggaaag

SEQ ID NO: 19127 - DNA, 452 bp, Zea Mays
cacaacttcatctagttctttctttatttttttctctcacacacattctctctttttgtgagcgtctttgtgcatgcttgtcggtggctcgtctggccactgtcaccctgtcatccccgcgcctttccatcgtgggcgacatcccccatcttgcagcaccgcctcctagccagatcgcttgtccacccacctccctgcatgtcatcctctatgtaggcgacatcctcatcaccacaatgggccaccttcgtgttgccacctggttgtcctatgcctccctgcttcagtcgatcgtccacctcctttccattccgcccactcgcctatcggcctccttgtcgtgtttgcccacccacctccacattgtggttgtccgtgatgaacatagaggtgaagaatttacaaactcaataatcaacaagcgccatggccttgtagctctccctcccaat

SEQ ID NO: 19128 - DNA, 284 bp, Zea Mays
cacaataaatctctgcctctcatggcccaaacgtgtgacccaccagatctgggacttcgaagacatgggagctgtctacggaactgatcccgccctcgccgctatggctggcgcagggtgaggtgcggtgagatttaggagaatgaagagtgccctcatgctcgtcttccccgctttggcattgatttcgatggcctacaagatatggacggggtcgatggaggaggacgtgcccgtcggcccctcacccgaggcgatgccgatgccgaagtgccagaggtgac

SEQ ID NO: 19129 - DNA, 429 bp, Zea Mays
ctcttacgatgacgggcgtgaaggtggaataactttgtattagcatctctatctttgagccatgaaatccttgctctcagccttgcaatagttctcttgcaagatgataataataatgcctgtttcttgagtctgagtttgagccagcgttcagcagggctgagcactctaccatcctgcgctatttccagcttatggaggatttctttagcaagagcatgttgggatctcacgtgcccgatctgcttttcgctccaggcctgcaaacttttttgcagctccttgtaacttcatttccagggacttaaaagggcatgtagccgactcaatagaattccacgcagcaaggacaatatcctgaaacccctcaagcttggtccagaaggattcaaagtggaaacgcctttttccggatttattatccctaag

SEQ ID NO: 19130 - DNA, 394 bp, Zea Mays
gttacgctgggccacgtcggtgttttagaagtaacagtcgagttacgctgggccacgttggtgttttagaggtaacagccgagtggtgcttgacgtcgtcggtgttttggagataacagccgagttatgtcagaaatcttgttttcccgagttatgacttggcactttttagaaacggtgcccaacccgggaaaaaccccatttatatcacgtcgctgcacgcctctgagttctgagccctaacttcacatttccgcctcaagccactcctctgtttccctctgatttcgcttttgttcaatccgccggcgagattacaatggtgcccaagcggaagaaccagaattttgctgcggtagtcattcctcccatcgaccccaacagctagttgtcg

SEQ ID NO: 19131 - DNA, 560 bp, Zea Mays
cggggacagtgtggaggccgatgccgattcgcctgttacaactgcgatcgtgtcgggcagcccgacgcgacctccttcggtattggaacctgggatctcgtcacctcctccccaggttggatcgtctgcgacaacgtcttcgaccacaccgcttgaatcagcacctccgatgccgcatgctgatcccaacgagggggcgctggattcaacggtgatcctgccgggtggatcatcttctgtggacgagcttcctgcagcctcgtcgtcagaggaagctgctggtactactcctgttgatccagctgttgctgctacttctagtaggccagtcactcggctccaacgtgggataatgaagcccaaggagtacacggatggtacggtacgctggtgcatgaatgcacaggcccagtccgaggagccgagctcagtagaagaagcacttcaagatcaaaaatgggcatcagccatggaaaatgaacatcaagcactgctgagaaacaagacatggcatcttgttcctcggcccaaggggagaaatgtcattggatgcaaatggg

SEQ ID NO: 19132 - DNA, 676 bp, Zea Mays
cttggccttatcatgcactaaagagaagagaatgactcaaaccctaattcaaatcccttgtaggcaaatggagccctagaggggattatggcaaaaagtctttgtaaatcacattgtcatgacttggactaattataaaagttgtaatacacttaataccctacaaaacatagtaagagtttgaccccaaaaaggattcagaagaaccccaaaaaggtcaccaaagagaagagcataaaagaaaaatcaggaattgctcaagttcaaaaccgaccctctttcaaagatcaaacatgttcactttaatcccaacctcaaaaccttatggcccaattgacaaaatggcgcccaaagacccctagaacaccctggaaaagtttgaacccaaccctaagccttttgacacgacttggcatggcttttgtctcggtgtggacagctctgacagagccgacttctcacccccatatctctctactccgactgtatccttgcttggaactcacataaaaaaggtaggatttggtgcagggaagagaccgtacatggaggttttgccaagatctgcacgctaaggcgatcaaaccggccgttgaaccctggcagaagtaaacccccacgtgttcgacgtgggctgacgctcgggggcgcgctcagagcacgcccacacgcgaac

SEQ ID NO: 19133 - DNA, 462 bp, Zea Mays
tcgacacatggcgcagggcagggcagaggtgatcgacggcgtggcgtgattatgctgtcctaattgggcaggagatgccatcgggacttgtttcgctgcaggaggcagcgctgtggccgctgtcgtgtggaccggtcctactaaatggtagggctggaccgcatgccccctagggatggcaatggatgtcatttatccgcgtacccgcggataaaaaacccgttgggtacggttttaggtacgagtctgtacccatggatacggatacggatagcacttgatatccgcggatatttttaaaacggatacgaaaaatcaatatccatacctgaatacccgaatatccgttaaaattacacccatcccacaggcccacgggccacatcgccacagcccacaacgccacaagcattctccaggctcccgggcacagagcgcagatctccagctcgtcctcagtcc

SEQ ID NO: 19134 - DNA, 345 bp, Zea Mays
caactatacaagaaggggatcagtcaacccatgcttaaatgcgtcaccgaaaccgaaggcattcaaatccttcgcgaagtccacagcggaacttgcagctcccactctgggcctagggccctcgctgccaaggtgatccgtcaaggattttactggcctgccataatcagcgccgcgaatcgagtcacgaggtcgtgcgaagcttgccagaagttttctccccgctcgggcaacccttcacagttcaccaagctgatcgcccacacatggccacttcaacgctgggggctggatattgtcgggccactacctatggctcaagggaacctcaagttcaccttcgtc

SEQ ID NO: 19135 - DNA, 589 bp, Zea Mays
aaaacgaccactctcagcgctgcctcgtgctcgatgccgtgcccaggtggtcgagcgcaaactggcgctcctctgcgcacgccttgagcgcatgtagtagtggcccacgggtatgcttgcccgcgcctataaagccaccctcggacgcgcgacactcctctctgcacttgcccttactgtcccgacctagctcttagctccggcgacctctacgccgcccgcccgagccacccaaacgcgggccaccgcggccagccattttcgtagacacctagcctcacctgagcccctggacagcttccccgtggaaccgtgaagcttcttcaagcaagaatcgagaccctgcctcaccggagcagcgagatcgccctcgccgggctaccaggtaaaccatttttccaattgcttgtgcctacaacctccctagcctcccgtggagctccccagctcactggattgagctacgccgccgtggttaggctggaatccccgccgccgacgagcttccccgcctgcgcacgaggtccgactagctcgagccatccccgacgacaccccgcacaccaacgagaccgccacaaccttcccc

SEQ ID NO: 19136 - DNA, 506 bp, Zea Mays
gccgggtggggcaagcggcggatcccgaccgattcggccgccgttgtgaaagtgaaaccgcgtcggacttgttcatcctagaaccagcgcggaaatctaccgtttccaggccggggttgcgtctactctcgtgtggatattccgaggagcagtcgacattcctcagtctcctccacaaacaatctgacactcctactccactgtgcagtgtcactggtaacgagtaaacacattaaacagcggagtatctcaagaggaacagtgatacaggatgtggtcctcccgggacgtcacgtacccatcatcctccgtgccggtgcggcggtgcctggtccatccggtttgttgccgagccctacattttggcctctgcgtccacaattgagttgatggatctctcccctctgaccctctcccataggggtggggctcctcacccgccttcaatgactgataattgtccaggcaaagcatagctatagcagtcacaacacaaactacaattg

SEQ ID NO: 19137 - DNA, 329 bp, Zea Mays
gatgtgcgcagtgccttctccaggctagaggaagggtgttcgtggccgcgacacacagaatttgccaccaacaccgccgcaattcctcaccgtcgatctgggcgccgccgccggccgctgcgtcgcgtggtcagagcctctgcgccatgatttcggtgagaccctctcacttttcgattttggcatccttctcgggtcgttactcgcccttcgatttgggtttagggtcaccgtggccgtggattggtggccgccgacgatgtcgcgccgtgggttgggtggcggcgccactgtttcccaggtgtgggaggacgtagcacctgtgtcgt

SEQ ID NO: 19138 - DNA, 283 bp, Zea Mays
cagaaacgtctctcgctcacttctctgcgcatgagggtagtgggagaaaaaacatctacggtgtctccacggcttcacgcatggtgtctccacgcatgcaggatggaaccatatcatgcaggaaaccaatcactggctaaagcctggtcaacgactctggtctgcctagacacggatggcctgacaaccaatcacagggtataagtcaaagggaccaacacaaaatagtggctcttgtaagcaacaagttcccaatttcactttcacgtaccaaacacgtttt

SEQ ID NO: 19139 - DNA, 960 bp, Zea Mays
atttggcttgacgagttatttagctagtctcttggagatactctaaaaacttaattgtaaaattagtttgtggtgatcatttcattctagtcggagcttcgatcatcgttgaagaagagtttcggtcaacatctaatatcggaatatatgtagacaaggttggattgctattttgctctactaggtggtagtaatggaggatgaagacatcaccacgtctcaccctcaccaatgccatgtagagggcaccatgaggtcatgagccaccgcactgtcacagtgatatccaccatttggactcagctcctcatgatcacatgcaccaactactaggagtagacgatgttgatgcaagtgaacttagagactatagggtggtggtacattgccgtgctagaggaagacgatgatattgtctacctccacgactgtctagtggtcgccgcaatcctacgctctagccacctggcatactgaccagtctttgagagaggagaacgccatcaataatgtcactagcgattaagtagatccgtgttggggtccagcgagtgcgcaaggctaatgcacaacaacttcgtcagcgcgtgcgcaagaccaacacacatcaacttcggtatgagttcaaagccttagtatggaggagatagagaacacttaagatttcgtgaaccagatcactatcctgaccgctgatccgtgtctcctcagtaacaacgccactgacgtcgaggtagtgtaatgatatgttcttaagaagaagagaagttcttgtttccttgtacgttagtagaagttttaggtttatatttgaaagaccttgaaaaaccttagtcataatgcaaaaacgaggatagtttgctatcaagaaggggagaatgatgagaacattaccagctcagatatgaccatgttaatggctcttattacaaaggtgaaactctttcacattgtaactaa

SEQ ID NO: 19140 - DNA, 506 bp, Zea Mays
aggagctcgcatcgctttccaaccttgccactatcggcttttgttacccgactgtgcaccacgggattacccacgtgatgcttttgggtaggacgacatcattgattgtgactcgatggttcatgtggtgactcgatagaaagacatgcagacttttacaggctcgggccacgagagtggcgtaacaccctacttcttgtgatgatcctggtattgaagtgagattacaagctgagaactatgagtgcggtgcgctgtgatgagatccaaatggtaggggtgctcctggtcttatatacacgaccaaggagtgctatcccgcataggtgataaacgtaatccactcgcctatctccttatttgtagcgaaccatcttcctacttctctggaatcctctccattcatccgctcgagttactgtcgggggcttagcctgtcgggtgatcacaaccgtccgccttatatgctcgtgccccggtggtgcttaactcgggcgttggccttt

SEQ ID NO: 19141 - DNA, 569 bp, Zea Mays
cgtgggcggcgctaacaatgcaacgacgacgcgctcccacgagcgtggcctgtgaggggcatggcgacgtctaggctttcccactcacttctcccatgttgcagacagcttaccgctgagcctgagaacgaaggggcgcctaggagagggaggggactagggaagagtatggggggagactagggagagggagggcaaacagcaaagcacgccacccgcttggttttgctatatatagtcctcaacctcgtcctttgtcgcgacctccctctccgtatgtgttttgttgctcgcaactccgcacgcagtgtgtcgctctggctagctttcatttgctcagactttttgtttgcttgtcttttgtcggttcgggaaatctgcgacggcagggacttgcgtttaccactttccctgtaaagaagaacaaatgaaaataaatatctgttggaaacttacagccagatctggtgttgagaacagtcgaatcccatatgctggagatgagagtgatccaagcacagcctggtgcgcccacgaacagaagtcaatcatggccttccaaatgtagc

SEQ ID NO: 19142 - DNA, 607 bp, Zea Mays
agcgaatcgagcacctccttcctgacctcgccagccaagggcactgtcttcggccccaatatgtgcagggacaaccaggacagggtcttcttcgtcttgctcggttcataggactcgagcagcgagtactggccgagcttgttgtcccagcatcgcggcgaccaccaccacttcctactggtctgccaacgccatgccgccaccagtttcatcagcgctcgacggatgcccaggcctcgcttccagcaccgcctcatgccgtgcctcggcttgctgacgtagtcgcacacgaactgtacgacggcccagtcagagtaccccgcagtcaggtgttgcagaatgtctatgctcaggagcatggcgatgaggaggacgttgttgaagtagataaaggtgttctcggggggctcgtcaccatcatcagacggcgattcgaacaccatgaagtccaagagcaccttgaagaagccaaggaggacgaagaaacggatgaagcccagcagcctgttggtggggaagagcgccggatatttggtgtagaagaagtcgtacataaaggacagctcgacctccaccacacgaaaggctcgctcgtagtcgtagcgcg

SEQ ID NO: 19143 - DNA, 470 bp, Zea Mays
cttcatggaactagggaaggcggcgacaagagcggctaagaatgaagtacccaactctgtagaatgtcagataagacggactccttaccgaagatttgctcctgctccgccaatggttacatgttgccaaaaccatcgaagtctggtaagagtagcatgatttctattgcatagagcggccccgtttggacagcacattttagaggaaccatacagaaattggaccaattttgcgtaaaagcatagtaggaattaggaaactttccaaagcagaccccgcactatcccgtccccgtgcccggtgcccccctgttcccatccgctgcaacggcaagcacgcagattcgcagacacgatggatctcccgaccccgtctgtcgccgtccctgggatgctcagacctgttatcccggccgccggcaaggatgcgacgtgaagccactccagtcctctccctactcccgctgctc

SEQ ID NO: 19144 - DNA, 873 bp, Zea Mays
ctggactgcattccctctctggcaccttgcttgatgaccaggttcaaatttctctccacaagtgaagcatagaccattcactcttccatactcatttagttgtctctccttactccatcatcccacctcaacacctttaccttctgctctatttcctcctcccaatctaccaagaacaggttgcttggtaaacttcattcctcccttatcaataatatcctgctgaacttgagccaatagttgtgccttgtgaacagtagcagggagctgggacataactggatgctaaatttcattcttcagtcctttgacaaactgactgacataaaatgtttcatccatcataggagtatgaacaacagtagcatatcttgcttcctcatcgctcttgggtattcctcggctccaaatttgtctaataccagcctagacaaattcctccaatcacccaacccttgcttcaacctgactacctgcaaccatcgtgctgcagtaccttcaaagttgagagacaccatagtggacttcaaaaaattagggacccggtagaggttgaagtaatcttcacattgtatgatccaaatggctcgatctgttcctctaaactttgggaaaggcatccttggtatatgttgttgcaactgttccccatctctgtccagttacccagaactctcctctctacctctgtgcattctttctcctctattctgagaatttttgttgtctctttctcctgcttcttcattcccataacgatccatatcccttgccatggcttccacccgaagaagagaaacagccttcccggtctcctccatttgcttgcgaaacagcgtcctctcttcctccatggcatcaaccttgcctgtc

SEQ ID NO: 19145 - DNA, 321 bp, Zea Mays
ttggtgatcttcgtgttcttcacgttccgacattgtcacagtatgctgatatcttcaccaaggggctaccttcctcggtcttcacggagttccggtccagtctgaacgtctatccccacgacgctccgactgcggggggtgttagcagttcctgtcgtgtactagactaggatagcaatctgtgctattatggatagaaaccaggctagttatggtaggagagatcctgattggtgtaggggatcaatctggatcagcccacactaggaaggcctgatactgattgatagagggtatcaacccacactaggaaggcctgat

SEQ ID NO: 19146 - DNA, 386 bp, Zea Mays
tggaccaagttttataccagttctatacacctttaggggcaggacttttaatcaaagttatacaccaacatgtggtattccactttgttataatactagaagtccagaactgtatggatttgacactaccagactttcaaagtggcttcaaaacataaattcttcagtttcagagattacaccaagtctgaaattcagcttctaacatgccacctttcagcaagtttttcaagcagttccatatggttttatggctgggcaacttaatcaaacttgtgcgcctagtagatctctacagatttgatacagtgatcatcttcaaagcatccatagatcaaaagttataagggtccaaatacgctagttgctagcattttcagaaaccc

SEQ ID NO: 19147 - DNA, 421 bp, Zea Mays
tggcgttggctaatctatcacggtctgaaaacaaaagcaatctctctagatagataaaacttgtcgccaattaagcattcccacctgcgaaacgagcatgagtaatcatcccaaatgttttgcacaattgtcaccaaaacgtctttgatcaggtaggtcagacgcaacacagatgaacttgtgccgcagtttgtgaatgacgtctctcttccgaggaattcttttgggggggcaagctgaaaacagcagctagttaagaacaagagtttgaaattaacatctgtaacaactaacagaatcataatttaaaacttaagaatctaaatttatgacaccgtcagactcgagttgcaagaagagacatgtgtatcgcatattcacatagcatctatattcatatatgtgttacaaaatggacata

SEQ ID NO: 19148 - DNA, 347 bp, Zea Mays
tgagtgcggacctgagagcggctagccccgacagggtgattcacggcggcgcagatgatcaatttgggggaaacccaaattcttcggctatggtggctaatcggatatgagagttagtgtcctgggttcgtaataacttggcgaagtagagtggggcatcaatttatagaagctttaggcggtggctccgaatttgggaggagagtggagcttatctccctggtgaggcaatcacgaggctcactatggagcgcatgcgttcaccttgcgaccgtcactatctcgaggatgccacgatcacggcaatgtggtgaatcaggtgactacgtgtcccttgttgcgctcac

SEQ ID NO: 19149 - DNA, 406 bp, Zea Mays
agccagccaaggccttagcgcaccttaagtcccctccccgtggccggaatggctcaccggagttgctccggcccgcccgaggccttccaccgccgttctcccctctctgcccatggattcatggcctcttccccgccattgagttcgccgtggcgccctcttctcctctacccaactccggtgaccctggagccaccctagctcgtgccttcctcaactctggcgacttcaccaccgtagagaggagcggtgccgcttcgcgcatgtttgtttccttcggtctgatttcccccgtccgatgttgattgaacggctcggaccccctcggacccctgcagccgtctgtttctcctctggtgctgggcctgcttggtcatcgccccctctgtcgctgacaccccctggc

SEQ ID NO: 19150 - DNA, 908 bp, Zea Mays
aaaccagggaactacaggggcctctgcgcaagttgtttcaagactcagaatactatttgtagtactgcgggttgattctagaaaaacacagggactcttaagcaagtttccagggccgaaggggtatcggatgcgcacagccgttcagattacaaccaacggcctggattttatagcaagctacacgttacgcatgcgctcggatcacgatcctgtgatccacagagcgccacgttcacaccatatcccaatcgttcccctacggatctacggtcacgatcagttcacgcgactgatgactctatgagttgatctggtccgctcgttcggatcgaatggcacagatccacccacagaacaagtgcccacacattcaaatccgagccatccctctgagatccaatggcaccgggcacgtcacctttcccagctacccagccgacccaaactacggcggcgcgcgagtataaacgcggtggcgccatggtcagctacccccccccaagctaggccccactgcccgaatccccaatcctacagacgctacacgtatataggctgattgcgaactcgagggaggtacataccattgacagaaggcagagaggaaagctagccgcagcacacggcggtttgcccacgaatccgaactccggcgagtaatccacctaactttagtccttcttttggcttgaagatcccacgtacagatactaggtgcccgaccgaatcaccattggcacccatcgaggcttagtatggtcgaggacccggagtttgtcgatggcggatgtggttgggtccatggcggtgcaatcagggatggatgccccaacaccgatcgcggggcgccgatgggatgggcaagagggtcgcggggctcgagcttttatacaccgggtcctaag

SEQ ID NO: 19151 - DNA, 538 bp, Zea Mays
gttgggagcagcagcgagctgtcactttcgacagcgagcaatgcttccatcaaggatcccaagaccacagatccagaaagaaggaaggcaagaaaagaaagaggagaagccaagaccgcaagaagagaagagcgagaaaagaagaagaagctagaagagaagcttcagcagaaggaagcaagaagaattaaaagagaagaaagagtcaagagaaggacagcaagggagaagatgaagagcaaggagcttgatgcatcaccaagtgagctatcaagtagctccgacgatggtgatgatgatatctcatatcaagcttcgaagaatggcaagaaccaggatgagggcagcaccaacaagaagaaatatgtcgttgtatcctttaactattcatcttatttgactaaccgcgataggaagtctttcatcaacgttcctgcgggcaagttgcctcatttcgatgggaccaactttgccaagtggaagcacttgatgaaagcctatcttatcagcattcaccccggtctttgggagattgtgc

SEQ ID NO: 19152 - DNA, 678 bp, Zea Mays
gaacagcctgccatatttttcaagagcttcatcactaatcacttccttcacattaacaatatccattgttcttatcaggtcaatttggatctgcccggttgcatcacttggggtcccccgcttagccaatctgctgcttcggcgaggaatgaaatcaggtggtaactgtttacttttccttttcaggggtgtcggcgggggagcaggtcatccatcttcttcgtcaccatggttacaaaatcactaaccggggttgtgtctttatcatgcctagattccaccagagtatcttcatgtgcgctaggcacctgccgcaagggatccctctgccttcttctgctatataccttcaaggttgagctctcatgaatggtgatagagggatccaaggtgccatgagccgaaacattgcactgaccgtcatcttctgcagcttcagtcgcagaggacagacaatggggtgagactagcccagcgagggcccgtcccagcgacacatcgccgacgtcggggaccagacgtaggcccagtggcccaagagacccctgcggtccggcatgtttcacgggtgggacagggggaggggtttgctattaaggcggcccatcttcaaaagcggaacataccggcccagcggcagtttgaatacctactgcctcgggaccatgcaccaaacct

SEQ ID NO: 19153 - DNA, 1062 bp, Zea Mays
gtgatagaggcttgtggatctcgtagagtgtttacgatgacagagccaaactgttgaagtggcaaaagcttcctccaagaccctcgatgctggctttaaggatcaagagaacagtagcctttcacaagtattacgaaggcatatatgatagtggaagaaggttgaaaaaaatagtatcaacttccacacttacaaccgtacgttagactctacatttacaagatgtccacagtattgctcggcatattggactttttccatgcttcccgtgctgactgccgataactttcaagagttctcgaaggttactactcctctgacgtagacgacgtaccttggggaccttttgtgatataccttcggtccttatattgtacattagggaggttctctgactctcgcccctttggtttcttcataatcgatctatcttctacctttggtaagatgcagggaccatgttgcagcagagggtgaggcagccgcatactccaaacgacttggtcttcctctccccacatgtacgtacgtactttgcttatattgaaggaatgcgtttattccattcgttcaaacaaagtcgacatgcatgggcctcataccaacgctccttgtttggtcgtaggaagatcaatgcagttgatttccttcagaaaatcatgtgtaaataatgcactatctatactatgtagtgctgtgcagaggagaggaagattccgcttgggcggtgtacagtagcagccgttccggccggcaccgtgatgcagggacgacttctgactttttcagatgctattacgtttgagtttgacgacgaactctgcggccggagaagggtgcttttttttatatgcaagtcatgcatgatgtgcaaagaatctattccaccggcccttactaaatcacatcctgatgaccacactactgactaaacatttctgccgcgcatgcatagcgaggattcttccttcaacaccgccaattttggtttgtgtgttcctgaatcatttgtaactgttctcgtctggaatgaaagctacagacataacattatacgagttt

SEQ ID NO: 19154 - DNA, 763 bp, Zea Mays
gtcgcgttatccctctcttgtgttggtccttcctgttagtcgcttaactgtgcactcacgtgaacacaatcactgtcttgtgggatcgcctcatcaactccatcttctcgctgtaacaaactccacacgtttgtaacaaccataacagccctgaaattccttgccagctagacctggtcgggggatcccttgacaggtgtataaatgcggatccttctaagaccttgtctccataaaatgagtagtcgaggcatgtgaatacttatttatcgagagcaccacgccggagcaacgatggagaaagagagagtgcacacgtcgtggtagtcgccttatgtctacatcgtcgttctggttctggctattggtcgtggagattcaccaagggtttgtgtagcatgcgtgctatgatgctaggcgaaagggcttgttggaaccgtagagtttcttattgggatcgagtggcgccgtgtagctacatatggcgtggatagcgccaccgacgcctcaaccaccggtaagtcagtccctatagaggtattccatttccccgcattcgtttacactgtgtataggtcggagtgggtcactagagcattggggagcatacaccgacaaggggcgtcaccgtggtggatgggtgtcgttgcctgatgcatcgggctagtggatggtgataattaattgaagaataccattcaggtagatgcgatctagactcttgatcgtcgagcggacgattaggattataaggggcatacca

SEQ ID NO: 19155 - DNA, 664 bp, Zea Mays
tccacaagacaactccgtgcaaaagtcgcccaagggtgccgccgaacagttactacatcacaccggcaaacaaagggcaacaagccacattacaatacaagtcgcagattacatacacacaacgaagggtcaccagacccaccgcacaaataaatacaattgcgttctccctttactaccgcacgacaagtgagggcatcacacatactacatcggctcaaccttcgggataatgcccgcctcccgataattaaacaacatcattttcaattcatcaccctcaaacaaattccgcagatccccctcaccaatactcgtcccaaacgacgagaacaacaagtcgcgttggctaccccgatctacacaaagacgagtttgctccagccccatccgacggctcctaccacttcgcgaactctcgccaacactatgcttcgcaaccacttttcgttgacggcgttcgatccttgccccagctaggggatcccacgcttcacccatctccagccgcggtgaagactccaccgcggccacatctaacgcagcaaaataatccaaatcttcatccgaagactcttcagtccaggaaaacgggctttcaaactcaccaccatcagatgaaaaagacccagattcagaaccagacaaactatcattagcaggc

SEQ ID NO: 19156 - DNA, 828 bp, Zea Mays
gcccaattgaggatttcacccgcgcagcccactccacactcatctctccgcgtggcccaacttcggctgatgtgccgacgcatggggccatggtgtcaggtcttcccctccattggcgtcggtaacagaacccgagctcgccgggggcagttgagctcggccgggattttcgcttggattccgcggacccgcctcgcaccgccatgctttaaatcctcgtccccatcatccgaagcaccggaccatctccctcggccgcctaacccccaagccgtgtgacgcccaaatgcccctgtaacaccgccgccgcgtgccgtggagtgtggagggagtgcggccgcaatcgctccttgtcggtgcagccaattgggacacgccactgcaccgcgaccctctcggtgcggcagtgaccgctgggcgaaataggacatcgccacgacatcaattggagctcgaacccaccgtgctcacacctcgccgtggacgaagctgggcgcaacgaagccagtggtaaagaaactcccatttctcgcttagatttcataccctgtcgtgttccatcaattcggtttgggaatggcttatcgatgcctctggaattgctcaccggagctattgctccgccattggtgccgcgctttgtcgagggtagggcataccaatgcaccgctcgggttgggactaccttcaacatgttcgttatggcttagggttgctcttgcaatggaaaaccgtagttttaggaaacccgggcgaaattccatgcgtctccggtgaactcgccaccgtgggcggtggcggcgccgccgcatcctgaggtgtaggttg

SEQ ID NO: 19157 - DNA, 687 bp, Zea Mays
gtatgatctttataccaaaatgaaagaccattagtccaggtacaactttgatgcagactcgattgcatgtagtcgcataaaatttggagcaatagtcgtttgaattcggcctggcaggcgtactgttcaccagaattcagaaaaatctcgccggggataagatcaccaccgcggctgaggattggactgcggtcgtggtaaaaatcttgcgcgacgtggcacataaacactgaggtggtgcttcccagttaatcgacgatcaccggacgctcgccgtgactctgccagcgcgggtgagctcgctagcgcacatgcagatccttgaatctcatccaccaccggccatcttcctataaattgagcccgaccgctgcttcttcaccacatcacacagacacgagtgcttgcgcaatcgacccaattccaccgaagaactcagataggccataaatctcctcctcactgttcttagcgccgccgtgaaggacctcttcgtgggcagcccttctcgggtcagtactcgcccaattgtctcttgttctagcatttctttagcttcctattgctctcgatgccgtccaattgaattttaccagagccccaccaccagaacacccgttgttccatagaacgccgccgtatacaccctctatgtcgacccgcttccctaccctcgttcggcctaat

SEQ ID NO: 19158 - DNA, 336 bp, Zea Mays
gttcctgcaagggtactatcatccaaccgacgtcagcgaggccaagcgcctcagacatcgaagccgggacttcgcactgattgaaggccaactctacaagaaaggggtcagtcagccaatgcttaagtgcgtcaccgaaaacgaaggcatgcagatcctacatgaagtccacagtggcacgtgcggctcacacgctgggccaagggccttggccgccaaagtgatccgccaaggtttttactggcccgcaatgatctgcgccgcaaaccgggtctcaaggtcctgcgaagcctgccagaaattttctcctcggtcaggcagcccctcgcagtatac

SEQ ID NO: 19159 - DNA, 527 bp, Zea Mays
ctcctctcaactgatcgaataaatcttcaattctaggcagggggtacatgttcatgacagtaacttcattcaaggctcgataatcgatgcacatcctcttcgtgccatccttcttctccacaaacagcactgggtctgcccaaagtgaggtactcggtctgatgtagcctttctccgacaactcatcaatctgcttcttgagttccaccaactctggtccggacactcgataggctctcttggatataggggcggtgcctggtataagctctatggcaaattcaaccttcctttcaggtggcatacctggtaactccttgagaaacacgtctgggaaatctgacactaccttgatagcctctaatggtttaatctcctcaatatgggcggtgacttggtgacaacttactttccttggtccagacaagaccaactccactaacacttcttctcctgatagggacactaacttcaccattctcttgtcacagctaagactggcttgatacttggttagccaattcatc

SEQ ID NO: 19160 - DNA, 295 bp, Zea Mays
tgtccatcgacatcccataaaggggtcatgactggtcgtggcaacctatagccgatgtattacacgtgttaccccctaattcaacctcgtgcgaaggaaaatttgcaatactagatttatcaaatgcacatactagtctcctataatcattttacataccccctatgatattttgcatttgttctcgctgttcatctacataattcttaagagactgtagctcgtttgcattacttacattggggatatctagtgtgggtcggagcgaagttggatccgtcgcccgttgtctgac

SEQ ID NO: 19161 - DNA, 721 bp, Zea Mays
accctttgggctcccacccaggggaccaagcttcaataaactatctggacccactccatcgcgctacagtccgcagagtcagagctcccttcaggcaccctccgttgcaagcaaccaaccaccagcaaatgcttgttggcactgcggagaccccagtcacttcaagaataactgccctcagttgaaggcacccggaccgacctactccaacttggtgaatggccccaagattccctcggcacctacctccaaggcacctccttccaacagccagcagagcaggactcagtaccagggcagagcccgagtcaaccacgtcgacgctcaagaagcccagcaagccccgggagtagtgctcggtgagttccttgttgaatttactcccgctactgtgctttttgattcgggggcatcccattcttttttagccactaagtttgtggaaaagcatggcatcccctctacacccctagccatccctttggtcacccgaaccccaggatcagacctcatgtgccaactcaggtgctcccaagtcagaattctcttaagtggggtagtgtttctggcggacttaaccgtcttgccatcccaagggattgatgtgatcctaggaatggattggctaactaagcacaagggtatcatcagctgcgcaagtaagaccatccttctcaccgatcaccaagggaaggtagtttcctgtcaagcccagccgccc

SEQ ID NO: 19162 - DNA, 381 bp, Zea Mays
aattgtaggtcaccagtttggacttcaaaggaatgatgtgctacttcagttagatcttgtgcaagccttaatttatctttccatttaacgccttacaattgcttcatatgattaaacactggtaaatgtgattacaaaactaggtacaaagaaatgtttagggagctgccctatatgctttaactagctgatttcgtttcattcacttttcatttatggcagctgtttaaattccagtaaagcaaatgttcatgtcacatttggttactgttgtaccatgcttatactactgctatggccagttttgacatgagaagattacttatgtcaatgttcttttgttacagggtaaacgaaggttcctttatagcttacttgatg

SEQ ID NO: 19163 - DNA, 598 bp, Zea Mays
ccggtggcgccaaaagtggctgcaaggttgccatgaacaacgctagcgagaattccgccggcagacctcgaagcgagagaacttcggtgggtttttattccacgcaagatcgtgccaaaatcgggcgggcctagggacgttgtgacgcatgtggctcagctgaccgagtcctcacctccagcccaacgaactctgttgtccacattgcccactcgagcatggacccggatcacttgacgaagagaagcatgtgcctctcggacaggcacgaccccgaaggcaccaccgacggccatctcgaccactccgccctcaaaggagatggaaggagtgcgcagcaccatacccagctccttcctagacatcctcttcatccagggaagggtggaggacacactcatttccaacgacgagcccaccgtactgggggaggaacccccccagcatgacgcacgccaacaccgcaacgtgtggcgtcaccatgaagccggggaacgagatccaacacaacctgtctcccaggatgaggcctctaagtaggggaaacccccgacaaaagagcgatccgagaatgccgcaactcctgtcgtcgtgatcg

SEQ ID NO: 19164 - DNA, 573 bp, Zea Mays
tggcgagagagatggatagcggtcggtcggaccagtgtggtgaggttgaagatgacaggtagccatggatcgtagtatggcggctggggtattgtttggtgcagatgtcggcggtgtcgcactctggtgcgggctgcgtgctcgccagtagaccatcggagagagcgccagtggaccatcggagagagagagagagttccagggagagcgcggcgtctgacctgggaacgaaggaggacgaaggcgccggggccgctgaatttttgatctgcggtggagattagatcgtcacctctcccgttcgcgcaaccaaccatgaccgtcgatcggggattgcgcggataggattagatcttggtgttttatatcgggtgcgttgatgcgggatccaacggctacagtcgcgtaccggttcgggaaaggctagatctaatctcgcgcgtccacacctaatcggacgacttagattagacggtaccccttcggctagggagttttgctaaatagaccccgctaaactttggaagcaacccgcagtccactgggaagtctcctgtgtctcggttacatttg

SEQ ID NO: 19165 - DNA, 528 bp, Zea Mays
cacttcgacagtttgacacccagggtgcagctgctgctgatgatgatgatgatgatgattttggggttcctcttccgcctcctatgcctccacgctcacatgatcatgaggctgggagttcccgtgctgcccctgctcctcctccagctttggaccctgcccttgctacgattcttcagactctcacccagcagcagcagactcttacccagcagcagcaaactctcacccagcagcaggctctcctggcagccgagcaggcccgtttatccgacaggatgctctcgatgtttcagagcatgcaggacaggcaggatgcacttcagcagcagcttattcaggatagggccgagaatagggcattcatggccctcatgcttcagcattctggtatctcagcacctccggttcagtctgctccgccttcttcgcttcacgctccagtggtgccttcgatcttgtctgcaccccctgctgttacctctccgctccggccggtcaccttggcgttcacttctccggttctca

SEQ ID NO: 19166 - DNA, 413 bp, Zea Mays
tcggttttcctctcaggaggtttatgcacacctgactggctcccgtcaaacgctccctctatttgtttggttatggaaatctaaatgccagcccaagcacaaagtcttcttctggctgctgcttaaaaatcgattgaatactcgctccattctcaggcgtcgcgcaatgccattagactccttcacctgcgataactgtatcctccagattgaagaaacatctatccatctcttcttcaggtgcaactttgctaagagatgttggcttcttttaggcctccttccgccatgtgctacagatcttctgcataccctattgagaattagaagacgtttgcaagtcccctggaggcttgaagctattatcatcatgacgtggtgcatttggaggtgcagaaataattggatcttca

SEQ ID NO: 19167 - DNA, 738 bp, Zea Mays
gacgaggacgaagaagaagaagaagtcccactaattcagaagaatagtcggcggtatagaggcagtgggggatagcgatattccttctccagctctatctgctcttgttagcctaagagaattatccataacagattttgatcaggctctcaaggatgttgttcctgagggtatgctgtcagagccaactaatggtgatatgatggacgtctgctctgacactccagatgtgggattagaggtatcctgggcagcatctcacgcatcgtcgaccttggagggtggtctttagtaccaagaggttggtcaagattgctcgattctcatggaggtgactgaaaatccttcagccttagaggtggctgttgtagagaactcagtcctcaagggcagtgctggcggttacccagcccccgagggtgttgccagtaatgatctggctcgggtgggtagcgcaagctgcgacccagcccccgagggtgtccgagcgagctccccttctcatacctccatggatgtccacgtcgggtcgtctccaccacattctggtggagtgatagcagtgcacgcttctttagcttcaagtgaaggagtcgccttagaggtcggcgcaccagatgccgaaattacgatatctgctagtggggctgaatcaatccctgatgatgctcttcagattatcccggttgatattccttcatcgagctacaacccagcttctcatgacttgggattttc

SEQ ID NO: 19168 - DNA, 333 bp, Zea Mays
gtaacgtcagcgttttttagaaataacagctgagttaacttgggctgcgtcggccgttttggtaataacggtcgagcgatgacatggcacgccagcgttttagaaataacggctgggtgatgacatggcatgccatcgcttttagaaataaccgctgtgtgatgacatggcacacctgcgttttagaaataaccgtcgggtgatgactgggcactttttagaaatggcgtctggtccgggaaaaccccatatgtactgcactgtcgcacgcctccatgttccgtgccctagtttctgcttttctgcatccaggctttctctgctctcctgcaa

SEQ ID NO: 19169 - DNA, 525 bp, Zea Mays
gggttccctaaacgctcccccagctgggaggaacccttcaaggtgacggaaatgtgccgacccgggggtaaccaccttgctacagttggagcaccttttcctaacccctggagcatctctgtaagttctatccataggagcaagtctgtggggtttagtttttctcccttttgtaactaggttgcgcatacgtgtacgccagcctggtaaggtccaccctcataagcccggcctgatggcctgcacccatgcatgtcgagttataaagagaagattcaccccctcagatgcgctcctatgacagtcttatcctcctgcctccatggttctatcctgcagttcccggatattatttttatctaacccacccgtacagttcctatctgtcctggcatgaagacatccgaattgagtagccaggcctgcagtttaggacccctctacgaaagcagggggttcggtagcctggggactagttctaaagaacaggagctcgttccatggggtcgtccggagcagtgtggc

SEQ ID NO: 19170 - DNA, 317 bp, Zea Mays
aaactattgaaaatactcacttcctttgagactgtcgtccaacggtgccgcaaggatgaccaattgcgatttgattcaaaggttttattctcacaataatatttttcaatcctttcccaaaaacgaccatctttttgatctcttccagcaataggatctttgctaacatttagatacgccgaaatcagcaacatgtcctcctcttcagaaaaaattttggatcttccctttgaatgtgtttgtgagctcatgtcagctacaaccggtgactcaggcaaatcattatcgctttccacattgtcctctgagcctagccc

SEQ ID NO: 19171 - DNA, 694 bp, Zea Mays
cgtggttcactcgagccctgccatgaaactaagtcttgcttagctggctgttggaggagggtgccttggaggcaggtgctgaaacattcttggggtcattcaccgagttggagtaggcaggtacggatgtcttcaaccgaggacaattattcttgaagtgactggggtctccacagtgccaacaagcattggttggaggttggctgcttgcaacagatggggtgtggagggaactttgacccggttggttgaaacgtgacggtgcagaccttgttggcttgctgaagttcgaccctttggaagggaacccaaaagatcgaaccctctcgtgcctgtcctgctgctgagctcggagaacttgaaactttctcttgaggtggcctttttcttcttctcgtgctctttccacctggatggccttgttcaagaggtgcgagaaactgagtaagtcttggctggcgaggatggtcttgagttctggtctcaaccccttcaagaaacgggccatcttcttggcttccgtgctgacatcatcaggtgcatagcgagcaagttctgtaaatttattaatgtattcgctgacggatctccctccttgagttaactcccgaaattcttcttctttgagctagacgattcccaagggcacatgatgctctcggaaagcggcttcaaattctgcccaggtagcatc

SEQ ID NO: 19172 - DNA, 566 bp, Zea Mays
cacacgacggatgcaaggacgaacctagacgagaagagacccagaaggaccgacgaacgggaggagggccaagaagccggagcagcgccgctatgccaagacttagctaagaccttgtaaccacctccaccacaaataagagacttaggagcctctcctccctctctctcgcccgaactagtataaatcttgcacccaccgcgcacagcgttcgaagcccgtaacacgcataataaatagacttgtcggagtaaggttcgaaacgccgacaaacatgttccaaacctttacaatgagcgtcagaaagtcctaaaagactttgcgaggatggctggcagcgaggtcctggtcgcgcctctcccctcacacaatcgaacaactacaatctcgaaccgaatcaaaactaactactcataaatttaccaaaatcggagacctatgtatctcaatcgataacctagcatctatgttgtgctgacacctattagccctatttacacgggtcattatcttgatttcaccaccactgttgcttgcctgcacgtggcgcatcagtgataattttg

SEQ ID NO: 19173 - DNA, 771 bp, Zea Mays
ctttattccagagggcaccactttcatgcaaaagatacattgcacgaactccttcttagatggatcaggccaccaaccgaacttccagctagggtcctgtgacttagccttccgcttcgaatcgttagcttgttcagcatggtctggaggcagacctgctattgccttgtcagtaagcgtgcttgagtctgcagcagttgacgacgccgacggaacatgatctatgctgccagtttcagccacagaggacgccttccctcggacaatttgggactgcggaaagatgacttgaacagcagcagcacgacgtccatcaccatgatgtccatgcatatctgtgacatcaaacatcttaatagcagctctgcctctagagtctagaccttgctgaacaaagaggaatgaagaatagagggggggggggagagagcagagaacaaagagtgaagaacaggcaaaagtagctgcagcacaacatccatacctttagaagagctgctcatctttggttggacttctcagcagctgtttttctcgactaaaatggcggagaaggctgctgctgctgactgctcatgtctaaaatgggggagaaggctggtgctgctgactgctcacgtccaaaatgtcttttggcctcccaggcagcatttaaagggttgctgactgctcacgtctacctaggctgtatctgaagggattgggcgtcctttggcctccccaagacaacatttaagcctaaaatggcttttggtctaccaggcctatcgg

SEQ ID NO: 19174 - DNA, 370 bp, Zea Mays
gttctggtcagtcctctggttgctgttcttctagggtgtctgttgattatgccttgggcagttgttggcatagtggccaagttcgccacacttgaaacaaccattaggttgaactggggtagttgtgttgttgttcttggcgtgtgtgttcacggcgcttctttgacggttctgttgttgaccactagacctatgaccggtctaagtgttgttcctctgttggttctggtattggttgctcctctgaccttgttgtccaaagtgttgtacttggtaattgttgttcccactctggtttccggagcagaactgagaaccttgagagttgttctgacggatattcttgctggtctgcccttggtactttctc

SEQ ID NO: 19175 - DNA, 612 bp, Zea Mays
tgtggcttctgaacactggcctcataaatatgcttattaaattccattagcaatcgtgatgtatttatgctgtgggctatggaagagttgttgtctgctggcagcttggcatgggcatttcggctgtgtatatttctttggagtagctagtgatacagcttatggtaaatttttcgcttgctttgcgggctcgacaggtcttcctctgcttgctatgaagccatcgaaaacatgttctcattctgaaacagaaatctggcacaacttgatgtgttgggggatctggtgggtaaattttatggtaaatagtttgtgattttcgctaggcaacacaaccacatggcggttttcctttcgagtcattgctgatgatacgtcagccacgcccagtgtcctctttcattagttttttaagaagaaacgtagttttgtttcggttagcacaaatagtacaacagttacattatagccctacagtttgattgctcgatttggtcaaagctattcttatagtagtattagctctacagtttgattgcttcatttggtcaaagctattcttatagttcggaatgctggccctctcattggcactgattctcattacttaac

SEQ ID NO: 19176 - DNA, 517 bp, Zea Mays
aaattgccatcagtgataggtggattcgacacaaaaagggtgaaggctttgggaggaggtaggttccaggccgagtatgccactgaagcaccaacatttgacactttgcctctaaggatcatctcaagtcggctcaccaagtctgcagagggaattcttctgttggtaacccgagttgagtcggctaggcctcgatacagataagctgggtatgccctatccttcaacggctgaatattcttgaagacaaaatcagcaaccacagcttcagcagtcagacccctctctttcagcagtccaacttcagctagcaacgcacctgcctcggctacctcctgatctgtgggagactcggtccagcttggggtgcaaacatctggctgtcttcccgaccaggggggagagaatttccataattctcaactatgaaccactccaggcgccatcccttgatactttctttgagagggatctcgagatactcagtcttcctcccgcggcgcatctccaagctggc

SEQ ID NO: 19177 - DNA, 809 bp, Zea Mays
gcatggtcagcctaccccaccgttcttgtcgccaccattcacgacgaagccatggaaatcgggcggggccgttgcgcgcgacactcgcagctatcccctcctctactaagataaaggtgagttggtgccaaccaatctggtcccaacagcttaccccacacaagccccgccgcacaaaccaaaacgccatcgtgagggagggagacatcgacgcaagtccttccttggttcatcatcgattcagctccgttgaagcatcgaggggcgccgcctggggtcgttgaagccaattcgggaactgtgggtgtctaaagtcacctcgcgcgtggcaaattgctcaccggagcacatctacaccgcggatccgcccgcttcatgaaccggccacgctacgacatagaccccggtgagaaaccattacactgccgcctgtgtctccttgaatgcataggatcgagaatcatgactcgcatgttcttttagccaagatattgggtcgccgaagttaccgtgctaccattgggccactgatcgcgtggtcagggcgcttcggtgccctaactccagttaatacggttccggttgaattcgctaggatctcagcatcatgtatggtagtttagtgtgcggagtcgtcaaacccctaactccggcaatgtcctccgctgcgggtctgcgcgtgccgccacgtttctccatcagaggtaggggagggacctcggtcgttgatctgatgggcgacgaccaagatttgattttcgaggaatgtgtttcggtcgttagatgggttctgagcggtgaggatcgaa

SEQ ID NO: 19178 - DNA, 456 bp, Zea Mays
gttgtggactacggggaggaaggcgacgtggaagtggacgaccgcgccgagcgcttcatcgagcggttctaccaggagatgaggctgcagaggcagcgctctctggtccagcgcctgctctagagacattcgtccgttgctgctgcttcaattccttggtcgatcgggcagaaccagtcgtggttgtcgctgctatcttagctgcacttcggttaaatctctccgtatcttgcatttgcgtcgttccatgtttttttgcttctcatgtggcaattctcttgtctgtggaaggagacattcgtctcccctgctgttgtactgttacttctagtccttacctatataatccatccttgtgttgcaatgttcatttttttttggggggtagtgttttgagtttgtacaattattacaaagcatgcgtgctacacacctgtttctattagcacaaaatgc

SEQ ID NO: 19179 - DNA, 601 bp, Zea Mays
ggattgaagaagctgggtgaaaatatcttctcaagcttacacggtaacacgggtgccaatctttccaagtctgcaaccatggtccgagataactcttttgcacaaagctgacgaaagaaatggctcaactctgaaagcgctagccagacatgcttagggacatagcctcgaaccagcgcaggaagaatccgttcaatccatatgtggaagtcatgactcgtcatccctaagactcacatagtagataagttcacccccttactcaggttagctacatacccatcagggaacatcaacatcttgatccactgaagtacttccttcctctgggccctgcttaggacgaaatcggccttaggccttctccatgtctttccaccacttggcggcttcatctcttggtttggtctatcacataaagctgtcagatccactcttgcctttatgttatcctttgacttattaggaatgtccataattattgcccacagtgcctcggcaacattcttttcagtgtgcatcacatcaatgttgtgtggaaggagtagatcgtcataataggggaaccgagtcaagccagacttatgtgtccacatatgct

SEQ ID NO: 19180 - DNA, 475 bp, Zea Mays
gtcttcggatgaggatttggattattttgtggcattggatgtggctgaggcggaggcttctccgcgtgtgatggatactgaagttcttcccggtccgagtgctgggcgtaggcggcgaagggcggtggcgaagcgtagaatgagtgaggtggagggtggtcgtcttcgtgtggacagggctggcaagcgggaattgttgtcctcgccagttggtgcgagtgtaggtgagggggagttgcgaagtctttttgagggtgaggagctgaggataatgttgtttaactatagggagatgggtatcatcccgaaggttgaaccaatgtaaggtgtgatgccctcgctgtacgtacgtaactataatttgtatgatgaggctgtgtgccttcggtgacccggccgtgcccgtaggggacttgtgcactaggtctagcgcgtttattatgtcggtccggctgcacctgtagtcggtctttgc

SEQ ID NO: 19181 - DNA, 772 bp, Zea Mays
caatgaaaacgatgaagctggcaaggcttttgtcatcacattagcaacttgatctttcgttgaaacaatacgaacgtccaactgtctagtagccacacgctcccgaacaaaatgataatccacctcaatgtgtttagatcggcgatgaaaaataggattggcacataaatatgttgcaccaatgtcgttatcacaccacagatgtgctgctcaaggctaagaaattcgaagctctcttagcagtacttgcaactaaatcaattcagtagtagcatcagcaattgatttgtattcaacctcagtgcttgatcgagatacagttgattgcttacgagaattccaagagacaaggtttgagccaaaatagacagcataacctccagtgctgcgtctgtcgtcttggtcaccagcccaatcagcatccaagaaagcactaagtaactcagaattgctcttggcaatatgaagacccatatgacgagtgtcccctaagtaccataatatcctttttaccgcactcaaatgaacatatgttggagaggccatatattgacacacacgattcacactgaaagcaatgtccggtcgagtcaataatatgtattgtagagcccccacaatgcttctgtatttcatagtatcctcagaagagagaggttccccatttgtcagtttgagccgatcagtgggcagcatcggcgtagcaactgctttagaagtcagcatgttggtttgtgtcaagagatcggatatgtacttgtgttgtgacagt

SEQ ID NO: 19182 - DNA, 1473 bp, Zea Mays
ttggcattcgccccaaggatgtcacgctggcatcagtgcttgcctgctgtgctgagtgccttgacctgcgtggtgcacagcagctacatggtcttatcgcaaagagggactttcagtccaatgtgattctaggcacggcactggtcgacgtgtacgggaagtgcctctcgcttacggatgtaaggcgagcatttgatgacatcctgcaacccaatgacgtttcatggaacataatcatccggagatatcgtcttgctggtatgggcgacatggcacttcatatgtttttcatgatggtacgggctggcgttaggccgctggtatatactgtcgcacatgcaatgcttgcttgccgggataactgtgcacttaaagaagggaagtgcatacatagttttgtgctccgccgaggatatgaccaccacatacatgcgcggagctctgttgtagacatgtatgctaagtgtggcgacattgatgcagcacaaaggctcttcaacttggcaccaaagaaggatgtggtgatgtccacttcagttgtgtcagggttggctgcttgtgggaggatcgctgatgcaaaaatggtgtttgatggcatggaacaacacaatttggtatcctggaatgctatgttgaccggttatgtcaagtccatggatctgactggtgctttagatttgttccagcagatgaggcacgagacaaaggagcttgatgtagttacacttgcttctgtactcaatgcttgtacaggcctgcttgaccttgggaaaggtgaggagctccatgcactcgctctcaagtgtggtttgttcagttgccccttttttaggaacgcacttgtgaggttgtattccaaatgtggatgcctgaggactgcaaaacgtcttcttctatttgaaatgggatcagagagagatagatacgcctggaactcaatcatctcaggttacgaacgccactccatgagtgaagacgctctgcatgccctacgtgagatgcaatccgaggcaaaacctagccagtcaacgttcagctctgcccttgcagcctgtgcgaacatatttctacttaagcatgggaagcagattcatgcatacatgatcagaaacaggtatgatattgacgatatactgcgaagtgcactggttgatatgtattccaagtgtaggctgtttgattattccacccggatctttgagttaggatcatctgatgatgtcatcctgtggaattctatgatctttgcatgcgcttaccatagtaaaggtgactatgggcttggattgttggatgaaatgcggaagcagggggttagaccagactctgtcacttttcttggtgctctggtttcatgtatctgtgagggccatgtcgggttgggaaggagttatttcactctgatgattgatgagtatagcatcgttccacgaatcgaacactatgaatgcatgatcgagctgttgggaaagc

SEQ ID NO: 19183 - DNA, 453 bp, Zea Mays
gtgggggctatcgaagtggggtatcgcgtacctgggcgaccgaggccttcttctccggcgtgcctgtgaggtgcataggggcggcgccgccggtcagagtttggtgacggggaacgggatcgtggtggccgttgatcaagggatgaacggcacggattagatctcgcataccctttcggctaggaaaggtctgggccgtagatcatcaatcggagggcccgtgctaaatctgttatgtggatgatttcgggccattgatctttgatcctagggcagtgaacgcatatcggattataaccttccccgatctaatcgtggctcttgatgcgggatcgggcggccagaattgatctataccccttcgcgactgcagttttacatatgagccccagcctttacgtaaatagaacccgccgtccatgggcgatgttcactgagtcttagaaaatttac

SEQ ID NO: 19184 - DNA, 841 bp, Zea Mays
ccaaaggcagggaacgaagtcagaggagaaccgaaggaagtattcttgctgggacaaaaaaaaatccaagtgtccccggcccttacagaaatgacagcttaaggtcggcgggcccggtagcccaacaggcccgcgagcacgtacggggcgccattggaggttgcgggggcgagaccagctggagttcgaaatttaaaatttagaacggttagtaattccgcctccaagagcaacaccagaagaattagggtccaagaaccgaggagatccaatcctccccttagaggaagaaggccacaatcccgaagccggaaagttcaaacggttgaacacggaaactctggggcgaggccgaggcccagcacgaggccaccagatactacgagcctgagcatgattaaggaaaggagggcccaaacgattgaaaaccgaagatccagcccgagccacacgctgagcatcaccaggagacttgatagagttgcgaatcggaacagcattggcaccggtgagagggagcttaacaatatccgcatatgaaggattcttcctgccccggaccttcaaccaggaagcagcttcctcatccgaaaaaagcctgaattcatgcttccaattaggtccaccacgattccaaaggttgaagaaggccctgaactccttacgctcaatggaacctgagttgtaaatatgaaaacccaccgccatcgaagaaaccgaaaaccgaaaaacccggccagccagctgaagcacctcaaagcccgcggcgaacccaccaagggcagcctgaagaatatgaccaaccgagaccgaattcaacttgaagatgcatctgccaaag

SEQ ID NO: 19185 - DNA, 1037 bp, Zea Mays
actttctcaagcacccgatagggaccatagaatttcagagctagcttggggcaaggacggttgacaacagaacgttgtgcatatggttgtagtttcagcaagaccatctcacccacttgaaaatgtctttcagttcgaccccgatcagcttgcatcttcatacgattttgtgcagcagccaactgttccttgagcatttctgtaaaaacagcacgatcagccaacacctgagccacatcagcatcagttgcatctggaatcagaggagcagctggaaatggagggtcataaccataaagcaccttaaacggggaacagcccaaagtagtgtgataagatgtgttgtaccaaaattctgctaaagccagccaattcttccactgatgaggataattgtgaacggcacaacgcaagtacatctccaagcactgattcacgcgctcgctctgaccatccgtttgaggatggtaagcagtactgagactgagtttagtgcccaaaagcctgaacaaatgtgtccaaaaagaactagtaaacaccctatcacggtcactgactatagaccgaggtaggccatgtaatttcaccacttgctccaagatgacctgagccacttgctgagcagaaaaaggatgcttcatcgccaaaaagtgggcatacttcgaaaaacggtcaacgaccaccagaatagtatcatggcccccagatttaggcaacttctcaataaaatccattgttatatcctgccacatgccttgaggaacaggtaatggctgtaacaacctagctggatggagtctttcagccttggcttgttggcagacctggcattgttggatgaaatctgccacatccctcttaagacctttccaagtgaataactttttgatacggtgataagtagcctgaaccccggaatggcctcctagcacgctatcatgaacagcagcgatcagtttagtgcgaagtgctgaattgttgccaacccatatcagtttctccttgcgaataatacccttgtgcagccaataaccagc

SEQ ID NO: 19186 - DNA, 678 bp, Zea Mays
cgcatagtggcggagtcggctccccggtggcgatttcctgatctcgcgctggtccatgatgagttgctgtggagggggaggtggctctgacgggatccatgtttgctgtcagcggaggagctgtggtgaagtgggtggctctactgctccagcccacggcgatggggctccagcgtgtgttgacatggttgatccggtgagggagtatcagttttttttgtttttgctcctcgtttttgttcttgtgcataagtttttttgacatgtgtgcttgtttttttcctttgaggccattggcgtggaagcgttgtagacttttgtttagttgtgtggtcttgcttccagttaggttagttggaccaaatgaagttgtgtagaaaactagttggattgtgcagctaattttgtcccctgctccttaatgttcagattcaagtgaaatgtcccctactcctattgtttagattccagcgaagtgtaattatttgttgtgtctgaactgcatttggcaactcgaggtttttttagccagggtaggtggaaatatttttaaatttgttgattgttttagaagaagctattttctggaggtggttttcaggttgtactagtttgaggacatgcaacactttaattatagatgataaagtgtctcttaatttaatcttgttttgaaca

SEQ ID NO: 19187 - DNA, 417 bp, Zea Mays
tttgtgcggggaatgtcgttcgggcaccgcccgtatcatggtcgggggtgttcaactgtgtggaggtcggcaaaatcattacccatgtgttcgtccttgggctagctccgtgttgcgccaactcccttcaaggttgatgcagtcgtaccccgcagagatttctccggcaatggcgtccgccgtggatttgcctacgccgccgcgctcgcccgtcggagtagggaggagagatcttggccgttgatctctcaggcaacggtgacgattagaaccgcaacataccggttcgggacttcggtttgggccgtggatcagtgatactgcgaccgtgggcgtgtgagagatattgcgtcgtccgattaagatccagtggtagtctggggacgaccctcttaaaataaccatgatctaatctcg

SEQ ID NO: 19188 - DNA, 343 bp, Zea Mays
tctttgcaacttcagaaggaagtccttcttgatttagttttacaactaacttgttttatgttaaggtcattctttttatacttagattcaaagggcagggggagggctgggcatggttacgtaccaattcccttaggtagacaatcggggaagttcgaacgtagaaattcctcagtctcccaagtagcctcttcctctgagtgattactccattggatcttatacatcttgatcgatttagcccgagttgatctttctttgcaatctagaaccttgggagggtactcttggtatgatagatctggctctatctccacttcgggttctgttatgatctcggtcg

SEQ ID NO: 19189 - DNA, 648 bp, Zea Mays
tcaacaaccagtggtttcccatctgcgaaaattcggctatgttgtatacgtgtcgatatcaccaccctagcatacatctatgggacctcaccggaagttggggatctatgttggttatgaatctgtgtccatcatcaaatatttagagcctagaactggggatctattcacggctcggtacgctgatagcatcttcgatgaaggacatttcccagcattagggggaggattataccttacaataaataatgccgagaaatagaatggagtgctagtagcatccaatcgcttgacccacgcactagagaaaccgaacttgaagttcaacgaataatacacctgcaaaacttagcaaataatctaccaaattcctttactgatataagaggagtgtcgaagtcacatattcctgcggcaaatgcaccagagagagtggagatacctttgtagggtatggattctactcgtactccccatcctacgaaaagggggagaaaatcggatgatttagtatcagccaagcggggacacctgcaccagcaagttactgaaaagaatgcaacgcgctccctttcagatgttccagcagtaacacaccttgaaggtaaacgtcctagtgcaaatgtgcgcacaaataaaagcacaagg

SEQ ID NO: 19190 - DNA, 2986 bp, Zea Mays
tgttctttctttctgtctccagcaagatctatgggaggaatacattgatctgatcatgtagtgcatgtgcaatgatacctgtgaaatagaagtcgttttctggggggagctccatcgtcgggaagaggggtcatggctcaccacggacaaaaggttcgtgatttccatcaccacgctcccacaggttacaattattttcttgaattttccattcgactatatcactttctaaatcccactggttatgtacatgagcaagatttttatacttaaataaatattgcttgctgtttccttggattgtaagagatgctaataacgaagctgtcccaattagacggcacactgagcttgcacagtcaggtacagttttggatttatgccttaagtcaaacagttttggagggcaacacaacgctcaaagctaacttttcatgattagttatgctgaatcacgagcgtccttcgatagaaaaatggggggaatcatagaaatttatacagaactgactgaaaagcttactgtcttcaagtattccatagcagcagcccagtcagattctaccaacaattcaccaagctccacaaatgcctgcaaaataatctcattaaaataggttatatgcaaacatgaaataatcgatcggtaaagttaatgtgtggcctcataacggagagtaagaatgcaactaggagtctaggactaaacacaaacaggaagtaatttgaatagacatcatactcatcatctgatattgaacagcttccacactttgttttattcattttttggttaatcactctgaaactatcgtccagtaacttcataatacatgacactgtagtaagtcccaaaaatgtagtactgtgacacataaattagtcaaaagaaaaaacagctaaacaacaaatgtccttttttttgcaatcatgaagcttggtatgggtgtcttatccttttctaaaacaaatatagcagacgtgagagaaactatgaagataaagaatgtttctcattatagattaataattaaggtaacaatagaaaatctgtataccaatcaaaactacacattagggcaaatgtagtgtgttcctttcatggaccaaatacagatcaaatcgacaacaaaaaactgactgtaagatgctagcattccaagttttcaatcaacttcatcctagatcagcatcttcattgttgcaaatcatcagcattcaaagatccagagatggaccaaaattcagtgttcaaaaatatatattttttgccatgttcatatggagtaatttatgttcagattgagcatttgaaaatttcatcagtacattcatcctggaaagcagttgtactatttatgtattgacatgttagaaacaaattagtggcagaattatattttgggaccatgttacagcacttcttttgacccgaatacatgaagccatgaaagtaatggttgaggggagggggaagcaagtacctgatgatcttttgggtcaatacgggtaacttccttgaaggtttctatagctttttcagtttccccagattttgcatgtatgtgaccaatagcctagaagaaacataaaaatcatttcacaaatacaacgctatgttgcaaatacatgaactgagaataagcgtttgattagatatatgtcttaccttcaaactttcacaattttcagggtgcacctccaaaactttctcaaagctacctaatgaacttttgaagtctccaaattttaactgaatttgaccaagtcctggttcagatcaaattgtgttataaatatcaacttaatatacagtggagtgctccaaatgaccaatcatgctaatctaggctgcatgcatcatgtgcaaacctaaggaagaagattgaaaagaaaattagaactattaattttggatgtcatatataggtagtttatgatcaagctggtgtgggaggctcaccacggacaaaaggttcgtgatttccatcaccacgctcccacaggttacaattattttcttgaattttccattcgattatatcactttctaaatcccactggttatgtacatgagcaagatttttatacttaaataaatattgcttgctgtttccttggattgtaagagatgctaataacgaagctgtcccaattagacggcacactgagcttgcacagtcaggtacatgatcccttgtcactgtaccagtttctgtgcttctctctcatgaaaacaactgttgggattatttgtttctgaagatcagtgcatttattagttctctcatgaaacacaacactatgatttaaatgctcacattttgattactgtgtaaacaatgggacatacaagatttttttaggtttttgtagctcattattatagtatgtgttattaatatgatgtagcaggcaacatagtatcctgcgattcctaattagttgatgcctaagggtttttgtagcttatgcaactaagaaaacttcttcaggctagaaaaaaactttgaagtgtgggacatggtgcttagaaagtgtggcaagcatcgaatttacattgatgtagtccatggtgtaggatttttagatggcaaacacatcataatttgtgtttacaattgtttattaggaggcacattgaccattgcttccttccaaaatttatatgttgcagtttacttccttaagaaactaactgaagcattatgaggagctgtagcaaatcgacaatccatctgctattgctaataatcatgctattttggcaatggcaaaatttatatgttgtagactacaacaaacaatgtctatgaagtcgttgacatctggattatattctattagtgctgatctggatcaattcttgtttattaggagacttcaaatgttttctctcccctataaaaacactttgtttcatttgcttataattaactgctgcactgtccatggattgctctctcattctacttcctatgatttt

SEQ ID NO: 19191 - DNA, 311 bp, Zea Mays
gtccttactgtaagacaatgacaggaagctttgcgactcaatgcatctgccaccacattggcttttcctgggtgataatagatttccatgtaataatctttaattagctcaagccatcttcgttgtctcatattcagctctgactgggtaaaaatatatttcaaaattttgtgatttgtatacacatggcatatatttcccagcagaaaatgacaccatatcttgagggcatgaacaactgtagctagttccaaatcatgagttggatagtgctcctcatgccagtgtagtagccatgaagcataagctat

SEQ ID NO: 19192 - DNA, 471 bp, Zea Mays
ccttcttctacctaacgctaggcacggcggagtcctagcctgactggcggcaaacacgtcggtgaacagccatcccacccaacaggcattcatccctaaatctgaaaggtgttacgcgaagtggaagaagatatgagttcactagaggtgcccttaccagcaatcgcgtagccgaagccctgctctattttctctcttcttgcatctctctcctccacggcggcttgttcgcccacacggttccggcgaccgagcacccttctccctctcatgcactcatgatgccgcccaccaggacaacccgcacgaccacaccgaaggtctgagtgacgtcgcagacgcgatctggctgcagtggcacaatcctccttgcactttcctctcggtggcgctctctccctttcgcgagctcactgttggcgctggttcgacacggtgagagggcgaggatgcgcgtcggtatttatacac

SEQ ID NO: 19193 - DNA, 683 bp, Zea Mays
tatccttggcgggaagcgcaggatgctcgtctctgcggggctccactacccgcgtgccacgcccgaggtgagcagtgaggttctgtggtgcttcgcgggctctggcgccacggcggtggggcggggttcgggcgagtgggctatggttatagacggcgctttaatagctcgaattcttcggtctcagtttttgattcgcgcggcggttgggttcagctgttgctgcggttggtcgggcgtttccaattgcgaattattccgttctacggagtactcataatgtcgctggtgttggtccggcgtttccaattatgagaatttccaggctcctcataataatgctgtttgttttccatggagttcgttggcgagcttgtggcatctacattcatgttattagtagcttccgatcaactgacacattttgcgctccagatgtggccgagtttgattgcaaagtgcaaggagggcggcgtggatgcaattgagacatatgtgttttggaatgggcatgagccggccaaaggccaggtacctcattgactcatttgttcacgtgaaatgacagatataatatgccctcgattgttaatttatgcttcttctaatgtgctctgccccagtattacttcgaaggaagatttgatattgtcaggtttgctaagctggttgcagctgaaggt

SEQ ID NO: 19194 - DNA, 484 bp, Zea Mays
ggcgggttggttttacaaaagccgaggggctcaaacgcaaaatggttatggcgaaggggtactgatcagttctagccgttgaatcttacatgaagggccatgattagatcggggaaggttattatgaatcgatatgcgttcactgccctaggatcaaagatcgatagcccgaaatcgtccacgctacagatccagcaagggcactctgatcgatgatctaaggctgacattaacccacgcggggagtacgctcatagatccattggatcaacatcacacgatccctatataccatgcgaacgggggtacgcagtccactcatcctgaccgcacgtgggtcgattgatgtctatcctggcaccaccatcaagtaccagatgaacggtccgtggtcatcttcccacactcctccctctcaccgaccgcaaactgaaagagacacacgcgctgcagcggcgctcttgccgacgcgacgaccgtccac

SEQ ID NO: 19195 - DNA, 445 bp, Zea Mays
ggtaccatgtgatgtactctactgcgccggcgtcgcctattgaatgcggcaagcgctgaagggaatgacattatagatctactacctgtgccgacataagcatcactaacaccatattgttttttgttgaagtaatggctgaacaaacatgggtgtacgcacgtgttccctatagaacaggtattggctggttagaggtccccgaaaggttagatgggtctacttcgtcttcaccatgaaaaatgcgatgggcatcagttgtctcaaagactgggcaatctaaagaggttgcgtattttttggcccgcaagagaagtatcgcaaattaggatggataccggccatcgcatgcataaacaaagcagcaaacttgtgaggactaaccctgtgcaattgcattgtgcctcgggcgcttcgcttcgtggcatctcgcaacacgcacaca

SEQ ID NO: 19196 - DNA, 581 bp, Zea Mays
gcgggagcactggtggccgctaccagtatctagcgatcgttgagcttctgctgccttttgttctcttatgacccgtgtccgccgaagatgacgttgacttctccatcgatgcgtgggaacactctgcctcctcccccttccttctactgaggttgtcgaggctcttcgggtcctcctcgtggtgggggaggtggtagaggttggaagggtcggccattcccgacggagtgcttgaagtctctgcagttccgaagggtatgacgcatatccttgtggtacgagcactgggcgtcgaggatgtcgtcaaatgtttgttcgcctccgcggggtgcccctcgggcacgagagatgggtggtccagcggcatggacttcttcgcgaggtctcttttcctagcgcttgtcagtttgctggttcgcgtcacaccgtggtgcggatggagtgggcttcattcctccgatgaggttctgggcacactcatcggtggtgatgtagatgtccgcctccctgaacagttgttcggaagtggtcggcgccttttgtagtatggctcgtacgaaggccgagtcattagatcctcg

SEQ ID NO: 19197 - DNA, 517 bp, Zea Mays
cagcaacttcatctggagcatatctggagagctgaatgaacttatcgcgatactcgctgactgacatacttccttgctttagcgacagaaattccttcttcttaatcttcatcaatctagctggtatatgataattccggaactgtgtactgaactctgcccaagtgatagtatcagcagcatcgtgggcagcagtatatgaatcccaccagtcagcagcaggacccgtcagtcgtccagaagcatataaaaccttctcccgatcagtgcattgtgcaatattcagcatcttctcaacggacttcagccaatcatccgcgtccagtggatcaggtgagcttgcaaatgtaggtggcttatgactcatgaactccctatgcttgtctcggggtggaactggtggtggtggtggaggcagtggtacttgttgctattgctgctgctgctgttgttgttgcatttgttgttgcagctgctgttgttgcgccctcctttcctggcgtatctcctctcgctc

SEQ ID NO: 19198 - DNA, 516 bp, Zea Mays
cctaaggttagcctaaggagattgaagaacacaagaacacacaagggtttagagtggttcaggccgccgaagcttaataccctacgtccacttgcgagttgtattgctagggatgtctaagagattgagtttgtatcatatgtgccatcccttttacagtcttatggaggcatgtaatgggtcccacaagtggccccagcaatctagtattaaacaatgctcaacatggagcattggagcattaagcgctatggcaaaaggagatcttagcccttggcctttgagtggatcttctaacgaacatgctttcatctagtttgtcagcgcgagctgctacagagtggtgtctgttactgatgtgcgcaggggttgacgggttggctatgctgacgtgcgcaggagttatgataatagacccgagctgtcgtctctggtcagagttgtagagggtgctttgcccaagccagtggcagttcatgatggccaccgcccacacgcatgtcgttgagacacaac

SEQ ID NO: 19199 - DNA, 518 bp, Zea Mays
gcgcgttccgctgcgccgacctcgccggaaagctcgcgcctaccacgccccacggaatcttctcgtggcgggtataagtaccggggacgttgcgctctcggtccatctcaccacgtaggaaagggctggtccaccattgccgaaccgagagggagatgagggagcgcagagagaagactgccgccgtgctaggaatcctcagacaatgctcttcgggtccctgtgcgtgatctggggcattcgctggtgcttgccgaaggcgtccaggtccttgtcgtgtatgggtagagtccaaggaatggggaattgtttgtcggagttctatcctccgccgcgggccgcgctgctcatggccgggtgctctccacgccgcgacaaccgataagaaccttcgcccagcttcgccataacccccataacagttgtagctatattaattcgggtttctggcaccggtgtatggaatcgggtgtcgccggtgatgtctccaccgtggagaagacggtgccgccgttcct

SEQ ID NO: 19200 - DNA, 527 bp, Zea Mays
attttgttgcgttagatgtagccgcagcggagtcttcgccgcgtgtggaggttggcgaggctgctgatcttcctagtgcgagtactgagtataggtggcgaagggtggtgtcgaaacacagtgtgggtgagttttcgcgaagtggtaggcgccgtcgtatggggatggagcgtggccgtcttcgagtagaccggattggtaaacgagaattgttgtcctcgccgtttggggcgagcataggtgagggggatctgcgaaatctttttgagggtgaggaattgaggataatgctgttcaattatagggagatgggtatcatcccgaaggttgagccgatgtagtatatggtgccctcgccgtgtgtatgtaactgtaacttgtattgcaatgtggcctgttggccgttttcgcacgcctgtgctgatccggctgcacccgtgagcgacttttgcgcggagtgtagattgacgtacttgctgctcttgtccgtcggcacccttaggtgattttggcatgtagtgtttgtt

SEQ ID NO: 19201 - DNA, 313 bp, Zea Mays
cttgactgtacaaccagctaggcagctagcttggccaactgtgcgctatgaatggtactgactgtgacgcttctgtgggccagcggcctagccccgcccccataaatttcatggccatcgttgttgttgggagcgagcgagggaccaaatcaattccatcactgccgtgtggacgacgacggggggcagcagctatgtacagctgctggctgctagctgcaggcttcgccaactaatccatatcaaccaacccatgcattgcatgcatgcatctatccatgcgtggagctgatcgaagaagacccacgcttgc

SEQ ID NO: 19202 - DNA, 317 bp, Zea Mays
cacgacgaggcctggtgtggaggcctgtctcccagtcttctgggatggccggctctggggataattctgctggcggagttgaggttggtggagatgatggcgatggaagattgaagaagcgcacccgccgtggtcagaggagaagatccggaaaccagagggatagcgaagatcaggaagcagcagtcgaggtgcctgcccagcattgtgccgaacaaggccttgatcatgcaacgggtaggcccaagcggatcatcaaatactctaggaggattctccaggaagaagataatcttcggcgggctctgatcatcact

SEQ ID NO: 19203 - DNA, 493 bp, Zea Mays
tgtgagtatatcctccttgagcctttttgaacggcccgatcatttctaggccctagcatgcaaagggccagattacaatgatagtttgcagatgttgggcgggaactggcacgcttcgcacttctggaccaggtctgttgcatccctcttcattgttggccaataaaaaccagacccgaaagcctttcctaccaatgtttttgatgctgcatgtattctgcattgccctacgtggatttcatccagcagctgcctccctgtagccgagtgaatacatttcataaggacccctgtcgcacctcttctatagagaaggccccctatgatggtatagtgagaagactgccttgcaatgcgctccgtgacaaccttgtcatctggttcttccttattttttatgtacctgataattgactctctccagtcgttgggatctacctctgtctcgtctaccgcgttgcattcttcagcatgtcttgttgcgatgcttggc

SEQ ID NO: 19204 - DNA, 402 bp, Zea Mays
gtgggtaatcgggcgcgaggagcggtgctcggggtttgcaacatgctaacgaagcaggccaggtcatcaatttatagtgattaacaacggtggctccgaatttggggaaagaagctggcggccggagagagggggtgagtcaccaacgaacgctatcgtggctttcaccgaggcaatgtcccaggcaatgagcaggctaccaacggcgatctactgcgacgtggtaacactcctaagtacgtggcacgactacaaagggcggcgaactccggcgaggacacctcggttaatcgtacgacaagtgggtacggtgaacagtcggtgacagggtccgagctcatcccaacgccaagatcttttaccccgggttattatccgcacgccattgggcacgaatcacag

SEQ ID NO: 19205 - DNA, 1350 bp, Zea Mays
gaagacccacgcaggttcacagaacataatcatgcagggggaagtttatccagggcaaaaaggagggagtaaggataggagcgcactgtagcagatatttctgctgatgatatttcagctatgcgcaagtctgaatatctctgctctcccttatctctattatttcccataccaaagtaggacacggcaaggaaagccaaaagatcaaggttagatattttctgtgcttctgaatcttcaacaggtaactgatccccctctctttaatcagccttttcttcatattttggttaagaacaggtcagccactattaacagaatttgttcccagaccaaaggtctacaaattcactataagtctcttggacctaatccttatagattacaagttagggtgcccaaaaatcagctacaaaacactggtaccatttcactcctctgactttcagttttcagttgcttattccatttccttctttctgacaggggcagtttggacgccattatcacctaattttatacaacaccaggccgaggtttcttaataaaacttgctcatgaacacaacctctccaacttttcttagatccacctggcaccaaatcccatagaacagtctttacagggtctcaaagttgctcagacagacaagaattcagagcagaccgacagacattcagaacagagttgtcccagaacctgacagcctaacttgagcatcttttttctcgatttttggcacaggaacaagcccatacttcttaagaacatttaatccccttctaatggtctctaatttatctatacagctcccagcctttaaacctctagattggtcacaaaaaggctctaaactttgcatcacgcactgatttcagactttaaattctgaatagactaagtcactagccacctgacagtccaacctttgagcagctgttacttcactttttatgtaggatcatgtccatcatccttcaataaagttgttcaccattaggtgttcttgaattcctctatgtactctacagcctaaaacctcatggattaggcacaaatgggctccaaaaacagcaactttcactgaaattcagttttcagtaactgaattcaattcagtttcagccacaaatagtccaactttgaacaagtttttctccattttctgtgtggaatcaagtcaaagacactttagtagttttgttcactatcatataggcttcaacttctctgtaaatatcccagcacaaaacattacagaacagccacaaccagctccaaaactgctatcaacactgaaattcagttactgtgtccaatctgaaaattcagaaacaccgcagcaccact

SEQ ID NO: 19206 - DNA, 524 bp, Zea Mays
ttttcggcctcgggggggtgggctgatttgggagaatcagaattgccccgcgtccgttggtaaccttctgggacgttgggtttggccggtgctccgttgatcgctcactagagcagtgatcgaccactcagccacaagctcgtcggggaagggtgtccctatggcgcgtccgcaagtaagttgaagcatcatgcgttcgccatccgcccctctatgttttgccacgtctgcgtatcatcttgaacactgggccacaatcgggcacctttcggtgatgctccgccgtggtggggagggttgcgccgccattgggcacaccgtgggggtaatgatgatcactggaccgttgatccccgggcggacggttgtgatttggcaactgtgatacccccttcgcactttgatccaaaccattggtatgggatcgggcgaatttgggttggtgtccgccatttaaaatccgaaccgtgggtgtttgatccgaccactgcagaagcataccgtttcggcttaggtcggtttaa

SEQ ID NO: 19207 - DNA, 715 bp, Zea Mays
cgagcaccatcatcttctcctggtcatcccagtcacgacggtggtcaaggaattgcggcggcaccattgctggccaacctccacactgatcggctacacggctagcaccctagatgctaactaaacgttgtggaggacacggagagtagacccaaagtaccttcttcgaagattgtggtaaggatgcagctgtccacggtgagctgagacccgacgttgattttcctctccggtgacagcctacggtcacattcagccgccacagcgctctccgaggttatgcatgaggacggtgcgcttctagggacctctccgaacaccacgtgatccgacgacatccccctgaacccaacgatgttgtcatggcggtcgtggttcaccttctctctctcctcggttcgcacagtctgctcgatggcacagtgatgctcaggtcccaatggcgtaggtatgggatggttgagggggcgatgcgattgggttttacagccagcgacgcaaggatcccgcccgggacatcggccgatcaggaggagtccggtgaattaggtggctctgttgtggttgaagatagatctaacgaggatggcccaccagtagtgactagcatatgtacgcagaccacggcgcgcggcgagcaggcggctggtatgtggggttagggtgtcggcgtgggttagtgaagttgggccgcgtggggcacattgaaagtggg

SEQ ID NO: 19208 - DNA, 424 bp, Zea Mays
gtgcgtcttcggtgtgggaggataattggggggaattcgtggtggtcaggtacccatgaaaaatcgggtcggggcgtgggttgtgctgtggttatcatggtgggttgccgccggcgtacccttcgccaccgtgagcacctgcgccgccggattcagctgggaagggggagtgttgagcaaccatggatccagatattgacggtcgttattagactgtcggcaccaagcggtaggattaaatccgggtggtcgatctagcactggacgatcaaggagcgtcggggcttctcaaccgttaatcttcgatccgtgcgctggcatgacacgttcccttgggatctaatgtagttcgtaggattagatcggatggctagatctcctcgataccccttcggccaggtacttttattaaagagaccctggc

SEQ ID NO: 19209 - DNA, 693 bp, Zea Mays
gggatcgcagcaattgaggcgctgtgcgtcatcgatgacagtaatggtgggggggcgttgatctgctgctgattgacggagtagtatctatgcgaggattcagctcatcatggcatgtgccaccacatgcgcctcgcccaatcatgctgccccgctcgctcgccttctggccttgagacttgcgacgcaagagacgtcagcctgcgctcttgccctcgtttgtcaaaagaatacgcggccttttgcggctgtgacagtgatggatatgcttattttataggagctaggatagtattcactgtgtgtgtgtaattatagcctgtccgtcagttaaattgattgaagtttaattaaacttttaccaaatactcgctccggtgtaccaaaaactgacgttttggacagcttctcgcataccaaagaactaataaataccactctttttcattcctagcgaaatccctttaatagacggagtggtcctcttcactccttcctagacaggagacccaggttcaattcttgtctcacgcaagaccaaatgtggcgtggcaagaaacatcttggcgctgttattttttcgctatactggcatcgggcacgttattattctatctggcgccacattttctgtttggcgcgttacatttttctctcaggcgcatttctttttcttgctccccctactttttt

SEQ ID NO: 19210 - DNA, 509 bp, Zea Mays
tagtaatgggtcagcccatgtttataattgattacactgtaatgatccgtcataaccccgtaaggggaaattccagggataacgtaggtaactgagggtataatcgtctttgatggggcggggccgaccctcggttacctataaataccctgtattgtaccattgtgagagacagagaaaaacattgttgtcctaatacattgtgtttatcgacatcaaactgtttcctattcttccactgtttgagcttagctgaccacgagttagtaagttccaataggcagtatgagagtctgtcctcgatatttttcacatgttggttgttcactacaaaccagcagtcttgtcaatgatgttcggattgcgaaatgtttttttttttgttaatcctccaccacaaatgcaaccccgtcatgttcctggaaatagtgtgcgcgcggtatgatcgacaacctgcaaagccagaaatgcagccatgtgaagcaaagcaactgccacgccttctgtgc

SEQ ID NO: 19211 - DNA, 438 bp, Zea Mays
ctgaattttatccaactacctgtcgcgtcctttctgctgaaattacacaagcagctcaggttcgcggaagcggaatcggagtccgcacgacgtcgatcatggcttcaccatgccttgcttctacttctgattctcgttgcttttgctgctgttgctggattgctgcagggagtaggaagaggaggaggaggagcctcagcaccagcggcatcacctgcggatgccatccaaatggacgcgcaggtctcgactcactgcggggtgccatacacagcttcactactcgccttcgatcccgtccagcgcctcctcgctgttgcaactctgtgagccccattccaaaccccgccttcacattagtacatcacaaccaaccctaaaccactgccacacaattcattcagttgtaaactagagctttgctaatttatgttctcc

SEQ ID NO: 19212 - DNA, 413 bp, Zea Mays
ccgcaaactaaagaacaatacatgtctccacctaccccctaatgaaccgactgtcatggcctcgatgcttaagtacatcatcctcaccagcaataaggggtactcgaaacatcttgtcgctaaccctcacactcaaatttctgacactagcaaactaaagaacaatacatctctccacctaccaccctaatgagctgaccgccatgccccccaacgcataaggaagcatcctcactagtaacaaggggtactagcaacatcttgctgctaaccctcacactaactttggctacaacctccaaaattctcccataacaccacatactgaagagcaatacatgtccccctaccccatccaacacacacttgtaacgaccgtcatcaccctcaactcctaaggacatcatcctcac

SEQ ID NO: 19213 - DNA, 370 bp, Zea Mays
cctcgccgctcgatgagaaattattggtgccgcgaagacgcagggcccgcctagatgccacgattggcttccccggacttaggcgtgcgtcgtcggccacacaccgaggctaaaacttcagcacgaatgagggttcaccagtggtggcttacggttgtgtcaccacgggtaccggtgcgagcaaaaaccctagggtctgggtaccaaatggctgagttaagaagctaacggcgactgggcgaggagggggctgccgtgtggtggggaaagctttatgtcccgtgggtgcggctcatggttccaccatgcatggcgagttacggcaatggcggagtcgagttgacccgagcgcaacaatagaggaggcgtg

SEQ ID NO: 19214 - DNA, 473 bp, Zea Mays
aaaaagaaaaggagacgcctccagcgagtatccagtttggatcgggatgccggtacttcggttcctgctgttgaagaaatgtctgttactgaatttgctgatgctgaccccaatgggtgtacccaatccgctgctgatcccaatgtgggtgctccatctattgctgatcccaatgggggtgctgcttgtgttgccactgtggacgacgaggaggaggaagatgaagttcctttgactcggaaaaatagtcggcagttcatcgccagcggtgaaagtagtggcgttccctctcctgctttgtctgctctcatcggtctgcaagaactgtccctggccaactttgatcagactcttgaggatatggttccagaggacttgttatcggagccagtggatgatggtgtgatggaggtttgcgctgatgtgcttgatgctgggttgaggtcatcctgtgcctcgtcgaccttagagcg

SEQ ID NO: 19215 - DNA, 322 bp, Zea Mays
ataaagatggttcatgtagtgaatacgagcagctgaagcaagaaaatattgaaagaaataaaaggaggttggcatctcttaacatccctgaaatcgtcaagagtatggagcaccaaggtccatccaaaaaaatttcaaaggttggcatctcttaactgaatttcagtttatacagttttgttctcaccgactgctgattgttgctattgcaaataaattccgaagtctgaataagctcagttagtgttgtcgcgtttcagagtatggacactaacgatatttatcttcaataaacactgctatttgaattagccacgctata

SEQ ID NO: 19216 - DNA, 471 bp, Zea Mays
catgtatcaaaggatggctagtgtcagatggcgggtcctatgggtgtactactaatgctccctagccgaagctgtgtgcaggcccaggtcctagtcgaggctacctcctgggggccattgccaactctttcttaggtatgctagtctgcagcctcgacaaatcaagcctacatcccaggggccaggtaccaaggaggaatcggttactccacacacaacagggacaagtggtacatagataagttctaatactgcttgataaatagtactcaaaagtaccttacaaaaagcaaaagtattacatctgccttcaagtggagtcctagctccatctctactctacaggtatgaactacctccacagcagtagggccgcgtgggtagctagctccgagcggctcgccagcggaggcgaccacctctacaccgacgacagcgaccacctctgcacagatggctcgccagcagcga

SEQ ID NO: 19217 - DNA, 1048 bp, Zea Mays
cgtggcggcagcgctctacctcagggccttcctccccgacgctggcggcagcgtctcctgcgccgacgaagcctgcgaccctctcctccaggattcgtcctgcgcctcttccacatcatcctccgatgaagagctctcgcctcggctgccgccgcataagggaggcctgccgtctctgtccgacatggtcgcgcttctcactggcaggttaagaaaaaaattctcttgtgtgtatagcagtttttgtgaccctgcactctacttctctagtctctagaggaccgtttactcttggagtttctgagtgctctactgatgttggtttactcctcgtgtagtctggccttgtcgggggcagcaaccatcactttcttctacagtctaggtgaacatgggcttcagactgcattgctggtatgaaaattttccatccgacaatagatttcagttgacgtttgtgatttttagtttttcagtctaggagaaggtctagcactaaagatagcaggagtttatcaccagctttcgaattgtattttacttttgatcatttgcatccaccagccatgatttataattttatatgttttcaaatgctatatgcttctctgtggtcgaatcctatgcagtactacttgaaggcacaatttggttacaacaaagatgagtttgctaatctacttctaattgtcggtgctgccgggatgctatcacaggtaccaaaataatttgttacgtggaagctatagcattagtttttcggtcatttcaaggctgcagtagtattcgttcattcaagagatgtaatttatttttctcacgcttgatgtttgcagctcactgtaatgcctatcttggctccgattctgggtgaagagatgctgcttattgttgggcttctaggtggatgtactcatgtaataactttcagcgagacttttacccaatccttaatgacaacatttttcgggttttttggctaaataaattaatttgaaatattgcaggttttcttgtatggcattgcatggtcatattgggtactttc

SEQ ID NO: 19218 - DNA, 680 bp, Zea Mays
aatggaaaattaaggtcgctagcacgagcacacaagcggccacgacaatagaaaataggtcaccagaccgtccggcgcccgcacacaccaagaactcttacataggcatacaataggattctattataggtccatcaagcccatttaattattttgaagatataagggataaggagacgatggactacgagacatcccctaaacacctaggtatggaaattaatgttattacttttttggccgattaagatgttattagtgatgatgaacctgcggtggctcaatttgatttcggtcctaaggatgcggtcttcaccaaacccaaggaattggtcaatcatctaaagtctcttttcattcgtaggcatattgatggaacaccgatttcgcacatgatgattgatggtggtgcagacatcaactttatgccttactctctatatccaaagctaggcaagcaaaacaatgagctgaccaggtcaaacatgacttttaatggagccggtaccaaccacccaatcaaggccaagggtgtcatgtccactaagctaaccatcgaaaccaagaacctaactatcgcattcttcgtcgccgaagtagaaggcaattatagtgttacactggcaagagattggatacatgccaattattgtgtaccttctaatttacaccaaatgttg

SEQ ID NO: 19219 - DNA, 869 bp, Zea Mays
gtgacaccatctactgtccttagatccacataggaggtggcgccagtcacgtggtttaggagaacacggagatagtagcgctccccctcggccggatgagcagagactattctactgacttgtccacccgtatctcgtttcctccgttgcaatactttgcccttaccactctaccaagtgtaccactcagggaagtcacgatacaggatgccacgagcctcctcgtgtagcctattcgcctcaaaatatgctgtgagcattgacctatcagcacctggacggttgacgactcgctcgaccatttgccgctcgtgaaatgccaccatgtgcatgtttggaagatgtagttgcagctgcatcacaggtggagagttctgactaagctcaaagccatatatcctccataaggcttctggaggagtcacccaccttgcatctctgtactgcttgatctcatctacatcatcatctgccttgctcgcatctctcataacaatagacacacgatcatggcctttgtatatgtacttgaacagatatttaacagccttgatgctcccgcacgcctcaacattgatgtgacagttgaagagacgaaggaggtaagggttgtaagggacaacccatctattgtccaattcgcaccctcgaaccttttctttacggccatcgtcacgacgtctgtaaacagggtacgaatccttcccttgcaaggttgtgtcactgaaaggccgagggtaatgattcttgcacgatgcacaacccttagtgcatgggcagttagggtttagcgacccacacgggccatgcatcatatgcttgataaccatctttcatagttcagggtacttgttgcttgggatctcggc

SEQ ID NO: 19220 - DNA, 327 bp, Zea Mays
cttagacaaaaaaacaatatcttattagaagcaagccaacaatcgaagcttttacaagtcagccactctgtagtcaccgattagtgcaagctcctggccttgtgaacgaacatgtatcctatgtgcggatatgtccattatatagacatattggtggagtggtaggctgtggagcgtcgaatcgatttgttggacttaagtcttcaggtcttggaacacagtacacatgtacaaggcaaaacgagaatatggatgtaagactgagttcaacggttcactctatatttctcctcctatatcccactcacgcaccacgtcagcaacttc

SEQ ID NO: 19221 - DNA, 919 bp, Zea Mays
tgcaccaacgtatcatgcaaacgacgaaacacagtgcggcacatgcgaaacatgtcatagcaatcatcactattctccaatgtacgctcaacccattagatacctgtttcgaccatgcttcttctgggtaccctacttgacgagctaccccaaatatccaaagtcaatgctgccactaataattcctcatgatccctatcatcatcactatggccggtatcaggctgaaacatctgcacagatacaaacaataactagttttctgcaatcagcaatttaacatacaacaacttgacggttgtacatttatcataagtccaacatagttctcacacatatacaacagttattattgtaaatactacctgaactcgaatatttgaaatacttttccgactcaaaaaaatactcataggactcaatgtttgtaacagcactggacgacataaaaaacgacagattgtttgtaaaaaaactggacgatggaaaaagactcgtaagcctgacattttgaagcataagagggctaccaacacctaatttgacttctcattcttctcgtaagcacgacgcagccaagcgttccttccttctttggtcttgagggtagcaaatacatctctataacgtttctccattaaaagatgagtcgcaaagaaatgtaagtcgcttccttcctctgcaccatctttgatcacttgttccaattgggcagcaacctttttatgcacggggtcgttttcagatgaggttatggacttgtaagagcccctggactcgaaagcatcgacaatccgtttcatgtattcatccctcatatcctttttcttcttaggtttaggagagtcatgcaaaaccttatgctttcccttaattgtagagctagggttaggtgtgctgttttcacccgcaccaaaaa

SEQ ID NO: 19222 - DNA, 517 bp, Zea Mays
gttgtttggatttgttcacacactttcgcctttaattctcaaaccctctccttcattcacacacttttgtctccattttgtttcagctattttcaaacctccatttcgatatggattcgaggtggagtctaaactatgaaacattcacgaacttgttgagcgatcaatctccgcaacatcttgagaccctactggtgtggagcaagtatttttcaacgatctttcttccatccaccatcatcgagatgaagctcatgctcatccccatggcctctgcaacctctctttccatacccgtatgctcctcttccatatccatatcgaccatgtatgatgcctctcctactattgagcatccaacaaatgacactcctcatcctcctagcgctaatgaatccctttccatcgatgtttgtcctcgacaacctttcacttatcggtatcctcctccatatgcttttctttgtggtgctcgtgcttcttgttctactccctcggacacgatagtgccaccaag

SEQ ID NO: 19223 - DNA, 596 bp, Zea Mays
gatttgatctagattcgtttgatggtaaagttgaggataggccagcgcctagaccactttctggagaggaaattttattgcaaacagagaatatgcacacagtgcatgggaaaggttgccaacataaaaagaaagcaaaaaagaaggaaggggagcctactatcatatggaaaaggaggtctattttttttaggcttccatattggaaggatttaatgttacgacataatttagatgtcatgcatatcgagaagaatgtgtgtgataacattgtcaacaccctcctaggcattcaacggaagtccaaggacaacttgaaatatcgtttggatcttcagtccctaggcattcgaactgagcttcatcctattccagtgggtgacaagttatatttaccaccagcatcatatacaatgagtgcgtccgagaagacattattttgtgaggtattgaaaggagtaaaatttccagatggatatgcatcagatataaggaacaatgtggatgtgaaggagaagaagcttgttgggctaaagagccatgataaccatgttctgttacagtatttactcccacttgctctaagaaggatttta

SEQ ID NO: 19224 - DNA, 457 bp, Zea Mays
gacgctctccagcagatttcactccagcggccaagtatctctaccagctgatgagacagacgctactgccccgaatgggttatagggaggccaccactcacatccagctctggctacttggtgccctgatctctcattcagggtttgatgtggttgattttcttatatgtgagatcgaggacacggtattggatggtcttcgtgcccggcgacaactgctgtatgctcattatctctgctacatcttcgcacagctgatccggccaccacagttccagggcactcttgaggcctcatgcctccactttggctcctatcgtccagcccctgaggaccttgtgccagtacctgatccaatgatagacactcaggcagaggatacgacattccataagttcgagactcagggcacaaccgttcctgatgatgatgatgatgattttgggattctgcctcc

SEQ ID NO: 19225 - DNA, 449 bp, Zea Mays
cagataagctcagagtatgcattgattttcgcaatttgaatagagcaactcctaaagatgaatattccatgcccatagccgacacgttgatcaataatgcatcaggaaatagaattattagctttcttgacggtaatgccggatataatcagattttcatggccaaagaagatgcgtctaaaacggcctttatatgtacatgcttcattggtttatttgagtgggtcgtcatgacatttggtctgaaaaatgctggtgctacttatcagagggctatgaatttgatctttcatgagctgttgggaaacactatggaagtctacattgatgatattgtagtcaaatcggctgagtttagttctcatatagctgatttgcgcaaagcctttgataaaatgtgtcggtatggtctgaaaataaacccacgtaaatgcacttttggactgtcg

SEQ ID NO: 19226 - DNA, 343 bp, Zea Mays
cggaaacgccaacgtggtagcagacgccctcagccgaaaacctttcgggataaagggaaccaactttttagaagattggaagaaggaatcagctcaactgaatgcatgtttgggaaacaacggcagcctcgaagtcaaaccaatgttagaagacctcatatgcaaagctcaacacctggactcagagacaacaagacttgtggaaaaagctcgcaaagaacaacttccggacctcaggacagatgaacaaggagccctttggttcaagaatcgtctgtgtgtgccaaaaggggaggcaagaatagtcctgctcggggaagctcacaactcagcctactccatc

SEQ ID NO: 19227 - DNA, 764 bp, Zea Mays
gtttcttcaccagataaacccctgacgacgaacggcgctgcgcagagctccggcgagctcgcgcactggccaaatagctccaagaccggcgcccaacttcggcttaaaccagattcaggacctagagaatgtttcccctaggttaatttcaggaacgacacaccgagaagccctgaccacagtgaccgcgggtgaggcagatgaccacaagcgttctcggcgatgggtggcggtctagttcaattgggcgggtctaagagctttaggagggcctagggatgctagaacaagtaacagagggacttggactgacctgagctgaactggccgcggcgagctgagttttgcggtggcggagagtcgatttgggggaaatgaacaattcgcgattgctggtggataattggaggcaagcgtgggtgcgttggcttcgtggtaacttggcgcaacagccccggccatcaatttataggagggtaaagcggtggccagtgaatttggggaggacgcgcggcggccggaaatgaagaagaaggcgggtgcggtgaattcgtgtccagtggcgtggcagttgttccggcgatcaacggggagtgggggtaagtcgcggcgatgcggtggaaaggggtaaacacgcggcacaaggccggaaggcggcggtcaccggcgggcttatctgctcaaccgtagggtagaggggaaaagcacgggggtcgccggaatggagcccagctcatcggcggtgaagattctccttaccccgc

SEQ ID NO: 19228 - DNA, 689 bp, Zea Mays
tagtgcaaaaccagagcccgagcgagccccaccggcgggggcgacgaacggaagagagaagggtgaacagatggcggggtggacttgcggctcggcgagagggttggagcgctgtgagtcgggtggagggtgggggtgtctcctccatgtcgcgtgcagtcgccatcgcctgccatcaatatgggaatcagagctagggttttggctaggaggccgtggaggaggtggtgcagattaggtggttggttggtgcggggtggggagggggcgagcacagttggatcttgtgtggagaggggagggacgcatgcggctggatggcgtgggcaataggaacggacggtccagatagatgggaggcagaacgatataaccaggggaggcagactacctttgctgccttaataagtagtagagatatttatattatgtacttcggtatattatataacttgtttgtgtgcttgttgtcaaatcctggtcgggttggtgcaacaatagttggctgtcaggctcaacatattgtttaggagctaatcagcctaagtgataaaatgtcccaatgagttgtatatctgtacatattataagtcagataggttagttaggcagtgtttatctcctatagtctatagactacaaatgtacatttcccattgtcaataatcagaagacagacgcctaccaag

SEQ ID NO: 19229 - DNA, 510 bp, Zea Mays
tggacgcggatggaatgtcagagatctccgctcaggtccgtcaatggaaggcagacctcccttgaatggactttccatccgccctcaaaaattacagacgccagtgaagcgacgggtccctttatttccatccaccctcaagaattccagacgccagtgaatccacgggtcccttttttctctcgtagcatcctccttggacgcatccgttttttctctcggagcatcgccctcaagattccacgggtcgctaacgtcacagtgctgaaggtcagtgtttcatagtttgtttcttgtatcatagtttgtttcttgtgttcatagtttgtttctggcgcacgggtcagacgcatcaccgcttcatgcacttctctttccttgtatcatagtttgtttcaggaattctggaatttgatttagaaataaacttgaactatgagttataatctgaaatatgattagttgtttactctgaactatgagttataatctgaactaggaattctgaac

SEQ ID NO: 19230 - DNA, 458 bp, Zea Mays
actcctaggcgtttttgggccgaagcgatcaacactgcttgccatgtgtccaatcacatctttatttgggcttttctaaacaaaacttcttatgagctgcgatttggacggccacccaaggtcagtcattttaggatatttggctgcagatgctttctgctaaaacagggtaatctggacaagtttgagtcccggtcttctgatggggtttttctgggttatgcattacattctcgtgcttatcatgttcttaaactagagactaaccacattatggagacttgtgaggttacattcgatgagactgcaccttgtccatcccctgtctttgagcctgcaggtccagatcagatgggacagaccatctttatggaggaggagcacgacgacaccgattgggttgctctcgagccaactccaccggccaccccagtcgagcctgcttccactactacggc

SEQ ID NO: 19231 - DNA, 548 bp, Zea Mays
cgacgatgccaagtggtggtggtggtggtggaggccaggacgggaggtggagacacgtcggtggatgacggtcggagcgtgtagaggggaccgacgctgtcacatcgggcgagaggggtcctggtggccaaattcttcacagaaaaaccggtagtgtcaaactcaatggaacaagaattgtcggtggtgaaccaatggacagaaaggagattgtgagtgatgtgaggggctacgagaacgtcgttgaggtagaacggtccagggagtaccgaggcacctaaagaggtgaccggaagagtggaaccgtttccaacgacgatcgagatagggtgtgtggtaggaggtgggtttgagcgagagagcatgcctgtggtgggagtggtgtgataggatgcaccggagtcgatgacccagtcagaaggcggtggggccaacaccatggtgctgtatgcggaggcgagggcgacagggtcccagcctgcagcaaacgaggacaatagtgtcgtggtagacggtcccgtaggcgggagctgaggcggggcctgggt

SEQ ID NO: 19232 - DNA, 623 bp, Zea Mays
cgcgggttgattcctatattgcgcggggtctcttttaaaaaaccaccagccgaaggggtatccagaaaccctagccgttggatcaacgatgcgtgtttcagattagaacctagccttcccgatttccaaacgcacgttccggaacaagcggcccagatttaaaatcgtggagattcgtctgatccgaccgattaatatccgagggttgggatctaaaggggtcaacacatcttaatctcgctcgtcccgtggccatccaacggctgggcaaccgtcttccccccaacagtgccgagctggggaccgcccctgcccatggcggccatctcgccggtgctccaccgaattcaaccgccccggcgactaagctcgattaagtatgtgtggaaaaccaaattgatggctaggggcacatggaggaggtgtctcatcggtaatcgtcgcggcgaaaaggtcggtccgcggcgagggagatattctgtggcggcgaagtgcgtgaacgtaggattcctcggccgtccggtccttgtcgaggtacgtgcggcacctacgcagtttggcgatcaccccggacccgctttgcagaccacggacggcggcgcaacgcacgacgacggtggcgg

SEQ ID NO: 19233 - DNA, 1240 bp, Zea Mays
tgctctctgccatccgcagagggtagcacataagctccagaaacactcgcggaagaggaagctcccggagtgaaattaacagaagaaccccacggagtcgaaggatgaggcagccgcggagccccaaactgggatggtacaggagcggttggtgcaggagtaggcgcgaccaagtactgagggaaacctggcataggcacgaactgagaagccccgggcatatagaactgctgctgagggggtggtacagaaaattactgctaagcgattgacatcacgttgacagtgccctgcgaagaggaagaagtaactagctcccatatgagcttcccattgggattcctcctacacaccacatccttgtgatcctggctgcagatagagcacctgccactccactgacactcggcacggcgatgcgcttcaccacaacggaaacacaccaaccccagcccaggcttaggaacagcccgatacctctgagtactccctcctgaagtaccagaatcagaggattttccacgataggagtggtgacgctgctgttgcgactttcccctcttgtgggctggacccctagtgttggccctgctcgcgtcctggccacgagactgatcaacacccgaagacttctaagattccatggtatactgatgttgcatctccacgcccaatgcctgctccaccgtagtacgaaaatccaccaacggaaaggcccctagagcatgcttgatagaaggtttcaggccctgacggaacaggccctaacagaactggctcgcggaccatcttgttaaagcccacttcatactctgtgacggacttcttctcctgcttgaaagactataaatcaatcttcattttctccaggaaggtgaccgggtagaacctcctctcaaactgcctgatgaaaacctccaatgacaggactcctagtaaggagtgagctgcctgcacgcctctccaccaaatttgagcctcccccttcaaaagttgtgtgacaaaacgaacacggtctccatacacaatctcgaaaacatccatcttatcctccacataagtcagccaatccgccgcctcaactggagtaccattgccatcaaaggtgtccaacttcatgcccatccattgcatcagagggagaccactgacgggaaggggcaccttagccccatcacctggagtagcacccgcagggacaatgcccctgggcactcctccacccttgacaccatgagca

SEQ ID NO: 19234 - DNA, 415 bp, Zea Mays
taagaatgtgattatcctctttctccggctgcagctccactgaacacaaggcatcccaaagagtgaggaactctactattactccaacagataaactacctcggatatctgaaatccatctcctgtccatgagggtctcctgcacatttctgctaatggcaatgcctttaggaaccacctcaaacaacctaggagccaagtccttcacacataacccatgcaaccatcagtccatccaaaataaggttgaagcaccattttcgatttctgtcatcatagccatagagaagaatgctttgactttatcacaagactatagtggaagagaggaccaaggtctcatagggtcagtcttggccaaccataaccatctcattcgaagggcccagcctagctcctttaaacgaaaaatgcc

SEQ ID NO: 19235 - DNA, 579 bp, Zea Mays
gcgggccatcttcttggcttctgtgctgacgtcgtcaagcgcgtagcaagccaattctgtgaatttgtgcacgtactcactgacagttcttccgccttgagttagttcccgaaattcatcttccttgagctgaacgatcccttggggcacatgatattctcggaaagcagtttcaaattctgcccaggtagcatctctgacggcagcgctgaaggtatcccaccaggttagggccatcccggaaagttgatgagcagccaattgaacacgctgattctcagggcatccgatggcttctaacttcctttttgtcgtgcgcagccagtcatcagcatcaaagggattgctggatccaacgaatgtgggaggcttgagccttagaaaatctcccatcctgtcctgtggtcttccaccattcgggcgctgattctccagacttctagtgaggacttcaatgagtcgggtttggttggctagaaattgggctaaatctaatggcagctccggaggtgcggggaggtgggtctcactcccttctccaccggcttctccttcagctcctaggggaaaccctgctcc

SEQ ID NO: 19236 - DNA, 536 bp, Zea Mays
agacagccgcaaagagtgtcgtcatgccacttcgaatccttcttcgtcgctgttgtcaacaacctccttgtttctgggacatcaatcaaagccctcgaggcaatcagacaccgaggttcagaaagttcacaatatataggatgaacgtataatcttacttaccagcttaaagaactcaagtgcatcccacgcatcgtagtcacggagatgggcaacagactgatccaggtcgtagttgttctgccggagtatatgcttgttcaggtcagcctgcatgaagcccagaccctccagctcacccatcagcttcccctccatgtggttgacgacctgttcaggcaagggcgttgctggaacaggagcaatactagctgctggagcacacatgtgaacataatcatcaacgacaggcgcagaggagctaacagggagcataggcagaggattgggcagggcaaaggcttcagatgcagtcacaccaccaggtattgaatccagtgaagactcggcagaaacatcagtggcaggaatttgca

SEQ ID NO: 19237 - DNA, 514 bp, Zea Mays
aggggacccgtaactgtccgctgccaaacacaaactcgcattcatccaaccaagccctcggtccccccattgctgctgcacttgaccatgcacgcacgctagcatggcatgatgatggcaacagcagcccttgaatgccaacgaatcgtgcatcagcgaggagggggcgcagtacagtagctagtaccactagtgatggtgtagtgtaccggtacgttacgtacaatactacttgggttttgcttgcacaccattcccttccgctggcaagttcacctttttgcccccactccgttgcccggcgtcggagacagtactacaacaggcaccgattctgcggccggcttgacacggaatgcgagtactagtgcattccaactggcaggtggacaagagagcactgcagcctacgacgataggcacgggtggcgcccgtcagtcagttccaccacgtgacagtacacgcgacagatgtcaccaggccaggactgcttgctagcagggcatgcacgag

SEQ ID NO: 19238 - DNA, 527 bp, Zea Mays
atcaatccaaccaacaagcttgaactttgtttgactaatggtctgccaactctaattatttgtagaaatgtttcttccgccccaacacaacatcatatcacgacggagccttcgaaaacaggtgacctggcaatgagaaaacggcgcaacacaacatcatatcacgactgaagaaacacggtctgccttgctagatagaatgtaggtagagaacgcaaaaggacagaatggttagttgcagccacacagctgaaaccgaataaaacaaagctatcctccaatggaataagctgcatcaatacagagtgcacgacagagaaatcggcaggccccctcaaacaacgacggtagccccacacacaaagcatatctagagtcatcacggtcgagcttaacataagggacgaacagctccgatttcctaaaacgagctgcatacagccaaggaactcgacaacacctaaacccaagcaccgacacacgaggaagaccacattgcgtcatcgctgctaagccttaacacaccc

SEQ ID NO: 19239 - DNA, 279 bp, Zea Mays
tgcggaatgtctctctaaatcctgtcaacatcgactcttcgtcttcccaaaattggcaaaatttcacatcccgttcttatcctccgatcagtcacctcctccaaatctcatcaccaccagcacccactccccctccaaatcccgttagtccaaatgcccctcttcaaatatgacagtttcttcacactgcctctccaaatcatgtcaacattgactctccgtcttcccaaaattagcaaaatctcacgttctgttctcatcctccgatcactcagctcc

SEQ ID NO: 19240 - DNA, 665 bp, Zea Mays
caaaagtgatgacaattgttagagttaaggcaagactcgtggaatggctaagtggagaaaacaaacaaggtaagataggtgatgtttcaatagaatggttgaagtaagaattcattaccgagggaagttattataaggaagcaacgagattaccacgggtgtgcaaaataaaatgatcgctcatggattattaggaaacaagggtggtcaaggatatgttaactaaaatgtcttgaacagttattggggtatgaaaataagcatacataagaatataaaagtatgcaagattccaaggatacgagcatactaagaccaagggcatagaaattgccgaaagatagcgacttaacaacagaataagaaatgatctcagaagacaagaaggtcatggacacataaactgaactgtttaaataggcaatagaggtacaagggtaagtactttagattaagggataaaggtatcaaaaatgtaagtatacgagcatgtcaataacaaaatggaatagaggtcaaatggtagcaatttaataatggatgaggaaagagtcccaaaagactaaaggctatggtcagggggcatctacaaagatgtcgcaagcacaagagtgagatcagatctagtagattgagaaaagtatagaccatactagaataaaagt

SEQ ID NO: 19241 - DNA, 316 bp, Zea Mays
tcggattccgaaatgatggacatatggttaccagcgaatggcagctggctgttggggtcgataagcgggatgattgcagcaatggtgctctgcctcttccactttggcgccatcgcaatctttccggcggaacgagcaggatcgagatctcagggaagcagaggagtggttcgaagtgaaaaagtgaagttaggactcagaaatcaaaaaagcacgtcggcgcgagtataaatggggtttcccgggtcaggcactatttctaaaagtgctaggtcatactcaggaaagcaaagtttcaggcatcactcggcggtta

SEQ ID NO: 19242 - DNA, 563 bp, Zea Mays
gaaaaagtatgaggagtcgacgaccttaccatgtctaatcggcgcaggtgcgcatgcaccggcaaggacatgacgacaaaggtagctccaccacgggatgaagcacctatgtagacgctatgcttaggatggctgcgatgatgacgacgtgcggatgaggttagaccgacactatggatccaagcatcgagaacagaggcagaggcatggtgaagagaggagctagtctgaggaagaagtggcatctgcgacagctcccagctatgcgaagaaacgtccatggaagatttgagggagcgacggcggcgagccggtgataccaggagtttaccgacgacggttggaagaggaaacaaaaaggggtgagaagaatgagaacgggacaacctggttaagcatagggttagagcaactccaaaaggtaatgtaaatttttccccaaaaactgattataggggacatacaaaaaattttgtaggggtgaaacaaggtgtaactccagcagttccctcaaaatgaaaactgaaaacgaaactaggctagcttttaaaaatcctaggccc

SEQ ID NO: 19243 - DNA, 718 bp, Zea Mays
atttaactatgattgaaagtgttgatttaatacatagacatcggtaggtaaatgttcatttttttgaagacatgttatatggtacaacaggtttactagagtgtaggcaatattattacgaggctatcgcaacttgaatggactaaatcagaattaaaacgtggaagatatgcattaaaaagttttaggatcattttatactagttttctagctccggggatcaatctgtaaaatccaggggcctataccgaattacttaacatggaaagggatggtgggttgataagtcaaaagggcgaaggttcttctgcaaaaccatcaagtcgaaagggtatgagcacatctcaaccgtcggatctatgcccgatggtccagattacttcggggcgcattatgatcctgtaagcgcgctgaaccgcacgatcacgatccaacgccccagatccgaggtggtgaaggggtatgtcacatctaatcttagccatccattccgatcctacggaccacaatgttctttcaggcattcctttctcccctgcacactccggctggtggtgagccatggccagacggtggcgccatggttgagcttcccaaaacctcgccctggtgcactaacctctcccgaaacatttccctgtgacgcggcgagcaaggaagaaccagggaggggatccataccttgctaccagctgcgagcagccagcgcttctcccc

SEQ ID NO: 19244 - DNA, 552 bp, Zea Mays
cggacgcggacggtccggcggcgaacttcactgcggcgaacgacgagggagagagaaccgagaggagggagcgagcttggggtaaggagaggtaagagcttgactgcccaatttatagtgaagggagagggagagagagagccagggagagggagaaacaaccatggcttcaaggctattgatggcgtgtatcaatggtggggagtaacgacgacattgaaattcctttacgcgggagaagaacggacgtcgcgatgcttcggtcggctcggtgttggacgcaggggctcagcgtcggttcttggcgcttggtgcgttgctcggtctgcggctgctagggtcggcatcgggagtcggcttctggcggttcctggcgcacggtacttggcgcctgggtggcattggggcttgagtgtgtaggtggcgggtgaagcaggggtgcgcgccaggcgcatggcgtggtcgggtgcgcggcgtcgcgggcgggcaagcagagaaggggagagaggaagtggtggagagagagaagagggagggagagagaaaaggcag

SEQ ID NO: 19245 - DNA, 621 bp, Zea Mays
attctggttcgggcaacacaaggccctacttccagcagagggggtgagacttatattactcgcaccgtggtgcatgtagtaggggtttacaagcacggcgggagaggggaggtccccaagtccctggagatgattgaggcaagtgccaatatctaagagaaagtggaggagtgagtgttcgtctgcgtgtgttgtggacatcgtccctggagtgaccactgccctatttatacacgaaggggagtgtccgtagtgtaaccgagtgttgtattcgaaggagggatgccttagcgtttgcaagtcgacgtgacggtgaactgtgctgttgacccacgcctgctgatttcccgtagagaacagatgcagagaccaaggggttgtccgtacgcttgagcccgaggaagaggtcgcccatgccatagttgttgtaacagcgccggggtatgggccaaaggctgcttacgaggtgtgtcagcgtcctggcacgtgatgatgtcgagattccctgctgcgcttatcgagatcagagcccctgcctggttgaggcggaagtcttcccgaggcgttagccgagccgtcccttaacgtgcgctaaacccgggcggagtggctgactgtggg

SEQ ID NO: 19246 - DNA, 394 bp, Zea Mays
cttaaattcacagcaccagcctggtgccaaacagcagcatcctcctttatggtttggagtatacgagagacttggagaggcaccatcaaaggcgcagacgtttctatgtttccaaatccaccaggcaacgagaatgacaagcgagttgaaaccttttctgtgtagcttttgaactcttctctctgtcccattccaccaaacttgcaaacaaatgtcctgccgtagcgaactgctgcaaattgaccatgcttaacacagtgaaccacacactcctagcaaaaacacaatggatcagcaggtgattgatgctttcttcttcttgatcgcaaagaggacaaaactccggatggtctctggtattgaaagagccagtcctctgttcatgtgtacttag

SEQ ID NO: 19247 - DNA, 1176 bp, Zea Mays
ccgcctatgcgacgttggtctggccgcgtcgtggctgccgacattccctggcccagtggccaagcttgtcacagttgtgacagccgtcatctcgtgccgacttcttgttgccaacggtgctgccttgggcgcctccgtgggcaccaccctcagcttgtcctcacgccctggccttggcgcctccacgcgccttgcgcggcttgtcgcgtttgcggccccgtgtccaggaggaggactccccttcttgtcaccctggcaggcctcccactgctcccgagtgagatgtagcttcccgccgatggtgataggcccagagagggcctgtggttcgtcaccgtcgacgaccttaagaagaccaatcgcttcttcgatcgtcatcgtggagaggtctagcagagactcgattaaacgagcaatctgcttatacttctcggggatgcaacggaagagcttctcgacggttctctcctcatcgtaggcgtcgtcgccgaactgcaccatcttctgcaacagagtgttgaggcgaagagcaaaatcatcaacatcctcacctggcttgaaggtcaggttctcccactccttgcgaagtgtctgcagtgtggtcttgcgggcacggtcgctgccaatgcgggtcgcagtgatgacatcccagtcatccttggcagtccgcttctgggaaagcgaaaactgcatctcgagtgagactgcagcaatgagggcatccagcgcccgtcgatcctcgtagtagtcgacgtcaccgtaccgaactgcttcccacttgtggcaaacttggagccgtaccctcatcaccgcagcccaatcgacgtagttggtcttggtgagggtaggccacccaccacctagaccgatgtccctaacaacggcctggaccccacggtgaccatggtaccgatccagggagggagagccgcgcagactgtagaggccgcgatctccgtcgacccagccgccgccaccgagagcatcgtcggcgtgtccgcgcccatctgggctgccgtcgcgtgcattctcacccagagcgccttcggcgcatctgcgcctatctaggttgccgccgcgcgggcccccatgggggtgcgcggctgcccattgtgttgcctgctcttgcgctgcctcccttgccagccggagctcgtcgttggtgctgccgtcgcc

SEQ ID NO: 19248 - DNA, 579 bp, Zea Mays
caaaaattggagcaggagaagatagctggggaactgtatcacctgtcttagaatgctattaagggaacagagtgtgatgggtgtatgagggtgcagtctctgatccaggatcaagtgttggtgatgttgatagattcaggcagttccactacttttatcagccaaaggatggtgggaaagttgggtttgagaactggagattgtcctgcagttaaggtgaaggtggctaatggggcagtaatgctaagtgactagtgtgtcgaggaagtggaatggaaggctggagggcatgtctataggactgccatgagggtgttggggttggaggcatatggtgtaatcttggggtatgattggctgaagaatcacagtcctatgcattgtgactggaacaacaaggtgttaaccttcagtgatcagggagtgatggtcagactgcaaggggatgcagaccatctgagggaagtgcagcaggtatctgtgctgcagttggagaagtagatgaaaactgataaggtgtgggtgatggtgatgctggagcaagtgccagaagggataaatggagaagagtgtgaagca

SEQ ID NO: 19249 - DNA, 402 bp, Zea Mays
gacgaccacgtagaggtagatgtacagggaaactgcagaggtggtaaattctaccatggacagcaaaccagcacagtacaagcaggcgagtcactgctgtcaggctgcaggttggtctaatccaaaaccttccccctttgggctgtaaaaatcgtccatgtgaccccctctttttaccagaacgaaattcttgttgttttgcacttatccaaagtcatctggaaacagctagtggatgcagatctttttcctaagatattttcagactgcctgatctagttcagtcgacagcagcagccaccttgtcccctccgtttctccaatttctttataatgacagagctaactctccacatcaaacttcttccctgaacattggtcttttaatttcttgtagacttc

SEQ ID NO: 19250 - DNA, 275 bp, Zea Mays
agactaaacgtggatatttcgtcgttaagcaaaagtccgttcaatggaacattttcatgtgattggcaaaggtgggtccagtacataggtccataatggagtacactcatcaccatatgctgctctatggacatataatgttggtttcgtactgatccagatcatgaaaactgatgatgtatgcaggttgcagggtaatgtttgtttcagctttttgtttgctatagtctcttttctatcaaaagcagatattacttaaaatatcctttctgttg

SEQ ID NO: 19251 - DNA, 465 bp, Zea Mays
ctgcgcatcaaattcagtatagtacaggggccaacttataaacattccctagactcagattaacccacatatggacgacgggttgattccctcaaaacccatgagcctatgtgaaaaataattcgggcgaaggggtatcgtgaagtctgggccgaaggatcgactatcaacggatcagattagatcagaactccccatcctactctgctcgttgatcacgagatcgacggtaaccacgcccaatagtcctagcaccttcagatctggatcaaacggtcgacgttctcacgggtgaaccgttacctgacttctaatcttgtacgtctatagtaggatcaacggttagcgcactttcaatctcccagcccttgattctgggatcgacggtaacctggtcatctctcacctcccgacggtcagaccatggcgacgcccacccaccccacgatggaggttcgcccgtgg

SEQ ID NO: 19252 - DNA, 352 bp, Zea Mays
tttggatacgaaaatactacataacatgctacaagtttcttcagtctgaatcacaatctataagtaactcatcttcgaagtcatccgtcgcgcaatcctcaacgacaacctcattccacttgttgcattgtcctgcatcacacttgtcaacaattctcttgtaataattggcttctgcttcatctacagcttgggagaatagctcatcctcagcctcagcctcatcagacttcttcttgtaataagccgcctctacctcttcggcggcctgagacataaactcatcctcttcctcttgagcaagtaatcctgcctcagctagtgcgatgagctcactcaatctagatgtgtc

SEQ ID NO: 19253 - DNA, 766 bp, Zea Mays
cgagggatttcggcggctgttggctcacgtcggcgatctagcagtagagaaatcctactgaggcagcgatctggtgtgccggtgttggcggattgggatgatccatccgccggtccttgactctgggtcctgggtgctcgttccatgttgaattggattcgagtattcgatcagctggttcggatggtcttatgtgacagtgcacgctatgagctgccgatttgtttgtatatatctgaatcagagattaggctgatgccgctgctatagcttggatggggaggatattggactgatgtatgctgttcgttgtagttccaggtcgatggtaatagagttcctgtgttgctagcccttaattctttgtttcattagataattgaccttcaatgtcaaaacttaaatcaaaagctgtctactacctacaagaatatcttcatgactcgccttaggtttacctgattcaatttgtacccggctcagttgagaattaggctgatgccagtgccaaagctttgatgggacataatatgggttcacaggggccggaatggggcgtgtgtgtgctgttcgttctaatgtgtgatttccagaaattaatttagtgtatagcttatgcatacttcagggccttagattgtttgtttcagtggctaattgaccttacataacaaagtagaatcaggtgaaaatctgcgtaaaacgtacaaaagaagctcattaacatggcttgtcttaagtgtttgtggttgaacttataccctgc

SEQ ID NO: 19254 - DNA, 407 bp, Zea Mays
cggaaaaccaatttggggggaatcgcgaattgaggagctacagtgaacgattggaggcgaggagcgatgcactgggcgcgtaacaacctagcggagcacgctgaatgctcaatatatagtgatcaatagcggtggtgcccaatttgggtaagacacgctggcggccggagagagagggaggtcacagacgcgagttatcgtggctttccctgaggcaatgactcaggcgatagacgtgctatctactgaggtctactgcaacatggtgaaacgactgatggcatggcataaccaagggaaacggtggcacgacggcggcggtcgcgcagacatgtcgccggtgcaagtgggtacggcgaggctggttctatccattcccccgcggatctttttacgtctatggtaat

SEQ ID NO: 19255 - DNA, 539 bp, Zea Mays
caaaaggagccgactagaattatttttgaatcagcatggatggcaggttagttttaccataccccgggggctcttatgcgaagttgccacgccgaaggggtatgcatgcgctccagccgtccgatcatggaccaaaggctcagattagatcgggactccactgaacggttatgcaaccaccactgatggataaagatccaacgacacagatttcattctgccctaactaaccacaaccacccgatcgagatccaacagtcgcgggcgaaacattacctagatctaattcgacgcgttcatcggaagatcaacgaccaccgccatcccacatccgatcggtacgccgatcccatccagatcgctcatcatgagatcgacggctaccaatacctctccctcctcactgtgacccgagctcgacggagctacagccccccatggcggcgcactacgcagtccggcaggagatttcaccgacgtaggccccaccaattccccgacgcacacaacctgaccctgtgaggtccatcccaagtaaa

SEQ ID NO: 19256 - DNA, 464 bp, Zea Mays
tcttcacattttactcagtagcaagcccaactctcaacatgaaactgtttcaccttcaaattatcttccatcttgctataaaacttttggaccaaaacctcatgaaattgtcacaaaaatgctcgaaaccgggcatcatgcactgcaaattcagttttcagtgactgaacataattcaattacagccaacctgacagctgatcttggaaccaatgtttctccaggttttgtataagatcaagtccctcacccttaaatacatttgttcatttatagataacctccatttttgttataaggatctcagctcaaaattgcctagaaaaggcaccacacagctccaaagtagagccaaatactgaaactcaaatctgttcactattcattatctggaaactccaagaacctgacagcccatctttaggcacccttttctgtgatatttgtgtagcaccaagccagcc

SEQ ID NO: 19257 - DNA, 670 bp, Zea Mays
cccaattcaaaagggcgataagtatgaagaattccaatgtcctgagagtgagttagaaaaggaataatgagaaatattccatatgctccaactatcaggggcttgatgtatgcacaagtctgtatatgtccaaacttcgcagttgcaatcaaagtgtttggcagatatcagaaaaaaatccaagaaaggtccagtggaaaggtatcaaaaaggcattgagatattgacaaagtaccaaagaagggcgaaccgatgaggagcggctccggtgagcctaaatccatcgcggtgagacaaaattagtgcaaaagaaaggcggtgagcttccttacccaggggcgaagcttggcacgacgtcgggaggcttcggttggctagacggcgagagaacacggcggcggtgacctccggtctacgtagggaagtagttaggcatggacggggcagagggaccagtgaaaggggaaaaccaaagcgagttcccggtgcactatgctcaggcaaagctcaccgtgggcgaggcgatggcaaaggcccgacgaggacggcagaacggttgggcaacgacggtggcggcgctgcgagctaggtgagggcaaggggcaaggagagggtgaatgattgacatgggtgtgctgagggggtctggggtcttcacctaggcgctcgg

SEQ ID NO: 19258 - DNA, 1149 bp, Zea Mays
gcgagcttattccggccggatgacgccacggctggagctcccgggcgacagggacacaattgaacccctaccgaacacttcccctcacttaatttcgcaaatgggtgtctggttggctctggccacggtgaccgtgggcgttgcggacagacaatcgtgttcccaacgaccagtgggtttctagttcaattgggcgggtcggtgagtatcaaggacaagcatgggtgctgaaacaagaacacaattggcaaaatcggacctaatttgagcggaccatggcgaggtcagaacacgcggtgttcttgagcagattgggggaaatgtgaaattgaagctctctggtggagtatttgaggtacgggtgagtgcgctagatgtgtgattacatcacgaagttgatggtgcactcaattaatagaccccgaggtcggtagctctcaatttgaccatgatgtgttagcggccggagatagggaagaacacggtggctgtaaccgtggcagtcaccggtgtaacggcgcaaggagaatactcctaagggtgccacgcttactaccgcatagtaacaagcttcggcgtggcgcaaccgaggtcaccggcgcttccacggcgactctggtagtccggccacgtcgcagcgactataatcacggcgataaactgcaattcgcgatcctatccattccccaccgtgagatcttttctttgccgtagttatccacccgccagtgaacacgaatccaggcggcggcgtgaatcacggcgtagagatcgtcagcggcgaggttgctgtgctggcggtctgatccactcaaagcactgtaccatggcgaatgacattcagttggcctgacagaccgatttgaagcttgattttctcctatttttatttggcaacccatccgaggctctgcagcaaaattgtagtccaatataccatcttcatctttattatagtattccaagacaaattcttactggattatggtcgaaatggctcacaaacttggttctaggccactgtcagtctgaaattcagacttcaacagcctgactttgagtgtgattatctccaaattcttcataacaaccttgcttacactcttaagaaaaattgttctcctttgttaggtctacaaatttgatgtg

SEQ ID NO: 19259 - DNA, 877 bp, Zea Mays
agtctttcaactcactagcaagcggcagcctagtctggacgtcgaacatggtgactccacccaccaggtcgtcatccactcacaactcctggcccgtccccccggtccttgacaccgccgtttcagtaaaccacggcggtgaagacggtttcgtagccgaggccgacgccgcaggggtggcataatcgtaggcagagcgatccccttcgcactaggccatgccaccttggcattgtggcgtgggtccactagccaaagcggagctttccatttcttctgctgggcatcttggtgatctttctctatcactactgacacaatagcactaatatttctcccataaggaagggttttcagctcacgagccaaacagatgtaaactagtcatcgtcgtcggtcaggggtatagggtccttcctatgccatcgatccccagtaaccttcagcatgcgtgaagatgtttccaggagctcgggcgaagacatcacctccccaggacccgcgcacgtccccgttaactcctcaacaaaaatcctagaggccttcggccccatcttgtcatcccccataccttacaaatctattttcctctttcgagtagctgcaaccacaaccttccccttcgaggtgccctcctcaagccgggtcttcacctatttttctcggtcgtcaccgacaccagcagagtctccctccaggtaaggactgcatggtaagctattcaactcaaaaacctggttcaacctggcgtttggaaccgcggatatcccaactcctcaacatctcagtcttcggcacatattttcccaacaattttaatggcctctgactccacctcccacacaaaggcggccgcatcctgcccccgcaattcaat

SEQ ID NO: 19260 - DNA, 407 bp, Zea Mays
cgccgattttactgcctgtttcacggtgaagactgcgcccatcaaaccagagactgcccagagacgaaggccaccagagacaggatggcacgggcgcaaccagccgacaaccctagggttgtcgcgcacacatattagcagccccctccaccatacatccacgccctcgctccgcatccaccgcaccacgcataccaacaccaccaggaagtacaaattgtacctccctcacccccacctccacatcagcaacaacaaaacatccaccacccccatgccccaaaacaagaggacttcgccgatcagccgtatcgcggagtcattcatatgatcactggggggtcaagcaccgacttcgacacgaagcggcagaagcgggaccactaccgcagcatcaacctcatcgc

SEQ ID NO: 19261 - DNA, 440 bp, Zea Mays
ctccgaccagacggcgatagtcccacatgtaaatctctcacggagcggttggatcgtgtgtaattacccccattacacagaatattctgataatatagcacgtaacagagtgctgtatttagatctaactatctctggttggcctataaatatcttcatcctgtagctagacggattacgcttgacaaagtacccgttgtagcgaaaacatcccttcatcatctcttatacttatacttatcagtcactaagatttctaatacaggataaccgatcaggagagacagaggtaaatatggggctcagtctaatacggatcagaacgccttcacaaggactcaggtgatcgaatgtacgtcagcgagcgaaggccaattcgtggacaggactacaccgacaaacaaagacctcgcgctaactccctacagaaaaatcggatg

SEQ ID NO: 19262 - DNA, 585 bp, Zea Mays
tagtgtgttggtcgtggtagtgtttgattgtatcaggtgacaattgcgtgtgtcctctttgtaatagggtctttaccctcccccttttcttaatataatgatatgcatctctcctacgtattcgagaaaaaaagagaaaaaacaatgcaaaatatctaaataaggaaaatgtttggcatttcgtctataactgctcggtgcctttagttgacctcagtcataacatatcttcccgtctcttcatagaactcgtccttgagtttgacgtcatgatagaggtccttcaattgctgaaatagctctcaagtggtttcattgttgggcagacaatgccattgaactaggacgttctaggagccctgacgtagttgggtgcgcaaaacacgctctgactcaggcaatggtcaccatcctgtatgggtggcatagatggagtcattgggggtccccgtggaatggcttgagcagccccatgtggaacacatcatggagacgagcaccctttaggccatttacaacaggttgcacatatggctgtgcagaacactggtttgcactgtaaactgcactgtttatagagtggag

SEQ ID NO: 19263 - DNA, 377 bp, Zea Mays
ctggaatgaattttttcgaacaatagtctggaatgtgatatacatgataagctataggtaacacctgttatgtggggcgcaatgtataagcgccgaccacagccgccccaacagatgagaccgaccagtaggaggttagagaaagaataggagaggatagaattgagtagttgggagaaaatagggataagagatagattgggccggtcagcaaaaggttagagaaataataggagaagatagatttgggttagttgagaaaagttagggataagcagcagtagccgcaggtcccccaggcctatttattgtaatcggatgtgaaggaaaagcaggcaagaagtttaatctaatccccctctactcctctagtcttt

SEQ ID NO: 19264 - DNA, 722 bp, Zea Mays
gaaaatgacagggctgacaccatggtctggaactaatcatacaggccagaatttttcaggccctgacttgtcgcaatccctggaataactccaaatccccagtgagaatgagcagtttgttgcttgcgtcgcagaaatctgagggagggtgtggcggggaccaggccaacacatgttactgttaccaaccgctccacataactcgccatccaatcacattgcacaatctagagaaaggcctgcatatgaagccaacacatgatccaacttcaattctgaatctggtcaggattgactgctggatctaggttttgccggtacagatcagagctacagatccactgaccgctgtaataaaaagatatacgttatggtaaaaacggcaaggcctcgtgcttactttattcatgctatctcaatcatgtgatgctaaccttgctaagatagatggccctctgactttggatgacagtaatgtaagtgcatgcattatttgagacaagtggtgatgataaccttaatccattgaacatgtgaccatgagatccaaaacattgcatgcctagctgtctgttcagtgctcctttttgtgctgatccagcaataacatttaaaactgacatggctacctacacaaacccatggggagaggtaacaactactgctcaaaatcaaacagagagctagaattagaatccagttgcatggggatcgagagagat

SEQ ID NO: 19265 - DNA, 373 bp, Zea Mays
gccgaaggggtatcgcttaatatcggccgcccgatcgctgatcgaccgtccggatctgaaacgaggcgcccagattaaatcgcccaaagtggcgaagcggtacactgcgcaggccactggatcaggaatgcacggtcacggtttaatggagtcagatctaatccgagtcgtgggatcacagatctatggttatgattcaatcatgcgaatgggtacataaacatctaatctcagcccttcatcaacggatcgacgacggtcgacccttcttcctcccaggcagccgagtctggcggcgcgcgctagccacggcggagtcgtcgccggtggaaaccaatccagggcaccaacgcccaaaactctaattcgttag

SEQ ID NO: 19266 - DNA, 781 bp, Zea Mays
cgaaaacttcgcccggagctgtcctccaccgagttcatcgcaagtccgcaacagaccacctccaatcccgcgctgatctcggagtcgggccgaccattggcgtaccatccctggctataaaaccatgccgtgaaccctgttttccccaccatcaggaacggaatagagagaggacggagtgtcgccgcgcttggatctagtctccaccgccggttcggcctcgggaactcgaccagggtggagcgcggtgcgcatggaagatgttgtgggcacccttcaagcatatggtgctgggggtaagtcgcaatttctcgtcggtgtaccacaccgccccaaaatccacacttcgccgcggccaaggcttatgactggatgattcatagtctgccacccaaccgctagttcacaaggttgcccgctccctatttccctaatcggtttcgagtttggagactttatgctcgggattgacattgtaggtcatggcgccgccgcactggcgctgtgcgccgccgtgttgacagccagggaaagaagatggtgctgccaccatcgatctgtttgtggacggctagatctgtgagtcaggtaccgcttcggccgggcgcgtttcggggcgttgatatcccatcggacgatatgcgtgtatcacacgtctcattaatcgtgcgccgtgggatctggatcctgtggccgtaaacgcgtaccggttcacccaaaggagtagatctaatcggggccatagattgatgatcgggtagatgggattcctcgatacccc

SEQ ID NO: 19267 - DNA, 402 bp, Zea Mays
gatagagaccgggtgaccttcaagaatctggggatcttcagctcttatgggttgaactaggttggatgaagcgggctcttggatccgcagggctctacgttggttatgggttaccaagtaggcctccatcaacttctgggcgtgctcatccttggcttgcttcagggcttcaaccgcaatgacttcacgactttccaatgcagttgcacgggcttgagttgtagtgaaatccacatggagctgacggttgcgcttctctgcatcttctgctcgggcaatcatctaacggtggtgccgagccaagaaatcatactgtgcatcaagggtgagcaggtatgcagtgaggtacacgactgtggggtcgtcctcaagcatcttcttcccttccaatgcccgcatcct

SEQ ID NO: 19268 - DNA, 544 bp, Zea Mays
cccccaaccggcgcggctccatcgacaaagaaaaaaaagcagtgcgccgtcgtgtgtgaggatgtgagcgtcgtctctgctgcacagttggagccgggttctccaacgacttgtgcgtggtgtccagctgtgaatcaccgccatacccttcgcccgcctcaaccatacggatgcaccaagcagtgagagagagtggaatgggagatctgcagcagccaccattgccagcgaagtacagggagaggtgagggattcatacgaagaggtggagtgatgtgaggtagccgatcatcgttgggtcatcgcgacccttctgctactgctagaactacgaatgcggtgtcagagctcggtgaatttctcgccaggattccgccggcgtcgagattccgcctgtcgtcgtggatcgtcgtcccctctgcgcgcattatggtaagagacccaaaatctgtttcgctttgtttctatctgcgcatagaacgttttggggaaggaagttgttaactgtagggccggttataggttcgccggcagagggagcacc

SEQ ID NO: 19269 - DNA, 589 bp, Zea Mays
tgaagttgtttactcttggcttgctggcatgcatcacaaatatgaacaagctctttattggactcaataggtaaattattatcacgaataacacgacgcactgtaacggatgacggatgaccaagacgactatgccaccgatctgtggatgttttgacaacactggaaacatgcttgctactgttgtgctccaaggatgggatgggatatagtccgttcctacacatgccgtgtagaagagtttgcctcgtgtgacgatccttgacaagaaagaaatcagggtgaagttcaagaaaaacatcattatcagacgtgagacgatgaactgaagctaagtttcgagtagcttgaggaacatgcaagacattatttagagaaatgttatgataaggggtaataaccgtagattggcctatatgctttatcgtcatacctgctccattggccgcatgtacttgatcattaccattgtagtcttgccgcatggtcagtttgtcaagatcgccagtaatatgatctgtggctgcactgtcggcataccacgtcgtgtcaacattataggaggtgacagcagcagaagctgttttct

SEQ ID NO: 19270 - DNA, 578 bp, Zea Mays
cttgaaaagatcagcatactcctcttgagccctctggtcaattcctacattatcagcaattatcccaactgccttcatgattttcttagtagcacgtctgtcaagatcagaggcattaaattcaacgcctactccagcaactctgtggctgcgtcgtggtatcgatctggagggcaaaatgttgtccttcttcttcaagatgactggaggagcaggaagcaatttagaaggttgccgagtaacagatttgatgaactcttctctctacatagactgggaagcctcctgctcgccagaatgagaagaaataagactgggaaccaccccagctggagacatcagaatgtctgccacagccgcagtaggctcaaccaaactcaaattaggaacagaatgtgtaaaagttattgctgtgactggagacaccaaaccatctgccacatccccgataatgactgggccctgaccaacgtgatctgtcccatcagcagcaaaaccagtcgccgatgctggagaaatgatagcatctgctgcagccccaacattgccattctcaacgataccgtcaatcagctgta

SEQ ID NO: 19271 - DNA, 468 bp, Zea Mays
tcttcacccagtcagaattgaatatgggacaaaggcgatggcttgagcttattaaggactatgaactggaaattcattatcacccaggcaaagccaatgttgtggcagatgcactaagccgtaaggtttcctgtcactgtcttacggtgaagacctctgacaacactttatgtcaagagatggagatgctaaacctgggaatggtccaacaaggaactttgaatcagctaaagcttgagtcgtcctcttgcaaaggataattgatgctcaaaaggataatgagggcatgaaacacattcgtgagaagttaagggctggaaaagccaaatgtttcaaagaagatgatcaaggcattgtatggtttaataaccgcaacttggtgccaaagaatgaagagctccgccagcaaattcttgatgaagcacatcttagccgctactctattcatcccggaagcactaagatgta

SEQ ID NO: 19272 - DNA, 363 bp, Zea Mays
gttcgccaaggcatctgccatggttttgaagcggcgatagtaatcagagataggtagatcaccttggatgaagtgccgaaactgagcgtcgaggtggggggcgcgagtctcccgattcccgagaaactggttctcgagagttagccaagtggtgcgggcactggcgcctcgctccatggccatttcagcaaggtccggggagatggaactggagatccaggacttgacaacgcagtccatgcgtgcccagtcggggaagtaaggcgcgggagtgtcgtcgaggatgtggctgtccagggagtatttgccaacgacgaggaggaactcatcgcgccagcgggtgtagttgttgttggcgaggtc

SEQ ID NO: 19273 - DNA, 904 bp, Zea Mays
ctggggaaagtcctccaccctaggttagtttagggtacgcgacgccactgagaatcttaacatatcccggtcagtttgactttggggccgcgtcgtggagctttgttggtaaggggaccaaagcaaagggaaacgaggaactcaactaacatcacgtgctttactagtttttaatgaaggcggacatggtaaatatgctcccgaagcttagctggacatgctgtggaaacacgagaagccattctaatatgcaatgcaatatggcattcctcactgctgcgaccaattctagcacttatgtcactgctattgttcttttgcgcgcttcgttaggtgttgtgcttgctattcttttctttgctagactatatgggtttgtttctacggaagttacatgccatcctgtagcaagtaaaagtgagttttgacaataaacagtgcatgcttagatcatgaggtcatgtttgcttgaagacccctccgacacccaggcattgattcgaatccattcagatgcctgggaaagcttctcatgtcagtttgcctggatgtaatccaaacaggccttcaccgcattgcctgtcaggccataaggaatatactctcagcttcgatttacctcacattcacatataatccatgccatttgagcttctgtttcccttcacaataatataatggattatcctctgtatactaactctaatctgctgggaaacatatgattggcattgttactggtatactccagtcacgtggtcgacaagagggcatctctgattgtgcggcaaataatataaatatcatatctacgctttagataggaatggtgaatgttggtgggaaaatggatgacaagattgataggtgtgtagctccatgtacaacaacgtgaatgaattgt

SEQ ID NO: 19274 - DNA, 325 bp, Zea Mays
cctcgtctggaagtagtaggcactgatgtggtccctagtctttccggacttgaccagcatgaagaagtagcggaagagggaagtacagggggccacacctacgaacatctcgtagaggtggacgaagatggctatctggaggacggagtggggcgtgaggtgttgaagctgaagcccgaactcctccagcagcaacagaaagaagggcgagatcggcaacgccaacccgcaggagatgttggaggtgaacagcacgaactccctggcggcgagatcgccagggggggcagcgccggcacggattcttccggcgagccccgacgcg

SEQ ID NO: 19275 - DNA, 546 bp, Zea Mays
agcgtttacccagcccccgagggtgttgccggtaatgatccggctcgggtgggcagcgcgagctatgacccagccctcgagggtgtccgagcgtgttccccttctcatacttccatggatgtccacgtcgggtcttctcctctacattctgattgcatggcagcagcacgtgccttgggtcaggaagtcgccttagaggctgatgcacctgatgctagagttttgattcctgctggtgatgctgagttggtccccaatgatgctctgcagattgcctcaattgataatccttcgtcaagtcaccaactgacttctcatgatttggggcttccttcgttcttctccaatctccaggtaatttggcttttcccgatctgactatactacgggtgaaatactgtctttgcactcatttgttttcaatgtcaggctttggttgacgagatggctggtcagctgagatcgcagggtgcctctgtcccggcaagagctctgtctctaacacattggaatctagtgctgcttcagcagcgggtatctgattta

SEQ ID NO: 19276 - DNA, 2017 bp, Zea Mays
gcgatggcgggctgggcacggactggatgaacttctttgccgagccggaccccacgtcgccgtcgtccttcctgccggactttggacactgcgacatcctcagagctaccggcggcatcaatggctaccctaaccccaaaggcggcgcaagtgtggccgacatcgcagataagattgtcaagcaggttcggaacctcctcgcttaattattctgctgtttccggtgcacattactcgcgtcgcttgacgccgagtcaccgtcgcgtagaactgtagatctctgggaaaaaaaaaccggaaacgccgagagcgcatgctgctgcaggtgatcttctctgctctaatctaacagatcagggagccgcatgatctttggttccctcatcctgaacttcttcaatgatgcagacatttatttatcacaacttaactagtgacgtttttatttcagtgataattctcgtgattctcggatctacgttgtagatcatgcgctgttggacgtttttgatttgttttgtttttgcttttgggttttacagtggttgttgcccttatagtttcattgttctcacctttgtgcatgcaggtcgagtaccaattcagtgacacgaacttggttgcgaacgattttctgacaaagatcatgaacaaggatcccgagggctatggtacttaaaaaatgcagcaactttttatcgtacacaacaataaagaaaagagcctagagatctagaactgatgatgaaattttctatcttccattaaaacttgcggtggaaactaaatggtgtccaaccgttacgttttgtgggcagtccctttgtctgtcatatcatcctggaagaagatcaaggccatgggggtaacaagccagctgctggtcatggctctccggacctcggacaagctcgtaagccggtgctacgacctctgcgcctccttttcctttcacacaagtcgtacgtagccatatgtagattaccatgaaatagttctgagcggcgtggctccgatccgtccaggttgtcagcgacgacggcaggaaggtgcggcgggcgcagccattcaccgagcgacacaaagaagagctgcaggtgaactagtgtgctgattccgagcagaggacgacaaggtatttttagttcctcaaacaaaatgggctcactgatcactgtttgtgtgtaccggctcgtgcagtgccggatggtcatcgccgagaacttgccgcaggattccacgagaaacagcctcgagaagatcttcggcgtcatcggcaggtcacacacgagaaacagcccatgtagtttaatttgtttgttctacgcatgttagccttgccatgtactagctagcgtctcttaaccgtgtgcgcgacgagtttttttacagcgtgaaaaacatcagaatctgccatccgcaagaacccggctctgcaagatcatcacctaggtcgtcagacacaaacacaccagccagtaacaaggtacttgtacttggtctttttttattttcatctcccagttcagttcagtattcttgttatagtactgtatctctcatcgtcgtctgataatgacagttgttctcttctgtccttcctgacacagctgcatgcgcttatagagtacgagacctcgcaccaagccgacagagcagtaagtcagtttcggattcaggcatgaaatgaaacccccgagtagttttactgccgctgaaagcctgtttccgtgtgctccatcgtccatcaggtggacaagctgaacgacgaaaggaactggaggaagggcctccgcgtgcgccccgtgctgcgacgatcggtaactggacacctcactcctttttcatcggtttttacttgaccatgcttccatcccatctcggagctggctgatcactggcctgacatgcttgcggcgggcattccacgtgcgtgaccgactcctcgccacagcccaagacggtggcacggatgaagcggccggacttggaccaccacgtcgccgcctccgacgag

SEQ ID NO: 19277 - DNA, 824 bp, Zea Mays
gtttaatttgcaaagtctcggtttatttctatttattttattcagttaatagatggcgggttagtttgtcaaatgtgcagctgccctttagccatactactccgctgtctacacacgcgcgatcctaagcccttagatcatcatcgaaccacccaaaacacatcccgaaccggtatacgcccctgaccacatgattccggatcaactatcagatttttatgaagcccggtccgttacatccctcggatccaatctcaatggtctgtgttcagtccaagcgaaggggtgtcttattctaatctcaggcgtttatctcaattcggacggcccatgctcatcttcaacctcacgcacacctacggttccttctctcccattctttcccttcgttctctcgtctaccctcagaccggccatggtcctcggtcactagcagcaacccgccggtgatacgccagcgccgcgaagcacaacccttaatccggactaccatgttcgcggaatagaagaaccgagagaaaatctaacaaaaacattttaagcgagctatcgctagagcaaaagggaaagttttgtacatggcgaggaacaaaactgagcttagctagactaaagggaaagtcatactcaccacagcgagctaccgctagagaaagggtatagctccatggcgcccacgacctcgttcttctgctcgacgcggtggcggaaatcaccacaacaggcatgatgctcacggctgtgcttgggatagatgagggtaggttcctggtacacggtcgacttatatggaggtagggaagcatgccctaggcggtggacgc

SEQ ID NO: 19278 - DNA, 606 bp, Zea Mays
gcggatgttgtccggatccttggagaccagcaccaggccgcccgacggcgctacgtgcgcccggccaaccaccggcgcccggcgccgtccccgaggtggcattccatggtggggcggcgatgggaagatttgggaggcatgaagtcgcggcgacggcgcggtactgcgaggagagcgagtcgagcaggtagaggagcggccacagagtactgggtttctgaatatggtctgctttctgaatatactgacattgatctctaaaaggcttaatattcattagttttgttctctgctagcatcaaacatgaacagagagactgtagaggcgccacactagcacatataggtcgaggtggagcaggagaggagcataacatacctttgagctgtaggtcgaggtggtcgacgctccacaacaaccttgctacaacatggaggctgtaacacaaacaaaaggacatgaatcaaaactatagtactgaaacaaccatgccatcaaattaaaacttttaaccacccccatgtcaagcaaacatcatttacattttacaactttctaacaaaacataatataatagtactatctgtgcaactgttgcccatata

SEQ ID NO: 19279 - DNA, 537 bp, Zea Mays
gattttggttttcattttccgtggggcaaaacttggaaagcaaccaagtgccatgtcgggttcttgatgcaattcccttctcaagagaaacttgatgagatgattaatttctctgaacttaaaatgaaaatgtccggggcaaaaaattctgtctcttattggagctcacaggctaaacctaaatccaagcttcattctgtgtggattgtggctgaaaatgtccctgaggaacttcaaaactatcaagctatttgtgagctgggatcaacaattggggctgttgaagaggtggatatcttatctttagactctaaagatattgtgagattcaaggtacacgtcaaaagtgttgctatgattcctccaattatagaggtaggtgttaaacctttactctatgacatattcttcaagattgatgatatcactgatgagggatggaacgatgagtctataaatcttggcaaaagagcatcagtggacaggcaaggtcttgatgatccttcttatgaaaaaactggcaaaaaagctagaaat

SEQ ID NO: 19280 - DNA, 432 bp, Zea Mays
aaagacagcattaaaggttggcgtctggagtggtttatagttgataactatggaaattctctcccctcccggtcaggaagacagccagacattcgtactccgagttagactgagtttcccacggatcaagaggtggccgaggcaggcgtgttgctttctgaagtcggattactgaaagagagaggcctgactgctgaagctgtggtcacggattttgttttcaagaacattcagccgctgaaagacagggcttatccggcatatctttattgagggctggccgactcaacccgagttaccaataggagaattccttctgttgacttggtaagccgacttgagatgatcctcaggggtaaagtctcaaacgttggtgctctagtggcttactcggcttggaaccttccttctcccaaagctttcacccttttt

SEQ ID NO: 19281 - DNA, 982 bp, Zea Mays
tgcctgccatataaggccccatatggtgccatcttgatgctagcctggtagctattgttataagcgaactcagccaaggcgagatgatcctcccagctacccttccaagacagaacacaagcatgcaacatatcttccaaggtttggatagttcgctccgactgaccatcagtttgagggtgaaaagcaacactaagagagagcttggtacccaatgcactgtgaagactctcccagaatttggatacaaatttggagtctcgatctgaaacaatggacttaggcaccccgaaagcctgattacttctttcatatacaagggaaccaactctgaagttgaatttgtggtcttcatgggaataaagtgcgcagacttagtcaagcgatccactaccacccatatagcatccctgccccgaggagaacgaggtaagccaaccacaaaatccatggtgatatgctcccacttccactccgaaatttccaatggtttcaataaacctacaagcctcttatgctcggccttcacgcgctgacatacttcacaggcgacgacatacttaggaacgtcaaccttcatcctcttccaccagaagttttgcttcaaatctctgtacattttggtttcaccagggtgaacggtgtaaggtgttttacgagcttctctcaagatatccatcttcacctctgatttctaaggcacacaaagacgacccctgaaacgaaccaaatcattctcatcaatggtgaactcatggggtttaccatcgccgaccctctttcgagcttcctgcaacaaatgatcctgctgctgagccacacgcactctctccagaaggaaggattgaatgagatctgagccttctctctagcagtgccgacatagcacaaagtgacccccatacggtctagatgtgcgatcaaaggcaaggccacttttggaacaccggacctgctaagggcatcaaccaccacattttcc

SEQ ID NO: 19282 - DNA, 328 bp, Zea Mays
gccataggaggtttgtaatttaaattgaggtatgaaatgacgtggaattgagctgatacttcacgaataggtttatatgggtgaatatgagtgaagtgtgtgcttggtttgaatttaggcgaagaaaatggaatttgggcactcggctcggattgatcgctcgaaatagggaattgtgtgaaattgaagcctggaatatcggattggcgtgaaatttggtgaatatgttactggaggtgttgttaaggtgcctgaaaagttgggttcaatcggagcatttttggctcgtttggacatttcaccgaacacgtagtatgcggtgagatag

SEQ ID NO: 19283 - DNA, 370 bp, Zea Mays
aatgttggaactatattagggtgtgggtacatttactctcttgcccctctgtaatgggccaggcccaactcatgattattaatacacagccccaccctatcctagggttagggttttccctccaatatggtatcagactttcctgcatcctccctggccgccgccctcccctagcccgccggctgctctccctaccagccgccggtgcccttctagccgcgcctcccctgtcctctgctccctatcggcgcccgcgaccggccgcgccgagctcctccaggtcttcgacaatgctctgccgagggcctcgtccgtcccggcgcctccatcccgcttgccccgcccgccgcggccgccgcgtcggccgccc

SEQ ID NO: 19284 - DNA, 1184 bp, Zea Mays
cggccgtggtcgcccaccgcccttgctccagcctacctccctgtatgttccgcgcatacgcgttggcgtaatgtcgctgccaatggcccgcaccaaagattttcctcctacctcgcaacaacccccaaacagacagcggaactctcgttgggttacctcgatccgattccagcgccggagttctcgggctgcaaccgttgccctcgtgactccgaccgggggcatataaatcagccctgcggcctcctactgaaccattggctaactgaagcacagagagagatgtgaggaagaaacagcaataggaagaaggtgaggtccgccgtgggggaaatcaggatttcctggggggttttgaccatcctagggtacccgtgcgattcgctggagttcattgaacacgtttgaagattctattggcaaaggcatcgtctcctgggcaccaatttctcgccggtggcggaattccttccccttgccgcctccgacgtggactgcccccgcttcgtcacccctgtcgctggtaagtcctcgtttgttttccccgcatactcagggtcgcgtagcatcacccgtttagctaggtttgggccggaatcgccagttggccgtacaccggcgaagaccgcaggtgaccctgcgccgccgctctaatctgccgtgggtcgatcctggatgaagaagacgaagccgtggccgtgggatctcaaacgaacgactccgattagatctctggataccgattcggggcattaaatcgtgaccgtagcgatcagatcggtgggctcgggtgcaagtttgacgtggaagaatctgagccgtggatcttggatccaccggctgttagcgcgtaccgattcggtttattaaagaatttgatcctggtcgtccatctgcaatcgtgcggttcagaatcaatcttaccgcttcagtcaggcaattttctaaaagagaccctggggtttgacaaaactaacccgccgtccacattcattattcactgagtcttagagaacttcggtttaggcccctgacttttccagtatttgacgcccagtccaggtaattaataaaacagggaaaatcatttagaaaatagtttttagtacatatttaaatgcagattcttgtttaatttgtagaaaattcatataatgtccaaatcagttcattccagtttctat

SEQ ID NO: 19285 - DNA, 352 bp, Zea Mays
aaagagttaaatagacagttaaaaataaaaagtatcttggagatgctattatattttttctccggcccgggcagatagactagtcatcctaacaaaacaaaggaacatcaaagctaggaggtgcaagaagcacctggccagtggccatgtcccatgtcacactttttcaaaagacaaaacaagctttcgaaaatctgggccagtgggtgttgatcatgctcaacacatcatgtgaagcatctaattccatggtgcaatgggaaaattctagttgcgaccaataatataacgaaaaccgaatctaaatccacatgcaaagaatgaccaacccaaccgacaatatatagtaagt

SEQ ID NO: 19286 - DNA, 872 bp, Zea Mays
acccaaagcccttgataaaacacagtactgtgctagtgttctgttgcttgtttttttttgagaaaggggataaccccctatttcattacgaaatagaaagagacataagttcttacaataccacatgagcacccagaattttaaagctgacaaaacacacaactatcagctaaaaaggaccaaaccctgaccaaaccaaactactagtagcaacacaaaaagtaacacagagctgaccaacatcaaagttcacacagatcacaccaaagcagcaagcagcatttctatctcatagtttttcctgtagctaggcgctacaagggagaagaagtagaacgaccgcacagttattgaaccaaaataaccagataacaaaacatgtttcatttcatcggattcgtctgtcaactggcctccaaccacgagtcttgttgtagatctcacacgccatctttttgattttgagacttccgagctccaccaattttcttgccttctttttttgacgaatagcccaagtattaagccaaaaacaacaagagaaaatcacgttagtcggatcatcaattcggtcagtcccaaagcaacaattattgcgacatctccagatcgcccaaatgacagcaccacagccaaacagaaccagatttttttcagtcttattaaaactgttaatccaagtaccaaacaaatcatccacattatcaggaatagaatttaggccaagagcagagtagacaattctccacgtaaatctagctaccggacactgaaaaaacaaatggtctatggattctgaaaatccacaaaagatacattccagattacccttccaatttttcttgaacaaattatccttagttaaaatcttc

SEQ ID NO: 19287 - DNA, 544 bp, Zea Mays
cggctctatctctttggctttgatggcttcggtgctgcctccaacggtgaccgctggcctggctgttgaagacaccacccaaggggacgtacaagacgtcgtacgccgtggtgatggcggccacgcgcttccagcgcgaccctactagcgtcgagtaggtcatacctgtagacataaggctagggccccgctttaaggcggatgtaataactttgtttttgtaaggtactttttgagtactatttatcgagcagtattagcatttatctgcatactatttgtccctgttgtgtgtggcattgccgactcctccctggtacctagccccctgggatgtaggctcgatgtgtcgagactggataccagcatacctaaaagagttgggaacggcccccaggaggcagcctcgactgggacctggacctgaatacagcttcggctagggagcgttagttgtacacccttaggacccatcgtctgacattagccatcctttgatacatgcacgggacctgcaggttttagtctgggaagccaagttgtg

SEQ ID NO: 19288 - DNA, 528 bp, Zea Mays
acgccaaacttagtcataggcatattaccgtgagtggagcgatgcaaggccctgaccacgatggccattggcttcgcgccggaggggagcaccacgagcaattgccacaggttcacgtccactggagcacgattataaccatcaacacgttccacaaaagattgtgaagctccctgacccgaccacaagccccgatgagggcttatgcgcgtatccccattcgatctccctcctacatttcctcttgctcggagttcatggtgaggcgcaggtattcacggccagccggccaggacttcgggttcaagggggagcaagggcttgtatttatacaccacgacagagaaaccaggcgcaagcagtttggattaggacaagaaatcgtcacatgcgatttcctaagaactccgctcaatctcacgcagaggatagcaattctgttacattaggaggtcaagctaacatatgggactcacatagtagacacgaccctccaagcgcgcacggatctcagttctggcaaggcgg

SEQ ID NO: 19289 - DNA, 295 bp, Zea Mays
acagtgatcagaaacacctttttagcgatgtggtcagaaacttaataagaactttacaactatgaacagctatagtgatgtgatgtccggtatcgatgtaaaattagtcaaagaagaccagttatggaatctgcacaactcacaagccatttctgagtagtatcaggaatgcccagttggaagttgatctctggtggagaatgatgatcctgctctggaatttcgtccttcgtaggcagtaaagactctgggacctcacagttactagacattctgccttcctgcttggtggaac

SEQ ID NO: 19290 - DNA, 281 bp, Zea Mays
cctgaatattatatcttgtatgaattccaccgccttggctgaagttagagaagcaatagatttgtattctatccatttggtaaatttgtcaatggcgaccaacacgtgagtatatcctccctgagctttcttgaagggtccaatcatgtctagtccccagcatgcaaatggccatgttacgggtatggtctgcagttgctgtgctggtaaatgctgctgctttgataagaattggcaagcttcacacctctggactaactcggctgcatcactctttgctg

SEQ ID NO: 19291 - DNA, 495 bp, Zea Mays
agaccaacaaccccaaatcagtagcatcactcatcaatagtaatctagcgagggcccccttgtaatcaagagcacacccaacactcaacacatgggtaagggctagcagaggctacggtcgtggtaaagggtctggataggaacaaaggccattgggcattaaatcaagtattgctagtcacacaagaggccaaggaaagaacaacaagatcagttttggaccagctagcgaagaccattgcccacacttcatagcagctgcaatgcacccctcactaccaaagaaatagcaaccatacccacatttcccctcaaactaccacccacaattaccccaccaagaacggctgcaactccccctcctcctccccctcaaatcatacccccatccaccaactcctccctccaccccaaagatgaaggccatttcccatagccgccagttcataatataatagacatgatatctagcgagtccaacatacacttcgagac

SEQ ID NO: 19292 - DNA, 661 bp, Zea Mays
cttgtgtccaggtgtctcagttggagatttcttcaagaaacgccgcttcggatccgaagtcttctttggtggtggtcagggtagccgcttcgggtcaccaggaataagggatttggtctatttggtggacgacgacggaggagatttcttgttctcaggcggaggagctttcttgttctcaagcggatgcggtggctgagaaatggcacggtcgtcccttgaggtgggacggacgtgggcatcagtagaaggcagaggctgcaaggttaacaagaagatagggggaggaggaaggtcttcatcggggtcgtctctgtcttcaacgccgacgactggtgatccagatagtgtcgccatgagaatttgagaactactcaatctccatgcgactttgggagtctgggacctctttgagtcggtggacaggaaggagcctgggctcacagcacgctcaactgcaagaggtaaaactagggttatattctttattttatatggctgctaacgtgaaggtgctttgggcttttacatttttgcttttgggctacttgcgacaagaagttgaatgggttgtagcctgcaaccattattctttatataatatacatacactacactacatggtgcgtccccgatgaggaagagctggaacgttctatcc

SEQ ID NO: 19293 - DNA, 440 bp, Zea Mays
gcaaatactgtgcttactaataattactgaaattgggcgataaatgacagagagatcacaaattgctgaaagatgatgtggcgaccgggtgggcgcgtacggctcatgtgggagtcacgtgtccacggagctaatactgtgtgcacgtcttgcgagctcgttactgggcacgcaacccgttagtggattgcagactcccgatttggtgggctaactgattcatttggtggggtgtttggtttgtcagttgggtctaggtgaattatcaccctatatagggtgaggctattgggagccttaggcttccaaacatatggtggaagcctcagtcgccctcgtccgcctcaccatgatacgcgcccgcccgactccccattgccctgtccgtgttgccattacgcgcgtgggtcgcaatgcccctctcgccccgtccgtgttct

SEQ ID NO: 19294 - DNA, 366 bp, Zea Mays
aagtgagcaatttgggggctctagtgagtaattggaggcacgagtgggtgtgttgagtgcacaattacatagcggagccgagggtgtgctcaatttatagggcccttgagcggtggcccgtgaatttgagatagcgcagtggcggccggagagtaggcgttgcactggcgcaagcaattagtggctttcaccgtggcgagctcaccggcgatgaatggggggtctaaggtgactcactgcgacgtggttaaagcaccaaagcacgtgacacaaggtcgtgaggtggctaactccggtgagtctatccgaaacggccgtgactcaggcgggtacggcggccagagtggaatagtggctggagttcat

SEQ ID NO: 19295 - DNA, 601 bp, Zea Mays
gacttgggagcctctcatccctctttcgcctacttgtagcctttactatgagctttgatcattaatggtgctggtagtacaaaccacagatgactggatgtagggacattctgtccgaaccattataaatctcgccaacagcgcacaccgtccacatcccggaacacgcacaatacatttacttatcagagcgaggttcaaaacaccgacacctccttcttgtgtttgagagccatggtaaaatttccctaagtaggagacaatttggcaatgatgcccccaaccacgaacttgttaggcaagacatagtcaatgtgagcaagttccccgaccagaagctgattccatgagcccgttccacgacagaacgatcatccaccatcatgtcctcatggtactggtcattaacataaagttcacgtccaacatctaattttgtatacttccggtctagggcctcccataattcaccggcatatagctcgggttttagtgcatctgaaggtctagtcatgagaggaagaactagggaaatcacccatgagatccttaacgacacgagccagaacttaaccctagcttgccatctcttaaaattttc

SEQ ID NO: 19296 - DNA, 540 bp, Zea Mays
gttcgctacggttaacgattaaaactaaactctaaacattaaaaaatatctcggagacaaatatgaatttgaattaaagcaatcaacagttaaactaatcacaacacgacaagatgactaatataaattaatgacttattttcgtcggtactcaattattcttaaactaggtgcgtgggaatggtgagatgggtttttgtacagttcagccattgtgcgcgctctgcaaaagcgaggttgccgactgcggatctgcactgcaccctgccagatctgcaatttattccacaatcgtgtagtagcagtagtagtacgatgtacaacagtgactagtgtagtagcagtagtagcagcgtaggtctagctagctgagtctgaactgcacgcacgactgctttagcacgcttcagtttctgggaggttgacaacttaaactaggtgcgtgagaatggtgtgacacggtgagatgatcagggaatcaactatgacataggaagtgcagttttgtgccatatctcaccatgacaagcagctaaaaag

SEQ ID NO: 19297 - DNA, 545 bp, Zea Mays
gacgaaatagatgggggagaaaataccttaattagagcggagtacggacccgcccacagcacgatgcggcattgtcaatcaccggcaagcaaatcccacgatttggatcgaccccaggagctttcctgtccaattgatgtcgtgctgggcatcccttcgcataggcgattcagccaaacctccctaccctagaccggacacagcatagggcccgacatcgccgtgtgcctggattcatggcggtaatctcccttccctcggttctctctccttcctagcgtccacgacacggttcgacaagatggatgggggagcgggagcgccagggttatataggggcggttagagtccatgcataagaatcgcgaagatctgcaaccacttcagccagcacagatcacagagccctgccgcgaccatgggttcctgcttctgcgcgattctgtttcaggctggaagaagcccagcggtcagtgagaccatcgcttgatcgtgcccatgcagtagctggtgagtgggccccatcagttgcatgctgcggctag

SEQ ID NO: 19298 - DNA, 1379 bp, Zea Mays
tgtagactacaacaagcaattcaccgtgattaggagcttaaccacgccatctaacaattcggttaactagagcaacgacatcgccactaaataacatacacgtcaacttgccttttattgccgcaatccgagacataacatatactacaacatttttataaacccacagattcacaagtatattcgcacatcgaccaactcatatgaatcgtaaactacaattttccaaatcgcaatcaccacacatttacttcccaaaccatgaacgcttacatgtttatcctacgaaccgggtatttcaataattagcctaaaacaactaactccattacatccttgtatcacaaacctacttgacttacgtgaagtgtctactcgaaattgtgagcacaatcatacactatatgcgaagcctaatttaacgagcgcataatacgcatcgtcatgactcgacctataaatatagagaaagcgatgactactctagcatgtcaccacccctctatttaaaccaagacaatttctaccatcgactaagagtcgtaagcattaaataccttactactttacatgcacaaataaccttcaacttaacacaactgacaccgatagaatttttactaaactcatcatacgcataaccctgtctcgtatacaaccatattatggcatgcactcgagacacttcactcaatgtggcgcgaccactaatataaatgaactctgacactcatgtcttaacgatacatcctccacgcaaacgagcattttctaaactactcgtcacatcgcaattataactcctacataatcatgaatcccatcacattgcataggatttgcacttcaatctcgacttaattgcacgcctcatacttgtttattataaaactcttcgcctaaccaatacactacattctgcctacataggatctttttaacacaatcgacgtatacacttaatagaacgattttcgtatgacctataaaatcaatctagccttttcatcgcacaacatgactctttccctatttcgaatgcaaccatattcgacatgcattcaaatacttcaaatgactctaacgcaatcactattataatacatcgacatacatgtgcaatagtacaccctacacacaaacctacaatttttaaatttacacatcacgtccaatcaacataactcagttatttctccgattcgcacactcgtgcacgccactacacatgaataataaactctaccaacattcaacacattacaatatatatcgcctaatattagttggaaaacaaaaagggacatcttactcttcattacttacttcgtcgaggttccccactcgcacgcaaacaaggttttggctaaaccgcaagc

SEQ ID NO: 19299 - DNA, 521 bp, Zea Mays
tgcggccatggacatataatgcttctccacttgagccggcagcatcttccgagttaaccatctgtctcattttttctttcacagtcaaagcttcatacacttcagccacggttagggtatcacgactatataggatggtatctcgaaaattgctaaacgatgtagggagggaacacaggagaagaagagctaggtcttcatcatcaaactttacctccatagatgtcagatcagccacgatcgccttaaacactgatatatgcgtcagaacagagcctccttcttgcaacttgtgggagaacaacttcatttttacgtgcatcttgctggttagatccttcgacatatagattgattccagcttcaaccaaagtgcagcagcggttttctcctccaagacctcctgcaggatattgttagacagatgaaggtgaatatgtgtgagcgccttacgatccttgctcctctcctcatcagtccaagtcctgatgtcttttctgccaaacccatcttgggccaag

SEQ ID NO: 19300 - DNA, 307 bp, Zea Mays
gttctgtccgttaaatttgaaggatgccgagctactttatccctccaacaacgcacggtaaagcttccggtaaaattagcgtgcgtccttcaaccctgtaaatgtggagttcctctgggcgttcgctatccgtcactctctctccctcctgtgtggccggggtgaaagcttctcctcgcgcattccatgtcgcaggttggagcacgacgggtgcagtcgagttcgtcgcgaagaggttccccaagctgggtaggtccagcggcggagcaatcgccacgggcggcgatgtgtggtggtgcgggtctac

SEQ ID NO: 19301 - DNA, 588 bp, Zea Mays
caagcatccaacataagataagcaaattgactctaactaaggctaactagattaagacactgaattaagcattattacagactccgactctgtcgatctatggatccaaatctatctgggtcctgcagtctggggtaccatagtcgaagcaaccatggggcgatgaacggtaagggtgctgaatcccgacaggggcgggagaaccaccatctagatagtggtctgctgcgcactcagcacgcaattccgcaacctccgcccgaaccttgcccaactcgtcaagggcgtggtccaactctgtgttgagcacgacagccaggttgaccatgttgttcagtctgggattgccctcaccaactagcgagacaatcacacctccagcactgctggtcgaacgacgaggatagtacttcaggtcaaggccatcagctaccccgctaaacaacgagcaataatgagaaagtgtctgtcgtgctacatcttgcatggctgcctcggcagtatccctctcagtaatagaatagtgcttcgagaaggcctctgcaccccaaagatcatcatccggacggcccaccaagcaagtagcct

SEQ ID NO: 19302 - DNA, 767 bp, Zea Mays
tgcgggggcgagcttcttcagcttcttgtcgtaatccatcttcagagtgcggtaggcctcacgggtgttggtttcctcgccttctgctatctcgaggctctcttgaagggacgccttttccctcgtaagttccctgactttttgctctaggctttccacccgggagtttaagtgagtgcagtgggaggcaaggtcatcatattggttatcgagggtgtggaggtattcagccatgtagacgatggtggggtcatcttcgataggatctcctcctgacaaggcctgaagtcttttcctctaggtgggggtatctttgttgctgggtgggaagtagcggaggggggtttcaaagattactttgctgtagccctggcatagttgtcggagggttttcgggcaacattctggcaagtatctaggaagcggtgtccggtgaaagtgacttggaaagaaggatggttcgggtagtttcggctttctcctaggtagactgccatacaacacttctccattccattctcgaggtactccttccagacatattctagctttttgcagattcccatgcaaagcgcacagcttcgcaatagatgtgggaacccctccacctctgagcagtaggatgtcctaatgaccagagagtcttccatctggaataggaaaagaagggtctgttaatatcaggggagaggagagaagacttttcttggggtaagaggtattttcatgtaaggcaagttttaaggtcagggctacgacctacggcc

SEQ ID NO: 19303 - DNA, 417 bp, Zea Mays
tggcgcagtggcttggtgtccagcgccgtggcaattgctccggcgatcaacggggagcaagagtgagtcacggtgatgcggtagataggcagagacacgcggcggacaacggcgacggcttaacggcggtgagaatccttatccgagggtggtgagtaaggggagaggtaccgcggctagccggagtggcctccagctcaccgacggcgatgatctttcctaccccgatgttatctacttgccccgagcacgaatcccgacgccggtgtcacgaatcacggcggaggattggtcgtcggcggtgagagttccgcactggcagtctgatcttgttcagagtactgtgccatcggacccttcttcagttcatctgacagagcattttcaaagcaacttttcttcagattttgcatgaga

SEQ ID NO: 19304 - DNA, 604 bp, Zea Mays
gtgtcggtgttttggagataacgaccgaacggttgctgatgatatcggcgttttagaagtaacgaccgaatcctttggagctatcttatcgatttagtgatagcggccgagtgatggatgtgacgccggtgttttagaggtaatcagccgagtgactaatggcaatgtcggcgttttagaagtaacggccgagtgacttattgtgatgtcggcgttttagaggtaacagccgagtgactgatggtgatgtcggcgttttagaggtaacagcctagttagaacgggccgcgtcggccgttttggaaataacggccgagtgatgacatggcacgccagcttttttaggaatagcagctgagtgatgacatggcagtccagcattttaaaaataaccgtcgggtgatgactgggcgttttctggaaacagtatctggcccaggaaaacctcatgtgtactgcattgttgcgcgcctctgctttccgtgccctagttcttgcttttctgcttccaagccttccttacactcgcgcgatactgcttccgttccgctcgccagcaagattgagatggcgcccaagcggaaagcatcaagttcatccgttg

SEQ ID NO: 19305 - DNA, 542 bp, Zea Mays
gggatggacggacctagaaagggctggccgcggtgaggttgctcttcacggtgttcttcaactgttttggggaaatcccaaattcacgtgctctggtgggggtttcgggatgccggtgggtgcagtagatgcttggatgcatggcggagctgggggtacggtcaatttatagcgcccgcgggcggtggtgctcaatttggccgagtcgtttttggcggccggagataaagaagaaggcggcgcggtgaatacgtggctaacaccgtggcaagctcaccggcgacgattagatggccgtagcgagtcacggtgtcgtggtggaaagcaaaaccacgcggcgcgatgccgggaagcggcgggtctccggcgagctaatccactccagccgtagggtagagggggaggcacgggaggccgtcggagtggcgtccagctcaccgtcggtgaaggtttttactgggcgatgcttatctgatggtcacggcgcacgaatcatggcgagcggcaatcgacggtgacggccaccggcgacgagatctttt

SEQ ID NO: 19306 - DNA, 355 bp, Zea Mays
ttcacaggtatatgtcctggtaccaaagaaatatgatgatcataatctctggaaggaggcaaaccagtagggacagcaaaaatatcctcaaactccaccagcaacctttgtaactgctcagggactactgcttctttcttatccaccacttgctccagcataaccaaagcccaaacctcattgcctttcaaccatttattcacttgtagaatggaaatttgtggaacctccttctactgacccgcatctcctcttagctgaacagtcactcccttgtccacaaatgtgagcacattctgcagtcaatcacattgcataggactatgctttttcagccaatcaaaacccaaaatca

SEQ ID NO: 19307 - DNA, 303 bp, Zea Mays
gaaggatagagcatacccagcttacttgtaaagtggtgttaccgactcaactcgggttactaataggagaattcctactgaggatttggtgagccggctagacatgatcttgagaggcaaagtatcaaatgttggtgctcctgttgcctactctgcttggaatttgccacctcctaagtcctttttcaatttcgtgtccaatcctcctgctggtgatagtggtctgggtcttagagtgcgaccctctcccgaagatattgaggtcttggttgcttctctttgtgatcttcccaatgatgagag

SEQ ID NO: 19308 - DNA, 604 bp, Zea Mays
aattctatcacaagaattcttacgtcgaaccatgctaactgagtggtttgttgctaatcaaagacacgaaaacgctagatccctaacttaccctgacttcccatctgagtggagatgggatgaaaagaaaagattatgggagcacatacaacgccatggtaaaataggccgcatacattttgtgcatccatctgcaggagaaagatattatgttaggatgcttctgatggttgtcaagggagctcagaactatgaatcattacgaacatacgatcatattttacatccaacctttaaagaagcttgtagagcacgtgggctcctagaagatgatcaagaatggtacaatgccttcgatgaggctgcgtcttgggccacatcgaatcagcttcgccaactctttgtcacaatgcttcttttctgtgaagtgggtgatgaattgtctttctttgaaaaagtttggagattacttgctgatgatattcaatataacactagacagatgcttaatcacccagagtaccagattcctgatgaaacacttaaaaaccagctgatagaggagcttgaaactttattcagcaaaagaggaagtcgaattcaa

SEQ ID NO: 19309 - DNA, 323 bp, Zea Mays
cgatggctagggaagatgggctccatgaaaattttggctgctataacttcgcgtatcgcaaggatacaaaggccctagttctgagttatcggtccaaatggccaactggatggaaaagtgagtggttttatgttaaagctgacaagaagaaaagggaaaagctgaagaagctggtcatgagcccactaagcctaagctttgggatgacccgacccctgtgcaacatgaaaccagggttaccatgacaactggccgtggcagaattcagagtggtggctgagcatatcagtaccagagatctagtacaagaatacctggcgaac

SEQ ID NO: 19310 - DNA, 1022 bp, Zea Mays
ggatggcaatagaagaagggtgagtatgatggattcaatagcgtgactctaggtcactcaaaggaatgggttagggttgcaaaacaattcgtggatatcgcattttccggtggacctcgtgtggtgaagtgtccgtgtaccaagtgtcggaattttaagtatgtgagaaaggccgaaaaactggagcatcacctttgcaagaatggtttatgcctaactatcttgtgtggcgctcacatggagaagtagagcaaaatatcacagagtcagaaagaattgatgatgatgaggatgatcagatggatgacttggtggctgatattagtagagagtatccaacattggcctcagaacaggctacaccagaggaagtgcaggagttctataagcttcttcacgcgttagaggaaaagtgcatgacgacaccactgtgaccgtgttgcaggtggttacacgtcttatggcaatgaaggcaaagtataacttctcgaataattgctataacgatacaatcaatctgattatttatctcatcccatcaaaccataagatgccaaaagacttataccagtctaaaaagattgtgtccagtcttggcatgaagtataagaagattgatgtgtgtgaagataattgcatgttgttctcgaaggaatatgaagcgaaccacccattgtcagaaatgcggtaaatcaagatatgcggaggtactaaaagaggatggagctacttttgttacaaaagtggcagctaaacaacttcgatatatgcccatcactccaaggcttaaacgtctacttttaaccctagaaactgcgaagctaatgttgtggcataaggaaggagaccgtgatagccaagacccagacataatgatgcatccatcagatggcgatgcttggaaggccctgaatcgttttgacccagaatttgcaagagacgctaggagtgttcgtctaggcttgtccactgatggtttcactccttacgacaacagttccacttcatactcttgttggccg

SEQ ID NO: 19311 - DNA, 320 bp, Zea Mays
gtccgacctaggacatacaccaataagcagtaagagatggtaagtgacgtatagctggttttgacatgcagagttgggttaggtacgacaggcgccctgggatcacgtgtcccacaggccaaactactgggtcgtgagagagtcacaccataagtggcgtcgaggcccagccactatcgacccgagagcgagtaagatgactcaatccatcttttcaatatttcgatattcgatactatctctcacttgctgggaaagaccgcaggggtatcgttaaccaatgaccgcgaggcagtccaggctatctgaaaagatttttt

SEQ ID NO: 19312 - DNA, 553 bp, Zea Mays
cttggaggcagtggctggggcattcttggggccattcaccgagttggagtaagtaggcacggatgcctttaactgggggcaattattcttgtagtgactggggtcttcgcagtgccaacaggcattagctggaggttggttgcttgcaacggaaggggcctgaaaggagctttgaccctactgactaaaacgtgacagagtgggtccagctggcttgttgaagcttggtcccttgggtggaaacctaaaggatcgaattctctagtgcctgtcctgctgctgagctcggaggacttggaatttcctcttgaggtgacccttttcttcttcccttgccctttccacttgtatggccttgtttgagaggtgcgagaagctgaggaaatcttggctagcaaggatagtcttgagttctggtcttagtcccttcaagaaatgggccatcttcttggcttctgtgctgacatcgttaggtgcataacgagccaattctgtgaatttgtgcacgtactcactgacagatcttcctccttgagttaatgatatagctgaa

SEQ ID NO: 19313 - DNA, 447 bp, Zea Mays
aacataatatgctctttgttgtttcaggcctcagtccatgctcgctattgggttaagaatattcataccaccacctactagctcaaactcctcccatgacgatctgtactcccatgccctactttgctctctttggcatcaccccatcctgtgaccatcttcatgtctttgggtgtatgtgctaccctaatctctctgctactacttctcataagcttgcccctcgacccttctattgtgtcttctcgggtactcttctgatcacaaggagtaccgatgtcttgatctcaatacccaccgcatgttgatctcccgccatgtcattttcgatgagatagacttccccttctcatccccctccaactccaccttcgagttgagccagattgaccttgtggctccctcaggacaaccacctcagtttttccacctgcatgtttacctcca

SEQ ID NO: 19314 - DNA, 809 bp, Zea Mays
gttgtgtgcagccctaacgaatcgtatcgttcgggacacgagaagcgaagaggaaccacatggctctgtttatttagatcctgtggagacaccctacgtattgtctgtaaaggcagaacgtcctcatgagctgaagcaactcattagagatacaatcatgaatgagttctggacacgcaccatgaaacgtccgactcattttcctggttgcaaaccactaccacttttacaatctacaatgctagtctcagttaatcacattacaaccgatgataataccaaaaataggtttgcaccactgcctaacgaggttccggcacctcattctgatgatcttcaacgccagttccaacagttacaagctcagatgatgcagcttcaacaacaattacaagggcgtgaagaaggcacacatgctgggggcaggcctagttgttctcatgcgaatgaacatgcgaggagcagacctattcattttcatgaaaatgaacattatatacataccgggggcaggcctagccgtccttatgagaattacacacgagccggaggcgggtctatgcaccgaactcaggaccgctatcatgaagagccagagtcatctcgccaaactaatacgaggcaacatatctcgggttatcgtcctcaatatgatcaaagaactttggctccaagaagaggttctcatcaatacttcaagactaggcatgcatcatcgtcgtcgcatgtctacaagcaagcacgtcaagaatggcgacctgtgtcgccaaggcgggaacaacatcatggtgaacccgcaattacatttt

SEQ ID NO: 19315 - DNA, 526 bp, Zea Mays
gaggtttggaattcgaattgaggcacgaaacgacgtggaattgagccgatacttcacgaataggtttatatgggtgaatatgagtgaagtgtgtgcttggtttgaatttaggcgaagaaaatgagatttgggcactcggctcggaaacgatcgcacaaaacggggaattgagtgaaattgaagcctggaatatcggattggcgtgaaatttggcaaatatgttactggaggtgttgtgaaggtgcctgaaaattttgggttcaatcggggcatttttggctggtttgggcattttaccgaacacgtgacgtgcggtgaattaggtttttggagatatggccatttgaggattgaaaccctcccaaagggagctagaaacctgcagggatactcaatggccacataggaacacattgcaccacatggattcactggaattcacaggattttgaattgggcacaaaaggtggaaataatgggtgcactgcctagagaaatagagagagagagaagaaagagggagaag

SEQ ID NO: 19316 - DNA, 940 bp, Zea Mays
gagatatacttcaagagcacataacctacagagtgtggccacttgttgatagttgggagataccgaaggagactgttgctgggtccagcaaaggtggattagttcaattgaaatatgccttcagattcagagaaaggttcgatgagccggatgacgactggttgaaatgcattgaggctactagcgacgagttgcttggggcatataccagagctgaagatgatgctttatcctcagccttcgggggtcggggcaagaaaagattgaatagggtttttgatgcaattggcttcatataccctgattactgctaccccttgcgaaggcaaggaaaaaagagaaaaagtgccgcttcggccaccactgttgtgccgaagggcaagaaaataaaggttttgacccaccggccacgatatattgaaacagacgtagtgcctgaatttggtgaagggacctcctccgctgccgaagcgaaacaagctgctcccgtcgctcggagcactgagggatcgattgtagtgccgaaggtgcctatagtcgggtcagctgaagccaaagatgatgcggccagagagccagagctggaaaaaatagtgatgctgccaaaaattatgagtcctccggcaaaggcagaactgccgaatgttacaagggctcccgccacaactcccaagaggagaagaatggcacgcgtgctagatgttgttgtagaaacaacaagagcactgactcctgctcctgtgaagaagattgtcgaagctgctacagtgcatacggaaaccgaagctaggccctcaatgcccgttgaaacgaagctcgccgcaaccgagtagagggccgaagaagaatctctagatacttgcgtagctctagagaaaagtatggccaaagaagccaaatcccctgctaccgaagcaccgtccaaaagtcttgattacat

SEQ ID NO: 19317 - DNA, 400 bp, Zea Mays
taagaatcctggttcatgctgctatggtggctatcgcacgccatctcctgtcccggatccagttgtagaacaagatgctgattttgagggatcatcgagaaggcacgacagtttatcctatttgcatcgtcggtcattcaaccttagccggagtttaagagttgaagggaaccatatgctgtcacacccaagattggatcgtaggttcagtgtctgtgacccagttagcttgggaggcaggccaagtgattttgatgggaacttcccattcatgggatcaccagatgatcattgtatcgaggaggatacaagcaacggagcacatttttcacccttcccatatggctatggtgtctctgcacctatggaagaaaatggttatcatccaaatacaccgtct

SEQ ID NO: 19318 - DNA, 386 bp, Zea Mays
agcaccactatctccttcggggcatctgactgccccgaaaacatggcagggtcggtgtactaccgctcatcaccgctcctgtcatcgccaacatgcggccgcaccatgttctgattgacagaggggccgacctcaacgtcatcagtcatgctgcattcaagcagctgcagatcctagggtcccggctgggaccctctcgcccattctccggagtgggcccacaaccggtgtatccccttgggagcatcgcactcccggtaacatttgggactgaggagaacttctgcatggagaacgtcctgtttgacgtcgtggaggttaacctccccttcaacgccatcattggtagaccgaccctgtaccggttcatggccattgcccattat

SEQ ID NO: 19319 - DNA, 392 bp, Zea Mays
cgacaacatgggagatggaggtcctaatagcgtgggcgtggaagtccctgtgacgaccgacgacgacgacgatgatgaacgataacatgcgataacgatgtggccacgacgacgagcaacagtggcgcgatagcagcaaatgcggaggagcaagcacaaaggatggcgagcagtagcaaggctggcatttggtggcactaagcaaggaaaatcggcgagggagggtgttggcacgaaacccataaccatacactcataagcgaggaagaaaatagcacgacaaaagaataggatgtaagcttaattgtattgccaagcaagtcatgtgggctataggaacgaggtatatatagggttagccgggggttggtgaaatatgtattgtattaccc

SEQ ID NO: 19320 - DNA, 435 bp, Zea Mays
caactacggaggtgagacgaacaggatagtgtagggcttacctacgattcagtgtaccaacggcgctggcgacaaattccgtgggcttccccggcccacgactctgatgaacctgctcctgatgatcccgccgggcttctagatggcacgccccagccggatggtcaccccaagcgcggatcgacggtggcggctgcgcacacagcacagcgcccagacggtggtggtgttgcgatacaagaagggggttcctgacctggtgagctatggtaaaggaagcgccgcatttatatggccgaacccccgaaccatggccagaggagatcggtagttggggcgcgtgatttggggcgggcacggagctgctcgcaaattccgtggacggttgaagaagacgcggtcctgggtggcccactcgtcagccgcgctagtgag

SEQ ID NO: 19321 - DNA, 587 bp, Zea Mays
cgaacgcgccaatggcaagatcttcagcgccatcaagaaagggctccttgacgacaaaaagggcaaatgggcagaccaattacccgaagtcatatgggcgctgaacacgatagaatgccgagcaacagggttcacaccatttcgcctcatgtatggatccgaggcaatgacaccgcaagaattaaggcacggaccccccgaacaaaccaatcagccatccccgacgtcgacgaatcaatctccaaagatctcattgacggagacagtgtcctcgcattgcaggccctaaacaagtatcaagcccagactaaggcatgacgtgacaacaatgttgtcccaagagaattcagcgaatgggatttagtactcctaaggaccaccagaacagagtcccggggcaagctagagccgaagtgggaagggccatacatagtcaagacaaaggcatccccaaacgcttacaggctaacaacatcatctggcgaagacttagagcattcgtggaacatagataacctccataaattctttatttaagatccaaggcccaagcgcctttgtaattcttcaaacaatgttactcaggc

SEQ ID NO: 19322 - DNA, 587 bp, Zea Mays
gaaagatttcagaaaaacctaagtctaaaccaatcgggtgttgtgagctaaaactgaaaacatgtaaaccaaaggcaaaccagaccttatcatcttatgggctaattaaacaaattgaagctcacaaaagtctctataaaggatagtaaacaagtttcttcaaaacagacctaaatcgaccacaaatcaatccccaactgaaggaaccctagggggattcaggattttctctaagtcccccaaaccgaattcaaaaattcgccacgttcacctagctccttaactaaaactcaaataatccaatggacaagtttgtgcctaatcacctcagacacgacctagagaaagttgacacgaaaacccgcccgttagacacgtttagcgcacgcctttgtcgcgacctgggggctgtgacagacgcgacttggcactgccgtagctccaagcccgacgtgtatcttggcttggaactcacatagaaaagcaagatcgtgttgcaaggaagagatcctacatggaaccctcactgagataggcactctagggcagctaaacggacgcttgaactcgggtagacgccatcctcc

SEQ ID NO: 19323 - DNA, 798 bp, Zea Mays
ggcgaggtcgttttcacggtggcggaaaactaaattgggggaaatccggaattggtgctctgcagtgaacgattgctggtgattcttggtggctggatgcttaactatcctatggagctcatcgtggcttcaatttattggaaggaagagcggtggcgctcaatttggctgagcagtgctggcggccggagaaggagaagagcactggcgcagtggattggtgtccaacaccgtggcaatcgctctggtgatcaacggagagcgagagcagactacggcgatgcggtggaaagggttagacacgcggcggacaatggtggcggcttaacggcggtgagaatccttgtccgagggtggtgagcaaggggagaggtactgcggctagccagagtggcgtccagctcaccggcggcgaagattttcttatcccgcgatgttatccatctgccacgagcgtgaatccatacgccggtgacacgaatcgcggcggaggatcggtcatcggcggtgaggtttactgaacctgatcatgttactgtaccatggcaaacaacattcagacgacctgacagccattctttgaacttgattttctcccaaatttctatggcaactcataccaagttctgcagcaaggttgtagagctacaaaccagttgcatttcgactataggggttgaactcaattaagcactaaatcagggttgaatcctaggccaaagatggctctgttacactgcaagtctgaggttcagagttcaatcagcctgatagccagacttcagacttaattatctc

SEQ ID NO: 19324 - DNA, 586 bp, Zea Mays
gctatttaggaaagaatacgcggaggcaaagtattgtccaaagtgtaaatcgtctaggttcatggaggtagactttggtgatggacagaaggtgcagctcgacatccctgtgacaatcctacgccaccttccattcatactgaggatccagcgtctatacatgaccgaggaatccgctaaaccgatgacatggcacaaaaatggcaaactatacaatcctaacaagttggtgcacacatccgatggtaaagcatggaaacacgttaatgccattcaccgtgagaaagccgaagaggctcgtaatgtacgtgttgcgctggccacaaatgggttcaatccctatggaatgagcgctgccccatacacatgttggcccatgtttattatccacatcaatctccccctcggagtatgctttcaaagacagaacatatttgtgtcgttgataatgcccggacactcggggaataaaatgggcgtgtacatggagcctttgatgcatgaattggtctgtgcttgggaggaaggggtatggatgtatgaccgagctacaaagacaaacttcaaaatgcatgtttggtaccag

SEQ ID NO: 19325 - DNA, 739 bp, Zea Mays
gataaagaggaaagtggaaataaatggattacccaactaaataactgactttattaataactacaccaagttgtaggggatacccacaccttgatgacaaccattacaaagatccaacttcattacatgtccatcataacaagcattccaacctatgataagcaaactaactctaactaagactgacgagactaagacactgaatcaaacattattacagactctgactctgtcgatctatggatataaatctatccgagtcctgcagtctagggtaccatagtcgaagcgaccatggggcggtgaacggtaagggtgctgaatcccgatgggggcggcagaaccaccatccaaatagtgacatgctgcgcactcagcacgcaattccgcaacctttgcccgaaccttgcccaactcgtcaagggcgttgtccaactctgtgttgagcacgacagccaagttgaccatgctgttcagcctgggattgccctcaccaactggcgagacaatcacacatccaacactatcagtcgaacgatgagggtagtacttcaggtcaaggccatcagctaccccactaaacaacaaacaatactgagaaagtgcccatcgtgctacatcttgcatggctgcctcggtagtatccctcttagtgatagagtagtgctctgagaaggcctctgcaccctggagatcatcgtccgaacggcgcaccaagcaagtagcctcccactggttc

SEQ ID NO: 19326 - DNA, 567 bp, Zea Mays
gaaaaatctagtgtagggagaatctgagtatcgtggggattattgctgttaatttagggattttccctttattaaaaaaataataagaccagccgcactgggccacctcaaggcccaaaaggccgagcagcccagccggctggggaggagctagggcacctcggtgcttctgctggcttacgggagatagagaggaggtggttggcggtggttgttgagagcagcagcggcggcgttcttcgtacgccgatttctgcggctcgatctctcgctcttctcgctaatccgtttgcctcctccgtttcttggctccttaaaggatgggcagtcaacctctgaggagcacgcagcaaaacaccggttcctggttcctctctccagttttctgttccaatcgcactgatccattcggtcctggcgttcttgtgtttggttcgctggtggtgattgaaagaaggtggaggtggtggtgttagtgtgcagtgcatttctcctgtgttccagtgctccacttgtgtgcgtgtggtgttgttcgtctgattattgtccatcgtggcctggtgcttg

SEQ ID NO: 19327 - DNA, 512 bp, Zea Mays
accaaactgaaaatctcaactgatagagaaacaaacaaactgaactcaggattatagcaatatttcaccccctaatcttgaagttccgtgctgaccttgacggtacccatcttcatacgccagtggcttcgtcaatatatctgcgatctgctcctcatgcgggcgtgtttaatgtccatattcccatcttgaagacactcctgaatgaaatggaatttaacatctatgtgcatgcttgcttcgttcattcatgaaagacaagattcttactgagtgcaatagccgattgactatccatcttgagcaagaaaattcgagcatctcgctcgctttttagctctgcaagtaactgtgccagccaaactccttgacaagccactgttgcttctgtaatatactcagtttgcttttgagattgccaagttaccggacaggtgccgaggaagaacagaatatccatggtgctccctcttgaatcaagatcaccacccatgtcttcatccctgtacccg

SEQ ID NO: 19328 - DNA, 699 bp, Zea Mays
ttcggatgaggacttagattattttgcggccttagatgtggctgcggcggaggcttctccgtgtgtgatggatgctaaagttcttcctggtacgagtgctgggcgtaggcggcgaagggcggtggcgaagcgtagagtgagtgaggtggagagtggtcgtcttcgtgtggacggggctggcaagcaggaattgttgtcctcgccggttggggcgagtgtgggtgagggggagttgcaaaatctttttgagggtgaggagctgaggataatgctgtttaactacagggagatgggtatcatcccaaaggttgaaccaatgtaaggtgtgatgccctcgctgtatgtatgtaactataatttgtatgatgaggctatgtgccttcgctgatccggccgtgcccgtaggggacttgtgcacttgatctagggcgtttattgtgtcggtccggctgcacccgtagtcggtttttgcacggagggtccggctgcacgcctaggtgacttttgcacggatagtcttttaaagaggacttcgattttgcgcggatagtcttgtgaggaagacttcgtttttgcgcacttgttgtgctagtccggctgcacccttaggcgacttttgcacggatagtcttgtgaggaagacttcgtttttgcgcacttgttgtgctagtccggctgcacccttaggcgacttttgca

SEQ ID NO: 19329 - DNA, 843 bp, Zea Mays
cgaacgagtttagcatctgtggcggaagaaatttctcaacggagcaacgacacaccgcgggctgcacatcttcgtggacggagcgtgtcgcggcaccattgtaggtaagaagctgtgtggtcaatttgttctattcatcgtattgcatagcgcgtaatagtgagggtttgggtgctctgggtgccgcacggggcttctctgggtggtagccgccgtcatggcgggtgaagatcgattaggcatgggcggctgggcgtgttgccatagagaatgggcgcaaggttgatgacgagcgactgaccgtgatgggtgcgccgccggagaacggtggtgtcgggtgttggtccaggctgggtccgccggttgaccaacgggagagagagaagatactggggagtccagcgccactgggctcggtcgcttggggaagaagataacactgtcgctgctggatcagttttgaagggctaggattaacagagaaccctgaccattcatctgtgaacctgtgtgtacgattccacggcgattgtataggatctgaaccattgatgctggatctcgtggctaccatggtatcctgttccatagaggtggagatctaataccatgcgctaaacccagatccaacggcggggagtacccgataccccttcgaacaggcgactttcttaaagaaaccctttgtttttataaaatagaacccgcagttcacagggatgggttctgtgtctagtgattctttcactaagacccctgcatttccctgtaatagtgcacccagtcctgatagttgataaaaccaggaaaaatatttagaaaatagtttatagtacaaattta

SEQ ID NO: 19330 - DNA, 536 bp, Zea Mays
cctttaactttaaacctcctcataccccagattggtgacaccttcagatacacgtgatcaccctccttaaactccattagtcttctccaggtatcagcatagctcttctgtcttgattgtgcaattctcaaattctctcttatcattcacacttgttcttctgcctcttgaataagttcaggcccaaagaactgtctttctccagtctgatcccaatatagaggagtcatgcacttcctgccatataaagcctcaaatggtgacatcttcaaactgatctggtagctattattataagataactatgcatatggtaagctcttatcccaacttccaccatgtttaagagcacaagatcttaacatatcctccagcacttggttagtcctctctgtctgcccattagtttgaggatggtaggccaaactaaaattcaactatgtatccaagctctcatgcaacttcttccaaaaccaagaagtaaactgtgatcctcggtcagacacgatcttcttaggcactccatgtagacaaat

SEQ ID NO: 19331 - DNA, 1053 bp, Zea Mays
aaccacagaccacattctcacatacgttctcatttccattcacacaaacacatatatatttcaatttcaacatgacatatagattcatttaaatagcgtcatagttccacatcacataggttcaaagtcattcacatagttcaacatcacacatatctatcacctagttggttggagttgtggccacttcctccaactggactttgggtggtgaaaaggttcgttcacccacgaagtcgcgcgtgtcgtcttagccagatgtctctccaggtgctgcaacgaagcaggaggtgtctagaagcccagtaacacataagatgagatattaaacactaagttcttcatttctatcacactcacatgcgcatatatgtacatatgaatgaatacctgatctggacgaatcaaagggaaaagtggcagaggtggaggcagcggtgcaggtgctgtaggcagcatcctaaaggatggattctggacgcccgtttgttgtgacagttgttacaagttaggtgcaagtaacttttgaggaagcacaaaatgaaacaaatttgtactcgtaaaacatatcacttcaacttaccgagaggaaagcttgttgctggacctagaggttcgcatagtactcgtccttctccctttggcgcgctagcttgctgcctctgataatctgtttgttgccttataactttcctgcattctagcaatctccatgtcctgggtggaggcacaagaacgagacgtttgcgatgacgatgatacagattgtcgtcctcgacgtctcagctccccagagtcaatcgacgaatcaaatatacccaacttatagtagtgaaccatagcatcaatacaatcacaaagatatgaccataacatagaaatcgaaatgaaatactctcaccgtccatgtgcttgtcctattgcgctagcatatgtcgcctctggatcaattggctggctcctcgagtcattgtcttgcccatggtgctcaaccatctgttccccatatgctccttggagaaacacacaccgaatattaatacatcatcaagg

SEQ ID NO: 19332 - DNA, 415 bp, Zea Mays
gagaaatcccggcgagttgatggacccttgcatccaaggaattcccacactgatttccccagccatcggcccattccctgggttgctcccgagaccccaagaggcatcgccgacataaatcgatggtggccgccatcaatccagtccgcccccatctcccttgcttcacgagtccactagtttgcttgggtgacaggatcgggttaaatagccatgggaaaactccagatcataaccaccactgcacaaatcctagccaaatcccgatactcacggtgcgatctaatcgtaacagccttttgggtgattttatttgagctcgtgttcgtggaggggatgattctgagcgcgaactgttgtgggcgtggcttcaatcactgctcactcggcaccacatgacagtcggccaggagca

SEQ ID NO: 19333 - DNA, 572 bp, Zea Mays
ctgggttacacaaccgaaattccacctcaatagtaaggcacatgtcacaaatcacaagcatcggcctacactctcaggctgtccaaaatacgtggacaattccggaacggcgaacctcacaagccaatgtgacgttcgcagttcccgaatgggtgacgcatacggttcgctacggttaacgattaaaactaaactctaaacattaaaaaataactcagagacaaatatgaattaaaaaataaacattaaaaaataacggttcgctacggtccaaatacgcgtgtgccgacgggtccgcgtgtgcgctgacgggtccgcgacgccggtcctcggctggctggcggcagccctctcctccccgtcgcgccccgctagctagctagcgccaagtctctcactgccaacctcttcgccactcatgccaagctcaatcacgacaacactattgttctcaccaaactccaacgagtggcatgagattaggaggtcacaatatggtcaatataggtgttcttaatgacgacaacacttcaaggtcatccaaccataatgaaagacaaacatatgtcgta

SEQ ID NO: 19334 - DNA, 445 bp, Zea Mays
ggatattattgttgctgcggaacgtagtacgtgtttgttgaccaaaagccgcaatcaatatggtttgctgatgataaggaacgccatgcatggtccttccttgcttgatcgtcactcactcacgtagtcgatcacgtgaggtgagttgaggggccagcagcagacagccaacagggggagcgggaggagatggacgactgatcgatcggtcactgctattcatcactaccacgtgtacggtaccactctggatcggacgctgcttgcaacgcactcatatactatatgccatgcatgcatgcatggatcggccacacggggagtggtgatatgcatgcatgagcgaggacgaggaggggcatgtgctaatccgattggatccgatgcaacaacccatggcgcgcccatgcatgcgtgcacggtgatggtccgtccggtcggccgg

SEQ ID NO: 19335 - DNA, 493 bp, Zea Mays
catcaggcaacttataatgtttctgaaaaaaacatagtcaagaatccataatatgaatcaatcattgagctgataacttggcaagaagatagataaacatacccagaagtcgtgccaaactacgccttgcacattcccatgttgcgcgttaaccgcaaggccgtattgatcccatcttgtgacagggacctcaataccatcctcaatcaccaatccaggccatctcatacgacatatattgcccaacactttatttacttgccttacacgatctttgctggtgaaactactatccacccaagccctaacaacacaagcacaattgtgaaattcaaaaaataattgtttatccttaatgtgtaagacataagaacaaagcaaagatgctcttacccatctccagtcggtattatctcaaccttgttaactggttctttaggagggggacccaactagtcttccgcggcttctagacccatgaagaccctccaac

SEQ ID NO: 19336 - DNA, 828 bp, Zea Mays
aggaaccagtatctctagattacattgttgagatgtggcatcctgagggatatggttgagtcgttgattagatgggtcaagaggcatttggtttagttatttgcaattaaagccttcatatcattgctgtgtcttatggttccatttcaaggcacaccgttgcttgctttgcacctactttgatttatcaggaaaaatttgaatgtttattacattctcattggacatttgttactgtttggttgcgactttgcttagcaattttcctcaggaatcttgtgtttcctatgcgttatggtcctagacttatggatattctaatttatttaggctgattggaagaagtgcatttctcattagatgattctttctgttcagctagatttcccgttccatattagcacattgcttattttgattctttcagttcagttcattttcttgttccatgtccaaattttccttatttatcgttgtacaattagttttcacatggtatttgatttggtgttgttacttttctatgacttcgaacttttattctgttataagaactgctgaaaattttccctcaatggtgatccagacgtaatctaccataataatgtcatatttcaattagctcagctttagcagtcccatcgggtctgcatagattggatgggtcccgaatttctcctagcagttttttcttgtgttttatgagttgcctattttctgtatatggaatcaccagcaagtatgaccagtacttctgaaacaacaaaggatacacatccattttgtcttgaacgtccagcctgaactgaaatcgtggaggctgagtga

SEQ ID NO: 19337 - DNA, 574 bp, Zea Mays
agataaagcatgggtcgccccgaacaagcacatcagcagtccccgacgtcaacgaaccaacatctaaagacctcatcgatagagaccacgtcctcgccctgcaggccctcaacaaataccaagctcaaaccaaggcctggcgcgacaacgcagtcatctcaagagagttcaacgaaggagacctcgtactcgtccggaccaccctgacagagtcacggggcaagctagagccgaaatgggagggtccattcatcgtcaagacgaaggcatcccccagcgcgtacaggctatcaacgccctccggcaaagacttagagcactcctagaacattgataatctccgcaaattttttgtttaaccctcagggcccacacgcccttgtaatccaccaaacaatactattccggcccgcactcttttcctcccagggggtgaggtttttaacaaggcagaaccatgtaatatacatgcaaaagcccccgcaaaaacaaaaactcagatgcaacatattgaaaaagaccgcatcaacggtcttcagcattcgaccactccgaagtcaccgcgagaggcagc

SEQ ID NO: 19338 - DNA, 560 bp, Zea Mays
ctgccatagcctcgcccagagccaccgtcgcaagcctagagcctcaaagaaactcacccacccttccccggccaactagctcaccggagaagcttgccaccgcttaccggagcaacttcgttcatcggtgaacatggccagccccctacaccccacttccaaccgattccttccacccaccgcacctccgtgaccccatgaagctccccgactggccaattagaactctaccgccgccgacgagccagattactcgccgccgacgggacacaccatctgcgcacatggaccgagcgattccggccatctttggccacgacccaaccattgacgtgtccgctatgacctccccgacaccaccatgccctcacccgaaggtctactaccgttggtaagtcactctgctgcttcctttcccacaggtgttgttgcagtgtgatacacccagtccaggtggggttggccgatgcccaacaaattagggtttcccgaagcccaacagatcattaagcacacccagctgagggaaaggcccaatcgccccaaaagactaatccaat

SEQ ID NO: 19339 - DNA, 475 bp, Zea Mays
tccttattgaagaaatatattcctcctccacatgacatttctgctgatctttcttctgtgtgcacggatccgttccagatattgacgccggacaccatattacagcaacggtgcattcgtagaggtcgtgctttggttcagcaggtcttggttaaatgggtgggactgccgaatcatttggctacctgggagcatgttgatgatatcaagtgtaggtttccagcaacaacagcatgagggcatgctgcatgtaagagagggggaatgtcaggaccatggttagtctatcatcttcagtagagtatttgaatattcgtggttgggccgtcagcccatgtaagaactaagaattggccggcagtatataagccggggtggtggagggtttaaaaacaagaaaaaagaacagaactcgtttacctgtatcttcttcgttgcctcacggactcagccgtgttctctgtcttcctctcgc

SEQ ID NO: 19340 - DNA, 624 bp, Zea Mays
aaggattttactggcctgcgataatctgcgccgcgaatcgagacacgaggtcgtgtgaagcttgccagaagttttctccccgctcaggcaacccttcgcggttcaccaagctgatcgcccacacatggccacttcaacgctgggggctggatattgtcgggccactacctacggctcaagggaacctcaagttcaccttcgtcgccgtcgaatacttcaccaaatggatcgaggccagggcagtatccataataacgtcgaagactgcccagaagttcttctagcaaaacattgtttgccgcttcggagtcccgtccgagctcacagtcgacaacgacaaacagtttgacagccaggacttcagggacttctgcctctccatcgacaccaagcttgccttcgcctcggtataccacccacaatccaacggcgtcgtcgagcgcgccaatgacaagattttcactgccatcaagaaaagacttctcgatgacaagaagggtaaatgggccgaccaactacctgaagtagtttgggccctaaacatgaccgaatgtcgggcaaccggattcacaccttttcgtctattatatggatcagaggccatgacaccgcaggagataaagc

SEQ ID NO: 19341 - DNA, 714 bp, Zea Mays
ccgctggagagtttggaaataaagaacacaaactcttcggcagaaaggtcgccaaaaggagagaccccaacacaagtcctcccggcaaataccggcgtattccatccaagcaggcggtataccattttgagcactcactcagtctgggcgcgctcggggtgaagtcacaaggccatggtaaactatggcgacacaaagcagaaaccttgaaggcaaagaggcacagagagctcgaagatgaaagggcaccgcgagtgggagagaagcaagacatggtcacatggctgctacccgagaggtgaacccctttttaaaggcagatttccccgctcgcgtcccgaagtgtcacgggcaaggcctcccccgatgcgcaccagggttcccatcctatgacatgggggccaggcctcacatgtcatacaagctggctcgaagcgcgaagaaggcgaatcgtcgcacaaggagcgtgcaaccgccctgcggttatacgccctttcatctttgccgcaaccagcgggtcaagaaggcgaaccgccacacaaggagcgtgcaaccggcctgcggttatacgtccttccatctccgtcgcaaccagcagtcaagaaggcgaaccaccgcacaaggagcgtacatccgccccgcgtttgtgcgccccctcggtttctctgcaaccggtggtccaacctctggcatggggcccaggtgtaacatcct

SEQ ID NO: 19342 - DNA, 711 bp, Zea Mays
gccgaggtttgcttgttgaaagacagaggtttgactgctgaagatgtggtcgctgatttcgtcttcaagaatattcagcctttgaaggacagggcatacccagcttatctgtacagtggtatcaatgactctacccgggtcacaaagaagagaattcccactgaagatttggtgagctgactggatatgattctgaggggtagagtgtcaaattttggtgctcctgttgcctattctgcgtggaatctgccagcttataagtcattttctgaatttgtgtcctaccctcctgctagtgatggtggtctgggtcttagagtgcaaccctcccccgaggacattgaagctctgattgcccctcttcggaatcttctcaatgatgaaaagcaaactcatttcgagatgccaactagcacaaacgatgcagagatagatgatgtgcttagtatgttggctggggaatcttccgactcgacccatgctgagccgatggctatcacggttggacaagaacttggcaaagcagtggagactcggaaggttgggggtgctcgcccaaagtgtccccgccaagttagccacccgactgcatctgttgaggaaaagaagaagaagaagaagaggcggcttcggcaactgtcatgcttggaccaggatgcaggtccttctgctcgggctcatgatgaagtgccagtagaggtccttcctgag

SEQ ID NO: 19343 - DNA, 647 bp, Zea Mays
tatttgaaaatgggggctgcattacaactttccttttcttctattcatacaggaaactgcggatgtctaactcccaaaacttagcatctccaaagagtgagttctattatgtgaaagggaagaggaggtttagaacaaataaaattgagcaaggtaatagcaggcctttggacatatcgaaacaggttcagttatcaaagcatgaactcagcaatatgcgtcgttcccaagtatggactaaaaatcccttttaagcttcagttaattgcttctcacataatagatttgaattgccatatgttaattttctttctagaatacatgtggtccaattatgtggcatgccagattgatgccattttcttggtacctttaactgcaggttccactaatacgtgacactttatcacaactatgggaaaatggcatgcttccagctatctggtttatttttagtagaagagggtgtgatgcagctgttgagtaccttgaggattgcagactgttgcatgactgtgaggctagtgaagttgagctggaacttaggaggttcaagatgcaatatcctgatgctattcgagaaagtgctgtgaaaggactcatgcgaggagttgcggcccatcatgctggttgcttgccactgtgga

SEQ ID NO: 19344 - DNA, 762 bp, Zea Mays
caattcctaaggctcagagagtcactggtgtggacggcgggttgatatatgtaaaaggcagggtctcatttataaaacgtacccgcgaaggggtatcgtgatcacagggccgttggatctacattatgtggtttagattagatcccgatgcgtatgaatcggtaagctacgactgccgtcagatctaaaacctgtggctcggatttcatttgagaaggggtatcgcgaccttctaatcctgaccgcacacccagaatcaatggttacgatttgttcaagcggagggttattcggtgatctaatctacaccgtccgaattgaatcagacggcacgggagctgtcttcttcccccacgacaccctctctcctccactccaatcggtctacaccagggcggcgccattagccagaaattgagcccctgattcctacacccgacctccaaaatgaaagcagtaatacatggatgataacggtacaacacggttgcaggattactcacttcgattcaaaccactccgagcctcgcacaacgcgcgcggcggatctgtggcacccacagtgcgatggcgagcgattcccgagagcttgaccgcccttgcgccaacgccaataaccgtccagcccctcatggttcgcgcgccctccaactcgctgcccaagcgaacagagacatgggtgccccaccgacgttgcaggggatggcttggccggccatggcgcatggtagttccgtggtcgccaaagccctccggtgcaat

SEQ ID NO: 19345 - DNA, 657 bp, Zea Mays
gggaattgtgtgtgcgcgcccaccactccgcgactcacacacacactcacggtcggtgaacctaaaccgttgaacgggtccgtgtgttgtgtgcggctgccggctgggcaaaccgagaaccgtgtgtcgcaggaagagagacgtgcagcactggtctgaatgactagagatcagggtcactcccgatggcaaccccgcacctaacagttttccgttgacggacgagcttgtacggtctgaatacagcaagcagcatcgagatgggcctctctgtgacgtccgcccatgtgaagattgcttgccgggcggctacagcaggaatggtctacagcccgggtattagctggctgattaggaaacgtcgtcaggatcggacggaacagagtacccccagtgcacttcacttcggtcagttgggactcggccttatccgatcgggccatttcgcgccttccgtaaaaagacttgttgcaagttgcacctcttgcgctttcaggtgacgtacttacccgtctaccccctgccgattcatttacgccgtcccgtatcaccggctttagctttccggacgcggtcgtgcagttctggatggctattcgattctacggacagaacacaacagataccacagcgcaagggcgctccactccagccccg

SEQ ID NO: 19346 - DNA, 766 bp, Zea Mays
ggaatcaataggctcttgctaacttgtttagcacgctaaccttgacccctcttgcggccatcatcgactaggtggccaactccaatgcctcctaccacactactccggatgttggtatcctatcctctcccccccctcatccttcctaccctccttccattattgttggcaatggttctggtcttgcagtcacctctgtagcaacttggttcttcctggttctttttgtattcgcaacgttcttgttgcccctgacattatttagaaccttttgtcttcgttagttcactatcgacaacttgttctatggagtttgacccttggtttgtccgtgaaggatctcgccactcggagtcttctcgcgcggtgtgagaactctatgcccctatacactcttcgccttcctgcgtcctctactttgccatgttcgtctattccacatgctttgactactgcagcttcgtccattacttggcaccgtcatttcggccatccggatcttgatgttatgtccaagttgtctagtagttcagtcatctcctgtacccgaggcccctaagttgtccctatgtcatgcctatcagctaggttgtcatgttaggctcccatttctcggctcctctcacgctatgcatacttttgatctcattcggtgcgatttgtggatttcgcctgttatgagtgttttgagctataagtattatctggtggttcttaatgattactctcattactcgtggactttttttgttgagcttgaagccta

SEQ ID NO: 19347 - DNA, 845 bp, Zea Mays
ttgatggtggccaatgacgacaacctcaaacgccatggagcctgatggtaggtcaatgcagaggaccgcataggtcgtggcgccgcccttgaaagcccaccggtgcgcgtggtaggcccccatggggcccctatggtcagcacacaacctcctatgaggtcaagttgatgaagacatagcccttgctggcctccttcctgaaatccattggcaggttgaggaagtcatagtgcgactttgccctaccgccaaatgttagagaaagagagccaactccgcccaggaggcgtaatgcattcgcccaatgtccatcgaatgtcggagaagccacttcatcggcggactggggaaatcatattccagatcccccctacatggcacaccagatactagtccttagaatagggctaacgacctagtatttggcgctagaggaagagtgacatagggacacacaggcacacaaggttttagagtggttcgagttgccagagcgtaataccctactccatagtgggttgtattactgagagcttgagaaagcctatgactagatagagattcctctgagggagttcgagtgcaaatgtccctagggagtcttccccgggagcttgggtctaggtgtcctcccccttgcaatgcctgtgccctccattttatggcctacgaggagcatgtataagggagttggggtctgacacgtgggactaggaatactaaaatatggagcacagagtgatggatagatctggtggaccaaggtcttctcccgcagtgggcataaatcttctcttggtcgtcgtgcaagatcctcttgccagactcgtcttcgccccgtcttg

SEQ ID NO: 19348 - DNA, 410 bp, Zea Mays
tgttatttgatactggagcaacacattcattcattactgcatcatgggtagaagcacataatcttccaataactactatgtcaacccccattcaaattgactcagccggtggtagaatttgagccgatagtatttgcttgaatgtaagtgtggaaataagggggatagcgtttcccgctaacctcatagtaatgggtactcagggaatagatgtcatcctagggatgaattggctagataagtatcagacaattatcagttgtgataagaggacaatcaagttgatgtccccactaggagaggaagtggtgaccgagttagtcctgcctgagccaaagaaaggaagttgttatcagatggctgttgatagcagtgaagcagatccacttgagattatcaaggttgtgtct

SEQ ID NO: 19349 - DNA, 930 bp, Zea Mays
cagctaagtgcactttttaagatctatctcgtaagcattgcgaagccaagcgatccttccttcttttgtctgcaagtttgcaaaaacatctctatactttttctcaatcaatagatgagtggtaaacaaatgtagttggctgccttcaggtgatccatcatccataacttgctgcaactgctttttaatctcaagtcgaactgggtcattgtcagcagaggtaatggacttgttagtggtcattaaacgcgactaatacctcaagaaatggttacacatttggtaatacatacaatcttacgggtacatgcctttacaatcttgcaatgttctatgtttatggtgacatcattttttgagataatagttgaaaaggggaaatatgtcataactacatattatctattaagtcctaatgaagctaaaagcgcaacgaaacaagcataaaattgacagttcatgtaaaaatgtcatgacataataagtaaaccaaacaaccaaactgtgctgattgatgggagtgaaagctttgtgttagccaaccaattaacgctggaacaagcacattaaaggccttattatcaactgaaccctgttgttacctgccgatcaatattcttagcaccgtcctgcagatcagccacattactgcagctctccttggcttcaacctctgccttcactggaggcgcagaggggtgtgccccctcgagcaggaggacgaccctcctgatcccattgagccttgcgtccctgggcacttcgttcatcacggcgaagggttctccgccctcatctctgaccctgaacccgacggcctccaagagcgccatcccgccttccctgtccgccaccgcctctttgatccgcgggttgctcagcctcacccgcctgaacttgtcgttctcgggctcccgcagcaggttgccc

SEQ ID NO: 19350 - DNA, 817 bp, Zea Mays
ggggcatagaggtcgccctaagatgagtaattgcaaacgtgcttgtgttggattaggtaaacgcgaatgtgccgtgccgttttaagttattaccaacttaaaccgaccgctctgttagtagggtatagtggtcaccccgagttaagtaagcgtgagcatgttacaccgccttaagtcattgtcgacttaagtcgattgctccgttagtagggtatagtggtcaccccgagtcaagtaagcgtgagcatgttacaccaccttaagtcattgccgacttaagccgattgctccgttagtagggtatagtggtcaccccgagtcaagtaagcgtgagcatgttacaccgccttaagtcactgccgacttaagtcgattgctccgttagtagggtatagtggtcaccccgagtcaagtaagcgtgagcatgttacaccgccttaagtcactgccgacttaagtcgattgctccgttaatagggtatagtggtcaccccgagtcaagtaagcgtgcaggttgacagtgaacaattcgagtgcctttgaagtctttttattgatgatatatttcccagtttatagagtacattgtcgtcccaatagcttttgagatatagctagggataaaactttctgagatgttctatgttccatgagttcccaacttctatgccgtccatctgagtgagacgatatgatctaggctgagtgacttccgctaccatgaatggtccttcccatagaggcgacagtttgtgtcgtccctcccccattagaattcagcggaggacgaggtctcccactgcgaaggatcgatgtc

SEQ ID NO: 19351 - DNA, 680 bp, Zea Mays
gatcacactgagttgaaagccaagtgtccactgacatgtgtctaaagcgacgaaccttggcaacagtggccctgtgaaggtcgaacagtctcggatccatagcaagcgatcaaacctcattctcgtcacgttctcataatcgggcgggaggtactggtggagtggcagaggtagagggagcggtggaagcaggtgtggtggaggcagtaggcgtagcttgggtggtggtaggcacttgagtggcggaagttggcgtggtagtgaaaggtggagtggtactggtggctggagcagaggggttgaacctagctagagtggagcatgcccaagacgagaggcacgaacacggaaggctatttgatatgatccaatcctcacctgctctcccttctctcctatctcagccgccgccgctgctgctaccactgcccgtgctgctctagtagctctgtccaacttccttttctttttgccttcgtactgctcaagatagacctccttgcccttgtatagtctgaatgggcgagggggatcatgatcatcgccccctcctgctagggtcacattcttggtctcaccatcctgactgctcactgatcattgacacaccgcacgagaatgagagtagataaatcagcatagcaaagcaagggataagaatggaaaatcgaagatctagc

SEQ ID NO: 19352 - DNA, 419 bp, Zea Mays
agctgatggccttgacctgaagtactaccctcaccgttcgaccgacagtgctggaggtgtgattgtctcgccagttggtgagggcaatcccaggctgagcagtatggtcaacttggtcgccgtgctcaacacagagttggaccacgcccttgacgagttgggcaaggttcgggcggaggttgtggaattgcgtgctgaatgcgcagcatgccactatcttgatggtggttctcccacccctgtcgggattcagcacccttaccgttcaccgccccgtggtcgcttcgactatggtaccccagactgcaggacccgcatagatttagatccatagatccgtggagtcagagtctgtaataatgcttaatttagtgtcttagtctagtcagtcttagttagagttactttgtttatctttt

SEQ ID NO: 19353 - DNA, 1094 bp, Zea Mays
caaccttccgttttgtcagcaggggcgcaggagagaaaatcaatcactgaaacacaaaagcacataacaacctagcatagtcttacacatgttcattcttccatgtaccaggagtgcacaataatgacataagtagcattcagggcatgcgaagaactactaaggatgactcacctagggggttttgaggggccaacaccattggcatgagcagacaggctagaattcacttctggttcaccattgtctgcctcaccttcaaatccagagcaggtgtcaccaaacgagctcgagcattcagtggtatcacctccctcgtatttcacaagttcagtcccgaccaccagagggccaccattcgtgcagacaacctcggatttcaccaccaccacgctgttttggttcttggagccaccgtcgccctcgtccttagtatccatggctgtaggtagagctggaacggaagccggagccatggctcgccgctgatgcgtcaggccaggtcgtcaggggccctacgcgcccacacgaaccccaccagaattccccccaatcttcctccagaagaagaccatgcgggcggacagatgacgttcagcaacgaaattcgcaggggtagaagagaatcaaaggagcgcactagagtggtcgaagacttcgcaagaaaaaagatcaattctgcaatagaaaacccacggattggtaacagaaccctatagaaccgaaggagtcttaagaatcgtcgcgaatgggccaatggaaaatacaaatactcgaccaggcaacgagggaatccgcggaacactcatacgcaagacgaatctgcaaccacaacaaaaagacgcaaaagaacccgcaagaacctgacaagccatgtcaatcacgcaggatcaaaccagcggggggcgaaggcttaccgaggatcgtcagatggagaatcgggcatcagtccgggcggatcgccatggcggaaatttgtgggaatcaggatcgggggccggggcacgatcgctcgggtctgtggctcaaaagtggaggcgagggcgaggagagaatttgtcaaaatgggtctcctcgttgccgctctaaaaaaa

SEQ ID NO: 19354 - DNA, 277 bp, Zea Mays
tgccccttcgaaattgtatatgggttcaaacctattgctccgatagatttgttgccccttccattgcaggaaagaactaatatggaagcttctaagcgggctgcatacataaaaaagatacatgagaagaccaaggaagcaattgagctcaatgcagtgcgcaaggcagcaagcatgaacaagcataggaagaaagtgttatttgaaccgggtgacttggtttggattcacttgcgcaaggagcgttttcctgatcagcgcaaatccaaattgatgc

SEQ ID NO: 19355 - DNA, 536 bp, Zea Mays
tcgaagaggtccatcaccccgtgtggctggccaacccggtcatcgtgccaaaagcgaacggaaaactccggatgtgcatcgactacaccagcttaaataaggcatgccccaaggacccatatccacttccacgtatagatcagatcgtggactctacctcggggtgcgactttttgtctttcctggatgcctactccggttttcatcaaatccggatgtctagggaggacaggaagcacaccgcttttgtaacgatagatgggttgtactgttatgttgtgacgccttatggtctgaaaaatgccctgccaacatttgttcgggcgatgagtaagaccttcagggatctgatctgggacaaggtggaggtttacgttgatgacatcgtggtcaagactagaagggggtcgaccgtagtggaggatctgaccctggttttcgacaacctgcgggcaacccgcaccaaactgaacccggagaaatgcatcatcggcatctccgcaggaaagctgctgggtttcctggtttcatatcgg

SEQ ID NO: 19356 - DNA, 570 bp, Zea Mays
attgaataaaaccgcaggggcccttatgcatatttccccagccaaaggggtatcaagcgactgcagccatccgatcaaccaacagcggccatgattagttcaaacttataagcggactggtattcgcgggtggccgccagatcatgatccaacggaccggatccgaactggtgaaggggtatttagacgcctaatctcaaccgtccgttaactatccaatggcccgaggcctctcttcttcccttatttctctctctcccccaccggtgccagcctgacgacaggcacggcggcgccatcgccgaccccgcccaaaccattggcccgagcaccaatccatgacccggacagtgctacacgaactatggagcaaggtgaattaaataaggtgattctcaccgacgattgggacgcgcagaatcactgccacggagatgcgtaacactacagtggagaaaggattcctatgagaaatctcacggtcacctgtgctccacgactctcccagcgctctcccagcaagttccgagtcgatccccgagagctcgtcgccggcggaaatccttcttc

SEQ ID NO: 19357 - DNA, 355 bp, Zea Mays
aaagtaagtaggccctgtgggccagtccttagctttttaaaggatgccctaagagcacccttttattcggagaggagacgttatttccagcatacatgcattataaaactaaaggaattaaagaaattaaagaggtaaaaatttgagctaacccgcttccttttaaaccacccaggctcttttattttctttcttccaccataatatttacatctgatacccttccgcagatgacctcacctacccccgccagtggagaagacactcgtttcagctctgatttcctttctcacgatggttttccttccatcttgtgggaagtgcttaactccgctggttaccctatgcccctttg

SEQ ID NO: 19358 - DNA, 383 bp, Zea Mays
aaagaaacggagggaatacttttgtaggcagaacagaaggtagctgagttcaagaagaccttccatttgtattgagatggaatgcataatagaagtctccagacaaattcaaattcagtgctactggaaacacagacaaacatttgtaatgactagacaaattcaaattcagtagtaaccaacggtagttacatgacactccattacacttacaccctcaactggtcctgccgggagagaaaaaaacaaccggacaagcaaccaggaggcacacgacgctaatgaataatcttaacagtaatactgctccatgttgactagatggaaaagcttgagcctaaaccctcctctacgtccgacgaactccttaaaccctacccgta

SEQ ID NO: 19359 - DNA, 558 bp, Zea Mays
caatgaccatggtgcacatcaatctttagtgtgcatttaagtaggagtatacaaggaaggatgaagcaaaaagttgcgatggaattattttggatttttatttggtgtatattttctaatactatatttttgtatgtagggggaataaaagagaattaacccaaaaatcttaaacaacaaaaaaagaaaatcagtacctgtagatcctttctatgaacaacaacttcagatctgaaaacgtagctagagtttgagtggttggtttcgcatagtaggagcataggagaaggggtgcacgtacacctgtgggaaaatatttagtggagcggtgtttggaattccaataggagttcgatcagttgtgtctgctccttgatcatcgattggaacagtaacttcagatatgaatacgtagctagagtttgagtgcttggttttgcatagtaggaacagaggagaaggggtgcacgtacctggtgggtgcgtatcgccagtggaagtctcaaaggcctgagtagggcggaggcagcagaggaggaggaaggcatcattccagga

SEQ ID NO: 19360 - DNA, 1811 bp, Zea Mays
cgggaattagatcaatgtagaactctacttctctttctggcggcattcctggcaattcttctgggaatacatccatgaattcttctactacagatatgctttctgctgctagattaaacaccattggatcttgggtgggtggctgagcctgacatgagactgacttcccttggtggtcagtgagaagaacggtcttatttgcgcaacttatgatgcccttgtgcttagctaaccaatccattcctaagatcacatcaatcccttgggatggcaagacagctaagtctgccaagaacactaccccacttaaaagaatcttgacttgggagcatttgagatggcatagaaggtctgaccctggggttcaagtgaccaagggaatttctaggtgtgcagtgggaatgccatgcttttccacgaaattggtggctatgaatgaatgagatgctcctgaatcaaaaagtatagcagcgggagtaaattcaactaggaactcaccgagcactactcctggggcttgctgagcttcttgcgtcgacgtggttacgcgtgccctgccatgatactaggtcttgctctgttggctgttggaggaacgtgccttggaggtgggtgctagggcactcttggggccattcaccgagttggagtaagtgggcacagatgccttcaactgaggacaattattcttgtagtgattggggtctccacagtgccaacaggcattggctggaggttggttgcttgcaacggaggggcctaaagagagctttgaccctgctgactgaaacgtgacagagtgggtccagctagcttgttgaagcttggtcccttgggtggaaacccaaaggatcgaattctctggtgcctatcctgttgctgagctcggaggacttggaattttctcttgaggtgacccttttcttcttccctagccctttctacttgtatggccttgtttgagaggtgtgagaagttgaggaaatcttggctagcaaggatagtcttgagttctggtctcagccccttcaagaaacgggccatcttcttggcttctgtgctgacatcgtcaggcacatagcgagccaattctgtgaatttgtgtacgtactcactgacagatcttcctccttgggttaattcccgaaattcatcttctttgagctgaacgatcccttggagcacatgatgttcttggaaggcgacttcaaattctgcccaggtggcatctctgacggcagcgctgaaggtatcccactaggatagggccatcccagaaagttgatgagcagccagatgaacacgctggttctcagtgcatccgatggcctctaacttcctttttattgtgcgcagccagtcatcggcgtcgagtgggttgctggatccagcgaatgtgggaggcttgagccttagaaaatctcccatcctgtcttgaggccttccaccattcgggcgctgattctcaaggcttctggtgaggacctcaatgagtcgagtttggttggccagaacttgggctaaatctaatggcagctccggaggtgcggggaggtgggtctcactcccttctccaccgtcttctccttcagctcctaggggaaaccttgctccaaccccagaggcggtaggcgtggttttatctgaagccatctgccagggggaggggattactactatgcacatgtcaattcttttgcaaacatgttattttattcatcacacaagttcattacaagcataagttaccacaaatcgcactacgcgcgagcgcttcctaaggtgcttccaaactctctttctaaggtgtc

SEQ ID NO: 19361 - DNA, 452 bp, Zea Mays
ccaggagctagaggtcgctcgactggctaccaaagttacagaggacaactgcgccgctctgaaagcccagcgtgacaaggccatggacaaaaccattcgcgcggggataatcttgatgagaaggcctggtgtagttgtttctaatgacattgttgcgaatgtcaaggctacgcctgatgcttcgagtctcccttcctcctcgattgctcctgtgaaagacattgccaaatagagatgttttgctgtgtttagaagatactgaatgcatttgtgaactatatgtgtgtgtgatcagtgcgctcgaatactcggtaggatattagaatgtgttcttggcgttgaaaactataacattttgtttctgttgttagaattcaacagtcgctatgaacgtttgcagaagtaagcgtgacatgctggtttttggaatcttttcctaatttatgccaatt

SEQ ID NO: 19362 - DNA, 369 bp, Zea Mays
gtcttgttttgatcttacgaagggcctttgtgatgagctgagctctatgatagagaaatactggtggagcaattaagataaagtaaataagattcattggatcggatggcagaaactaaaaagatcaaagtcattggggggttaggatttagagatctgtacgcttttcaacattgctatgctggctaggcaagggtggcggctcataactcaaataacctctttgtgcatgggtactaagactgtccgcaaccgttccccctaaatttttccccctaaatgttactatgcagccacgtcagcaagattccatcccctatattcactcgtcccgcaaccgttccccctatagtttcccctatatatccc

SEQ ID NO: 19363 - DNA, 320 bp, Zea Mays
atttctgtttcgcgatgccaagattgtctctatgacgatcgagaccttgtcgtctccaccacccatgctcgtcgtcatcatgctcgccactagcgccctccccactggctcagtgggggtgcctccgctagctctctcctcgtatccgatgtcatcacaacccactcctactcccatcaactgagttgtcaactctggcgtctcgtaccacaccactcctgacctcggtactgtctctttacctcgtccccacaaccccaccttggtactaagttgttaaggcgtgagaggagcgaaagatgtggcagttgcggcttgac

SEQ ID NO: 19364 - DNA, 554 bp, Zea Mays
aagacgagtaatcgcaagcgtgcttgtgccagatcgagtagacgtgagcatgccgcgctgatttaagttattactgacttaaactgactgctctgttagtagggtatattggtcaccttgagttaagcgtaagcatgttacaccgccttaagtcagtgccgacttaagccgattgctccgttagtagggtatagtggtcaccctgaatacaccgtcttaagtcattgccgagttaagtcgattgctccgttagtagggtatagtggtcaccctgagttaagtaagcgtgagcatgtcacacggtcttaagtcattgtcgactcaagccgattgctccattagtaggatatagtggtcaccctgagttaagtaagcgtgagcatgtcacaccgtcttaagtcattgccgactcaagccgattgctccgttagtagggtatagtggtcaccctgagttaagtaagcgtgcatattgacaataaacagctcgagtgcctttgagaatgaagtctttttattgatgatttgtttcccaatttacagagtacaatgtcg

SEQ ID NO: 19365 - DNA, 500 bp, Zea Mays
cgcgactgcatcttggggaccgggttgccgagctcctggtcgttcttctgtggtccgatgaccgggaccgggattgcatagatagagaggaaatttagggttagggatttcggaaaacttgagaaagagatggagcgaacaataggaggggaacaagctgcagctcaccactgtgtcgttggctaccttcctccgtggtccggccaccgggcgcagactggggcaccctccaccgtgtccgttgtgctcccccgtggcaaggaagttggcgcccctccactgcgtgtagggagcatcgtggaggcccaaggcggacctccgtgcggcaatggttggggtcgacggtgcggcggctgcgtgtgagagaaggtgtagcgtgtgaggcgaggagatccaaacacgtgcgaggaccgaggaagggcaggggcgttgctggagagggagcggttgctgtgtgacgctcgtgcggaggagaggatgaggaggagcgaagcacgaac

SEQ ID NO: 19366 - DNA, 597 bp, Zea Mays
atggatcagagagctgccatacgtggtttggagcctgagaactcaacccagtcgggctctgcatggaaataccccatttttcatggtttatggattagaggcagtgctgcccgctgacctaatcttcgagacaccgaggttaacttttgaaagcatagccgaagcagaagcaaccaggatggaagatatcgatgtgttggaggaagaacgattgaacacagtaattcagtcggctaggtaccaacagaccttgaggcgctaccatgataaagctgtgcggcaccgatcctttgcagtgggagacttggtccttcgctgaattctaacggggaagggcggcacaagctatcaccactatgggaaggaccgttcatcatattagaggtcacacggccgggatcataccggcttacttagatggacggcatagaagtggggaactcatggaacatagaacacctcagaaaattctatccttagcgaggcctcaagattcttgaaggaacattgtactttttaatctgaggacttcatcatcaataaagttttcattttccaaaggcattcagactcttgacttacagctgacttcgattg

SEQ ID NO: 19367 - DNA, 805 bp, Zea Mays
ctctatgcagtgaagaatacaacaaggtgaacgactttgagggcgttaaggacatatgatgtcgtggtttcagaaatcgtggacgcagtagagtttgtgttcagtgggggtggttagcatcaactcacttcgaatggtgaatcgagggattcaaacaaggggtttatattggttcaggctttcgacctagtctagtgtagtgttgatcgtagtattgctctatggaacgtgttacaatgggtgcaattgtgagaatgaggggaactagagaactcagaccgaatgctcctctcctctctggatgtctaactgtcccccttttatatttcaagagggagtcccttacagggggacttgttgtccgaagcagggcgcgatctattttctatggtggtcgtgctgacatagttctcctaacgtcgtcttctggtatgtgcgtagtcgtacgcctggtatggcggaccgctccatctacctagtatgtgagtcattgtagggactctggtgctgacgctccttgtagcggtgcttggcgggacctgcgaggcagagtcgagggatatgggggggttgtacgtggcaatgtctcgtcctattgttagagactctctgtcacccctttggtacgtcatggtgtcaaccaagacaacgtgtggtggcaatgtgccttatcgtggctggcttggggtaacaatgcttgccttacctccacgtcaaccgggtataggtgtgctccaacagtgccgtaataggagggcatggcaccagggcccataggtgtactggcccccgttgtgggtttttg

SEQ ID NO: 19368 - DNA, 801 bp, Zea Mays
caccggagttgggggttccgccaagttcgtgcttcaccgtgaccggccccaacccgtcgtccattggcggtaagttccctacctgtacattccgcatcaccccgtactccgtttaagccgtgccacaatagaatgggagcggcgtgtggccgaatcgcacaagtccggcgatggctccgccgtggctctgcgcaggcatggtcgaaggtggaagagtttgcgcgtgccgttgatctgggagttgacagtcacgattagatctggggattgggagatttcgcgccgttaatggcgcgatctgcggtccagattagagggagcgtatcaattgtgttgggatcacgagcgccgtccgattatgatccggtggtgagaatcggatcgggatttcattaaactgtgtccgtcggattgaaatccgagggctcacgcagcgtaccggttcgcgttttcagcagtttaatttggcgcgcccaagtctgatccaacggcctgggttcatccgtaccccatcgccgtggcaatctttgtaaagagacctcctgtttccactgaaacaacccgcagtccattggccactgttccctgagtctaggttatcttgcgcagagacccttgagctttctgagaattgatgcccagtccagaacctgtttaaaatgaataaattaattagtaaatgtatttttaatgcaaaaacaaatctagaaacttgtaaaattcatagaaattccatttttggtccaaattgaaccattccaatttctaaaattttgtaataatattctctatcatttagta

SEQ ID NO: 19369 - DNA, 674 bp, Zea Mays
ctcgtaatgtacgtgttgcgctggccacaaatgggttcaatccctatggaatgagcgctgccccgtacacatgttggcccgtgtttgttatcccaatcaatctcccccccatgtgtgctttcaaaggcagaatatatttgtgtcattgataattcccagacacccgaggaataaaatgggcgtgtacatggagcctttgatcgatgaattggtacgtgcctgggaggaaggggtatggacgtatgaccgagctatgaagacaaacttcagaatgcatgtttggtaccagtactccatgcatgacttaccggtgtatgggctattctacgcctagtgtgttcacggtaagttctcatgcccagtttgcaaggaagctcttaggttcatttggttgaaaaagggtggcaaatattcgtccttcgataaacatcaacaatttctccctcttgaccatccattccgcctaaacatcaagaactttacgaaaggtgtcgtagtgacagaccgcccacctgcaacgatgactggtgccgaaattcgtcaacagatagatgggctcatggccaatacagaaggtggttttgtgggatatggtgagcaacatatgtggacacgtaagtctggcttgactcgactcccctattatgacaacctgctccttccacacaacattg

SEQ ID NO: 19370 - DNA, 1007 bp, Zea Mays
gtggaatacagcatcaaaacgaacttaacatttcattaataatgtatgtcggaactcctctggatggtaggattctcaatgggattttggaggattctaatcattagattgtcttaggtagatagagtaaaataggagacgcagaactatagaaaaaattgtttgtagactgaagtttgaaatagaagatgagataggagatgtgatagggaatctgttgaaactagccttaagattttgatttcttaaataaggagcactttgaaacgaatgaactgtgttctcccattttcattagatccaatcctttgttttccctatatgtgttttttgggttccaaagaaatcattatctaaaaagaactatattctaatagctgaataatctctttctatgttgatccatgaacaaaattttgactcgttttaattccttgaaatatttaaattgtttcatctaccgcaatctaaatttgcatttaagacctttccaagcactcaaacctccacgctagattctgtttagaacgtcctaaagctaatagttagcctgggtattagaccgcctccaacaaaactcctaccaaactccttgtttcaactataaaaagaagaagatgtcccaaggggcacggaaaataatcagaacataacccggtaaactggacgtgaggtattatcgctcaggagggctcgaatatatataaattttatgtctataggttgttcgcttcaaattaaaatcagttgtttgcactgttgcaattgtaatttatagaggcaaaaatactgtagaatataagccgatacaaattaaagccaagcgaatagggtgttcatatagacagaaattaattcgagatgcagcaagcaacatcacattgaattattttgggtgatagctccgtggaatttgctttcttggcaaatgaaaaaagtggatcatgacgtatccctctttcaagatgctccctacgttcataaaagatgcaactatagaagaattt

SEQ ID NO: 19371 - DNA, 941 bp, Zea Mays
acagcttacaatccccaacgacgaacggcgctgggccgcactctgacgatcttataccggcgaaattacttacggactgacgccctactttggcagaaaccaaattcaagacccgccgatcatttcccctcactcaatttcacgactacgactctaaatcatcctgtccacggagacaacgcggacaaaggatgaacacgggcgttcacggtaatccagggtggtctagttcaatccaaggggtcgaacagcattagggggtcttaagaagactagaacaaatgtccaaggagcttgaactaacctggagcaagctgaccacgatgaggtctctttcgcggtggcggaaacacggattggggaaactgagcaattcacgggcgttagtggacaattgaagacaagacttggcggcttagatgcgtgattaccctgcggagctcacaacatgctcaatttatagcaagcaagagcggtggccgatgaatttgtattgagacgcgcggcggtcggaggaatgggaggtcactggcgcagtggattcgtggagaatacagtggcgggctccccggcgatgatcgaatggcttaagcgagtcacggcgatgtggtaaaagtgcccaggcatgtggtgcaaggccatgaagcggttgtctccggcgaacacatccgaaggatccgtgaccagctcagtacggtggtcggagtaatttagtggccggagtatatccacggcgatgatatttactcaaccccaagcactatccaaccgatccgagcacgaatcatggcggcgaaagcacgaatccgcgcgtggctcgtcggcggcgagggacagagctggcgacctgatcgggacactgtaccatcggaactgcgattcagagctcctaacagcccaacttgtagcgtccagaacacaaatttctatataagaacttg

SEQ ID NO: 19372 - DNA, 613 bp, Zea Mays
gtttggttctatgtctgattattttgagtccgatggtgaatctaggagtttgtttccttggacggaggagtcctcggatgaaggcttggattattttgttgcgttggatgtggctgcggcggtgacttcgccgtgtatggagggtgccggggatcttcctagtgtgggtgtcgggtgtaggcggcgaagggtggtgggaaaacatagtgtgggtgaattttcgcggagtggcaggtgccgtcgtatggggatggagcgtggccgtctccgtgtaaaccgggttgataaatgagaattgttgtccttgctggctggggcgagcataggcgagggggatcttcagaagctttttgagggtgaggaattgaggataatgctgtttaattacagggagatgggtatcattctgaaggttgagccgatgtaataggcgatgccctcgccgtgtgtatgtaataggcgatgccctcgccgtgtgtatgtaattgtaatttgtatggtgatgtggcatgttggccgtattcgtatgcttgtgttggtccatctgcatccgtgggcgactctgtgcggagtgtctttgtaatgacagacttcgattaacgttattccggct

SEQ ID NO: 19373 - DNA, 630 bp, Zea Mays
attcgttgttgcaactgtgcacgagaaggtgaaataggaagaaattatgggtaaaggccagttagatttcagcatcgtaaaaagcgataaagctcaagtgagaagtggcccgggtgactgtgctgagcggagacggcatattccgggtgctcccaagtcccaattccggaggaacgcttcatcctactcatcgcctttatgtgtggatggggtcagctccaggctcggatccacatccacctcataaaatacatgctttcatcgtacgataaccagcagggaaagagaggacgaactgtacgcaaacgggaagccgtcaatgcaagggagaccatttcttcaaagatctaaagaaacctaaacacgtcatcaggccatgtgtaccagccccctttgactcagcttcttccaaactccaaacttcgggtctctgatctgatgcctcgtgatggaacgacactacaatacagtaattggcaaaccggtaggtcctgacatattctttgacctcgtgtaaaagtaacgaaggattccacggcagaatcaaccggggcctgaagcacatggtagatcgtgggcaggagcataacaatatactaagcgaggagccgaggacatgtggtacggtcg

SEQ ID NO: 19374 - DNA, 405 bp, Zea Mays
ctgataggccaatagagtcatggcttgacccaatagtaggcacacgatgacggtgtcatgttgtggatagactcgacaatgtcctaactatagtgtaaaacctagtccccttcttgttcctctttccttctcataccaagaatagtcatttagttttccccactattctctctagtgttggatccatttttcacaaaaatgtttatgaacaagcttagttttaatggatggacatgctctcctacattaagatgggtaagtagcataccttgaatttgtagtttgttttattggttagattgtttttattctcatgattgttttttcttcattacagagagcatttttgtcgattttttatgaagactgttgcgcttttgtgaatctacgtggtacctatgaatc

SEQ ID NO: 19375 - DNA, 1185 bp, Zea Mays
cacagaggccctcggcttaacggctaaaccaaagtaggttcattcactattgcactaagtcgctgacactttgcaaaaatgtccttgaacttctatttcttcgcagaatggggtccctgacggcgaacgcggccgagctccggtgagctcctggaccggctgaatggggcaacgactagggttcccgagtggctagcaccgaattggaccttccccgaaccattcccctaacctaatttcatcaaggaccacatggcttgctctggccacggtaaccgaggatgttgcggacagatgagtgcgttcccggtgatctaaggctactcggtgcaattgagtggatcgatgggcatcacgggtatatgagagcactcaaacgagggagaaggcgacatgagctgacctgaacggtgctggccacgacgagctcggttcttgcggtgcggctgaccgatttgggggaaaacagcgattctccagctgggggggctaatcggggatggcagtggttgctatagcttcgcaatttggagacggaggttggagctcggttgatttgagcgaagggagcgaggatgtggtgaatttatagccgcggtgagtcacacctgcggccatggtgataaccatcgccggtcttagctagcgatcaacggcgacgtcaagtgctacccttttcttacgacttgccacgtctctgctgtgacagtaatatggccgaatcgatatggcatggaagaatgacggtgaacggcgtcgatgatcggacacggcctagaggagggatggtcgtgaggcagccggagttagtgccctccaccacggcggtcttacccggagcaaaaagatcttcgcacggacatgctcaccacctgatcatcccgatcccgacgcagatcacggcgcggacaggtcgtcggcggcgaggaactgtcgtgctggcagtctaatccacatgggacactgtaccatggcgaatgctcttcagtcggtctgacagacagagtttgggcctcattttctctcaaatttctgtggcaacacatccagatctctgcagcaatattatagtgctataaactagctacaactcgactatagggattaaacttagttgagcactggatcaaggttgaatccaagtccaaagttagctctgttacactgcaattctgaatttcagag

SEQ ID NO: 19376 - DNA, 397 bp, Zea Mays
gcggaataggggttagggatttaagtgtaaacttttgtttctatgatactgaacctcggttgctgcgcaggttccgacgtttgggcctgtgcaagcaaccgctgctggcaatactgattttgtggcggcctcaaccgtagtgcctgccgatgataatttgtttggctctgtgtctgagtgttttgagtctgatggtgaatctgggagttcgttttcttggacggaggagtcctcggatgaaggcttggattattttgttgcgttagatgtggctgcagcggagactttgccgcgtgtggagggtgccagggatcttcctagtgcgagtactgggtataggcggcgaagggtggtggcgaaacacagtgtgggtgaattttcgcgaagtggtaggcgc

SEQ ID NO: 19377 - DNA, 378 bp, Zea Mays
aaaatggttaaatgagatggcacacattccaaaacagccgatcagtagcaccaaccggtatgacccgactaacctgtcaaaacacaccacatcgctaaagacgaccggtaccgtttgcttcaggtagatatcgactaggctgtccaaccagaagtcacctagtataaccgatctagctatccaacagaccgattagtagcaccgactagtatgacccgactaactgatcaacatcccgccgatcaattagtagcaccgatcagtatgacccgactaaccggtcaacaaccctaccgatcgatcagccgaatagatggagagacaatacagtcgatacacgaccaccgtccgggctatgtcaataggcagtatagacca

SEQ ID NO: 19378 - DNA, 335 bp, Zea Mays
gagctgtgtcatggctcgacgagggaagatcagcaggaacaatctgaagggcatcatcaggggtgatctcagccccgctagcaggcagcaggatcctcgcttaaagctcgttggcctctaaagcgacatgtccatttacaattgtggaagcatgtacaaccgtcgccccatcggaccgaggaggggacaacccaacgtggacatccatggaggcgtgggaaaggaagcccacctgaacaccctcgggggctgggtcatagcttgcactacccaccagagctggatcactaccagcaacaccctcgggggctgggtaacttctggcaccaccctcg

SEQ ID NO: 19379 - DNA, 548 bp, Zea Mays
ggcgagcttctttagcttcttatcgtaatccatctccagggttcgataggcttcacgagtgttggcctcttcaccttctgccattttgagactttcttggagggatgccttctccttcttaagttctttgacctgtttctctaagctttccacccgggagtttaggtgggtgcagtgggaggaaaggtcatcatagtggttatcgagggtgtggagatatccggccatgtagatgatggtggggtcatcctcagtaggatctcttcctgacagggcctgaagtcttttcctccaggtaggggtatttttgttgctaggtgggaagtaacgaaggggggtttcaaagacctctctgctgtagttttggcatagcagtcggagggcttttcgggcaatattttggcaagtgtctgggaagcaatgtccggtgaaggtgacttggaaaggaggttggtttgggtggcttcggctttctcccaggtagactgccatagagcacttctcagttccgttctcgcggtattctttccagacgtactccggcttct

SEQ ID NO: 19380 - DNA, 407 bp, Zea Mays
gttccgttccgccccgccgcctgctgtttcgttcgccgcgagccgctcccgactccccgtcaacgatccactgcaacatggagttttcgctttatttactagttactactagatttatttactcctatatctgtctgtctgtctgtcagcatcaggatgggtccagtcaactcttattaaggcatctatcttccttcagtttcacttgtctgtcagcatcaggatggatccactccatcctcgttgagtagcgagaatgagaatatactctgtatctaaatcgaactgtttatatggacgcatgcacatgatatcgctgctacctgcattcgtccccagcgcctgctgccaccctatccctgctccattccaaccgcgattattgtttcctttgtttgggttgacgg

SEQ ID NO: 19381 - DNA, 823 bp, Zea Mays
acttcttcttatttgtcttatctatatcaagttggaagtatgcttttatgtctggaggaacagagggacatttcttgacattcttccctctgcgggagatgctccttcaatcaggtaccacccccttccgctctcgtttctttacaatacttgcacttaaaacctgtgccaaccttctcttcgtgctgccacactagttctgtcatgttttctataaaatataaacatataattgattgagcatacacatttaacaataactaatacataaactattgggcattcacatttaacaataactaaatcaaaacatatttaacaataactaatccataaaccataaaccatcacatatgtaacaatattaacatacaacatatataaatctgaaatcctaattccgaaaacatattatcgagactaaatctgaaaccctaaacaccgcaaaactaaatctgagcaataaatacgtagtatagaactaaatatgggtactaaatccgttttactggaactaaaacacggtttacttgctccaatcgcggtaaactgccgacttttgatgataaatcgacggggctcgggggaggatgccgccggctgggcgctcggcttaggcatcgcatcagcggcgagaactgctgcctgggcggtggtaaactgagcctgggagccggtaaaggcggcgacttcggctgtggtagtggctgagcgcggggtgttcgggtggggaaagtgagaggaggagaaaggtattgattatttagatattttgttaacgagtttactaacgggtccatacatttttctgtttttaatgggc

SEQ ID NO: 19382 - DNA, 546 bp, Zea Mays
gtgatctgcccatgtcttgttgtatatgaggatatcatcaaagaatacaaggacgaattggcggaggaaggggcagaggacataattcatgagcacctagaacgttgtcgaggcgttgcagaggccgaacgccatcaccaggaactcgtacaacctgtcatgagtgcggaaagtcgtcttgtggatgtcttccagtcgcatgagcacttggtggtacccggagcataggtctagcttcgagaagtaccatgtaccatggagctcgtctagcaactcatcaaccactggaatggggaaggcatcctgtatcatgagcgtgttgagggcacggtagtcgacgcagaagcgccaagacccgtcgaccttcttgacgaggaggaccggcaacgagaacggcgagtcactgcagcggatgatcccctgctcgatcatggcggtgcattggcgttctagcttgtctttgtgggccaccggataccgatatgattggactgccattggttgcgcactcgccttgagggtgatgcggtggtcatgggcgcactg

SEQ ID NO: 19383 - DNA, 715 bp, Zea Mays
gtgaagatatataactagacgaggtcacgcgcacgcggtcgtgcccccacatccacactggcgataaagaaaaagtggcctgtaccaccctggccggagagaactacggtgtacgtgttcggtgctaagcgtttccacgcgcaaaaaaaaaaaaatctgggaacatgagctgccgccaaaccttctccaccaggcaaaggctgctggctgccggcggcctgcagtgcttgcatgcatggtcctttgaactcccacggtcgcaccatcctcgaccggatccgatccgatccgatcctatccactcgacgagatacgcgaattgcttccacttgataagtacatctaagacgatgggagggacacgacacgatggtcccttttagccgcgtgctcaaagccagtacgcagtggtcagtggaagcgattagattagcagcaggcagaacgtcaagtcaaaacccacacacaaagcaagcaatcccggcacccggccgaaaaatccgaaagaaagcaaaagcagcgcgctcgcccagcatatcctcctcgttatcctcgagctacagctactactaatcttgcgccgttcagaatccgattcggaccggcgccataatccttatcccccagcgccggatgcgatcgatcattcattcatttgaccaccgatgaggcaaccccgccgccgccggtccctgtagttgcgtgcggtcatagg

SEQ ID NO: 19384 - DNA, 655 bp, Zea Mays
cctacctagtgtgtgtgtgtgtgtgtgtgtgtttgtgtatgaaggggtagtacaaccgattattggcaccgccgccggtatatctcacagtgatcgacgccaacacactttttggtgactccactgggacaactaagattggatttatcagatcagatccataatttggtgtgacctaacatagattggccccatatggccggttcgaaggataactctgatatctcccatagcaacatcatcaaactgactacagattacctgttggttgaagaacatcagaagctagaggacgctagaaagaagatgttggcaaaagtcaacgccaagttcttggctggtttcaaggtcgaccgacacgaaaagctcgtccgacaaagggaatgttaccaggtgaacctttgacccgctttcaagtaaatctaacgatgttcatgctcttaaggtttatgtagataaacagtgggagcaatttcaacaaaaagttgtggtatacaaaatgactttaaaagaatgacatgcatatttgagaaatatgttgctcccaacttcccatcacatgacattgatgccacaaaagactcatcgtccgcagatgggcactcacgttcccagccaatttatgtaatgctgatgaattcccatactagacaac

SEQ ID NO: 19385 - DNA, 575 bp, Zea Mays
gtaagcgccagatcatgaaacaaggaggggctgcaatgcaatgcgtcttgcaacctaatctagagctagcgtggcgagaattcacacaagtcggctagcgagggcaaatcgagtaatgtggggtctcgacttgtaatctgggtaaggtggatgggctagcggcggaaacaaataacatcgatggagcggttgaactacgattacgacacgacctaaaccagcaacaagactcgaacacggacacaaattcaacaaagcaatctgaaacgaaattgcaaggctaaacagggttataggacaacgaaatatatttttttgtatggcaattatctggagttataggatgaaaaacctaaactaaactagggtaagcctgacggtaatacctgagtctttgaataccacttgataggaacgggggtgcccgatcttccgtcaggtgaagataactatcgatttggtggagatgtcacacagacgatccgacttccaatcaacacgactagaaccccgcaatcgcagcaccacttctcctctggttatcaaccgtgcgctgcgcgattgacctcgccacg

SEQ ID NO: 19386 - DNA, 596 bp, Zea Mays
cgaactgaatagcttgcggtatagtccttactcggaggggaattcagctgatgctggggacaaccgagggaaaaaggtgaagacccagtctgaagagggcacctcgaagggaaaggtcatgattgcagcgactcgaaagaggaagatagaggcaaaaggtacggacaaggaaacagcaagaccaaaggcctctaggtttttctttgaggaattggcgggacatgtgctgggcatagggaggttatgacttcgcccgaactctaggaaacatcttcgcgaatgttgaatgtgacaggaggtcggtggcataggaaggaccctattccctgggccgccaacgatgtctattttacgtctcatatggctcgtgagttaaaaatctttcctgacagaagaaacattggtgctgttgtgtcaacagtgatgtataaggaccgccaggaggccctgcggaagaagcgaaaggcccctcttcggctggtggacccgcgctgtgacgccaagatttcgcgttctagcgcgaagggagctactccggctgcagtgatgcccctcctgtggcatcagtagctctcgagaaggtgtcttcgccaccg

SEQ ID NO: 19387 - DNA, 582 bp, Zea Mays
gctggacgtcgaagaacgccgagaaggtccagcaggagggtcagctgaagtgacaggcccaatgagcgggacacggtgttcgggggtcgccggtgtgcccaatcgagtccggcgtagaggcaaccggtcgaagaccagagttgttggtggtacctgcagtgaagaaaggtgacaactcgaatggaactggaaccgtgttaggtatgtcatccaaaaaatcaaatattgcgctcgtgggtggagggatcctcgaaaaagggaaatgaggtttcctcgaagaccacgtggcgagagatgatgatgcggttggagagacggtcaaggcaaagatatcctttgtggtggggggactacccaaggaaaacacacaaggtagagcgaggggagagtttgtggggtgtagtgggggtaaggtttggaagttggtggcgagttgctggagatcccagccaggaggggttggagcagcgctagtgtactcgggggccggcccatatacctgaggagggaccccccaggagcccgcccactggcaagagggaccagcgaggaaggcctgaggcggttgggctggagcagggg

SEQ ID NO: 19388 - DNA, 674 bp, Zea Mays
ggtggaacagatgagcaaccgcatccaagagttggagcagcaggtggaaatctgggacaacacctttgaggtcctggaaaatcagctccatgatgtgcaagaggagctagctgaggccaacgctcacatagaaatgcatcaccaagacatgaatgcaatggaggctggcagtgaagaggaggaggatcccgaggagattgaaccagcttccagtctagacatggcctactccggagtgccccctacacctagggccagtgctgcctctgctactcatggttagatgggttaaaattaaacatgttaggagaatggaaataccacataagcttagcttttggcaccaacttttgaactaggctgtaggatggatctcctagtatgttgtaacccggaaaaacctgtatgagcaatgcaatgaatgaatgattatctttgttcggttcggtataattttgtgtcgttattctcctcatgatatgaagtcaccacttgacatcttgggtcgaagtaacaatgacagaatttctattttcagatggcagctagaccttgtcgcggacaaaacgagcaagttcccccactacctcccccggctccaatgatgcaagaattaatggctcaacaaaatgaaatcatgtggcagctggtgcaacgccagccctaccctcagc

SEQ ID NO: 19389 - DNA, 491 bp, Zea Mays
ttttgtagcgagctgtcagatttttccatttcagtgatcctgtttgatggctctccagaaggaactgcggtcttgctgggacaaccgagttgctcggctcggaacaaaccagacaactagatttgccccccaaaattaggaaaaaaaaagtactagctttctcacagggaaaggaacgctcaagaaagggagaccagggggggcaaacctgctcgtgccacggcacgagtggaagcagcagagctccgcttgaggccaacatggtgtgcagtctccttcgacgagcatttgcgaccaagaggccggggctacctagatctggaagctctgctcatttgagacggagcacgttgacttgcaagtctcccccctccatctcgccatctaataaccaggaggggccgcgtagatgtggatgctctgctcatttgagccggaccacgttgacttgcaagtttcccgctctatcttgtcaccaaaattaatttaag

SEQ ID NO: 19390 - DNA, 754 bp, Zea Mays
tgcggtcggtgactgtctttgtggtcgaatgttggctttgagagccgtttcagctgtggcattcgttgagagcctttccggtataaggtgccttcgatgagtgagtactgtcgtcacctgtatgcgagcatggactcttccgatgggtctgatgggtggtaatgcccgcgaaggtaggatattatttgagccctacagtcctttggcagatcatgttgaaagatattgcttctaagtctgggttcctgatgaagggtgttttaatgacttggtaaaacacgtcggagggtaggggtctcttcttgcagcagccttcgccaaggtatttgcttaagccgtttctggagtgatcaatatgatggatagtgaaacctcataattgcttttcaagactccgcattctagataggtattgaagcagaactggctcacatggtgcacaatctttctcgatttgtcctgtgactatcttcgagtatgttttgatgatgcaggtccgaacgccaaggattcttagcttgcgcaggcctagaacgattgcatcatactccacaatgttgtttgtgcaagagtcatttgtgaagcttagtcaggcggcacatctatacttggaccttaagggggtcgtcaatattgcaactactctagcccctgaatggccctaggctccgtcatagtgtacgatccaagctgtctcctttgtcagtagtgagggcgtagcggagccgttccagtcaacgatgaagttggctaa

SEQ ID NO: 19391 - DNA, 574 bp, Zea Mays
ctggcggccaaataaagaaatccgctagtggaaagtgcatttccattggcggtttacttaagtgaactacctatcacaacaggaatcgcgattactcccgtcggccaacataattctcgttggctgaaaacgaaactgacaggagttaacttattttcttggtcataaaggaactgacagtggttaacttaattgtcgtcggctaaaggctggagcaacggggatcacttaacttccatcagctattcaataggtcgatgaggattagctgtgatctaggccgcgtaaagtgctgatgtaggagaacaataactcccatcggctattcaataggccgacggggattatgggccaccgccacccgaggagagacctaggttttgaagaactcttgttcgcctgtgtacgtagccgacggcgattaccttactcccgtcggcccgtgtacgaagctgatggggattagttgtttatgaggccacacgttgtcacgcgtgctcactttcgtttctcggccaacatttctccactgtgtcatcgcctccaccggcccccgcaaggagacgacgtcgcc

SEQ ID NO: 19392 - DNA, 446 bp, Zea Mays
ttgcacgcatctctccccagagagatttctagtcttttgggggaggttcgtccatcaccgacctagtcgcgcgtggagagggaggtcgtcgagctgctaatgggttatccaagtgagatctgaccgccctcaggtagggtttggtatggctagtggtcccacttgggggctcgccccgttgggtgaatctcatacaatccttccttactcgaccctctatcggccctctggttcgacatgcgaccaaaggggggtcagtggcaccccatcagctggtttaacgcaagggactgtgaggtacgaccttagacacgttctcaaccccaaattaactatgagtataattacattggtgtggtcgtcgaccactccagattccacactcgtccttcaccactcacggtgtttttacacgaatccacatgatatttaccttcttcgtcgac

SEQ ID NO: 19393 - DNA, 778 bp, Zea Mays
gttcacacctgattctacccctaaggagtatttcccctcactaaatttctgaattggagctctaccgtactctgtccacggggacagtgcggagaatctaaggaacaacgtgttcccggcaacccatggcagtctagttcaattggacgattcggtgagcatcaagggcatgggaggatgttggaacaatagcaaagagggcgagatcggacctaagttgagctggccgcgacgagcttgatcttcgtggtggcagagaccagtttgggggaagtttgaaattccagagctcaggtgaatgattaagggtgggagcgggtgctatggcttcgggattatacagcgcaacagccccggccatcaatttataggaggcttaggcggtggcgcgtaatttggctgagcagtgctggcggccggagatagagaagaaccttggctcagtggattggtgtcctcagccgtggcgaactcaccggcgatgattagacgggtataaagagtcacggtgccgcgacggaggtgttcagatacatggcgcaaggccgtgcgacggcagtcaccggcgttcttatcggtttccaccgcggtgaacatggtacggcggccggaattgtttatcggccggagtttatccccgacgacgtacaccgggtgttatccactcaccccgagcacaaattggaccgacggtggcacgaatcgcggcggaaatcgatcgtcggcggtgaagctgctgcgctggcggtctgatccctttggtctactgtaccatcgc

SEQ ID NO: 19394 - DNA, 607 bp, Zea Mays
gccgtcgcgtccccgatttcggccctgtgagtctctccgtgcgtcggggattgaaccggggagttccctgctgtggattggcggccggagcccttgaatttcgtcgtcgtggtgcgaactccgccgcgtgtccgccaaactcagtggggcggttcgtccaatgcctgaatcaaggtaagaaaccctcatctagttcgtcttgttggttacatcgtgtagctccgttcaatttgacagaggtcggggaggtagcaggatcggtctgcgccggcgtgatgctcaccgccgtggagatcggagtgccgctagctatgcgctattggtagaagaaaaccctcgtccgctgatctaaccaccaatggctaggattaggtcaagctgtatccctctgcgcgatgcatcgtgaccatagatctagtgatgaccggctctgggtgcatacagttccatgtgggatctagcccgttggatcaagatcgagtgtgcgggtttccatctcaatattttaaatcccgagcgttgttatttgatcgggtggctggggtggcgtaccggttgggggccaacctgatctaatctgagctcttggatttgaatccgacggccc

SEQ ID NO: 19395 - DNA, 437 bp, Zea Mays
cgggtccaccgaaggtggattagttcggttgaaatataccttcagattcaggtacctgtttgacgaaccaaatgacgattggctgaaatgtattgatgctactagcgacgagttacttggggcatataccaaagccgaagatgatgctttgtcctcagccttcgggggtcagagcaagaaaagactgaacagagtttttgatgcgattggttttatatatcctgattattgctatccctcgcagaagtaaggaaaaaagaggaaagcgccacttcggccatcactgttgtgccgaagggcaacaaaatcaaggttttgacccaccgaccaagatatattgaaacatccacagtgccaaaatttggtgatgaaacatattccgctgtcgaagcgaaacaagttgctcccgccactcgaagtgccgaggaatcaactat

SEQ ID NO: 19396 - DNA, 702 bp, Zea Mays
gaattattttgttatgatgttgtctttttttctcgaaaacgcatgagaactacgcgtcattatattaagagaagaaacaaatggtcctagtggaccagtacaacaaagggcctccttatggtggccaccaacatccatacatgtaaacatccatggcgactaaacaagaactactactagcagcatccagaacaactagctaagagcatgtaaaccagggataggactggtcagcatggataacttccttgctccagccatttcccacatctctctctcctagtcggctgttctaagagcaacatcaatgttaggcctttttttgtcaaagacacatccattacagtgcttccacaaagtccatgccccaaggatcacaaaagaattcagaccttcttgtgccactccatgaacatgtgtacagatcattttccaccaattcatgaatgcttcttcaccaatctgtggggccaaactttggatgttcacttgagacaacaatttaaaccaaaatccccgtgcaaaaacacacccaatgagcatatgatctagagtttcttgctcctgatcacataaagggcatctatcaggatgttcctatcccctttttcgtaacctgtcagttgtctaaacccttttctgggcaaccagccacataaagaacttagtcttcaggggtgcccaagatttccatattctatg

SEQ ID NO: 19397 - DNA, 319 bp, Zea Mays
tgctgaagacagagactctgaggagttgggatatccgcggttcaaatgttaggttgaactgcgtttttgagttgaaccatctgccgtatgccggctaccccggggacgacgatgctgatgctgctgtccactgggggaaaaaggtgatgacaacggccgacgagggcccttcacggggaacaacgccgagcgcggcccccaagaagaggaaattaggtacaacagctgaggggtcgagggcttccgatcgttttgctgctgatttgttggagacctacgcgattcccggggagacgatgtcttcgcccgagctccagga

SEQ ID NO: 19398 - DNA, 1176 bp, Zea Mays
aagaggaggaggataggttggaagagtcttggaccattcatctgcaaatgacgactcacgaggagggtcgtctgcaggcagataggcaaaggaggatgagccctaatatggaggtggaggaggagatgaggaggatggtataggatcaccaggtacaaagccagaagccggggcaacgggatcaacatgagcaaagccaaaggcaggagcagaatgataaaaagaaccatcatccacatattctacttcctcatcctatggagtaatgaacgacactccatactattgcgggtgccactgattaatgtcatctagatattggggcaagggagcattatactagcgaggtggcatattgtagcccatgtgtgcagcaaactgacataaattatcatcatgctcacgagcctcgtgtcgctgctccatggtgtcagtagcgtggctgcgatagatagcaaacataccagcaatgcttctcaccaggtgcatgaatgaactgggcctcctaccacgaccctttcctcaatcgtcgcggtccattggacgagaagtggtagaagcacatgaggaagtctcatggagaggtggctaaggcggtggctcatctaaatattcaactatgcaagaccaccagagctagtaggagcccgcttctactggcctcttggattgttgggatcaatctagtaggggtgtagtgggtgggccattcatccttctcataccttgtttgggtgactacctcaatcattctgataatatatggtgcatgaagacaacccttcaaaggtgaccaagatgtgtgcacaatttcttcctagatgttataaaaaacattaagcttgtcattgctacaagggtcatgaacaaaaggagtctactctcccccagaacattcatctaggtcccactcttgggtagaatagtcatcctaaataaagagttcaggtacttgtagtacctttgcatgttcgaagtgacctagaactcttgatccattgacacatctagctcttcttgctcttccttttgaggcagacaataataatgaatgtgaatattcctaccctagatatcttcatcagaaaactcaataatgtgagcaaacctcctatatctcaccttatttcatgtgccatcgagaatgaaatacatgactagatgatcataaccctc

SEQ ID NO: 19399 - DNA, 428 bp, Zea Mays
ctcgggttagtgcatacccaattgattcgagttatttcttgtttttagccccctgttgctctcggagccagccaattggagtttacctgagtctcatcaccggaacacccctctgctctgtagaacgccgccgcgacgccctctctatcgacccgcttttctactcttgcccaacccaaattctagcgtgtatataaactctggtgaacccatgaagcttacccaagcttcaatttagtcaaccatgctttctgttatccagaacgcattgatccattcgaccatccgcactgtcgccatgaactggttgattcaaagccccgttagtaaaattgattgaggggaaatgcgcgggaggagttcaatctggtgtctaccgctcgggagcactagtctttgcgccatccggccagtctaacctcgctggt

SEQ ID NO: 19400 - DNA, 386 bp, Zea Mays
tcgtaagaaccacccagacagaatcacaaggcaaactagagccgaagtgggaaggcccattcatagtcaagacaaaggcatcccccagcgcctacaggctggcaacatcatccggcgaagacttagagcattcctggaacatcgacaacctcaggaaattttttgtttaaggttccaaggcctacgcgcctttgtaactctgtacactgccattcaggcccgcactcttttcctcctggggggtgaggtttttaacgaggcggagctatgtaatataccagcaaaaatcccccacaaaaaattcctaggcatcatgtcgaaagaagaccgctccgacggccttcggcattcgatcgatccgaagtcactgcgacaggtagcgcaga

SEQ ID NO: 19401 - DNA, 824 bp, Zea Mays
cctgaagttggactgtcagactgcttgaaatcggaaattcagattaacagtggaatggcatggagttagggctcgaatttaagcatgatccattaagaatttggctaggggtgctataacaaagatgaagatggtttaatggtttacaactttgatgcagggccttagatgtgttgccatagaaaatttagagacaatctaccctaaacatcatctatcaagcactctgaagatgactctcatagtacagtagccgatcggatcaggttcagtgaacctcaccgccgatgaccgtcgcgctgtgattcacgtcgatcaccgggattcgtgcgctgtggattgtggataactgtgggcgggtaaagatcttggcgcctggatcagcttgagtccggccgcggttaagcccgccgtacccccttgctcatcggtggatcgggatgagacctcaccgccgttgatcgatcactgccgtgcgccgtgtgtccagacactttaccatgtcacgattagttgcgttaggggatccggtgatcgccggagggagcgccacggtgaaaaccactaagcacttgcgccagtgctcccttccctctccgaccgccgcgcgtcgttgctcaaattcgcggccaccgctcatgtttactataaattgaagccacagtgagctccgtaggatgatcatacaccaaaccaccaagtattgtctccagtcatacaaccgagagctccaatttcatacttcccccaatctgctcaaaaacaccgcaagaacaccctcaccgcggccagctcaattcaggtatgctcatatcttcttctcc

SEQ ID NO: 19402 - DNA, 606 bp, Zea Mays
ttcaagagctcgcactctcgaagcttgtgcctgatggggaagcctagttttgacatgacgagtccatcaacttctggaaatggtcgccaccattctaggctggtggcctgggtggtcgatctgcggtggtgaattcctgttcatcaagccgaggacgatggttccttcggtgcttgtcggggtgctctcaatgctccctcctttctccactgggctcgccagcgtcccgcgggccctttcccatgtggaaaatggctcccacagcgtcctccctgttagcgaacttggtcgctatgtcaagtaggtccatcgttgttcttggtcttccctggccaagctcggggacaaacgcttcatcagtggtgccataggtgaaggcacttactatgtctgcgtcggtggtgtcggggagctcgttcctcatctgggagatcctccgaatgtagtcccttaggctctccctgcttctctaggtgcctagaatgttttcgatgacatccttatggaggtcggcctagtcacggacggttccaatcaccaagtgttcaagccagactcttgctccctctactaggtgtatgggaaggaactgcatgacgaggtgat

SEQ ID NO: 19403 - DNA, 302 bp, Zea Mays
tcacaaagacataggtcgcaatgagctaaatgaactccaacaaataagtcaagatacttagaatgaccctacatgtggtaagtatgagctaaagtacaaaataactcaactggcaaaatgaagactgttgaaggagggtcacgtttacatcagcagcagtgatgatagcaagcactgcaaagtttcataggctacgtgaacaaacaagagataactgaaatatcattatctgaacaatagcagtgacatcacatgcccaagtaaaaacaaaaatgcctccatgtccagttccatcaaagaaa

SEQ ID NO: 19404 - DNA, 593 bp, Zea Mays
gacgggtgcttagcttcggcctaaaccaaattcactacctggagaacgtttcccctaacttaattgcacgaatggtgatctattctcttctgtccacgagaacagcggagacaacggacatttgatcgtgttcccggcgaccagaggacttctagctccattatgtgggtcggagagcatcgtagacctatgagagtacttaaacggggaagaagatggtatgagcggacctgaatggtgctggccacgacgagattgagttcacggtgttctagaaccgaattggggagaattcaaaatttgtgctcgctagtgggggatttgggatgcaggtgggtgcggtagctgctgggatacatggcgaagccgaagggaggctcaatttatagatcaattgagcagtggccgggaatttggggttgaatgcggtggcggtcagagaagaagcgagtcaccggcggggtgattcgtggcagttcacgggatgagaagccacgacagtcactgggtaatgatcatagttcacggtgatgtggtcactgatcggaagcatggcacaatcgcggcggaggacgcaaactccggcgacggcc

SEQ ID NO: 19405 - DNA, 428 bp, Zea Mays
aggagaggagagagagtgtcgttgtagtcagcgccgacgcaccggggatctctggtggaagagcgctgtgcctcggggtgccttcacgtgggagtcatcatcggatctagcgctgatggcatgggagactcccttggacgcggggattctgcttgatgcttgattggcgcggcaaatcctatgggcgtcgtggccagcttctccgatgcttcctccgctggtgagaactaattctagtaatccgattttgtctctgcgtcgtgttggaatggtagtaatgagagttggggtggaattgcacggaattggtgcgctggtaatggcgccaccatagatgtcgtcacggcgccagttggcctatgcgcgagaggaagatgatggcatgccatccgtcgatctgccagggaacgatcaagattagaagcgtg

SEQ ID NO: 19406 - DNA, 451 bp, Zea Mays
tgacacacacgatgtgcggacggatgcgaaacagctagtggaaatcttaccggtagtggcgacagaaacaggctctgcctacggctccataggtctgcggcacggggatgtcttccggtgagcaatcgaccctgccccgacctgctcgagttcaattgatggtcggcatggcttctacatcacgcagcgactccccagagatactttattgtgtcaaagcgacaccccgtcgcgagtacgacggcggcagtacaagctcccctcccttcttctgaaattcctatctgctatggccgcgatggtattcaggttgatggaggctggttcgggctcggtttatatagccacgaggtgaattggtagccgggatcctagggagattacaccggttgttggaatttttttccaagatttgctgcgcctgctcctttggggaagaaacggctaatga

SEQ ID NO: 19407 - DNA, 663 bp, Zea Mays
ccggggcattcgtatctttccgatatgcaaagttgtaacaaccgaagttcttatgaagaccatccactctggtctttgtttgatagtgtagctcgtgcacccgacagaaagcttcggcattaggactcatacccttgcttcggagagcccatatgtagacactaagtctaacgattacattgggtgtcagctgatgaaagtatatctcaaaattctttaaaacttcgccaatcttctcatgtagagggaatcgaagccctgccctgaagaagctcttaaaaacaacgacttcatcctcccttggctgcggaaccacctcttccccggcaaatcagacaagcttgctctcggcttccccaaagtagcccaattttttcatcataaccatgtcgtctgctgtcacagtagatttaccaaattcaatgtggctaggtttcattgggctcagaatagtgttgtcctcctcaccttcgttctcacttcctccttcagccatgatctgttcagcttcagtagtggaggtacctttgacaacaacctcttctggcacaacaagacccgattgcgtcatcacttctgatattggtgctgtttcggtcgcttcgacctcgtccccctcgcgagacaccctagcagtggatcgtactctggccatttcagtgt

SEQ ID NO: 19408 - DNA, 951 bp, Zea Mays
cgctacaagttgggctgtcatgggctctgaattgcatttctgatggtacagtatctcgatcggatcgccagctcagtccctcgccgccaacgatccgcgcgcggattcgtgctatcgccatcgttattcgcacttagaacaactagatagcgccggggtcagtaaatatcacaccgtggatatggtccggccactaaattactccgaccaccgtacccgagctagttacgattgcttcggatgggttcaccggagattgccacctcgcggtcttgcaccacgtgcccaggcatcttaccacgtcacggttagtcgtgttaggcatatccggtgatctccgggaggaccgccacggtgaaagccactaagcgcttgcgccagtgcccctcttcctctccggcctccgcgcgtcttcgtccaattcaccggccacctctcacggactctataaattgagcacactgtgagctccgtaggataattacgcatccatagcacccacgcttgcctccaatcgttcaccagagaccgtgaattgctcgttgcccccaatatccgtttccgccgccgtagaaacaccccaccgaggccagcttgctccaggtccgttcatgctccctgttctctcgttttagcgtgcttgtgtgtccctgttgctcctcgacccctccaattgagctagagtccctaggatcaccgggaacgggctcggttaaccgtggtgtccgctgtcaccgtgggcagggcgtgttagtgcgccgatggtgaaattagtttgggggaaacgctccttaggactagaattaggtgtagaccgaagaagagcatcggtcattgagtaattcgactggtgtgcgctcgctagagctcggctcctcgccattccccgtcatggacctcggcctgcgaagaaacagaacttgggggaggtttctgtaaactgtcagtgac

SEQ ID NO: 19409 - DNA, 480 bp, Zea Mays
gcgtggcagtcggcgtgaccataggcagaccagcagtaattgcatcaacgggcgcgcaggagcagcgagccaatcgccaatcaaactttggccccacctgcaggctcgtatcctcccctgaggcgggcccgggggccactgttggtaccctgaatcaggggtaccccttactacagtgtgaagacacgatgcccgtgtgacgatctctagtcgtgcagtgaacagcacccgaccccaccacgtggacggctcaaggggcaccacgtgaccagaaaagatgatatatcccaagacgcaatcagttggaccggacctccacgaggaagcgccggacccctgtacgcacaacccggacccccgaatacggcccgagactcccaagtagcatgccgggtcccttggatggggtccggatccctccaagtaaggtccggaccacccataacgaggtctcgggacagaggataccttggcctaagc

SEQ ID NO: 19410 - DNA, 1185 bp, Zea Mays
ttcgcggcccagctattgcgccccctcggcccatccggctccttcctcccaccgcgcacttgcacgtgacaccggcgcctgggccccaccacacaggattaccgggtttacctccgcgcacgctcttcgctctctgaacggtaggacccaccggtcaggtttatctctttcccctcacccataacaaaaccaagctccgttcccccgccgaaatcgccgtgatcatctctgatggcggcggcagattctcccacaaaatgcgccgatctcgggggcgggccgaccatgcgggtcctcatcctcgtctataaaaccataccgtgaccctcttccccaccatctggagcgctgagatcggagcagagagatggagaagtggaatcgagggtaggagagagaatttggcgccgcctcttgcaatctacgcttgtgcggtggctcgggggtttgggaggacttcgcaggagcaagccagtggccgaccggtggacttggcgtggtcatcggtggcgagctcctttccccttgccgccgtgccgtggactgagttcaacactgctcgatcccctgtaagttgcccaccatctaattcgcgatcgcctctgcatcgttttgcgtcagcgcttgtggtgaatcggtcgctgggggggaatcagctcgagtggctccgaatgtggctccgccgttggcgacgccgccgcgactggttgaccggaagttgggagaaggccactggtcattgatctcctgctgacggccacagttagaagttggttatcatttcacccaagcgatcggtgaccatggatctccgttgggtcggccggcgttgatcgccgccgcgagcggggcctcactgtcgcggtggatggaggataggggaaagaggaagacgggtccctggccgtaggattgagatgaacgaccacgatttggggctccataccggtctggcaccagctcgtcttgatcgttgatcgttggtccagcgtgtggagttcaatcacggtattgtaaatcctgaccggaggatctagatcctgcggccttcgcgccataccgattcgatggagattgttttaatccggtccgtccgttcttgatcgtgtgatccacagtcgaagataccccttcggccagcgctttttgcataagaacccttgttattttgatataccaacccgc

SEQ ID NO: 19411 - DNA, 867 bp, Zea Mays
cgctcttcgacattcgacatatataaagtcaccacgataggtagcatagactaccctcgcgtgcgacaaatccgcgcaaaagtcacctaagggtgcagccggacaagcacaacaagtgtgcaacatgaagtctttactaaaatacaattccacgcaaaagccacctaagggtgcagccggacaagcacaacaagtgcgcaacatgaagtctttactaaaagacaattccgtgccaaagccgcctaagggtgcagccagacatacattacaagtgtggcatacgaagtccttacagcaagtcatccaagcaagacccacacattgccgcggcaggcgaagtccccaactcatttcacaacaaacaatgtaatagtttacatacacacagcagagggccaccggccacattgcacaaataaatatctaccgcattttgctgccctccctcttaatcgcgagccaggggagggcagcgtcttcgctcactaccgcgatacaagagcgagggcagcatacgcgctacattggctcaaccttcgggataaggcctgcctcacgaaaattaaacaacatcatcttcaactcctcaccctaaaaagatttcatagatccccctccccaatacacgacccagacgacgaggacaacaaatctcgttggccactccgatctacccgtagacgggttcattccatccccatctgatgacgtctaccacttcgtgacatctcgccatcactatgcttcaacaccactcttcgatggcggtgctccacggacctcgccccagccgggggatcagacgcctcgcgcacttccagtagcggcacagcctccgctgcggccacatccaacgcagcaaaataa

SEQ ID NO: 19412 - DNA, 383 bp, Zea Mays
tttgggagttcgattgtgtggacagaggagtcttcggatgaggatttggattactttgcagcattggatgtggctgcggcggaggcttctccacgtgtaatgggtggtgaggatctgccgggtgcgagtactaggcataggtgacgaagggcggtggcgaaacggagagtgagtgagttgtcacgaagtgataggcgtcattgtggcgaggtggagggtagtcctcttcgtgtggacgggactggcaagcgggaattgctggcctcgtcggctggggcgagtgtaggtgagggagagctgcgaagtctgtttgagggcgatgaattgaggataatgctgttcaactatagggagatgggtatcatcccgaaggttgagccgat

SEQ ID NO: 19413 - DNA, 411 bp, Zea Mays
ttcccccctcccccaaaaacaggtcgttcgtgacctggacaccaggaaaacggcgacgaaagtcctccagctgaacccacgttgcatcaactgctgattgtcccagccattgcacgagcagttcccacacgcctcggttcttgcgtgccttagtaaccttctcatgctgaggcaggactctgccatgtaatattgggggtagaggaactattgcagccgggggagccccagtatatttctttagtaaagagacatgaaacacattatggatgcgggcgtgagatggcagggcaagcctgtaaggtactgtcccaatttcctctagaacctgatagggaccatagaagcgaggcccaagcttagagtaggcggctggtgtgattcctaaagctgtacgctgttgcagtcgaa

SEQ ID NO: 19414 - DNA, 561 bp, Zea Mays
ggacctcaggacaaatgaaggagtcctttggttcaagaaccgtctgtgtgtaccaaaaggagaggcacgagaagtcctgctcgatgaagctcacaactcagcctactccatccacccaggaaccaccaagatgtacctagacctcaaaaccagatactggtggagagggatgaagaaagagatagtacattatgtggcccggtgtgacacttgccaacgaacaaaagctgagcaccagaagcctgcaggcctattgcaaccccttccagtgcccgaatggaagtgggaggaaatagccatggatttcgtaaccggactaccccggacgcaaaaagggaacgactctatctgggtgataatagaccgtcttaccaaggtagcccacttcatcccagtgaaaactacctttggaggagccacccttgcccggatttatcttaaagagatagtcagactccatggcattccaaggaagatagtgtcagacaggggaacccagttcacctccaaattttggatgagccttcagcaagctatggacactaagctagacttcatcac

SEQ ID NO: 19415 - DNA, 835 bp, Zea Mays
cttttattcaaaagacagcgcaacaattacttaagggcgcagccgaaacaacgtttatcgaagtctatcattacaaagacactccgcacaaagccgcccatgtacacagccggaacaatacaagcgtacgaatacgaccaacaggccacaccaccattacaattacatacacacgacgagggcatcgcctattacacatacacggtgagggcatcgcctatcacatcggctccaccttcggaataatacccatctccctgtaattaaacagcattatcctcaattcctcaccctcaaaaagctcccgaagatccccttcgcccatgcccaccccattcggcaaagacaacaattctctcctaccaaccctgtctactcaaagtcggtcacgctccatccctgtgcgacggtgcctgccactccgcgaaaattcacccacacactgttttcccaccacccttcgccgcctacacccagtactcgtaccaggaagaccctcagcaccctccacacgcggcgaagtctccaccgcagccacatccaacacaacaaaataatctaagccttcatctgaagactcctccgtctaaggaaacaaactcccagacccaccgtcggactcaaaacattcagacatagagccaggcacactatcatcggcgggcactacaactgaagtcttcgccgcaaaatcaatattgtcagtagcggttgcttgcgcagacccaaacgtcggaacctgcgcagcaaccgaggttcagtaccacacagacaaaagttcacatgcaatccctaacccctattcctacacctgcgaaggctcggtcgccgccgt

SEQ ID NO: 19416 - DNA, 584 bp, Zea Mays
ggaatatactccgtagaagaccaaaataagaaaggtgcgcaagaactgttccctttttctagggaaatattgcaatcataaaacagaaacacagctttgctaacacgtgagcagcaaaaggcaactgcaggtccacaatacctgcccttagatttagggtttgtaatatcctaagaaaatgagaaaagtgtgtgggtttgcggctgtagatgtagagcgcattgcaacatgagtttggagagcaatgaggaaaataaatgtgtaatttgcagtaagccacgaacggcggaaagcgaacaaaaacattaaaagcatttctttacctaaaaaggtgacaatggccgaatgtagacgctgacgacagaggaagccgcgagctcgcagtccctcgaaactggccggaggtggacgtcgacgaccgaggaagccatgggcttgctgtcgccctcgaaacggatgcgggagccatagtaagggacggccagtgggtagagaagggaagcatacgaatctttttttacctggaaaagcggtaatcgtcggagagtgcagcggaagccgcggagtcgctgtcggcggcggcg

SEQ ID NO: 19417 - DNA, 535 bp, Zea Mays
gtgggattgcggtttcccttaaatgagatgattggtgaagtcttgaataattatgaaatctatcttcatcagctgactcctaacgccattgttaggcttcgcgttttcatctgggcactctgaagccaaggagtggacccgaatgccgaagctttctgccgaatgcatgagcttcattaccagacgacggctagagaagatgggctgcacgagaactttgggtgttacaacttcgcataccgcaaggacatgaaggccccggtgcttagctatcgcactaagtggccgactggctggaaaagcgagtggttttatgtcaaagtcgatgaaaagaagagggagaagctgaagacgctagtgctaagcccgttgagtttgaaattcgggttgactaggcccttgtgccgcatgacgccaggatcaccatgtcaacaagctgtggcagaattcagggtggtagccgaacagatcagcatgagggatctagttcaagaatatttggctaacaaaacatctctgactttgagcgaattca

SEQ ID NO: 19418 - DNA, 585 bp, Zea Mays
ttgcaggcggctattggctcttttggcagattgatcttgtgggaagaggacagacgcaatgtctacaggactctgctcagggttcgggtcacgtctctagaggaggtccctcagttcattgttttctcagaagctgatggctttattggtgactcgtggacagtgcagtgtgagataatccaacaaactttgctggggggtcagcctcaagatgaggatccggtgccagtggtccctgaggatggtcagcagctccctcttgagttttttggtttgggtcaacctgtgccggctgtgggctgggatcttaatttcccgccagaagacaatgtccaagcccagccagcagacaacattcaaggagattgggaccaatggattgttaatgatccgcctgtgcagcagcctcatctggacctgccacctgacgagcaacaggtcagcaatccgcattcggacctgtcctcagatagttcttctggtcacattcatggtgctccgctgcagaatgggcagattcagaatgggcagattcctgatgatctggtggctgtggggccggtgcccaactttaatgcccccgcc

SEQ ID NO: 19419 - DNA, 973 bp, Zea Mays
aactgccttagctaaggggtatggatggattctgaccactggatcttactccgagggcctcgattagatggcacattaagtgaaccggtatgagattgtggccatcggatccgaatccaacggcccacggccgggacgcaggtttggacgcggggccagatcttaccgtcggttctcaacggactgtcccaaaccaatttccatccaacactaatcccagtcatccaaacatgatctaacggtcatcaacccttcttctacctcacgtacagaccagtgcgccactccgacgccggtgttggagatcacccagacaggcgccccagttctccagactccaattggacagagctatgcataaaagagatgatggcgaacgcgtgcaatggaaactcaccggtatggatgcaacatagaccactggccacgatgcaggcggcccgacggcgattccccagctccaaaccgtggactcgcttcgaatcccaaatccacggcggtgcagttcccacccatggcggcgacacgccggagcagagtagtgctagagccacgacacacaggtcctaatgtggagttgtgctagtcgatgaagagataaaggagaaactagtgggaaggttcttactggtgaacacgacgtagacattgtagaccacgccacaaagaagccctactaccaacatcagagtcgacatcctgcggctgcaggtttgatccgcagcggcgtcttgagttcgtatcgaccaggcctcgattgatttggtactttgaggggaaggtcacagataggttttataggaagaggcgggaggaggcatgcacgaccggcacaacagagccgtaacaatctgcacacaaatcgtaacaaacctacgacaggggcggatttggtggtcctagagattttgtgcgatttgaatctgggttacggctgatgaggcggatccatagtttagtagtgtagggccgc

SEQ ID NO: 19420 - DNA, 838 bp, Zea Mays
gccttcctcgtgggcaaggattcgtgcatggcgatggtgctagtactcctcttagttggcggcatcttcgtttcccccaccatcctcaccccgcggctatgttgccacgaagcaaattctcccaactgcctcagtgacatcggttttgggttcttctgccgaatcgaggcttgagtcatcctccagaaggtcgaggatggaggctgcgggtggtcgatgtcggccacaaacgttgagggtgaggctccctctgccttctgcttgatggcgacagcgggcttgttaagacgtcgcttgagggtggcggcgcgcctcatgaggtgtcgcttctccgccttgctcctggtggaggtggaacgtgagggtcctcccgcgtttgccacgatgggcgtgtcggagtcaatgaggcggagttctccggtggcggtggcgaggaagtcgagggaagagaatgtgatgcgagtccctagtgagaaagtctcgctaccagcaaaaacggatgactaagccattggagttaaaatgttgcttagcacacaaatagtccccctaccttgtgtaccaacagttgtggttttgaaaatagtggacacaacagaatttgtgttcggtgggggaggctagtgcggactcactccgagtggttaatcaagtgactcgagagggtttatactggtttaggctcacgccctacgtccagtgtagtgttaatcgttgtattactcttgagaacgtgttacactgttacagttggtgtgagtgtgagaatgagagtaatgggggagaactctagttgaatgctcctctatctcttgttcgtgttccaccaccgactttt

SEQ ID NO: 19421 - DNA, 924 bp, Zea Mays
cgatggcggcctcgtttttacgtcaccataaggagagtggctgcagtacattgtgcgactccactttcaagcttctaatgacgtggccgagtacgaagcactcataaatggtttgcgcaatgtcgtggagctgggtgtccaatgtctggacgttcaaggggactcctagctcgttttagggcaagtaatgaatgtcgcgatcgcaagatggtggcatactgccaagaggtgtgacggctagaggagcaattcgacagcctcgaactgaaccacatcccacagcgagacaacgaaatggtgaacaccctcgcgaaaatggcatcgggacaaacaagcgtgccaccagggatctttgtgaccgacctttttaaactaactgtccaatacgacgatgtccactagaggggcaggcaactcatgggcacggacccgccgactccagaactagtcgccatcgtggaggaaaccaaccccctagccgaccccatggctagctggagaacgtcatatcatgacttcttggccaatagtttgttgcctgagacaaaatagaagcatgaaggattcgtcgatgggccaagtccttcgtcgtgattgggaaagacctctacaagaaggggcgcaacagaataaggcagttgtgcatcccaatcgagcaaggaaagctgctcttagaagacatccatgatgggatctgtaggcaccattttgccctaagaagcctcgtggggaacaccttccgacaaggattctattggcccacctagtgttagatgcacatcaggtagtgagaacctgcgaaggatgtcaatactacgcgtgacagacccatctgccagcacaggcacaataaaccatccctgtcacgtggtcatttgttgtttggagacttgatctagtcggacctctcaaaagggcactcag

SEQ ID NO: 19422 - DNA, 461 bp, Zea Mays
tgagaggcatgtaccgaagctatttatgtgcaacctttgtcaccaccttctccccttcttcatttacaagctccacgtacctcgacttcccacattttaagcatttatgctcactgtcatgttccttccaaaaaagcatacagttgtcccagcaaacatcaatcttctcatactccataccaagaccttcaagcaatttcttggactggtacatgtctttgggcatcttgtgacccgtaggaagaacctcgctaatcaaatccacaagctccttgtaacaattaattgaaaatgcaaacttggacttaattgacatcagctgggtcacgaattcgaggacggtcacgtcagtgtgcccgtgaagaggctcttctaacgctttgaggaggtcgaagaacttctgaacctccggtgtaggtgaatcatgatgatctggggccagttcaggctgcagatcctca

SEQ ID NO: 19423 - DNA, 520 bp, Zea Mays
gggattcatcagagaaacagagcacaaaacaatggaggaagtggcagagggctatttgtatgaacttgtcaatcgtagcctattacaagtagtggagagaaatgaaagtggacgagtgcagagttgccgaatgcatgatattattcgacttcttgctctgacaaaagcaaatgaggaaggcttctgtaaagtttatgatggcatggggagttattcagcagaaaagacacgtcgtttatcgattcacagtgcaaatattaagttgtcgactcaaccaacaaagcttacagtccgctcaatatatgtttttagtaatggtttgactattgaatcacttaggtctttcttgaaacatttctacttgctgtcaactctagatctccagggtgcccagattgtggagctgccagatgaggttttcaacttgtttaatctacggtttctcagccttcgaaatactgaggttacgaatatccccagcacagttggaagattacaaaaacttgaagtcttggatgtt

SEQ ID NO: 19424 - DNA, 377 bp, Zea Mays
gccggtagaagctatgttggctggcaggtatggtcataaaaatgtgtaagccgtgacgacgacataggttgcgtgtgctgtgtttctttggtgcggcccaagtagctgccaggaggtcgcacgcttcttaccctgacccagcttggctttagggtcagtctcccttgctttctctgcccagcgagccctcgccctctagctcttcctgctagcattgtctccgtcccgtgctctcatgttcatcgtcgatctcagccatcccaggagcacccgctcactcccagacgcccgcgcaaaggaatcccccacgatctccctccaaactgcccactcccctccacgatctccccctctagctcatgatccatccacccgcc

SEQ ID NO: 19425 - DNA, 1197 bp, Zea Mays
tagctctccaaatttgctgcagagtttgggttgtgttaccacaggaatctgggagaaaatcaagctccaacttggtctgtcagacaagccttttactgaatctggcgcactgttcaccgtcttcagaaatatcgcgccgtggataagggtcagcccctcgccggcgataagaacgccaccgcagcgcggatggtcgtcggtggccgcggtaaatatcctcggcgttgtggcagatggtcactgaggtggcaggctccggttaaacggcgacccccgtgccatcaccggaatccgccgcgcggatagcttgccagcacatctgaaatccgcacttcttccccaactccggtcaacagcctataaattgagctcggactccgcttcttctccacattacgcacctcagtgcttaagcaattgacccaattccgccagagaacttgcgcagccccaaatcccctcctcctctgttcttgctccgccgcatgggactccaccgtggacagcactcttcgggttggtagtttctcaattactctctgttctagctcgtgtatagtctcctattgctctctgtactgagcaattggaatttggccgaagtccatcaccagaacgcgcccttgccttgtaaaacgccgccgtgaccccctcaccgtagacccgctcttcgggtcttgttctgcccaaaccaaagtatgtccatggaccttggtgaacctgtgaacctttacccagcctcaatttggccatccccatcgctgtttgatcggaacatgttcatcctcctgtccatccgctcggtcaccgtgaactgattgattcagtgtcccctaggtgaaattgatggaggggaaatgatcggggtggatctaattgtgtccctgtcgcttgggagctccagccgtggcgtcatctggccggaataggctcgccggagtgcggcgaggactgttcctcatcgtggactttgctctgcgaaagtatagaacataggggttctttttgtaaaccgtcagagactcacctcaatagtaaatggacctatttcggttaaccgttaagcagagggcctttttgcaaaacagccagtgcgcacgcgggcacgcttctgcttaggtctgggccgtgtgggccaaagtcagcccattactgttaatgcctttttccttttctttttacttcagaaccaaataa

SEQ ID NO: 19426 - DNA, 459 bp, Zea Mays
ctagtttgcaacttaagaaactagaacatcaaatactgcaatagcccagaaaagagagaaaaatacagcataaagttataatgtcaaattgccacagctcactgttaagacttatttgatctagtgaaacctagttatctattagtaaaaattaattactgacaagtatacaggtgcatcatgaaaaccaaagattaagtgtgatcaggtagagctagagcaaatttgagggggtgtacttgtcttgcgggtgcatagctttttagtatgaaggtgcagatgaggtgaaaaattgatcataatcactgtttttcatttttgctgtgggtgcgctcgcgccacagttttatacatagtagctccgcccctgaatgagataaataattaaatcttagtttttctgaagagtatagtgcacattactatgccactaactaaaccctacattttgaacaggaa

SEQ ID NO: 19427 - DNA, 453 bp, Zea Mays
gtgcctcgagtggttcaccatggagaatcacgacaaatccttccccctcggtcaggaaggcaaccagacattcgcacgcctagatgggtggagtctcccactttttcagaggtagccgaagccaaagtgctgctcgctgaaatctgctcattgaaggataagggtctgactgctgaggccatggtcgctgactttatcttcaagaacattcaacctttgaaggatagagtttaccctgcttatttgtatactggcatcaatgattccacctgagtcacaaacagacagattcctaatgaggacttgctgagccgactggatatgatattgagggacagggtctcgaatgctggtgctcccttagcttactctacgtggaacctacctccgaatagtcccttctctggatttgtctccaatcctcctgctcgagatggtagcccgggccatagt

SEQ ID NO: 19428 - DNA, 1335 bp, Zea Mays
tgctggtcactccaccggcgcttctgctcctcgtccatctgggacaagctcctctacagctccgactggtgggggcgatcgccgcaaaaagcgcaagcccgctgatggccgcgttcgtcctcttgcttcggtcgatgccctcacgccgtcgtatgggccacgaccatggacgtccacttataatccgtggacgagcgtcgttcaggcctggccactgtcccagtggcgtcctacatcgccaggcgttctcggctcccggcctcctgcaccaacacaggctatgttggcgaccaatgcctccagttcgtcttcgccatcactgcctccagaactgcatcacgccatgaacaatttatctctgaacaacccttcgggtacaggcggtggtcattggttccttgacacgggtgccacctcccacatggcaaacaacactggtatatcctcctctcatttcatccctacgcagtcttctcaaattttggttggcaatggtgctcctctgcaggtggagtccatcggacagaccactgtacccaccatgttctcgcctcttcataacattcttattgctcctcatttgatcaaaaacctcatttcagttcgctctcctacgcatcccatgattacgagtgggtgtgctagcatcactcgccccaatccgcgatattctctagctacaactgctccgtcccctccgcctacctctgttcgcatggccctccgtgacacagtctggaatcaggccatgcaggacgaatttgatgctctgatagccaatggcacctggacattggttcctcgaccaccagacgctcatgttgtcactggcaaatggctattcaaaaataaacttcattctgatggtacattagaacgcagaaaagctcgctgggtagttcgggggtttactcagagagcaggagtggactttcatcagaccttttctccggtcatcaagccaacctcaatacgcactgttctaaaacttgtagcagttcgtcagtggccagtccatcaactcgacgtgaaaaacgcctttcttcatggtgttcttcgtgagcgcgtctactgtcaccaacctagtggttttgttgatccggatcacccagctcatgtttgtaaacttgtgaagtccatttatggccttaaacaagcgtcgcgtgcatggtttgaacgtctgggcgcttatcttcggcacctgggcttcacttcaactcggtcggatgtctctctgtttgtatatcgtcaaggtggagatacaacttatatacttgtttatgttgatgacatattactcactgcctcaacggatagactgttgcaccatattat

SEQ ID NO: 19429 - DNA, 860 bp, Zea Mays
cttcagtaacgacagtagaactagtagcttccaaaaatgcatcatcaaccgcaaccgggagtggagacacaagagcagacgatgtcttaggaatccaaatagacacagatgacttcaacttcctcttgggaatccaaacttgcttcatcttcttgattgcacctttctcagcgttgaatacctccagggggcctagccgattaaggaccggtaggcgaggcatcctgactccttccttcacaaaggcctgcacgcgcggcccaagtcgctaatgaaccgacacccgaggtaggaccgctgtcatcgaactttttccgggagcattaatactaaaggacgacctcctagatcgacgccgcctccgccgcctgccctgatcgggatcgtccttcgccagaggaggtgacggctggagggactgcagcaagttcggtcggtcaaggaccttcaccaacacccggataggtagactaatgaacggctcagcattccaccatcggtcatgaccggatcaacaatttcaagcttaaactccctgggaatggagctcgggctagaacaccaggcgataatcttgaacacctcacgctgtcgctcacaatctgggtgaagatcagcaatccagcaccactcattgaggagagcttgcacagattccaactcctaagcataggaagggatgccagacacttcaatctccacttgaaaaggcagagacaccgccgcagatgagttgaggattctgcttcatcgcataacatggattttagttgtgggagacaaattcacaattctgcccccatcataggcatggtccgccatttctaaacttggaaggataagaagaaaacttgcaggac

SEQ ID NO: 19430 - DNA, 656 bp, Zea Mays
cttacagaagtgttatttgatactggagcaacgcattcaattattactgtatcatgggtagaagcgcataatctcccaataaccaccatgataacaccaattcaaattgactcagtcggtggaaaagtctgaagcgatggtgtatgcttgaatgtaagtgtggaaataaggggatagaatttcccgctaacctgatagtgatgggtactcagggaatagatgttatcctagggataaattggctagataagtatcaagcatttatcagctgtgataagaggacggtgaagttggtgtccccactaggagaagaagtggtgactgagctagtctcacccgagccaaagaaatgaggttgtcaccagatggctattgatagcaaagaggccgatccactcgaggctatcaaggttgtgttagaatttctggatgtgttccctaaagatttaccagggatgccacctaagcataaagttgagtttgtcatagagcttattcttggcactgcccctatttctaaaagagcctatagggtatctggaccagaattggttgagctcaagaagcagatagatgagctatcagagaaaggttacatcagaccaagtacctcaccttgggccgctcctgtcctgttcgtggaaaagaaagatggc

SEQ ID NO: 19431 - DNA, 408 bp, Zea Mays
catctcatttagtccttccatattcgatcctgtcttgtccctttggttggtctggccgatcaaagggggccccgtggccaccctgccagccaggtttccgcaggagaatgtgaggttcgatcatggacgtgaatacgagcaaatgacctatgggccggcttacggctcactaggagcttgctcggtccacccctcgctcaacatgagaagttgaggcgagttctagtttttacctggtcggcatgagatagttactgtgtgggtgtggaaaagtgggcagacatcatgacaccgcctggggtgggtggcttgatgggatgcaaaacggtccactcgtcgtatcgtatgctggtggtgtgatgtggtggttaaccacctcactcgttactattatgtcctctacgtcgc

SEQ ID NO: 19432 - DNA, 743 bp, Zea Mays
gcgtcgcatcgtcatgacgagcaagatctagcctattgggcgggtgtcgcgacgacgatgacgagatgatggggggcagaggtgccaagaaggggcggggtcaggcgacatcgcatcgagaaggggctgcggtgggagcgtggtatatcggggcaggctggtttgggtggcatcagggatagtatggccgaacggatagttgtgacgactgggccgatccaacgaggaggtccatgacagggttgttttagtcttttaaaaactttaattttttctacacttaacagtaaatgattattagatataagagattatacaagattgagtcggtaggagagtgagtggcatggaaaggtgttgaatagttggcaatatcttccacttcgagctgacatatgggcccaagctaagggaagagtgcaactcacttaacagattattagctagtattctctttctctgtcaatggggatgtgggtgatggagatggaatgaagctagatgccaagaaatagaactacatagatatatagggactatgtagtacgtacgtagtatagtgtgggtggtgagctagcttagagcgatcgagatagtagtaggcgatgcatcccaagcgatgatcgatcgagttccagacaaaagaaagcatccaatcaaacttcttctcatgcatggatcggaagaaagaacaagcaaagaaagatgccttgtttcttgagctgcccctgcctgcatctgca

SEQ ID NO: 19433 - DNA, 388 bp, Zea Mays
aaggcgtgtagcctgttgagcggttcagggccgtcctcaagctccaaaggactgcggttagtgcctgcggccactactggctgagttgtttgaggcaggtgaagacccgggtcttgaggccttgcatgatcattctgttagcccgctcgacttgtccgtttgctcggtgatggaccacagtggcccaattgatacggatgcagtatttatcacaggactgtaggaacctgccctcggtgaacctaccgttgtccgttataattgagttcgatacctcgaagcggtggacaatgttggtgacgaatttcatggcctactcgaaagtgatcttcgcgattggccacacttcggttcacttagtgaatttatcaattacgaccaagatttg

SEQ ID NO: 19434 - DNA, 445 bp, Zea Mays
aaaaaattcaatcatccaaatagcagaggacctacgttcaccctttggtccgcgtccgtgcgcgcgccctctctcactcctggcgcaactggccgacgaccgccgccgccgtactcctggttctctggtgcccaggtctagcaacgtcagtcccttcgccaggtcttcgttggggccttcactggcgacgagcacccaccaggtatgggcaccccctcccttccattcctgctgctcgaaaccgagcacccgaaccctaacttaatgtatttgcgtatttgtatttcggatctcatctaagcacaactttatatatgtactaacttccatttttttcttgttgctaaagttattgggtgtacatctgtatgctcatgtcctttgctgggtccgctcctgatcctaccatattgatgttttctgaggtaatatgatttgaactccg

SEQ ID NO: 19435 - DNA, 810 bp, Zea Mays
gcaaaggtgttggaggtagcggaggccctaaagatgatataggccaaggcggatcggtttgggctaaaaccactgacagatgcttcctcgaggcagaactagtcaaagagtggtgcgtcgacccctgctcatcttaaggtcgctcttatcaatgcaacacatgagcaatttcaccatcgctttgccgataatcacaaaggctacgtgccaagacggagaacgcctgatcacccactctaggcgaaggtatgaccattcatcgtaggcatacaccaacattcattaattgggattcgataggaaggaatttgattgccaattggtcatagatgtcaggattagtcatgcccagcacgaacttcctagtattcgatgggtccaatccaaagttgtggaaacataggtgtgagacttatttgaattttatgcggtgttggttgaaatgtgggttaggttggctacaatgctctttgaaggttatgctatgtattcagcgcaatccatggaatctaggattagtgagatggattgggatgccttgtgtgtttccctgaacacaaggtttggtagggaccaacataatatgctcatcaggcaatttatcacattcatcaaataggtacaacaactaaatacatagagcagtgtcaccaaatgatgcaccaattggtagcccatgaaaaccttatggcttcaactatgattatagctagatgtgttgatgggttaaacaatgagatgaaaaatgttgtaattattcaacacccatccgatttggatattggctgctctcttgcaatgttgtaggag

SEQ ID NO: 19436 - DNA, 692 bp, Zea Mays
gtaaagacctcgcacactccctcagctcgcccctgccccacattcgcgctcccccgacctcgcattcacccagtcgcagcgccgcttcccctcgttgtcgcttcgtcgttctgtcgtcgccgctggacttctgtcagcgctttggccacggtgagcttcgcctaagcttggcgcatcgggaacccgcggtggtttcccctttcctcaactcctctgcccgctccgccctctacctcttccctacgcaggttggagttcgccgccgccgcgatccttcgacgtccggtcaaccaaaacctccctgcgccgcgccaagcagccccaagcgtcgtctcagggtaagtgaccctccctcgtccctattttgcgccaaattcgcttcaccatgatgaatttcgtctcgccggagccccccatcatcggaccgccgcttcctcatggcgtttggccactgcaacccctcctcgagcctaaatttaggcctagagcatccctacccactccccgaaacatatgttggccgtagagcgccggattaaccctcaccttggcgggtattgctcgccggagcagccctaggttcacccgagggtccccctcccccatctgcccgtgttcacgccaccctggtctcgccttagtgttcgtcgagacctccccaacctctatgaaatcccaaaccgacccctagc

SEQ ID NO: 19437 - DNA, 278 bp, Zea Mays
gctagatttggttcaaatgggtagcatcggcgaatgctagcgagtagggaaggtcgctgtgggagcggttgagcaagagggagagacggcggtgagaggcctaggccctagggcaatggggagggcgcgagcggcggtggagctgagaggcgatggtgaggggaagggagtggttgctgctgggcatgaaaggcatggggaagaagggacgacgcgcgaaaggcacaaagaaaaggcccacctagcagagtccttacgaccggggtgggtagaactag

SEQ ID NO: 19438 - DNA, 477 bp, Zea Mays
ctctccctttccttttggttctggtgagagttctaaactcgtggtccctagttcacctctatttaccgtaccttttgtgaacctaagtacccctcgtctaagagattctatccaaaacggagagatcgagatcgatctttctctatgctgatctattcctttattttagaggtcaagaaagggcagagtaatacatggctgagtaatacatggttgtgggtcataggctcaactatttatatcttgtcttagatgtggagttatactcgtgcacaccttggacatgccatagtgttgagctcgtcatggtaaaaggatagatacatcatatcagagtgacaagtattggataccatgccgacgggtacaacatagttggtaaacgacatagttgcttgcactttaactcccactcttggccaagtcttcagtgtacccgctcgtgcacaccagactaaattatgctcggctgaaaaa

SEQ ID NO: 19439 - DNA, 341 bp, Zea Mays
gagggggtggccatggacacagctaaggtggtagccatctccacatggccgacgccgagctcagccaggggcctacgcggcttcctgggccttgcgggctactaccgcaaattcatccgcgacttcggcacgattgcagcaccactcacgcatgtcctgcatcgagacgcgttcacgtgggatgaggcaatagcagcattccaagcgctcaagaccgccctcacctccggacctgtgctccaaatgccggacttcgacaagtgcttcacagtcgactatgatgcctctggtgtggggttcggcgccgtacttcaccaaggcgtgggacctctcgctttctt

SEQ ID NO: 19440 - DNA, 705 bp, Zea Mays
ctctcacccattcatcggcttctaaaggttcttctgctttgatgaagagcgggggtcgagtcttagagaattccaaataagtagtatcacgcggtccttgtgggggaactctacctccatgcggttggaactgattgcccgccatttcaagcaagaagcacgaatcagtagtggcattgaccagggcagcgatagcctcggccaaagttggtggtgctggtagcgggttgggagtatcctccccgcaccatcatgtgcgcgagtccgtgatggcatctgaggcaaagaaacatttggaaaaaaatataacatgccaacatacaccatcatattacattaccaaaatgcaataattatacagacccccatgtacaacttgacttcattacttattttacataagtataatatctaaactatactattctagtcttcttcatcctttgttgctccatttctactattctagtcttcttcatcctttgttgctccatgtcctgtggcaggagaccgttcgtcagtaaggttcatggaaggagggggcctaaaaaggtccagctccccatcaggtccttcatttgctgttcctgatggtccggctcccattgcagcaacatctggaggcacgtccgggtgcagtcgtgcatacaatacatgcacttcttcatgtaaagtattacagtacacttgtaggctttcgaggga

SEQ ID NO: 19441 - DNA, 649 bp, Zea Mays
ggaatttttggggaagcattcaccagtaaaatagtagaattttggttagactcatgcgctaggggggtcgggggttgacgtgtgaacgagttgggccgtgattcttgatccggcccactagttcccctaaccctagccgcccctcccttaatcccttgggatttttttagccaccccctcccctttctcttgtgcagccgcccctctctctctaggtttggaggacgcccctctcactcctccacccatttgcagccgccaccccacctcccccatcaaaccctagccgccccctcctcaagcccttctctccaaggtgccattcctttcccgctcggatctacgtcgcgttggtgcatgtctccaattggattttggtggagggaagaagggaggaaagggggaggattcaaggtgattttgagattgtatcttgtttacttgtgttgtaatccaaatgattatatgtttacctatccggatcggtagaggtgctgtcctgaaattttgtgggtgggcgaacagcagtagttctagggatttctgggaatttttcgtgggtaattagtggggaccagtgggtgaatcatgtagagctttgtcatacctttccaacgggtacttatgcgctcgattcggagttataatt

SEQ ID NO: 19442 - DNA, 658 bp, Zea Mays
gggcagcaggggcagcactggaactccctgcctcgtgatcatgtgagcgaggaggcataggaggcagtggcgggatcccaaagtcatcatcataatcatcatcatcatcaacgacagttgtgccctgggtcttgaactggcggaacgcctcatcctcagcttgagtatctggcactaggaatgggtcctcatgggctggatgatatgatccaaactggaggtgtgaggcctcgagggtgccctggaactgaggtggcctaatcagctgcgtgaagatgtaatagaggtagtgcgcatacggcagctgacggcgagcacgaagcccatccaaaattgtgtcctcgatctcacagataagaaagtcaatgatgtcaaattctgagtgtgagatcaaggcaccaagtagccataactgaatatgtgtggtggcctctctgtaacccatcctgggcagcagtgtccgtctcatcacctgatatagatacttcgctgcaggggtgaagtcagctggagagcgttgcgacccatctgtgaaaggaggtctaaacagggccgcgacgtgagtagtggctggtgcaactccgttgtgagggcgacgaggaggatctgatgaaccatagcacatactatgaagacgagtcgacgactttgaaaatcc

SEQ ID NO: 19443 - DNA, 404 bp, Zea Mays
cgcagtaccctatcaatgccccgtgcctataatgctgacgcaaccctcggcgacacactccacactcccccgagcccatagccgagcaccctcaccggaatttcactagagtagggagcaccgccgcccgctatcgtcgaccaaagtcgatcgctgtggtccaccttgcctagatactctccacccaaatcaaacccaccaccagcacccctaagtgtcatgaagcttcccaaggcttgagtcggagctctacttcaccggagcagcgaaatcaccctcgtcggagtcgaaggttccgccggtgagcgcggacccgcctccacatcctgcctctatccaattccttcggtagatcgcatcaccgaccttctgtgaagctcactgaccggttgaattgaactcta

SEQ ID NO: 19444 - DNA, 730 bp, Zea Mays
tgcctgaacctcgtgttctgcagctgctgccggtaggtgtggctgagcgaccacagggtccgacgggcagcatcgctgaccgaggcagcgtaggtggacagcggtatcagggactcgtgagcagacagagtcctgaatcccctgtcacctgcatccattaccctgacatggatgcgagtgatgtaatagcaagcccggggaggctcgctcactcgcctcgtctcgtacagggggcggacgtaggctcctagctcgtgcagcactgcttgcagcaggttgggaaagtgtcctgtctcgaacattgatgtgtaatattcgacaactggaccaatccccatgaagttgccctgctgggcgtagttagcttcctcgttgacgtgtccgtcttctccatcgtcttcgtcgtcgtcgtcgtcatcgccgtctctggagtcgtcggggtcatcgcctccaggtgcaggtgcttggaaggctggtgccgaagatgctgacgtcgatgacccagctgcaaaggccagggactcggccaacggggtgggggtcggcagctgctcctccgagctgtcctccaggttgatcacgttctccactcggacgggagggagattcgctggagcttcctcgactaccactgggtagaccggaatctgccggggctgaggggcgtagctggtgttgacgcgagtagtttggagggtgcgaaccatctacaagagaagtgtcaacttag

SEQ ID NO: 19445 - DNA, 281 bp, Zea Mays
gtagtgtatgtgcctcgtataaatactcaagggtggagcctgagtcaaggaacgacagccgtatcctaacaaccccgccctagatcgtaacaaaccaatgctaatttcacggcggccacaataaagaagataaacaacgtcaaggggccccactagccatcgactatttctgacaatgctcggtaactagtctagtgaggcccacacgtcagatggagaaacgaggagagcaaacacttgaatcgaccatcccagcgtgcatggcacataatcagttcccc

SEQ ID NO: 19446 - DNA, 543 bp, Zea Mays
gggggcactgatatagctctgacctccctcgtctgcatcattcatcgccgccaagccacgactcccatggctaggcccatccaactactaccccactagcccgagctcaccaggagtttcctatacctccctgaagctcatacacccgctcacctaagctctacagcatcttaaaaggcttgacaccatgctctgccagccatatgccgccagagcacgtagaccggacaccccgagtcaccatcattcaattcaagcccatggaaagttccaccaaggccctgcgaagctcccaaggcatttcctcagagctctgccacaccaaggccttcgattgaagcttgtcagcgacctccacccgcctttgcgtgttgaccagccaattctagtcacctccattgatcattgctgccactgagcccgctagacatccacgatgctccccgacttgctactgccaccggtaaggagaaaattttcactagaggaatgtgtcatcctatttccgttgaagtggagcgtgggttgagggagagaaaatcc

SEQ ID NO: 19447 - DNA, 361 bp, Zea Mays
atcccccagctgaacacgcttgtgttcaatagctagagccttgtcaagaagcctctggaacgacggaaaggtatgagccaccagtgcatactacagtggtccattaagtccctctataaagtgttccttcttcctctcatcatcaaccacttcatctggtgcatatattgatagttgaataaatccatcgtgatactcgctgactgacatgctcccctgattcagtgatagaaattccatcttctttatcttcatcagtccagcaggaatgtggtagtttctgaactgtgtagtgaactctgcccaggtaatagtatcagcagcatcatgggcagcggtgtaagaatcccaccaatcagca

SEQ ID NO: 19448 - DNA, 735 bp, Zea Mays
gaggtatgggcagagcggaaatgggagtgggaggggaagtagtggaagctggagtggtggaggtggtgggtatagcggaagtggtggatggctttggagcgacaggagctggtgaagtgggaggtggagtagacacagtggcgaaaggtgtggagggagcagtggagcgaggccgagatgcgaggcaacgaacccgataggctatctaatcacaggagatcttcagttgtcctcctcgctcagcctgctctgctgccgctgcaagtgctgcacgagcggctctgtccatacgacactttttcttgccctcttgttgctcgaggtaaacagtcttccccttgacctgcctgaaggggcaaggagggtcctcatcgtctcctccccctgacgatgagacgttctacgtccgcaccatcctgacctgactgctgcacgagtgagtgaaaagataagcagaagtagagagcagccgataggatctcaaatgaagtcatagctacctagaaatctcacgagagagagaaaagatccaggaaggataggagatgggcacacgggccggcgagatcactgaaatgacagaataggtgagcacgtattagtcacatagtcataagtatatgaaatgtgaataattacatacacagagagtgaatacacaaaaacagggcgatttggagaaacgagggtcaaatgactcaataacgacgaattatgccataggaagtttgaaat

SEQ ID NO: 19449 - DNA, 611 bp, Zea Mays
tcaagcgccaacgacacatcatcatgcactatctcaagcaagcactcgccaacgtgtgggaccagtcaacccctgtttttggggcatcgacgtcggggtgacgtaggtttgtgacccacatacctaaaaggatgcggcagatacaccatacggggtgacacaggtttgtgacaagaagcagagccacgccacgcacgaccgaaccatgggactaacccatgagacccaccacacactgttacggatatgttggcaatgcactagctacaggagatcgtaggacgagcgggtaagacggtacgccataccaagggtacaactatgcacgatcctacggagggactacacgacgaccgtgagtagttgatctccctctcgccctctctctttggtagaaaaccaatcaccagtataagattcaacccttgagctataaaagggcaagctctctttcttctcaacacacaagcgcacaagttgtaacatttctttttgcaatactacgatcaagcaattcactggactagggctctggcctgaaccagtataaaccccgcgtctccagttcaccgttcgagtcctcgcgattcaccattcggagcgagtccgcg

SEQ ID NO: 19450 - DNA, 544 bp, Zea Mays
tattagaaatagggtcaatgtgctcgaatattctattagaaaatgttctcggtactaaacgctattattatttttctgttgtttgaattcaacagtcgttatgattgcagaagtaagtgcagtgtgatggttttgaaacttcctcctatttcgcggggcatggagatcgccctaagacgagcaatcgagaacgtgcttatgctgaatcgagtagtcgcgagcatgtcgtgctgatttaagtcactaccgacttaaaccgactgctccgttggtagggtctagtggtcaccctgagttaagtaaacgtgagcatgtcacatcgccttaattcattatcgacttaagtcgattgctccgttagtagggcatagtggtcaccctgagttaagtaagtgtgagcatgtcacaccgccttatgtcattgccgactttatccgattgctccgttaatagggcatagtggtcaccttgggttaagtaagcatgagcatgtcacacctccttaagtcattgccgacttaagccgattgctccattcgcaggg

SEQ ID NO: 19451 - DNA, 436 bp, Zea Mays
catcctttttcttttcggagttgccgcaagacttttttgtgccttcggcactgttacttccgccgaagggcttaaaatttctaacattttagtttcttcagtctttggctcttcggccttatctctaccagcctttgactcagctagctcggctgaggacgccttcggcatggtagctggttcttcagccttctgcgtaggaggaaagggatcctttagtttagcagctaaagaagtctccccgccaaactcaggtaccatggctggctcgatatagcgtggccggtgggtaaggaccttcaacttcttgctcttcggcgcaggctcatctgaagtggccgaagcagcagtcttggtcaaagcagtagttttcctcttctttccccgtccccgcagcgggtagcagtagtcagggtaaacaaaaccaatggcatcg

SEQ ID NO: 19452 - DNA, 540 bp, Zea Mays
gtcgggttggttttttcgggttgggtcgggtttttgggctttgggtcgggtcggcctgtgcctccctgtttgatgtgtcgggttgggttgggtttttgggctttggttcgggtcggcccgtgcctccctgtttgacgtgtcgggttgggttaggttttggggctttgggtcgggtcggcctgtgcctccctgtttggcgtgttggtcgggtcggcctgtgcctctctgttttacgtgtcgggtcgggttttttcgggttgggaaagggaaaagggctttgggtcgggtcaggtcggcccgtgcctccctgtttgacgtgtcaggttgggtcgggttttttcgggttgggtcgggtcggatcggcccatgcctctctgtttgacgtgtcgggttggttttttcgggttgggtcgggtttttgggctttgggtcgggtcggcctgtgcctccctgtttgatgtgtcgggttgggttgggtttttgggctttggttcgggtcggcccgtgcctccctgtttgacgtgtcgggttgggtcgggt

SEQ ID NO: 19453 - DNA, 611 bp, Zea Mays
ggggcgccagccaggcacgtacacgttacaagtgtacgttttggttagctagccttttttccggtgggtgatcgtgttctatttgatttgagtttgatacagcagtggacgcgcgcgcacaccacctgtaattatcgtgcttgatctagactcccccatacatacgtgacaactaaccgacacgtacaatatagctagcgtcggcggtgttagggagtaagctaagcaactttagttgctgaagcaaccccgctgtacgtacgtgcgcgaattggtgtactcgtgaatacataagcatgccgtcacggatagctagcgtagcatgcaaaacagtgatccaccagatgatgcgttcattgacgaagcctctcaactcatcatcagtctcagctactcgatcggtctactcgtactatattacgtaccacttctaacaaaaaattgactcgacacacacaaaacgcgcgctaccgcgcagcgcgcgtcaactgcctgccgatcgagggccgatcaagtcagagtcactagcgacatagggatactagctagctagctgaagcacgaacacggacgcaccgaccatctgtcacgcgtgataaacgggacaacaa

SEQ ID NO: 19454 - DNA, 376 bp, Zea Mays
gttgaatcggcgtggctcggcgcagcggctttagcactggcggtgttgtcaggaatttcttcagtgcgtctagagcttcctaagcctctgaagtgcactggaatttgtctaccttcttgagcaacttatagaacggtaagcctttttctcccagccttgatatgaacctgcttagggctaccatgcatccggtaagtctttgtactttcttctgtgatcgtggtgcttctattctcatgatagcttcgatcttttctagattggcctcaattcctcggtggctaacaataaacccgagcaattttcctgctggtactccgaagacgcatttttcaggattaagcttccatcgatatcgtcgtagactgttgaagac

SEQ ID NO: 19455 - DNA, 786 bp, Zea Mays
agaaaagcctcgcaaagatgtacgaaaatggcaacttgaagaatagagttagagtttaagtgtgtcagatttaagtcgtaaaaatcaaggagaccacggaaaaaaggagagataggaagagcaagtccgcggataagaaacgacacatagaaaacagattcatgggtgtcctctattggaatagtgactccgcgacagattccgtgacagatccgccaagaacagagttcctttggtggcaaaaccccaacctcaacaaggtggaaaatatcagattcagagataatagacatgtgattaccaacaaacggaagctggctgttgggatcgatgggtgggatgatcgcagcaatgatgctctgcctcttccgcttgggagtcattgcaatctctcggggggaacgagcgggctcagaaattcaggaaagcaaagaagcggctgaggaaaaagtgaagttagggctcggaaataaaaaaggcacgtcagcgcgagtataaatgggtttcttgggtcaggcattatctctaaagtgctagatcaccactcgtaaaagtaaaagcctcagtcgtcactcagacattacctctaaaaaaccagcactatcaagcgcatagacaaactatcaaacgcacaaatgaaaaatcaacacaatagtgattatttggagcaactgcgtccttgattcgttctggagggggtaacacaaactcgaagccaactcattaagagtcgacttcttctaccctggttactacattacattacactaccttactacttacact

SEQ ID NO: 19456 - DNA, 553 bp, Zea Mays
cctaaagtctggctgtcagtcaactcagagtctgaatttttactgacagtgacttgggatgaactttgggagctcttttgagaatgatccagtgagtatctaggtgtggttactatagcaagatcgaagttgaattatagatcaacaactttgtcacaggaggatacacaagttatcacataaaaatttgagatctgggccctaaaacttgctctgtcagacgctctgatggtgatcaccatggtacagtgaccctcgcgccgtgatctgcgctgtctccacgattcgtgctctctggtgaggagattatcacggcagggtaaaaatcttggcaccggatagactcggacccggtcgatggtgagctcgccgtacccacttgggctgcggtcgggcaaagtggtcctcgccggagttggccgcctaccgaccgtgcgccacgtgccttagggcgttaccacgtcgtagtaaaccactgaagcgtgtctggtcatcgccgatgaccttgccacggtgaaagccacgaatcctttgcgccagtgctctcccctct

SEQ ID NO: 19457 - DNA, 418 bp, Zea Mays
ttgaccagggccgcacgatctcacttctacggcctagattagatctacattatttgaactggtacgtgataagggcttttggatctagatccaacggcactgattaaactagcctaaaacaggatgcgcgtcacgatctacgccattccttccaagatcaacggacgaaatctaatcgcccacccgcggaacaaacgccgacagcggagcaaagctcccccacggcgacaccattacccaacctcgccagagttgtccggtttgccatccccgcccccattttctaattgaacatgtgcaacaactctactaggccatggcgagactggaggaggtgttctcaccggcaatcgtcgcggcgaaaaggtcggtccgcggcgaaggatgattccatggcggcgaagcacgtggacggagg

SEQ ID NO: 19458 - DNA, 1654 bp, Zea Mays
gtcacctgtgcacacgacccagccaggacatacgccgaccgctaaccatgctcctgctggtctgcctccacgacggtttgacgacttcgtctactcccggcgggctgcaccgactacctctgcagctacctctgtgtcaccaccacctccagttcgccttccctgtggggcggttcctgtctccccgatggccaatcatcatcgtatgaccaaccgcgctaagtcgggcttttgccagcccccttgtttcatgcagcaactctgtctcttgtactactgcgctcgtcgaccccaattggcgccaggctatggaggaagagttttctgtcttacttggtaatcacacatgggacctggttcctcgtccccagtctgtcaatgttgtttctggcaagtggatcttcaaacacaaatttcatgccgacgactcacttgaaaggtacaaggcaaggtgggttctccgcggtttctcacaacgtcctggtattgactttgatgaaactttcagtcctgttgtgaagccagctactgtgcgcatagtcctatccttaggtctctctcgctactggcccatccattaactcgacgtcaagaacgctttcttacatgggactttgtcttagacagtttactcctcacagtcgtctggttttgctgatgctgctcatccggattttgtgtgccgtttgaatcgttccttatatggtcttaagcaagcacctcgagtctggtacagttggtttgcctcctttctgctctctcttgggtttgttgaagctaagtctgacgtctctttagttgtttaccgccgtggagatgatatggtgtgcctactgctatatgttgatgacattgttctgacagcttctaccgaggttctttttcgtcgcatcatcagttcatcacctcacttcaacaggaattctctatgaaggaccttggcaaacttcaccatttcttggggatgcaggtccaacacacgacaactggtttgtttttgtctcaacgtcagtacatgattgacatccttgaccgcgctggcatggctgaatgcaagccctgctccaccccagttgatgtcaatcccaagctgtctggcactattggcaatccagtggctgatcctacagattttcgcagccttgcaggggccctccagtatctcactttcacacggcctgacatctcttatgcagtctagcagatctgccttcatatgcacgaccccctgagcctcaccttgctgctctaaagcgcattctttgttacgtgcgcgacactcttcaccttggtttgttacttcggccttccgcacagattgaactgctggtctacttagatgctgattgggttggttatcctgatacccctaggtctacctcagactttgatgtatttttgggtgaatagtctcatctcctggtcctccaagcgttagaacactgtctcctgctccagcgtcgagcctgaataccaagctgttgcaaatgccgttgctgaagtcatctggctgcgtcagttactacaagaacttcatgtccccctgcaccgcaccgccttggtttattgtgacaacatcagtgctgactacatgtcctccaaccccgtctagcatcaacacaccaaacatatcaagattgatcttcactttgtt

SEQ ID NO: 19459 - DNA, 424 bp, Zea Mays
agccttccaaccgggcagccggttagctatcttgtcaacccactgcaaaaggtccctcctccccaacttcttatcagaaacaggcagccccaaatagttgcatggaaaagaagccgggttgcactgcaaaatgttacaactgtcctgaacagtctgatcatcacaactgagggatagcacaactttttcgcaaattcacaactaagcccgaggcctctccaaagcaatccaggatcattttgacacaaataagatcgtcaactgcagtcttgacaaaaagaaccacatcatctgcgtaaatcgagagcctagatttcacatttctgatggccaggtcatgcagcaatcctctttccttagcatgcttgaataagctactaagcacatccatcacgattatgaaaagcataggagataaggggtc

SEQ ID NO: 19460 - DNA, 1518 bp, Zea Mays
caaaagagtcacatttgaactcttttgactaagtctaatttcagtatgttgggctcaactttggagccctgtatcttttgaaatatagggtttttgcccaaagtgatcacaacaagtttgtagcccaattataggagaacaactttgtttaaggattcaagccatgttcttatgaaaaatgtggagaaaatctcaacccaagttggactatcaggctggttctgtctgaacatcagactaacagattcatgccctgaacttcaagcccaatttcaaaccagatgcagtggctttttggggcaacatcatatggcaatattgtagatggcatattgctctacaactttgctgcagagcttggtatgagttatcatcagaaatcaagagaaaacttggcttgaaatttggctgtcaggttcatttaactgaactcctgatggtacagtgcccaccggatcagaccgccagcgcggctgtcttcaccgccgacgaccgatcttcgccgtgattcgcgccaccaccgtgtgattcacgtcgccgatgacccgataagaccgccaggtaaaagccaacccctggggataactccggtgactcactgtgactgcctttctgctttgcggctgtagccgataagctcaccgtcgaccgccgcctctcggccgtgtgccgcgtggctcaactctcccaccgtgtcgccgtgacccgctactgctgtcaaatcggcgccggtgagcttgccacggcgttagccacgaattcaccgcaccgccttcttcctcatctctggccgccagcacggctcggctaaattgatcgccaccgcccgctagctctataaattgacctcgcccgtagctgcgccatgtatttgtgaagctgtagcacccgctcccaccctcgatcgtccaccagcacgcccgaattgcgcattctccccaattcggttctaaaacaccgtgaactcaaccccgccgtggtcagccatactccggttagctcctcccctctgctcccttgtttaagcattcttacgcgtctacgatgcttgccgagccactgaattgaactaagagccctctggtcgccgggaacacgatcgtatagccgctatgatcacggccaccgtggctagagctacgtagttggtcttagttgcaattaggttgggggaaatggtcaggctagccccgatttcatgtctgccgctcggagaacccagccgttgccccgttcggccggtacaggtgctcgccggagcacggccacgcgtgaacggcgtcggggactttaaactcagaatagatagaagaggaaggacttttatgcaaacgtcagtgactgtgttaaatagtgaaagggctcgttcgctgtttgacaaaaacgcgagggcctctgtgcaagtccgccagcgcgcgcgggcgcacgcgggcgctttctccctctgtgctgggctactgggctgaaagcagcccagtactattcatcaatttttctttttcttttatctccagagcc

SEQ ID NO: 19461 - DNA, 534 bp, Zea Mays
cacgggcatagccaagaggccttcaccagcatctgagggcagcaccgggttgacctccgtagcctcgggcggcgcggccagagctccgaagtcctcgacgtcctcagcacgctccatctacagcaacatcagtcactcagcaaaaaccacgcatacccacacacactaccacacaaaaaatgaccctcacctgctctttcgcctggtcggatcgctccctgaccgcctcccgaccatacggaccccacatcctatcgaaaagtgcccctgctgactgcttcaccatagggtcgtcggccttgaagatctcacgttcaaagttcttgtctgattggtcgaagacctcgtagtgcctgcagccctcgcgggacaacgcattcatggccccctcacaggtgataagggaggcaaatgacatgaaaccctccacaatggtcgggagcaccagcagctcctcctgcatacattcgaggaagcgaaggcctgcttcctggtcgggtacatcgaagtcagcgatccgctcacccagcttgt

SEQ ID NO: 19462 - DNA, 525 bp, Zea Mays
attaagcaaagtcatgttgacgctatgagaggaagatactttcgtgacatgtctattgtgagggttggaggagacagcaccgcccctagtcctgaggaaaatgaagttgttgtttaccgaagctttttgaaggcaggccttcggttcccgttaagcaaatttgcggtttaagtgttgaagatattccagatctttcttcatcagattactcccgaagctataattaggatggggatgtttgtttgggctataagaagccaagggctgtagccgagcacaaattgcttctgcaacatgcacgagcttttgtacgacacgaaggctactggcaaaaaacaatatcacaacaacttcggttgttatggatttattgctcgtcccaatgcaagctatccagttctaacatttcagaagaggtggtccggaacctggatggaggaatgttttatgttgaaggacatcaaggaaattatccagcgccccatctagtctcacttcggccttcgaaggccgaaggtgacgatc

SEQ ID NO: 19463 - DNA, 776 bp, Zea Mays
tgaagagtgaagttagttgtgaagaaggggagcaccacgtcgtcgttagtaaaaccatctgcacagtctcgtttggtgttagaagcaatggcagtggaagcaaagcagggtgaagtgagatgggaaaagatgatgaacacagtagagacattgatggaaaaggtggaagttatagacaaggttcgtcatcagttgttgggacaatctgaattaacggctgaactagtgaagcaggtggcggatgaaaggacgattctgtctaggagggtggaggagaatgggaaggccttagcgaagatgagattggaagccatggcccgggagatggagaattttggggagaggccagaatcatcagagttggggaaggggcttgatggccaaactcacaggcaacgcagagaaagaggggagtcatcaggaggtgaaaatggaaactatgaatcaggagctggtggaagggagttgcaatcacaccttcccaagtttctgtttccaaagtttggtggggaggatcccgcgctatgggtgatcaggtgtgaggactattttcgtatgtaccaggtgcctaagtgcatgagggttctttcagcttccatgcacatggaaggaaatgctgctagatggatgcaaattcaaaggctaaaaggggatttgggaaattggacgcacttctcgaagactgtgattgacaagtttgggatagatgagtttccccgagtcatgaacagattattgtatttacagcagaagggaagtgtggaggactatgttca

SEQ ID NO: 19464 - DNA, 359 bp, Zea Mays
tggaccagcagttttcatgtgtatggctttgacacgtctgcaagtgtcacacttagccacatagcgtgcaatttcaattttcatcttcgtccaccagtagtgctgttttaaatcatgatacatcttaatgcttcccggatgaatagaatagcgactaagatgcgcttcatctaagatttgctggcggagttcttcatttttcggcactactatgcggtcattgaaccatatcacaccttgatcgtcttctttgaaacatttggttgttccagcccttatcttttcctgtatgtgcttcatacccacattatccttttgagcatcaattatcctttgcaaaatgattgactcaagcttta

SEQ ID NO: 19465 - DNA, 492 bp, Zea Mays
aaaggcttccaggtttgcgcacttgacaacaaagtagttgcggcttggtttgtggactacggtggtcagtggaggcgcgggcatgagctagctcgcgtcgaccatggttgtcggcgtcgggtggaagaagagatgaggcggcgagtgagagcgagacgagagtagagggagggagtgaggcatggtagagtgcttgaccaaatgaagccaagtgcggctgctgtgctttcccacacgcggggatgcgcacaccaggacaggcaatccacgcgtccacgcgagcaacacctatcgattgccatctgcccgagttgcagacacagtagggacaaaacaggaccacaaaacgttgtccagctccaccagtctgctctcctctctaccggctacagctttgctatagggattagggtggtttagctgttagattttgaattacaggcccccaaactttggtttgttagcactgcgcaaaacagtgttaactggttg

SEQ ID NO: 19466 - DNA, 746 bp, Zea Mays
ctggtactctcttttccaccgctactacatcgccatctactgcgccaccgcacgccgcgcggatggatatagctgccaccgcggaatccacacctcggggtcaatctggtgtcctgcgatgcatctagcgttttggccgagttcagtgtttgacgctacggaagaattggatcgggtgaaccagtggtgacgagttaatttctcgccggagccaccagtccactgtgaatccgcggagcgccgtggaaagccaaaggatcgactggaaccattgtaagaaccccctatccggacccatcaccttctcaatttcgtttagcgttccgtaccctagagaaccatgtaccgttggggtttgcggggtcgtcggccatggagtgccgtcgtatggccctgctcggccaccggagtttggcttgtgtaggaggctgggttatccaccgtcggtttgggaatgaacgggtatgattgagtctggcacatcacttgggcagtttgatctcgactgtgggttatcgatccatcggttccctgggagatctggtttccgtcgtcgatctggggatcgacggtctcggttcaagcacggcagtcatcctagtgtgttaatcgggaccctagatttctaatcgggcggccaagagcccttcataccgtttcagctgagctatttgcgttatagtcctcggagtttcatggaaataacccgccgtccatcgccgctattcactgtgtcttaggaattt

SEQ ID NO: 19467 - DNA, 603 bp, Zea Mays
gagaaatccccgctggacgagccgccttcgtaattccgccgctaccgccagtaaaaccttgggcaaaggagtcggaaaggtgcgcaggttggggaattgccggttcatcgcttgtgcggctctggggcgggccacttctctgcaatcgttcatcggaacgccgctcgatctcaggatccgccacacgccgcagctgccgtcaccgtgtcgtgatcactggtatgggccccctgtgtatttgtcgtattccattatgcgtttagcacgtttcgatttggtcgttgggcgtttggtgcgacgatggccttagctcgggtagaactccaccgcggtggtcgtttcccccgccggccgcggcctggaggtaggagaagctctctgggccgtgggttggccgatgaacggatgagatttgatcgtgttcgatggtgatccagtgcgtccgctcgagatcgtgcggctgtgaattgagttggttccataaaatcgggacggtaggatagggatctaatggcctggatggcattccagttcaagcggggaagatttaatctgtacccttgtttcctgatcggatggccagtactcgtccgtaccccttcg

SEQ ID NO: 19468 - DNA, 1311 bp, Zea Mays
ccttcacaatagccggagaacacttggatgtaacgagaccaagtctgtccaccatcagcctattaatgaaactggctgagcttcctgaatccatcaataccaacatcacctgattgtggacaagggccctgactcccatacaatcgtcagacacagccccactgatagcatgtaaagagagccgaaattcctcctcctccacttgctcctctttctcaatatggctcagtgtttcatcagacagcatcattcccagctcctcagtagtcagagcatttagttgcatctgaattttttttgggcatctagactggtggcctggttcatacttctccccacacgagaaacacaaaccattttgccgtctatattccttgaccaacctctccttggataactctattgctggggcttgtggtctgccttctgtccttccaactggaccattgaattttggttgagatactatctttagagatttttgtcgctgcttttctaaaatcttctgttgtatctatgccaacctagcagctcaatccacgatcgtgggcatatgcgactgaactgaaccctgcagttcttgtttcaaccccttgataaaatgcgccacaaacaatgtttcatccaagccttggttatgcaccacagttgcatacctcacctcatcgaactccttcagatattcctccaccgaccccttctggtaaaccgtcatcaggttgttcatcgcctgcgaatattcatccgccccaaacttcttcatcacagcatccacaaactcctcccacgttactaatccatactgcaacttaaaaatctaaaaccatcgtgaagcatttccctccatatgcagtgaggctgatgttacccagacagcttcagggactcgatacatcgcgaaataatcagcacacttcctcaaccaaatcttcggctccaatccatcaaacctagggaaggtccacttcggtatagatactggtggatactcccccgcatctccgccaccattcccacctccccgatcgcgaacaggagaataaccgcgataccttcgattggcgttcggctcgtgatgtcaaggttccccgcgagctcgctcctccatcaccgattctgaaccttccatgttccgcgccatccactcgagtcggatctcggccacctctcgtcctgtcttctccacttgctgcgccaaatggacccgctcttctgccgccttctgagccacagccgccgccaattccgactgcatcattagcttctgttgtacctcctccactccaacgaccttctccgtcagccgatcga

SEQ ID NO: 19469 - DNA, 378 bp, Zea Mays
cccaatacctccacgcaccatgattccatttgggttgttgtggacagattgaccaagaccgctcatttcttaccagtgcataccacccacaagacagagaaatatgcagaaatttatgttgatcaaatagtgcggttgcatggtattccaaagaccattgtatctgacagaggagcactttttgtggcacgcttttgggagcagttacaagaatcacttgggacccaggtaatacgaagctcatcataccaccctcaaacagatggccagacagaaagggtaaaccagattttggaagacatgttgcgagcatgtgtgctacactacggaaaagattgggacaagtgtctttctttggcagagttttcttataataac

SEQ ID NO: 19470 - DNA, 659 bp, Zea Mays
cggctgtacacggggacgaccatgaaggggtacaacgtactctacatcgactacgccgcgacttccacttccccgccatgcgccgggtggtgcaagacttcgtccgcggctgtgcaacctgccagcacaacaaatcagatcatctccatccggcgggactgctgctgcccctgcccattccacaggccgtgtggaccgacatcggcatggacttcatcgaagctttgccccgggtggggggcaagtcggtgatcctcaccgtggtggaccgtttcagcaaatattgccatttcattccgctggctcacccctacagcgccgagtctgtggcacaagcgttcttcaaagagattgttcgcctccatgggatgcctcaatccatggtgtcggacagggattccgtgttcacttcaacattctggcgggagttgatgaggctctcaggggccaaactacatatgacgtcagccttccacccacagtcggacggccaaacagaggctgccaacaaaatcatcgtcatgtaccttcggtgcttcacaggggaccggcccaagcagtggctgcgttggctgccatgggcggagtacatctacaacacggcgtaccaatcatcgctccgggacacccccttcaaggtagtgtatggaagggacccc

SEQ ID NO: 19471 - DNA, 500 bp, Zea Mays
ctttaagatacaaattcaacctgattagccctggtcctgctgatagttagctagggtaagtgcgatacagtggtagggagacaggtagcttattttcaagacagttgattttatctccaaattagtatcattaattgtctgtctggtgtttatttaaaagttagtattgattaaatactggatctatggctgcaagtcttgcggaaagttatacatttgaaagtgatgtattgtagcattttatcatttgttatgatgtcagaaagtgaactacatcagctttattcaaaaagaaattgttaaccttgaaagctaaattgtaatatgggacgggagaaaagaccaaatctgagctctataatccttgcttcatggtggtggattgttttggcaagatttccggagtcgatcttgtttaagttttcccccttctgggcttaagtcaggaggttatctgacatccgccaaatgtttttacatgttttattagttcatggtct

SEQ ID NO: 19472 - DNA, 647 bp, Zea Mays
cgccgaacaggtcggccggatgcagtagccccgcgcccccggcgggggcatcaaaccgtcagtgctcccaaatcgtcgtctagctagggcgaccgcaacgcaacggttgttggagtagcaaacttggttttaaggtggagggaaaaattggctgggctgaaagcagaaagccttgtaatgtacatgaaagaaacggaacggatggcgcgctacaatctgagctcgccattgccgcatatatctgctttaagagagcattgcgctgccttgcctaatcgaaacgaaacgacacgaaatgttgcctgcaagtttttgaacgtgtgggtgagtaaatcgcacggttgggtaccagtactgcgaggaaataataatgcagccagccagtcagtgcaaatccggcgccttccattttccaacgaacccaccacatcccgcaagccgacgacgatctagatcgcagcaccaacgcattttggcgccgagttgctgtcgcgtgacacacatcttggcagcagcaccaacgccggcactcctcctccaaatccggcgccagaacaaccgtacttccacgcggcggcaagcatctataggtgccgtgccgagctccatttgacaggtgagtggacaggagacatcgagtagacgcg

SEQ ID NO: 19473 - DNA, 809 bp, Zea Mays
agctatgtcatggcttgatgggggaagatcaacaggaacaatttgaagggcattgtcaggggtgatctcagccccgtcagcagatatcagacttctcacatctatcttgccgacctctaaggcgacttgtttgttcaaagttgtggaagcatgcaccgccgtcgccccatcggaccgaggtggagacgacccaacatggacgtccatggaggtgtgggaaggaaagcccacctaaacaccctcgggggctgggttgcaacttgcactacccaccagagccggatcactatcggcaacaccctcgggggctgggtaactgccagcaccaccctcgagggctgggtcttctgcagtagccacctctaaggctgagggctcctctatcacctccatgggagttgggcgactcggaccagcatcttggcattgaagactaccctccaaagtcgacgatgcacgagacactgctcgggatacctccagtccaacgtctagaacctctgaacaaacagccatcacgtcatcggcagttggctctgacagcatatcctcagggacgacttcctcaagggcttgatcaaaatctgatattgacagtccttgaagactgacaagagccgatagagctggagaaggaatatcactcccccctcgctacctctataatgccggctgttcttatgaatcaacgagacttcttcttcttcttcttcttcatcttcatcaaatatacagacatcagcttgtgcacgatcacaacccttggcatacacctcaggaaggacctctgctggcacttcatcacgaac

SEQ ID NO: 19474 - DNA, 1163 bp, Zea Mays
cttgcttcttcaaactcttgagcgtactcttcaactccattcttctgatacaggttcagaagatgtctcatggccttgggatattcttccactccaaatttggccctaacagctctgccaaactgcatccagtttcccagtccttgcctcatcttgtacacttgaagccacctcgctgcattcccctccatgtgcatggatgctgatattgcccacaaagcttcaggaacctgataaatggtgaagtagtcttggcacttggccaaccatattccacgttccttcccttgaaatctgggaaacgaatatttgggcaaagatggatgtcctcgccctcccatcacttgatcttcttcttctcttactctctcctgttgtggttctcttcttcttcggatttgatcaccttgattagcaccctcccttgatgatccagcaccatcgccctccaagtccttcgccatcatctccaaacgcaactgcgccaccaccttgcctgtctcctccatttgccttgccaatatagtacgctcttcttctgccttccttgccactgtagctgagagctcgacttgtccttccagccgatgctgtctagcttccaccgtatccaacttcttcaccactcgatccatcatcttcatcatctgttcccacttctcctctcccttctgctccacagtcgccatagcctccagcacgagacgcgtctggacagacggtttcaccaccggcgctgtcttgacagctctgaagtcgaccgtcctctgataccaaattgtcacgacccgtggcctagggttcgccaaaccctagacgtgagccgcgacagcaggaaccgacagctttcctagtaagcttcggtggcgaggaagaagaagtagacaggtttgtggctaatcctttcttattcaattcgtcatctctgacggtttatcagtacaagtatttataggccattagatgggccagattacaatcaaagaaaagccacacaatggcccagattaaccctaatgcttctagaacctcatagatctccagatctactactacaccgaactcacctctgcttcagtcattacacatgcatggtaaccaaacagtacatgctctctattaaatacatacagtaataaccaatagaaaatacaacacttttt

SEQ ID NO: 19475 - DNA, 442 bp, Zea Mays
agaagatggtgtttccatgcagagctcgactgggttgagttcttaggctccaaaccacataaggtaactctctgatccacttccctgcgaacttttcattcttgtcgaagactttcttcttgagtgcttccagtatcatttcattagccctttccacctgaccattggctcttgggtgtgctaccgatgcatatttgatctggatgcttcgttgttcgcagaaatcaaagaattcaaagctagtgaaattggatcctaggtcggttatgatgctattcggtatcccaaacctgaatattatatcttttatgaattacactgccttggctgaagttagagaagcaatgggtttgtattctatccatttgttgaatttatcaatggcgaccaacacgtgagtatagcctccctgagctttcttgaagggtccaatcatgtccag

SEQ ID NO: 19476 - DNA, 816 bp, Zea Mays
tttgcaaaaaggacaccccatacatccctatgcctaagtctgaaaaccagtgcatagagccaactttggaaccctgtatctttcagttcatgagaaatttgcctagggtcaacacatcaaacttgtagagctactataggagtacaacttttcttaagtgattaagccttggtgtcatgtaaaatttggagataattaggtctaaagtcaagctgacagtcagccaatgaactgaataaggggtaacattgaagttgggaaagctttgagattggattcgaccatgatgcagtaattgtttgactatggttgctatagcaagattgtagctggatcatacggctacaactttgatacagagagatggtcgagtcactacatgaatttgggaacaaatctccctgcaaattgctctgttaggctgactaaataagaatctgatggtacagtaaacaaagatcttctgttcagcccccctcgtcgccggtgacctttgcgcccggattcgcgccgaccgtcgcgattcgtgcctcgggcgagtggattacgctcgacggtaaaaagatctcgtcgcggatgaacacaagacattgtagccgctctgtctcttgcccacctgcgccggcgacttagccgcacagccattgccgcggctatcaccgttctccttgggtatgccacgctgtggctcgttactgtgtggtagtaaccgtggcacacttaggatcacaatcgttgagtcgttgcaccggtgaacgccacgattaaagccaccagtgttcttcttcctctccggtcgccagcacactatgtcca

SEQ ID NO: 19477 - DNA, 348 bp, Zea Mays
tgtcgctgggcacatagaccatccagtactgtgtcctcgatctcacaaataaggaagtccacaacatcaaactctgagtgagagaccagggcaccaaggagccagagctggatatgagtggcagcctccctgtaacccatccgtggcagaagcgtctgtctcatgagctgatagagaaacttggccgctgtagtgaagtctgccggaaaacgtcgtgacccatctgagaagggcgaccggaacagagccgtgacgtgagctgtaccaggagcaacttcgccgtgagggcgacgaggaggatcagaggtgccgtagcacaagctgtgaagacgagtcgatgactcgttg

SEQ ID NO: 19478 - DNA, 406 bp, Zea Mays
tgcgtggttcggggtagatattaccagggaagatgaaaagatcgcaggggcgttgaattgaagctcggtacggctatgtacacttgcaggcgacgtggccaagcgctcgtcaccgtgggggttgtcggtttcctcggttgcaccacaccatggacaaattcaccatggtgtcgagagtcgtggcgagtagatagttactaaccgaagccattgtctcaccgcgtgccacgacgagtgagtctcggtggaaattcgcgaagcacatgatcggctcctataaattgagtactcccctcgctccgcccttcgcgaacccagtccaccctcagccgaccctctcgtccaccgtagctcgagttcatcggattccctgaaattagtcaccatcgccgccgtgagaagcctc

SEQ ID NO: 19479 - DNA, 1128 bp, Zea Mays
aactactggtgctctaattcgactgagaactaatctagcccttaacaagtgtttcccccgcttaattgctggattggagttctacatcaccctgtccacggtgacagcgggcacaacagacatcatgaagtgttcctggtgatctaaggggtcctagcctaattagcggggtcggggagcatcagggacacacaaggacactgaaacaaaagagcagagggcatgaacggacctagagtaggatgaccacgacgaggttgtaatttgcgggacttcggaccgaattgggggaaactacaattggggcttgctggtgagtaattgggggcacgacttggtggatcagtgcttgattatcctacggacccgtcggtgtgctcaatttatagtgtgcttgagcggtggtgcttaatttggacgaattgcgctggcggccgagaggggaatgagtcacggtggcgatctaccgtgccaattgcagagcaactgaactacgacggtcactagatggtcactacggctcataccgacgcgttaaacttcctaaggcatgtcaccctcacagtgaatggcgaacacgccggtgttagccgctcggccacgtcgccagtgcgaatgaccgagggacaacgcggccatagtgtcccggacctatctgtggcgtgatcttttcaccggcgagctcaatccacagaccaaaagcacgaatcgtggcgagcagcaccaatcacggcgaagggtcaccggcggcgagatactctgagctggcgatctgatcagtatactgtaccatcgcgcaaccaattcagttagtctgacagagcatacttggggtcaatttgcttcagattttatgtagtgactggatcaactctctgtttcaaagatatatcctaataaaccagctctaactttgttacagtgtgtacccacaaaaagtcacagaatcttacttaaaattgagctctaagttcatccaatctcactgtcaccaaaatttctcatggcaccaaggcataatccctatagcaaagttgttctcctatagtagctctacaactttgctatattgactttgagcaaaaacttcaaaaatcctgagatacaggactccaaggtcagcctcaa

SEQ ID NO: 19480 - DNA, 303 bp, Zea Mays
actttaaacctcctcattccacgaagtggtgacaccttgaggtacacatgatctccttcctcaaattccagtagtcttctcctattattagcgtagctcttttgcctggtctgagctaccctcaaattccctcgaattatacggactagttcttctgcctcttgaataagttcgggtccaaagaactgtctttctctagtctgatccaatatagatcgaggagtcctgcatttcctgccatatagagcctcgaacggtgacatcttcagactggcctggtaactattattatatgagaagtca

SEQ ID NO: 19481 - DNA, 835 bp, Zea Mays
gcaacattgtagatggtacattattctacaattttgctacagagcttgacatggactaccattaggaattgagagaaaattgggctccaaacttgactgtcaggctgtctgaaacgagctcgccatggtacagtgcctggggggaaataaaaatcagaatgccagctcagacgctcgtcgccggcgataagaacgccaccgcagcgtgggatggtcgtcggtggccgcggtaatatcctcggcgtcgtggcagaaggtcactgaggtggcaggccccggttaaacggcgacccccgtgccatcaccggaatccgccgcgcggaaagcttgccagcacatctgaaatccgcacttcttctccaactccggtcgacaacctataaattgagccctggcgctgcttcttcaccacatcgcaagcacgagtgcctgtgtaattgacttattttaactggaaagcttacacagtccgcaaattcctgttctctatgttcttaactccgtcgcgaagaacccctccgtggctagcattcctcgggttagtacttacccaattgcttcatgttcttgctttttgttagcctcctattgctctcagtgccaaccaatcgaaattcggccgaagcctttcaccggaacacacacctgctctgtaaagcgccgccgtgacaccctctccggagccccgcgtttctattcgtgcccagtccaaaatttagtatgtgtgtcacctctggtaggcctatgaagctttcccaagcttcaatttggtcgttcacgctgtcggttggtcggaacgcttccatccgtatgaccatccgccctgtcaccgtgg

SEQ ID NO: 19482 - DNA, 451 bp, Zea Mays
cccggggtgagccaatgtcgcgcgatcggttgttgctggcgaccctcccttccgccacctatttaagtcgcgaccgaagccttttctttccactccttcttgctcctcacgaccgccaccatagaaagaccacgggtgctcactggtgtggtgaccgcgtggaagtgtgaggggggagcgccgcggattgtggtgtagcaccatcacatcggcgggggcgcataccttaggagcatcgcaagatcacactgaacgtgttcgtcgcggtggcgggctccgacggtggaggtataagtgtggatggctcgctggagtttgacaagtgctcccgtccgccccacgtctgggtctgtgtacacgtcgtcgcgattcctggtacgaatccctcccatggcttcgtgttgatgcccgctttgtatagatgtgtcccacatcgagaatcagtcgccgg

SEQ ID NO: 19483 - DNA, 466 bp, Zea Mays
ggttgtgaaagatttttagtctcgacgagagatcgtctaatgtgacggctttggtcccctctacctactgccccttcccgcatctgctctccttgtatcctggtactaacattttagtcatgttggccacaagattttgtccaaactaaggcatgctaatcacactttgtgtcatgtttgacagttggatctccataggcgtcttaccttttatgcatccttatcacacaccagccacagtttttggctaaattattatcaggccattcttgatgatttttggtattacctttggacgttccctatgactgaaatctaacatattttccaccttgccttatttcttttcctatgtcgacacataactcgttcccattcaaggcatctagtgcgatgatggccatgaattcaacaaccatagcgctcatactttcttccactcccacaacattcaactttgtatttc

SEQ ID NO: 19484 - DNA, 395 bp, Zea Mays
cggtagcaccagcccgctagggaggacaaaaggcatgaactctctagcggaaagctcatcgaggtggatgacgccggcgcaaatccttccgccgagcgccggcacattccatccaaacaggcggtatagcatttcgagcacccgcttagtctgggcgcgctcaagatgaagtcacaaggccatggcgaactacggtaatgtgaagcagagaccttgaaggcaaaggggcgcaaagagctcggaggcgaaaggacgccacgagtgggggagaagcaaggcatggctgctactcgagggatgaacccctctttaaaggcagactcccctgctcgaagcgttgtgagaagcctcccccgatgcccaccggggtatccatcccatgacacgggggcccg

SEQ ID NO: 19485 - DNA, 484 bp, Zea Mays
gtacaatgctagctcgggcgcgtcttgttcaaactgctacgtgtacgtgacatacttactgactgtgtatttttgctcttgtttccaatcttcgcaactaccagcaactgcaaaaaaaaaagtaccgtactaggagtactagctaactgtccactccacaaacgaccgaacaaaaggcctctgcaagtttctaattcacggggatggtttcagtcctctgctccgaagctggggggatggattcctggtaggcgtcgaagctcctaaagtactgggacgctgcacgcggttttagttctggtgttctgctcctgtcatcctgtgattcagacccctctacatcctaatgcggattaggtcaggggcttcgggacggagaggagaggcgatgggagggcggataagagtagtagaacccaatttgaagtacgcaaacatatggaccccattcttgaccggtgggaaaagcacggcccaacaaccc

SEQ ID NO: 19486 - DNA, 764 bp, Zea Mays
gagttcctagcctagtctcgcttggatgggatgttcgtgctgtcctctaatcaggatcttcctttgtgctattgggatagtcgctccaaaatccgaatccatagtcacggtgttcctcttttttggatcggtatagctgcttctacatcctaacccatgcagtttgttgtgaacttgggattcatgtgccacggggggtttgttgcagccccatcgccactgctgcagtgttgctacgagttaagtagtgggttgtgcccctgtaggggtagatggtattgacgatcgattgattagcaccagttccatatgatgtctttcttgcttcctgcaagtcgtttctgtacctttaagttaggctagatgtagtccgtctcacacccaagtgggattttctgaccagattgtccctgaacgtgtatttatgctgggatgctcccttcactcgtattccaggacacctagctgagtgtactatttaactgaacaaagcattgtttcctctattaccgttcaaaccctgatccattttgtagcatgttgacttgacattgggggaaaaagaaaaatactaggtataaaaccatggttggaagcaaaaaatccttgtcagatcattgatgcttttaaaagtaatttgactcgctaattacttgctcatcactgtgaaggaagatgaaaattatcttcagatgcaccacattttaatttgttttttcttgtttaggctaagtatggttgtaattgtttggaatgttatttgc

SEQ ID NO: 19487 - DNA, 388 bp, Zea Mays
ctttgttggagccatcgccgaggaaagcgcgtgctttcgactcatcaaggtggaggagtgccgctgcggtcggtgccactggagatagctcggtgcttgcatgtgctaggagcagagcctcctcctctgcctccgcctgtgcgacattggcctggccatgtcgtggctgtcgacagtaactggcccagtggccaagcttgccatagttgtgacagtcgtcgtctcgtgccagcttcttgttgccgacggtgctgccttgggcatctccatgggcaccaccctcagcatgtcctcggccccggcctgggcgcttccacgcgccttgcgcagattactgcgtttgtggcctcgtgtcgaggaggactcaccttcttcttgtcaccctggc

SEQ ID NO: 19488 - DNA, 540 bp, Zea Mays
ttcaaattgtgcatttaatttgagtacaacagattcacaacattatttgaattcaaattggaaattcacaaataaaaaggaaaatgaaacaggaaataaaagaaaagaagaaaatcctaatatgcttgacgggctcaaactcgcaagccggcccattatccctcgcacgaaccagacgcgcgcgccgtcgccttgggcccaccagttagccacgccagctcgtgtgcatgtcactgggtctcagacttgtggggccaacgcgtcatacctgcccccttctttgcccgcgcgacccgggcgagctcaactcctgtcgcgcttctcggattcggttgctaccgcctcctgtccgacctcgggcgaccataaatagggagccaagccatgtgccacgaacctatccttcttttcctctgctctcatcgcctgaccgacccgtgtccttgaccaatttccccatcgcgttgccagtgaacctgcaaggtgccaccgcggtggaactctcagctaagccgccgtccgcgcctcgtgaggtgtttg

SEQ ID NO: 19489 - DNA, 622 bp, Zea Mays
gggtgcttgaattcgagggaggctgggcgctagaggcgctgagtggacctgaggcgcgccacgcagtggaagcgtggagtcgggcgggaggcggagcacccgttccggcgaagaatcccggtggccaggagcgcgattccgcccaggcgaagccgcgacgagcatccgtgtgcgcttggcttccacccgagtcaatccccgagggctggacatgggtggtggagcacgacctcggagagcagtggcccgacgatggaagatctgtaccgacgaggaatccctagtgccatggtgacatatcttggaccgctagacaaccagatccttcccccaacatggtgaagccccagggcgagcaatcggatcctgagcgacggtatagacgtggttccatggcggaccgacgagttcccccgcgagcttggtttatgggggggtcacccgtgatgacgatggctaggggaaaagcggggccagatttttataccgaggcagagtccgcgttcaaggagtccatggccgagaatctcgccgacgccgttgcccgagatccctggcgagtttggcggtgctcagctgcgaggcacgcggtccgttacgaagaagacgcaactgacatccc

SEQ ID NO: 19490 - DNA, 402 bp, Zea Mays
agatggcttgagttgattaaggactatgatttggaaatacaatatcaccctggaaaagcaaatgtagtagctgatgctttgagccgtaagggtcaagtgaacaacatcactactcatttgatgtcacaagaattgtgttgggaaatggaacaactcaaccttggattactcaataatgtagaagcaacagttatggaagttgaatctactttggaagaagagattcgtaaaggacaagagtctgatgagaaaattaaggaaattaaagctttgattggtttgggtaaagccccagatttcacggaagatgaacaaggcacagtatggtttaagaagagaatcagtgtacccgaaatcgagcacttgcgccaacttattttgagagaagctcatgattcaact

SEQ ID NO: 19491 - DNA, 320 bp, Zea Mays
acaacgtgttgtcccagatcccacccaagtcccatttaatttggatggttctgcacggcggaggctgtgcttccattcacgttcgccacctagggaccgtgatggtaggaggggctctatagaggatagcgtgcatatgggcagacaatctgctcttcaacgtctaggcccagggtctgcggtacagcctagggaagaagacttggctgctgttcgggcacattcggtgcttggttcctccccaccataggcaagcacggaccatcaccttgcggttcttcatgccttcgatgtggaagtcccatggactccgtttgagg

SEQ ID NO: 19492 - DNA, 893 bp, Zea Mays
attttggtaaacttttgtttaatgtgtgccattaaacaattacattaggtttgtattaattcaattacactagtcgttcaggtttgtacatagaaaattgttgtttttctgagatgatttctgcgtgctccctaaccagcacacacactcactttatatctccattatgcataaaggacccttacaaatattctaattccaacaacactcaccctcaagatgggcaaaagatatcaaccatgcccttcttgttacatattgactcgttctcacttgggcctaaacctttcgtaaggcaattagcttattgattacaagaattgatatgctctaatcttaatacccactatctatcttctccttgataaataacttgtcaatctccacatgcttagtgcgctcaaactgaactggattgtttgcaatatttattgcagcaacattgtcacagtggagtctcatagttccattcctcaacactttcaactcccctaatagacgcttcagccacatcatctcacatatgcttaatgccattgccctatattcagcttctgcagttgatctagccaccactacttgcttcttgcttcgccatgagacaagattacctccaacaaacacacaatatccagatgtagatcttcggtcatctttactacttgcccaatcgacatcacaatacccttccaagttcatgtgcttgttccttttaaaccacaatcctttcccaggagttcccttcaagtatctcaagatgcgataaacaacatccatatgtcctgtcctaggatcatgcatatacctgctcaccacacatactgcatagcatatatcaggtcttgtgtggcataaatagatcaatcgcccaaccaatctttgatatgtctctc

SEQ ID NO: 19493 - DNA, 507 bp, Zea Mays
gccggagagcgggagagacgtggtgggctggatgatgccaaaagcatctttttctcctgccttgtttttctttttttttcgtctctgtttttttagcacgagatattattagttaattgctgggcccaggcgtacctcgggtttgggtattggacatcactgacagagctggccaagatatatgggcccacagtggaagtggcttgatagcaaacagttcagaaatagacagctctgagccgagtaccgtgcgattacatcgaggcagcgtaggccgtcggattggtgtggacttgcgtctagtttcttctgcctaccctttacccggtgcggtggagtagagggccgcgcagactggcagtggggcccccggagggcggctggccctgacagtttggcactagttgatgtggatccggctcagcgttggactggtctgcagtggcgacggtttggggaacacggcacgtcccgggttgagagttgagagttgagaggatctttgca

SEQ ID NO: 19494 - DNA, 2964 bp, Zea Mays
gacaggcgcggcgcgagatccgggctggaagggctggcgggtcccgttggtggcgccgtggcgtcggcgtgatctgagatgagattggacccggctgcgcggtattcgctgcggaggtagacggccatgacgaccaacaccaagcgcgcctacaagctccgtatcctcgtcgcttcgtttgcgctatttcgcttcctttttttaattccttgtcggggttgctgcatagtggtttttgtatgaccgatccatcgctgctgccgcggtcgttcaaccagtagaggggaacatttgggtcagcaagtttgagaaggagctcccgactcttaattttctgtttctgttgagttgttaaataggtattttgtggttgcgagattcggcaggtcacatttagctgttggtgattatcgagtagtcgttactgatttgtcgtttattatcctagaagtgcgattgctggcattccggcatgtatgtgaaaatgtctgaagtggtacattgatgcaaataatatcagtcatcgagggagattgggctgttaaattcgcacacattggaatgccttgacttgcatttggtgtagaggagtttgtggcgcactcgtccaatgttaactgcctcaagattgggaggaagacctcgcgggttcttgtcacaggaggagaggaccataaggtcaatctttgggctattgggaagcccaattcaatactggtaagactgtttttctagttctgtttctacgtatggactgattgtaaactgcggctccacagttgggtaggaaaacaaaactcttaactcacttgaaaaactattggctgacctaagtggttacaagatgagaacttcaccttttcaaccgctaacagatttttatgtagcacagttctccttatgccagtattcaattaatagaaagatacttttaagttagttatatcaacctaccgcacagcaatgcgttttgaggatggttcgtttatatagttaaaataggtgtcatgaataatgtttcttaaggacggagtactttatttaatccactttaactttttggtggccgtacagagcttatcaggtcacacaagtgctgtggagtcggttggttttgattccacggaagtgtttgtggctgcaggagcagccagtggaacaataaagctatgggatttggaggaggcaaagagtatgcagatatgaatatttaacttactatatgtgtatatgtatgaatcgttcagtaattgcatctcttggctcattttctatgcagttgtccgcactcttactggacatagatcaaactgcatgtcagttgattttcatccgtttggggaattctttgcctctgggtcactggacactaatctgaagatatgggatataagaaggaagaattgcatccatacatacaaaggtcacacacgaggggtgaacactattagatttacacccgatgggcggtgggttgtgtctggtggcgaagataatatagtaaaggtaagaatttgccaataactctatgctgtgtgtgttcaattgctagttcttctgctggaatttgatttttcttttgccttaatatttctaatgaaaaaaatcctttttttcccgaacatattacaatatgtttttctttggcagctctgggatctgacagctggaaagttattacatgaattcaagtgtcatgagggtcagatccagtgcatagatttccacccccacgagttccttctggcaacaggttagattcagaatttacaatgcttatctgtttcttgactgttatcttttctttgtcccttttggttgtacaatgtagtatgtacttgtttatggtaaaatatcagacttctgtcttggtatttgcttgaagaaaaaactcttctattcgttgagctagtaaattaatttaagtatttaggtgctctctaaaaccaagcttggcatttgtccgttaagtggagaagctgtttaaatatgatttcctaactagacctgaaccaaactgtaatggctgttcctttgatgttttaagtggtaaagtgtaatggatcatactatcgctgtaattgttgtctgccccaccgcacctcataataactttttgattgtttaccaaaaaaattcctagtagtcatatcttggcatagttcagcttgctgtaagtaaatcactatacatgtattgtgtaaaattttcgttatgagatatcatgcttgttttcgttggtgacatctgtaagagatgcattgaaattttgtacgatacgttctatataaactttctttccatgtcatcaattaacacatttcattttttgttttgttgtgagacacattctctcctgtcaggcagtgaagaatgtattcatatgtttgtgtgggagctcagaagactgtattccttttgaaactatatctctcttatgtaaaacttgttgcttcattcaggttcagctgataaaactgtcaaattctgggatttggagacatttgaattgattggatctacaggacctgaggtacatcggtatttggagctgatagttcacaattgtttatttcctttgcatttgtaatcctcagaatttaagcattatttccttaataagtagcttgggtggggatcccatctctaatgttacatcgaaaaagaaatggaaaatgaacataaacttagatgtccctgtttgatgcttctttatacaacaaacagtcatatgctaatgttttgcagcataattcagttcaatttgggcacctatttaattcatttggatacctcttttgtttccatcatttaattcatttgaatcacttcttggaatcacttcttgtgtttccataaaaaatactagacaacaggtgtccgatccatgacattcaatcctgatggaagatctttgttatgtgggctgcacgaaagcttaaaggtagggctattgtttttcca

SEQ ID NO: 19495 - DNA, 634 bp, Zea Mays
actgtgaagtcgaagcgcagaccaggtgaaaacacaatcaacttcccaggccaagttgatcctcctaaactcatttaggtgtgtagttgaaaaccagcaccaagttgatatatactgaaataataccagcagccagatagtgtgatacaccactccactcatataacattggctctgaatattcctagctacacttttactcctattgcagctgccaacaactttaaacaagtttcctagatcaactacccaccaaggaggctttggcaggatggagccggccacaaccaaagatttacttctcaaccaaagatccgactacattgtgtttttgggcgctagactcatctcatggtactcaaagcggtagcccgtcgtctcccactccaacatggaggccaagtatcgagatatggccaatgacgtggtcgggacgtccttgctccgttagcttcttcatgagctccatagccccattgcccgtgccaccctcatctcctgtgacaacctcaacaagatctacctctccaatctcgtgcatcatcagcgcacgaagtacgtggagatcgagcttcacttcatccgcgagcatgtcgccgacggtgatgtctgcgttctgaccacttcgcagttt

SEQ ID NO: 19496 - DNA, 373 bp, Zea Mays
cacatactgagctatttctttcttcatccctttccaccagtatctggttttgaggtctaggtacatcttggtagttcctgggtggatggagtaagacgagtcgtgagcttccttgagtaggacttctcgggcttccccttttggcacacacagacggtgtttgaaccaaaggactccctggtcatctgtcctgaggtccgggagttgttccttgcgggccttctccacaagccttgctgtctctgagtctagacgttgagatttgcagatgaggtcttctagcattggtttgacttcgaggctgttgttgtttcccagacatgcatttagttgtgctgattctttcttccagtcttctagaaagttggttccc

SEQ ID NO: 19497 - DNA, 385 bp, Zea Mays
gtacaacaacagatcttcagctggttgagttgacgtggctcgccgtggcggtttcagtactggtggtgttgtcaagaattttttcagtgcatctagagcttcctgtgcctctgaggtccactgaaacttatctactttcttgagtagcttgtaaaatggtaaacctttttctcccagcctgtatataaatctgctcagagctgccatacatcaggtaagtcgctgaaccttcttttgcgatcgcggtgcctccattttcatgatagcttcaatcttatctggattagcttcaattccctggtggctgacaataaatccgagtaactttcctgctggtactccgaagacgcatttttcaggattaagcttccatcgataccgccgc

SEQ ID NO: 19498 - DNA, 679 bp, Zea Mays
gtcacctttacccttaggggtgtctgcaagagctgcatcccttttaccactccagccaagtgttcactcatgaaactagctgaactgcctgaatcaaccaggaccaaaacttgctggcaatgtatagatgcccataatctaattgttctattgctctcacttccactgacagcagcaacagagatagccagaactccctcttcagttgatgccttagtctgttcctcaatctcctctttctcatcctcattcacctcatcattgacagctatcgcccacatttcttcgaccaaatgcaagggaacactgctggaacaactgtggttgtagccccacttctctccacatttaaatcataaacccttagctcttctataggattttaatgcagcaagtttattttcttctgccttatgtccattagctgttgtcttacgatgttccccatatggtgtaaacccacgacttacagggactgctactgaatttactcccaccaaattaggttttcccggtggctttgaatacccactcatctccacccttctattttccctctttccagtgtgcatcaacacatcctcttgcaacatggctagagaacaggcagtgtccaaatcaactggacgttgaatcaccacaactgacttaatttcatcctttaggccatccacaaacc

SEQ ID NO: 19499 - DNA, 632 bp, Zea Mays
cacttgggaagaattcaaattggcatttaaggaacattatgttccggaaggagtgctacaaatgaaactggaagagttcatccgactgaagcaagggggagattctatgatgcagtatctcaataaattcaatcacctctcccagtacgccattgatcaagtggatacaggcttgaaaaagaagaatttctttatgaggggactaaatgacatactccagcgtaagatagcaacgtgtctagatctcacatacagcaggggctgtcagtacaacgctggcagttgaagccaaaaatgcaggacacgaaaagtcaaaaggatatgcgggtgaaagatcaactcagggacctaaaaagagaacaaggttggtaatcctacctttcaatccaaaccgttcttcacctcgcccacctacatatccattcagacaacacatatttattcgtcccactcctgccctcgctctgaccaatcagccgagtgcccctggtactagtttccctgcccttcctagttcctccagtggttgcttctattgtggaaagtccagacatttcattaaggactgtccatatctgaagcaaaacaaatccaacttttagcagacctctgggaactcaaatcaaagaaag

SEQ ID NO: 19500 - DNA, 286 bp, Zea Mays
atcaaaaccacccggaagagattctagccgccgtcaacgcgtgcgctgagacgaagcacacaaacacagctgtcaggctatcgcttgcgctaacattagtctaatcatgagccgctaccctttccgtaggcgacaataatcgaagctttcgatgcggacaaccgctgagacgcagagtgttaagggtggtccagtaccatggggtattatgcttaacagtgcagccatttcccaactaaacacacctcatcatcacgacctgcacaaccaccttccgtttccacgt

SEQ ID NO: 19501 - DNA, 790 bp, Zea Mays
gctacatcaagcagatgcgcttgcacgcacctgagaattcggtcctcaacgaaagcctccatgcaactccaaggagttacatgaaggctcgggggctgttgtcgagtacttgagaactgggtacctgaaataggcccatggcctctttaaacggcccacctgctgaccatgtcccagccgagcaactctgtgaagaagagcaacagactaggtccccgctgagcaaccatgcgtggcaaagcagccgagcaactctacgaagtggagcgacctagagaccgaccatgtccctgtcgagcaaaccatgcaaggaggagcagtcgagtgactctgtgaagcggagcgactgtacgcccccacgtatggtctcaagtgtatccccgctgccttgtgaggtcagtcaaccctggtcttgggggatttcagcacaggagtctctacaatgacctacatactggaaaggacgcggcaatacaccatatcaagtgtatgcctatgcacgctgacaggtgacatagggcccatgacgataggcaaagccacaccatgcacgaccgcaccatgagactaacccacggaccaaccacacactactatggagacatcagcaacggacccagtacagggaccagtatggtggacgagcaaggtggtacgccataccaagagtagaggtacgcacaaccctacgaacgacgtcatgaacactacgtcgacccggggccacagatcaccctcctaccagtagagaacaagcctccattgtaatgtgtacaattgccgagtttta

SEQ ID NO: 19502 - DNA, 415 bp, Zea Mays
ttcaaatgcatcaaggttccttgttgcactatccccagatttaatctttccatttcctgacataaggtggtgttaggtgatcccaccatgagacaatgacaaaaggctttatgacttaaagcatccgccaccacattagcctttcctcggtgataatgaatttctaggtcataatccttgatcagctcgagccaccttctttgtctcatgtttaactccgactgggtaatgtactttaaactcttgtgatcagtatacatatgacatacattccctagtagataatgactccaaattttaaagtcatgaactactgcggccagttccaaatcatgtgttgggtaatgtacctcatgccggtgtagctgccttgaagcatacgatattactcgtccttcttgcatcagaacacacc

SEQ ID NO: 19503 - DNA, 306 bp, Zea Mays
cttttcttctcctatcagcataaaggtcttcgctcggcagaccagaaccgaggcgggaacggcgcccttcagatggccttgctgaagacttgagggcctggtggctcgggggaaggacttcggtcctccatgctgtcgtatcgtcctccccaccgagggcggtagctgaacgtttcgcgctgtcgggtgcatccgctgagatggtcatggattgcctggggttggtggttgtctcggagacagtcatgcaccgtgggcgccctttgcctagtatgtgtgggatgcactgaggcttccctctcaaag

SEQ ID NO: 19504 - DNA, 497 bp, Zea Mays
tacgggtgcagccggtctaactcaacaaacgcgcaaaatcgaagatttccccaaaagcacccagacacaagccgcctacgggcgcggccggatcaacgaaggcacgcagcctcatcatacaaatcatagttacacacacagcgagggcatcacacattacaacggctcaaccttcgggatgatacccatctccctatagttaaacaacattatcctcaatttctcaccctcaaaaagattccgcagctcaccctcacctacagtcggcgaagacaacaattcccgttttgcagtcccgtccactcgaagacggctaccctccacctcaccatgacgcctatcacttcgtgacaactcactcactctccgcttcgccaccgcccttcgacgcctacgcccagcactcgcacaaggaatatcctcacccgtcaaacgcagagaagtctccgcagcagccacgtccaatgctgcaaaatagtctaagtcctcatccgaag

SEQ ID NO: 19505 - DNA, 1026 bp, Zea Mays
cagatgtctcccccacctcataccggatcccaacagaaagcagaaccagggcggatttcgtggccgggaatgtcgcgacccaacacgcgcttggccaaatcgcaggcgcgcatgccgcgggactcgccagtcgccacagatcgttgggggccgttgcatctccctatataaacccggcctcacttcctcatcgttccatccaagcgcaccgtgagcagagagacctgggtcaggggagagagagaagtgagggccaccaccatggtcgccacggctcaattgaaattagtcgtagtatgtggcatggtggtgttcgtcgctgcacggggactgtgaacggagttgattcacgcagcgggcgatcatggtcaggcaacgattcttcatcgccgtgcatcggccgccggggaaccacgaggcgtcgggggtagcccgccttgactatcgattggaggtgagctacttaccatagggttcgcctagttctcctcttcacgtaggggcgtctggtgtgcggtttcggggctcgattggtcgtatggctcatcgccggccatgggcaccgccgggggaaaactatgtgccgccgactttggaccatgggaggaggacggctcctggccgtctgatccctatcgggtggttgcgattggcgatgaagtgagaagaatcggaaccgtccacttgggcctgggtggctcagattaaaccctgctgtaccggttcggggtcgcattggggccattggatctgaatccgtgggctaggatcggtctgggcttcataaaatctagagcgctgatcgctgatccaatgggtacgattgcgtaccagttcgataaagtgaagatctaatctatgccatcgattgcggatccaacggctgatcttcgctgatacctcttcagctgtgtcgattagcataagagcccctggatttctaaataattaacccgccgtccccgcgggagtagcctatgtctgtattattttgcgagttaaaccccgaccttctctgtattagtg

SEQ ID NO: 19506 - DNA, 539 bp, Zea Mays
tttaacttcataaattcttcttgtttcatatgcagcacaccttcgggtatgtagtgctcacggaaggctgctttaaattcttcccaggtgatttgatggttgacaggttgaataaccacaaaatttccccaccaggtactggcaggaccacgtagttgttgtgctgcgaataatggcttctgcgtttctgaacagcggagaagaccaaacttttgttcaataacccgtatccactcgtcggcttctagtggatcttcagctttcacaaatagtgatagacgggtttccgagaaatccaggtaagtggtttcacgggggccttgcggataaccccttcctgcctgctgctggaattgctgttgacccgccatttccctaaggaagcgggtgttgtctgcggtggcatttaccaaggcggcaatcgcctcggccaacgtgggaggaaccagaggtggatttggggtaacatccctttccccagaagttcctgctgcgtcctgtcctcgagtcctggtcggcatctgagacaaagaacattt

SEQ ID NO: 19507 - DNA, 822 bp, Zea Mays
tgaaatcataacttgcacggactgtataacaaatacatgggtattcctttgaacttacatggctttggagaatgtgtggtgtgtcctgctcatgttcaccaattgtcctcatgggtatccgctgagttgttcccaccaaacttggatgaactgtgttgctgtcttcaagaattcctggcaccggtaacgcagccgggggagttacagcatgccggccatcggtcatacagggtgtcgtcgtcgctgtagcttctgcacactgctctgatcccctggccgtcgccattgtgtatgccctaactctcccagagctttgaacaaaagcgtcggcggctgtgtgtagcccgtttttttgcagctattctcctatactcgcctaaaccgttctgacctatattcatggcatgatccaatatcctgcgcgatttgctgcgcagttcgcatgtcgcgagatttaggtgaacgacacgttacgattacctgcctattgtgttacatttccataaacatggctcaccccaacgtgcgaccgccccacgttctcggatgacgcgcgcgtcacccccactacccgatctgaccacacacgtcacgtcagatgattatttatttgttattagtaatttaaacaagcataaaagttgaaccacctcccgatcacgtccaactatgccaatttacgcagccaataacgacaaaatacgcaagcataaacgcgcgacccacgtctccgtacccgagccccccacgttaccatttacgcatatgtttcattcaaattccgtatgcataaacttcccaccttgactcggtgcatgcgcg

SEQ ID NO: 19508 - DNA, 381 bp, Zea Mays
cagagatggagttactagatcgtatagacaggaaatgctgctaacaaaaataatgaaggtttttcgatatgctagtatgtccaaagcaagatctaacagagcagtagaggttctcaatgatcttgttaatgttctctcgtgtttggaaccggacattgtgagcgatgattattgtgatgtagtgaaggagatgaaaaccaggtaataatattgtcgttgaatttgtgtagctggtaattaaactggtatatatgcatatgtaactggtgtgatggtgctatgttgcaagcagaaggagtgaataatgagattgtgatggccgacgaagctacttgcatgaacattgaagatcattcactgactgacgatatgagggtgggg

SEQ ID NO: 19509 - DNA, 284 bp, Zea Mays
ttctgcctcagctatgttttcgaagaccagccttggtgccccaaacctgagatcggcaggtagcactgcctccgaaccatagaccatgaagaagggagtgttttcatgcaaagctcgactaggttgagttcttaggctccaaaccacatacggcaactctctgatccactttcctgtgaacttttcattatcgtcgaagactttcttgccgagtgcttccaatatcattccattagccctttctacctgaccgttggctcttgggtgtgctactgacgcatatt

SEQ ID NO: 19510 - DNA, 518 bp, Zea Mays
acctaactttaagacagaggagtcggtcgccagccctcatccgggcaaccaatcacgcgcctagtctgtcttgccggggtaacatccattgccatttcgcacgcgcacactctctctggtctctgggtactagaatgcaccgagcacaactacctttccggctttgtttcctctctctcctctccactttcttctccccctcacggagtgcaagtgcgagtgggagagtgagcggcggcggcagcggcagcgcagcggcagtacagtagccacggcccctgtcgccgcgtggtgtgccgtgcccgtgccccctctcagcctctctctcccccttccctaccaggctacccacccaaaaccacagagaaaagcaggcctgggcaccaccaccgctgcctcgccccgagccaagaggaagccccaccccaaatgccttcctcttccccctgctaccgccacagcttcctcttcctggcccttctctcggcgtgcttctcgacaccgggggcagcggacgg

SEQ ID NO: 19511 - DNA, 626 bp, Zea Mays
atttttaaagtaaaataaataattctccaaacagttttaactatgtagcaatcaaagaaaagatgttgtatgttctcgttctgattacaaaaactgcacttcagacttcctcgccatctacgtttcgctaagttgtctttggttaggatcaaccccctacctagataccaaagaaagatcttaatcttaaggggtaatttcaaatcccaaagcaaacatccatgattataattggggatactaattaaattacaatacatggatcgggttgagaaagtcccattcctatgagctctccacacgaaagtgtccctcaccggagtcagattaaccgtagccagtaagtgtatcatggtctgccattctacaagcttaattccaacaatggatctccggaaagaaagatttagattttcatgtgacagcacttctgcaaccagcgaggtcttattgcgtactatattaaaaaggtttgagaattgctatctaagaggagaattattaagccatttatctttccagaatcttgttgcttgtctgttccccaccttaaaatatccccacttgaggaatttgtccttgacgttcattagaccggcccagaaatgagaatcacccggttttct

SEQ ID NO: 19512 - DNA, 565 bp, Zea Mays
aagaactctataacaaaattaaatctggtatgatggacaacaactttcctatggtcggcttgataggttgttgaacgaaagccaaagaaaaatgatcctcaaatcgctctgccaggcacggaatggacatcgccatggtacagtacactgaagaagatcctaagtgccgtgtgctcgctgccgacatcccgccttcgtgattcgagctcgcaccacgattggtgccgacgagacgtgaatccatacgtggtagaatgatctctggctcggattcgatgctcgaattaccactcttgccatggacaccatgtgtcctcaccgtgaatcatctgccgctgccatagcaagccaccggacgctccggctgtccacgcaactggttggggactcgtgtatcaaaccgccataaagggttcgcgataaatccgccacgttactggcctgtggacaccgttgaggctaacgtggagcttctcgggccgccgccgccgccgtgagtcagtgaccaaattgcccaccatcgtgatgacttcctttaaattgatcctgcgctcagtcctgcctc

SEQ ID NO: 19513 - DNA, 576 bp, Zea Mays
aaaaaaagtttagacacctcccagttttcttagaaaatccaggggaaggaccgagcgaaagtgacgtgacatgagaaagtgattactagacatatatatacaccataagtatccagcaataagttaagatcctcctccatcaaatcaacaacaacaaaccaaccaacaagtacacttcaaatccagtctaaaggtctgaattgaatgttatctgcaaccagctgaactctgctttcctcctgccagtctgcctctgctccatctctcaagcagtgaccacatactattccatcaactggcatcaatgcatgcatcaacatccgcctatattaaacaagcaaactaaaaagaagcctttaagggactaatagtatctagtactacagaagataggtaggttgttctcagccacttctaaacaaatctgccatcagcatcctcaccggcatcacacacgcctacggcaaacacacatcgcaatcacaatcagctagataccacgacatcggcatcctcaccggcatcacacacgcctacggcatgccattccagcctcacaagtcacagctgcatcat

SEQ ID NO: 19514 - DNA, 390 bp, Zea Mays
tggtccggccgaccaggtgtgcagaccgcaccgggactcttttggcgtactgacgtccgatggcttacgccaaattaacatttgcgttacgatgatgtgtctttcagtttatgcaaatatatttttgcacgcttcggcattctgggcctatgagaagattttgctttcgcaatctgggcaccgtactagccccacacaatattggagttacaattttttatgtttcagtttacgcaacagtattgcacgtgtcggtcaatgggccctcgagaagatttggttctacaatatgtgcatcgggcccactatctcattacctttttcacgcggccttcacgcacgcggcagcggaaccctatacaaattcgtcgtcgtcgccttcatctcctc

SEQ ID NO: 19515 - DNA, 554 bp, Zea Mays
ccggggcttctagagcgcgggggttggtctgggtagccggagaggttggggaggactcgacaagcactatggcgaggtctgggtggcgagaaccagactgagacgggcatacggcgggggggggggaccctcgggcgaacacaaggttactccggtgagcaatacccatcgtggtggggttaatccggcgctgtacgaccgacataggctctggtgagaggtgggggtgccctaggcctgagttcgggctcgaggaggggttgcagtggtcagacgctgtgaagacgcggtgacccgacgaggggcgactccggtgagccgaaatcccccacggtaaagcagaattggcgcaaaagagggacaaggaaaggtcacttacccagagacagcgcttgggacagcttggcatgacacgaggggctccgattggccggacgtcgaagaatcgcagcggcgacgagctctaacctgcgtaggttgagcacagatcgggcagaggagttgaggaaaggggaaaccaccgcgggttcccggtgcgccaagctcaggcgaag

SEQ ID NO: 19516 - DNA, 865 bp, Zea Mays
cagactctgcagagtcggcttcatgatgttgcttgaggaaactttggtgcagtctttggaaccaaccattttggtgccaatttttagcagatgtagacaccctcgtccccagcggattcaccaaacatgtgtgttgaaactcttttgggctaatcacctaacgaaccctaggccttgtctgctggtagcgagggcctggggtcctctctacaggagtgcggatcatccaagataggtggccaaaccgtccgtgactacgcagagggggctctagtcttctctgagggcgcgtggactgccacgatagggaggtggaccatccttgtatgtgccgagggatttgggatctccttcatcacttggatctcgccccccgagagggacctcgttagggaggaaagaccctaggccatccaagacgcctctaaacaacacagagtcgagaagatgtgaagattggggatgggaaagactaatctagactaaattacgattactcctaggacaagaaatataaaggtaattataatagattgatttggatagattgtgaagtagtttggcacaacgactcctctctgtctacggcacaaagcagatcgacgatgtccttccactctggtgagaaatcatatgttcctcggccacccgccacatgatcttcggttgcatgcacctttggcgtgaactgacaaccaaaccaagacgattcctagggtctcgtcggtgccgagcatgtggatcaacatcagcggctctatgctctctttctctgctcaaagtttgcatgcttcggcaatgctcttggctcgggcgcgactacgtaatggggcccgccggctaggtggtcgttcgcatcgtgggg

SEQ ID NO: 19517 - DNA, 537 bp, Zea Mays
ggagtatcaggggcacaccagaacgctaaaacgggagggcagaggatatgagtggatctgaggcgcgctggccacggcgaggtcaaaccgagcggagttcttgagtgatttgggggaagtaaggaattggagctctctggtgaacgattggaggcaagacttagtggattggtgcgtgattaccctacggagctcgcattgcgcacaatttatagagccactgagcggtggccgatgaattgaacgacgacgcacgatggccgaagaaaaaaagggcactggcacaagcgcttagtggctttcaccgtggcggtccctccggcgatcaccggatgcgcctaacatgattaaccgcgacgtggtaaggtgcctgggcacgtggcgcagatcggcaggcagccaacgccggtgagcttatccgtgccggccgcaaggcaagggggtatggcggtcagccaccggagttatccccaagcgaagatcttttacctgggagcattatctggtcaccggtgggagcgaatcgcaacggcggcg

SEQ ID NO: 19518 - DNA, 497 bp, Zea Mays
cagcactggaactcccagcctcatgatcatgagcgcgtggaggcataggaggcggaggcagaggcggaaccccaaagtcatcatcatcatcaacaacatcatcgtcaagaaccgctgcgccctgagtctcgaactgatgaaaagtggtatcctcggcctgagtgtcaatcactggagcaggtgctggcactgggtcctcagggattggacggtaggagccaaagaggaggcgagaggcctcaagagtgccctagaactgtggtggctgaattagctgagcgaagatgtggcagagatagtgagcatatggcagctgtcgccgggcacgtagaccatccagtatggtgtcctcgatctcacaaataaggaaggcaacaacatcaaactctgagtgagagaccagggcaccaagtagccagagctggatatgagtggcagcctccctgtaacccatccgtggcagaagcgtccgtctcatgagctaatataaaaacttg

SEQ ID NO: 19519 - DNA, 1167 bp, Zea Mays
agaatagtcctggggttagtattcacatgagtctctgactacgcagaaaaccccctagggtgactctaaattaaacccacggttcttcccctaaataaacagtatctgcggcagaggaaagggcggaggggcttaccggtggtgagatcgctctggtgaagaggtcgagggtgtaggggaggtctcgacagtcacaccgatgtgcggatcgcctccggggatggtcggaataggccggtccacgtgtgtaggcgggtgagctcgtcagcggcgagtgttccggcctgctcaccgcgcgatagttcaattggttagctcgggaggctcgaccaggtgacatagaggcggtatacggaaggaatttgagaatggcgcagagacttacccggtccacgttcgtcggtgagcggaagaagtccggcgagggtgattcggggtctccggtgaggctctgccgggtccgaggacttggggagcttcacgggtctctggcgaagctaaccgaatagctggcgcatactagggatggctggagtgagctggccacggtggccgaggctcgggtggtttggcgggcggtggcgcgtcgtgctcaaggcaaagtccggtgaactctagcttgggcagaactgagagcgtgcgggggagtacgaccgaggccttggggctgctttataggcatgacgcgggcgagggcgcacggcggacttgaccgggcactagggcgagcgcgcgcgggttgggtgaacgctagcgcgccgaccagggtcgaacacgtgtgcgcgttcattctgcccgagttctggcgcgtgttgtcactcatccgagcctgctcttgccttggtcagtgcacaaaacctattctcctccctataagctaccgatcttgtgtggggtcataggatttggcctactggttccaaagatatgcagctctcaagtcgggtctgtctctcagcccgatcctgaggcaaatctttggttttgttgtcgtgtctagggtctgaatcccaatgccatcttcagatatgtggtagaggggttagtttagctcatttttgttaatgagagcttagggtattgagatagggatcaaggtgaacacgcgcggttttgagttagaggttgaaattcagaaatctgaatttcagatttctctagaaagcc

SEQ ID NO: 19520 - DNA, 483 bp, Zea Mays
ggcgaagacatcacttccccggggaccgcacatatccccattaacgcctcaaaaacaatctcggaggccctcggcccagtcgcatcgtcccccatacctaatttcctcttccgagtggccgcaggtggagcctttccctttgaggtgccttcgtcggcccgaggcttcacttgcttgcctcgatcgtcaccgacgtctgtggagtccccctccgggtagggaccatacaacaaaactattcaattcaaaaacatgattcaacctcacgttggaactgcagatatcccaacttctcaacatttcattcttcagcgcatattttctaacaatcttaatagcctctgactcaacttctcgcacgaaagcggcagcatctcgaccatgcaagtctatggcgaaggctgggcttcataccaatttatcccccagggttggcatccggcgaggtataattttgcccagaacccacccgtgcgccgaagg

SEQ ID NO: 19521 - DNA, 337 bp, Zea Mays
gcggtggcggcgacaaatttgggggaagtttgaaattccagagctcgggtgaacgattaagggtgggagcgggtgctaaggcttcacgataacatagcgcagttgctccggccttcaatttatagtcggctaaggcggtggcgcgcaatttggtcggacagtgtgggtggccggagaggagaggcgagctgagtgcgtggaaaaagtgactttcaccgtggcagttgctccggtgatcatcggacatgcatccagtgagtcaccgcgatgaagtccagcgcttaggcacgtggcgcgcaatggcggcagctcgacggcggtgagatttatccggtcg

SEQ ID NO: 19522 - DNA, 429 bp, Zea Mays
cccgatctgatcgtgcgaagggggtatgcgatgacataacctcgtcaatcgcaaccattcctattgagatctacggtcataggcccaactcctacaccgctctatatcgcaccgtcgatttctagatcaatggaccccacgccttcctgctcccatcagtgccacacggaggcggaaatagagctccacggtggtgctccgtcggttcaccgaatcggttccccagcgtaccgaaaccggaattgatcgatcctacgtgaaggggagctaataccgaaacaaaggagatccatttcacctgggttggtggcgacagtaacattgtccacatcgaagggcggcacagtggtggtgacggagcttcggggagtacttagccattagtgggacctccccgggagatgaatccgatgcacacacgttccgcac

SEQ ID NO: 19523 - DNA, 386 bp, Zea Mays
cgagctcccaggcccatggcacgcagaggcgcgtcagcccttcagtcccgctgccaccaccaccaccaccatcggttccaccaccaccaccaccatctaggggtgatctcccctaggggcaccagcagtagcaacaacaacaaccgcagcagcagcagtagtagcaagagcggtgatctcgcttccagggtcactggaaggtccagggccccaagtaagtgtagcccctttttctttgagcctaatcgtcatgccgacaagtcttaacccatcgtctgtttttcagggcttcttccccctatgctcccaaggccacacctcctctaccggataccaggcccaccgataggtctggctcttagcaataagcatctactgggagtggt

SEQ ID NO: 19524 - DNA, 732 bp, Zea Mays
caacattcatttccattgcacagttgtgctgttaaaaaatttgaccatagccgaagctttttgtattgcgctctcgagcaaaacgcttcatcgtttaaggttagcttcatcaaacggtaaaacaatcgaaatggcgagagtgcgatcaactgctagagtgtctcgtgagggggacgaaaccaaggctgctgaaatagcgtcgatttcagaagtaatgaaacgatcaggtctggttgcgacagaggaggttgctgacgaaggtgcttcaaatgtcgaagctgaacaaactgtggttgagggtgaaaatgttgatgagagtgaaaaagactatagcattcttatcccaacgaagcctagtcatcttgaatttgaaaaatctaccatgacagaagatgacatgcctatgatgatgaaattgggatattttggagaggctgagagcaaacttattcgatttgctggagaagagataatcccagagccgaagaaggatgaagttgtcgttttcaatagcttcttcagagcagggctgcgattccccctgaatgaaatgataggggtagttttaaggaactttgagatatatcttcatcagctgactcccaacgctattgttagacttagcgtctatatatgggccctccgaagccaagggatgagtccagatgtgaagctttctgctgagtgcacgagctgcattatcagacgaaggccaggacagatggccttcat

SEQ ID NO: 19525 - DNA, 566 bp, Zea Mays
tgctttgaaaaatctttagactgtgtgaacaaaattaatgctagctttgccaatgtgggcgcctattcttccgaagagaacttaatacgaggcgaccctgaaggtgttattgaatggataagtggggaggccgaagcctttgaagaaattctaagtgatcgtggggatgttgcgcgttcttcggtgcgcgagggatttcagctatcttggagaaggcgggatgcgaccatatcaagaccatggcccaggacgaagctgccttgtccgtaaatgatacaaaggacccctcagctgaagcaagtttaataggcgggaaattttataacgacatctgggcaaatggtggccgagaaatggctcatgaaattatgaaaaagagtgaaaaggacatccatgagacccgagccaaagcaagacaagctgaagaagctgcagagcgtgaaaaacgtataggtattgtgtcgtgatttttaacttcgacatttgttttcatagtttcagactgattaactttttatttcttcagctgaattatctccgctgtcggtaccgctcgatctcctggc

SEQ ID NO: 19526 - DNA, 613 bp, Zea Mays
cagataacaaaccatgacactaagcattagctttttttcggcatggatgtaaatggcccgtatatctatctaatataatgctcgtaattaacatcacggctaaagtgttgatgattactgatcgtcctagtacagttagtgcgtatttaccagtaatataatcgatgtgggttgagataaagagagagtcagacgtacgtacgaagcagatgagaccaggattcacgagacttcacacggacgtggtgctgagctgcttctccgcagtcgttgaaaacctgcttctcagaaaatcggcggtggctagaatcacctcagaatctagacgtttggacaccaaaacccgcttatggcggccagaatcggctgaaaagtcgaaccaaacacgggccatgatggatctcagctggagtccacttcatggtaaattctaaattcaaaaaaaaatattagagaaaccgagcataaacataatgtagacggcaggcatcaaagcaagtgtatgcatggctctggcctacacccacgtactacggcggcggcggcagcagcatcggagttgagagtaccgtcgcacgtgacgtgagacgttcaatggtccatccatgatatg

SEQ ID NO: 19527 - DNA, 547 bp, Zea Mays
cattcataccaacgatcaagcaaaacacctaagcccctcctcatctcaggatttagggcgggtgcactccaccacccggccggagatctactctccgacatttggcgcgccaggtaggggcctaggcattaggtttttgcttgatcccttgcccaagcatgatggtgcagatcattgagcaccgcgccgagactttggtagactttgcggtggagggagaagctgcttcctccacaccgcaggctcctactcgcccgacaccagtcactcctgttgtgcacgccgcacgacagcacacggtagcgcaaacatcccggactccatcaagggcgtctccgggggcgttgtcagcagccagggagttgttgcgacaccctccaagctccacggcttcaccaggagccatgaagcaatggcaggacgacgtcgaccgactgctcagtatggcgcattctacctcgaccaggtcgaagacacggtcatcccggcgccaacacgaggcatcagcatcggtgcgctcgccctcagtaaggggcgcacagaccaa

SEQ ID NO: 19528 - DNA, 728 bp, Zea Mays
agattgcagcatgtgttcggagggtggcttcagaagtgtttggagtgagtaagggggataaacaagaagcaaaggatacctggtggaggaatgacgaggtgcaaagggctattaaggagaagaaggagtgcttcaagcgcctccaccttgacaagagtgcaaccaacgccgagggctataaaatagcgaagagggatgcaaagcgagctgtgagtgtagcaaagggtcaggcgtttgatgacctctatcagcggctaggcacgaggaaaggagagaaggacatttacaggatggctaggatccacgagaggaagacaagggacatcaaccaaatcaaatgcatcaaggatgggacagatcggctcctggtgaaggatgaggagatcaagaacagatggcgggagtacttcgacaagttgtttaatggggagaatgtgggtcctacccttgagttggatgactcatttgatgatagcaatagacgctctgtgaggagatttcaggaagcagagatcgaggaggctttgaaaaggatgaagggaggcaaagcgatgggccccgatggtatccccattgaggtgtggagatgcctaggtgctagagcaattgtatggttaactaagctttttaacctcatttttcggtcaaacaagatgcctaaagaatggaggagaagtatattagtaccgatcttcaagaacaagggagatgttcaaagttgtactaac

SEQ ID NO: 19529 - DNA, 458 bp, Zea Mays
gccggggaggatctcgtggaggacgaggaggtactcgtggtagctatggaagaggtcgcggaggtcgtggtggaggtcgtggtagaggctgtggtggctccagggccaacgtagctaccactgaagagagtatctctgttactctgtccggggaacaagctaagcaatgggagcagtggcagaagggcaagtcttccgagtgcctcacttcaattgatgggcaagccaccaactccttcggtaactttgccaactacgcccacatgggcgaaggtacacaggcacaagtctttgcatcctcatgtagtcatcacatagattgggtcatagattcaggagcatcaaagcatgtgactagcatgtccacccctttcaaaacatacattccttatacacattctgagtcagttcaaattgctgatggtacatctcaacaaatccgtggtataggatctatt

SEQ ID NO: 19530 - DNA, 388 bp, Zea Mays
acgacttcgttgccaatcttcattacatctaaagcttctttcataaccgggtcgacctcagggttgtacggctctggcgggggtgaaagtctagctgcaataaaagaatatgttgataaacctcgaagctagaagcgaacgatgaagcgaaactttaaatataagtacctataatcatggctcgttcagcagcttcttcagcttgctttgcctcctttcgagcgtcgtgagtttctttttcgctctttttaatggcttcatcggccatctcacgaccgcccttcatccaaacatcaaagtagaatttctcgcctagcaaagaggcttcggtcgaagggtctttggtgtcgtcagctaagaagttagcttctgcctgggctacggcttt

SEQ ID NO: 19531 - DNA, 451 bp, Zea Mays
gaagcgaaccaacacccgtgatgtggctctgtgccaggcatggttaaatgtggttggctatttatggcggtcagtttggggccgaatgtgggatccaatcgagtggttctcttctgacatgcctggcctctcccgtcaggttccaccacgtctgaccccaggctcgggttgacgtatccacctctcccaagtgactaacgggacctagagatcaggggtccttccctctgtgcactctctaactggtgggtcctagggatcaggaatcatttcgccgagagtatctcccttcgtgggctgatgaatggtcggacggtgttctgttcttcaccgcgtatttccgtagctttttcgtgggcgatgctgattcgttgctttcttttatgcacaacgtttggcattcgcgcgttgcttcgtcacacagtccacctttctataaataatcccttcc

SEQ ID NO: 19532 - DNA, 1019 bp, Zea Mays
gtttaggtgaatacagcgataaagagatactgcgtataatgcctacatgccaacacaacttccatctcgaatgcatagatgtatggttgcagaaacagactacctgcccaatatgccgcgtctcattgaaggaccagcctggcgcgaaacctacagcatcccctctccgtaccccactccctcagatactgggacatgccggcagcccagtcaatagatcgccccattggatactcccgatccatcgcgatcgtgctggaggcagacagaacagcccagcctcgcaggaatcgttggaggtgatcatcgagatccagccacagagacaatgaggagggtacaaggttgagactgtggtgaagctactatactcctgtcaggcgtcagaaggaatccggcgttgcagaaaccatgctagctggctgggctgttcgtcctgcagcacggtagttggttgggggtacaggaacaggacgggcctggtgtgtagcagcattctttgtacatttcgagctgtagcatagcggttccctttcgcagtctcggtacctgcctttgggcttttctttctttttttgatgtattgtcattgtattctgtaaagaaatggtaaactgttcagatttggagctgcggagatatttgcagcggctccgcccgccaattaattgccggtgctcaagggagcatttcggctcatgaacgggtaaatatgttctgtgagggggcatcgccttgtcactgtcagtgcactccacatatttgttctgggttttgggaaaggaacgggtaaatatggcgtgtgttcatcccagcaaaacagccgtgacgttccatcagcgaccttgccattgctcactttccagactgtgaacgaacgcggctctttactcctgtagttcctgtgccaacagccgtgacgttccatcagcgacctggacttggacagtttgcgctgctcgcgctctctttaccctgttttcctaccgtgagcggggctgtgacgacacatcatttcc

SEQ ID NO: 19533 - DNA, 326 bp, Zea Mays
gtttgatgaaatggccaagtcgataactgtcgtcgttgctcacagctagctgtcaaagtcgtgcctcgcataccgcctatttgatgaaatgcccaaactcgtggactgtcaatgccacgtccgctccctgtcctaacaccctgtcgcaatttcgtgcgttgtcgatgagacatcgattttcttctattcaaatagtacattgcttgatgttagattaggatttaaaatatacaattgtgcgaggaatagtgataaatcagtggttgttgtcaaaataccgtgttgcatgtattgttatgattgtatccataattgtaatggagtca

SEQ ID NO: 19534 - DNA, 344 bp, Zea Mays
tccagcccgacctttgatcaattattgtctaaatatgtgaaaaagaaggccggccccagcaactggccaccaaaacaacctcgcttacccacctaggagcgacagcaggttaggccaattggaccacctcaccaatcggaaaagacgggaggtcataatgttcaattaagacctaacatacctgcatggacacctccacccccatatccacctatgtcgtatccatacacatacatacctctgccatatgtcccaaatcaaatgtggagcatgccaccatacccatttgggatgccacagtaccccaccaaacatctgtattcaataggttgacacctccagta

SEQ ID NO: 19535 - DNA, 331 bp, Zea Mays
cctgcagtagacaacgcggcggccagaactccaccgtggcggcgccatcgccggtgttgggcgaaattgaggtatagtgggtaatccacaactccaattgaagttatgcacagaggggaccgaggggaacccaacggagggcttaccttgagcagacatcaacgcagggagctcgaccacgtcgccatgcggcttggtgatgaccagcaaagtccgccgagctatcccgggcgtccccggtgtcgatcccattcgataagggcatggtcgtcatccagccgacccgcagagcacccccagccggacgtagatgccacaatgtcgatgcccg

SEQ ID NO: 19536 - DNA, 463 bp, Zea Mays
gccgttttttgcagcatccaccatactgttagctgggcaagtaatgaagttctaagatgacactattttactttacgcatagactaaatgtctctattattcaaaaatttcacccaaatgtttaactcacttgatgaaggagatcaaggacatgaaacaacaggtcttaactgcacacactcttgaacttcattgcttcctcacaccagcaatttatatcttaaatgttaacctgtctttcttaatttgtatttagatgctttgaaccttttattcaaacattgcctagatgcagttgctagcgttcttagtacacatacttctacattgctccttttttccttatatatcgtcatgataatgtattagattattagcctactcatgtaccttattcgacaaacacttcaactgacttagtacctgcctgctgtgatcagagggaaagagaaaacaaacatat

SEQ ID NO: 19537 - DNA, 734 bp, Zea Mays
ttggtattatagacagtccgacctatatgtggtctgatggtctacaaagggaccgaacgatccggtactatacctggactgtacggtcgtaccgtgcattgcttatgagacttgtggtgggctttgtgtgactccgaactatccggtgtaaggtgtcggacaatcctatggagtgctggccggtccaagaacatgcttggactgtccgaccatgcttagagccgatccactacccaacgaagatgacaacaatggctgccccggatatgagttcattggcataccataatatggctgggattgaaaaatccatttgttgctaatgtgttcggcacaattgttttggtgtatgagttttttctaatgcatgcttcattttctctatatacttcgtcatacttttaatctgattgtcacataaagaattttaggagattgaacaacgtcgaatgtcatgttgttactttatagtggagtgtcgcatgatatcctttagggaaatcatccctagtgtagtcaaaaaatgtttgttggtgccgatctggcaccaaatactaggggtgtactgcctggcggtgccctctgcgacggcacagacggtccgcgactctgggctggacggtccgtgacctcgctgcatgagcggctccttccctacgtcgctccagacggtccgtgatggtacaatgtcatcttcttcctcgcagtaacctagatctcgctccctggaggag

SEQ ID NO: 19538 - DNA, 471 bp, Zea Mays
gccgtattctagagacttgaatcattctagcactttaccatttcttagagttaaattaattaaatgaggactagcaagtagacttacaaattttatccaaatcatttagtgcactaaaattactacaaccaattaacaacgcattcttcacgataatcacccaacaatttgcgttttaaattagacatcacaagagcactactactttttacccgcgaacataaccatacgcatttagactacaacaagtaattcatcataactacgagcttaaccaaagccatctaacaagttgattaaccaaaggaatggcatagcccgccatacgatatacacgtcggcttgcctattattaacgcagttcgagacaccacatgtatatatatcacaatcacttacgccatcgactcttacttaacatgagttggctaacgccgtataagacttagcaaaccattttaaacattgtaa

SEQ ID NO: 19539 - DNA, 1002 bp, Zea Mays
cctgtcaaatcctcctgctgatgatagcggtttgggccttagagtatgaccctgtcccaaagaagttagtgctttggttgcctcactcagagagattccttacgacgagaggtaggttcattttgaggtgcctttgaatccaagtgacacggagataagtgccatgctggatatgttagctgaagattcctctgatgcaatccctattgaaactctagcggtagcgcccatcccagaggatagcgaagctttagatattcagaagtctgacaacgttcgtctgaagcgctctcgccgagccaatcagcctgcttctcctgctgacgggaagaaacagaagaagagacgtcttcgtcgagtgtctagttttgatcagaatgctggtccttccgttcctgctgctgaagaagtgccagtgcctgcatttgctgaaactaatcctgatgggtgtaaccttcctgctattaaccccaatgggtgtgacctggacgacgtcgaccccaatgggtgtaacctggatgatgctgaccccaatgggtttactgtccgcgttgtcgataatggcgaggaggaggaggatgaagtccctctaactcggaagaacagccgacgctacattgccagtggcgaaagcaatggtgttccttctccagccctggctgctcatgttgatttacaagaattgtctctggccaactttgatcaggctcttgaggatatggttccagaagatctattgtcagagccggcagatggtgacgcgatggatgtttgtgctgatgtgcttgatgccgggttggggtcatcccgggcagcgtcctgcgcctcatcgaccttggagcatggtcttgaggatcaggaagttggtctggattgcactgctcccatggaagtgactgagggaccttcagccttagaggtggctgctgcagagaactcggccctcaaggatggtgttggcgcttacccagcccccgagggtgttgccgagaatgacccggc

SEQ ID NO: 19540 - DNA, 301 bp, Zea Mays
gcccctccccataccatcttggaaatgggaggatatttgcatggattttatcgtgggattgcccaatacctcccggcaccatgattctatttgggtcattgtggataggttgaccaaaacagcgcatttcttgccagtgcataccacccataagacagagaagtatgcagaaatctatattgatcaaatagtgcgtttgcatggaattctgaagaccattgtgtctgacaggggagcactgtttgtggcacgcttttgggagcagctccaagaattacttgggacccgtgcaataagaagc

SEQ ID NO: 19541 - DNA, 759 bp, Zea Mays
tcctcaagttcccaagtagcctcgcgctcagactgattagtccacaagaccttaacatacttaattgatctcttcctcataacacgctccgaggactccaagatacgcaccggacgacactccagagtcagatcctgctgcacagcaattggttccatctcgatctgatggtctggatcccacaagaacttcctcaacatagagacatgaaataccgggtgtactcctgccatggaatccggcaattgtaagcgataagccaagctgcccacccgggccaagatagtgaacggtccaatgtatctcgggctaagctttccggagacaccgaaccgaacaactcctttagtaggttataccctgagaaagacttggtcacccactgcaaattccaagtcccgcctcctcacatcagcataactcttctgacggctttgagcggccaaaatattctgacgaatttcccgaaccttctcagaagtctgctgaacccaatcaggaccaaccagagatctctctcccaaagtctcccagcacagaggggagatacaccgcctgccatataaggcctcaaatggtgccatcttgatgctagcctggtagctgttgttataagcgaactcggccaaggcaagatgatcctcctagctacccttccaagacagaacacaagcacgcagcatatcttccaggatttggatagttcactccgactgaccatccgtctgagggtgaaaagcgacactaagtgagagcttg

SEQ ID NO: 19542 - DNA, 663 bp, Zea Mays
atgctagttgcaacaacgtgtcagaaggggaggaagcctccaaacgaggaggccatcgaccacttcgaaaaactgctcgaggccccgtgcccaaaccaccactatcctgtctggcatgcctacaaagattgcaggctactcaaaaaagttcctaagcaaggaggcaccgtccgggaagggcactgagccccataggagcgaaaaacaagaaagaaagggccctattttccccgacaagactgaatgtttcatgatctttgaagggtctgactaccatgcgtcgaaaaggcactagaagctcgaacggcgtgaggtattctaggtacgataggcggtcccaactctcttgaatggttcgaccacgccatcaccttcgatcgctccgaccaccctgagcacgttccgtggcccgggcggtacccgcttatcataaatcccattgttggattagtatgactatcaaaaactaatggacggaggaagcagactcaatatcctttactctgccacgctcgacgccatgggccttgactggggctacctccgaccgatgggaggaccttttcatggtgtcatactaggaagacaagcgagacatcgctcgaacgggtcgatttacccgtcacttttggaacaccgaccaacttcagaatagagacactg

SEQ ID NO: 19543 - DNA, 526 bp, Zea Mays
aataatcctcacaaagagactgccatagtttagggttttcaccatcaaaactaggaaaattaacacgaggtaattgacctagttcagaagttgtgtgcatgccatatggtcgctggccactatgatgaggaaatggatcgtgatggtgaaatggtggatggaagagaaacttaggcctaccattgagcgggaggtgggtttgagtgtagacacgcccaaagctagactcccgacagttgttgtcgacacggtgcccaattgggctgtcggtcttgccattggtggtaggtgggtgtcctccaaccggtggtagagggccgagaacacccgctggatggacgaacaggtgagtcatcagcgtaggagaatggggcttcatcttggtgaggtcgtcgcggagcagatccacataatatttgatgtcgttgattgaagcctccatgtgcggcttctaggactcgaaggctacggtcgcggactcaagcgctcccacacgagttgcagccgccgcctccatcgtgtccag

SEQ ID NO: 19544 - DNA, 937 bp, Zea Mays
ctcagctccgcccccgccattgctccgtcgttccaccgtcgtcgtcgggcctctgccatcgcctcggccacggtgagcttcacctgagctctgtgcacggggaacccgcagtggtttcccctttcactgaccctctacccggtccacacctaacttctcccctgcgcagaccggagttggcgccgccacgattctttgtcgtccggccaaccaaagcccctctcaccgtgccaagctgcctcgagcgccgcccctaggtaaggaaccttcccccgcccttcttctgcactaattacatctcatcgtggggaatttcggctcgttggagccacccctcgtcagactgccgcgtcttcacggcgtccggccggtacaaccctccccgtgcccaaacctaggtgtagagcactcctactctctcactgaagcccatgctggtccccgtgcactggattcttctccatcgtgataggtattgctcgccggagtggtcttcggtccgtctgaggtcctcctccgtcgtcttcccaccttagtcttgttctagtgacccaggcttcaccatagtgctcacaaggtcatccccaacctcccttgctacccaaaccaccctagtgcccctataaaccccgacctgtctcgcctcgggcggctgcaccaccgcggtcacgaacgacgccgcccctagccggccggagctgttaaccccccagacgcccgatcctggccgtccacccttgatctgatggcccaggtgtttggatagcgattcacgtggttcgttgaaccagggtcgttgatccgagatctggtggctagagcgccccatgcccccaacgcgtcgctgtcccgtgggccctacacatcatcgtctcgtcccaccctaagccccacctgttaggcatccgctcgcccgctcgctagttctaatcccgac

SEQ ID NO: 19545 - DNA, 991 bp, Zea Mays
atttgaaatgaaaatcataaaaagaaattagaaaagaaaagaaaaaggtgaaagaattccgatggggccgcctggttggaatttcttacctcggcccacttcgttcctcagcgcgcgcgcggcctactcccctcttcacccgcgcgttgccatcacttccacgtgggccctaggggtcagtctcaccaggtcgtgtgtacaatgccttgtgtctctgatatttgggccgcttgctagtcacagtagtggattcctgctcggtcgcaaaatcatgctcactggtggtgggcccagtgcgcagtgaccatcccctttttttttctcttcttctctcccgtccgcaacagatcgcggcgtgctcgccaccggaaatcccgtacgcgccatggccagatccccgccgaactcggagttggttacaaccgttccaccgatcttggtgatctacgccctataaagcttacccctctcagccatcttgcatcacgaagaactagagaaccacgcgtgccgctgccggagggagagaagggagctttggaacgccgcttgggggagttgtcgtcgtgccgcgcccagtgcctcagattcttcctcgccggtcgctgcggagcttcgcttgggcacgccaaatgggttgggaacacctcgccgtcgtgcggggtccatggcggatcgttgccgccagcgttccgcgcatgtacccatggcagggtccccatgaccagcccgggagcttcatttcgtcctaggaatggcgttcgaaggaattgaagcagtcgcgatgcagatcctgggctcaccgtacatgtgtgtggtcttgcccggggtgatgatagtcgtgaaccgccgtaatttctcgccggcagtaaagatccggggcatggcgagaacccacggcctcgtgacgttgacgttggtaagatttaccccaccttgtttgcattaatacccactccgcgtagcacccttcggattcgaggattaaact

SEQ ID NO: 19546 - DNA, 897 bp, Zea Mays
ttctttagatcagtatttacttgatcaatagcatactgggacagatgattgaacatgttgagatactgcattacagtatctcccccttcttttaaccggatgaattcttcatgtttcatgtgaagcactccctctggaacatagtgttcacagaatgctagcttgaattcttcccaagtgacctgatgtccagccggttgaactgctacaaaatttgcccaccaagtactggcagggcctgtcagttgttggacagcaaataacggcttttgtgtctctgtgcaacggatcaattcaaacttctgctccattactcttatccactcatcaccttcaagagggtcttctgctttaacaaagagcgggggacgcgtctcagagaattccatatatgaggtttcacatggtccttgtggagggattctcccgccatgctgctggaactgattacccgccatctcacgcaagaagcgggtattatctgcagtaggattgaccaaggcattgatagcctcggccagtgtcggtggtacaggcggcgggttgggagtatcttcccgcccacgggatgtccctacaccatcgtgcgcgcgagtccgtgatggcatctaaggcaaagaaacatttggaataaatatgacatgccagcatataccatcatattacattaccaaaatgtaattatacagactccagcgtacaacttgacttcattactcattttacataggtataatatctaaactatactattctagtcttcatcatcctttgtcactccatttcctgccgcaggagaccgtttgtcagcaagattcatggaaggagggggcttaaaaaggtccaactcctcatccagtccttcatttgctgttcccgacggtccggctcccatta

SEQ ID NO: 19547 - DNA, 933 bp, Zea Mays
tgattagtgtttttaagatgagatgtgcgaatgatcggttagtgtttcacttgtctagtcgataaatgttgtcataaataattgtgctaaaattggtcatgagaatgcagtgggcacgtggtgtgtttggatgtgacaagtagattggaagtgtggggtctgtcgaagcactgtgatgtcgaacgtgtatatcgaagtgcattgtagtgataattgcgttaagttaatcggtagtgtctcgggtgcacgccacgacatggttgtatgcgagacaaggtaatatacggtgtgctcgacacgaatgttcggtcgatataagtagaaattgttttggcttaattagagaggtggtgacatgccaaagtagtcatcgctttctctatatttataagtcgagtcgtgtcgatgcgtattatgcgttcgttaaattatgcttcgcatatagtgtatggttgtgctcacgattttgagtagacacttcaagtaaatcaagtaggatcgtgatacaagttgtgtaatgaagttagttgtcttaaaataattattgaaatgttctgttcatatgataaacatgtatgtgtttacagtttgagaagtaaatgcatggtgattgcgatttggagattagtggtttacgattcgtatgagttggtcggtgtgcgaaaatacttgtgaaaatgtgtgtttataaaaatgttgtagtgtattattgtgtctcggatttcgataataatggactagccgacgtgtatgttatttagcgggctatgtcgttactctagttagccgaattgttggacgactttagttaagcacgtaatcgcgataaattgcttgttgcagttcaaatgcgcatggttatggtcgtgggtaaaaattagtggtactcatgtgatgtctacgctaaaatgcaaactattgggtgaaaagcgc

SEQ ID NO: 19548 - DNA, 271 bp, Zea Mays
cccgatattggattccgctgctgaccgcctccgacgtctggatcagattcttggcgcccgcttggaggccgagggcagcagactctgctggtcggccatcgagtacgtcttgacatgcttccggagccacaacccggctgtctccttagggccagttattgcgggtccggtggccgacactgaagatgatgcccgggagagcatacaggatgctgtggacgcggtggtcgggcgcttccagccggatcctgctgacgatgagtagccaggc

SEQ ID NO: 19549 - DNA, 337 bp, Zea Mays
gtgtcggctccttcgccactctagtgactacacgacaaaattgtaaccctcatctctcttggtctataaaagggggaggagggcccctttagatagggggaaacaagagaatgaaagacaactacacgcaatacaatagcaaaacacacatgacagtgacttaggaactctccctctcttgcccacctataacccactactacaagcaacgaggtgttagtagcgcaagccaccgaagactggagtagggatatttagcccaaccagtataacccttgcgttcactacgcacaccatccaggtctaaaacacgcatacataaatttactcgttggtg

SEQ ID NO: 19550 - DNA, 463 bp, Zea Mays
agagcatgcacagttcgcctcggaatcaggagccagccagagtatgatggtcgtgaattcatcgagcatggcacgaagaagtgtgtcgtgactgtatacattggatccagtccgcaccatgtggaatggagtgtcactgctgctgggcacagattcaaagtcacctgtcaagtcgtcgctcacaaggcattgagggccctgtgtcagatttatgaagaagtggccgacaccccgctcagattctttccgccctttcagagaaaccgtcctgtttggatggccaggatgcgtgcattggtaaggcagcagctgcttgaggacgacccctcagtcatgtacctcaccgcatacctgctcaccctggatgcacagtatgatttcttggctcggcaccactgtcagatgattgtccgagaagaagatgcagagaagcgcaaccgtcagctccatgtggatatcacca

SEQ ID NO: 19551 - DNA, 315 bp, Zea Mays
gtcaattgagaagatgctgaatattgcacaatgcactgatcgggagaaggtcttatatgcttctggacgtctgactggtcctgctgctgactggtggaattcttatactgctgcccatgatgctgcggataatattacttgggcagagtttagtacacaattcaggaactaccatattccagctggtatgataaagatcaagaagaaggagtttctgtcgctgaagcaagggagtatgtcagtcagcgagtaccgcgacaagtttattcagctatctagatatgcccctgaagaagttgctgaagacgagaggaa

SEQ ID NO: 19552 - DNA, 564 bp, Zea Mays
caaaattgacagtgcatggtgaaactatagtcctttacggacgtgtagccttaatctcgcctcccaattccacccgagaccgttgcggcttcgtttttacccttttctgttacccgcgagccaggatcctccgcgccccgtggtcagctcgtcctaggtctgctcctgcttgttttaatcatgttccagtatctatatgcgctagtgatgctcatcggccctgccctttttgcttagtcacaatcaatcacccggaacacatgaactcgcttcggtattttccgccaccgtggtcagtctaaaccagggtcgtaactacgtaactgaaacccgttctagggtagtctcatgcccgtaacacccacctagtaattaaattgggcagccactaccgatcttggccggtccgcgcagcaggatcatcgttgatgagcgcgccgtcgatttggacctcttcggagaagaaatagaattagaggggtatgattgcataatgtcagtgactcgggaaatagtcccgggagcgttttctgaattatttgaagtagcgagggcctttccgca

SEQ ID NO: 19553 - DNA, 417 bp, Zea Mays
ctgatggagtgattagattttcgtcataatgcccccaagctagggtgagtgaccaaactgatttggcgaaggggcaaagcaatgccaaatggatacaagtctccaacggcccattacaaagagtgcagtgatcttggtgaggccagccccttttttgtaaattgtctgtggtgagagctttttccactgccattgtccatgcgaaaaccttgcacttgttttcagcatgtgctctccacattaggctggaccggaaaggcctgaaggagcctctaaactggacacggtaagctgagcgagcggagtatgttccgtctaccatccatctccatagaatggagtccctcaagccagcgtaatgtgggtgtcctgggttctgatccaaagggagacgaactcctgcatctgggttgcagt

SEQ ID NO: 19554 - DNA, 419 bp, Zea Mays
gaggaggacctcgtggaggcgaacgcacgctggacgacatcctcgatgcctagtgcccgtaccacaaggacatgtgccacacccttcggaactgcagagacttcatgcactccgtcgggcacagccgacccttccaacctctacctcctcccccgccgcgaggaggaccaggagaaccgcgacaaccccagcagcaggaggagggaggaggtggggccttcccgcgcgtcgacagagaggtcaatgtcatcttcggcggacacggatcgcaggagaacaagagacaacaaaagctcaatgatcgctagatactggtggcggctaccggtcctcccgccccataccgatggtcggagcacccgatcaccttcacccgggcagatcagtggctcaacttcgaccacccaggcaaatacccg

SEQ ID NO: 19555 - DNA, 533 bp, Zea Mays
attttgtcagtcccccgctgcccttctatcgtacttcctctcagacccaggcaggctccactagaattttgtcgtcctgggtgtggaagcatgccacgcagttaaaggaagccggggaaggccagcagcgagcgccacatatttcttccttctctggggaaagcaacaaatgtgaggcgaggacgaggacattgagaagcggccggcatgtgcatgccgaagtccaacggtcaggtcgtcaccccgtcacggtgctccggtcagctgttgcgttctgagccggcaagtccggatctgggactctgaatcccatgctcctgggaatggatccgcagttcaagttcagcacgcgcatgcgcggcgatgctcatgagtggtgtcttcgtccccaagaaattaaaggcaagattgcaggaacgcgttgccattgccatgatgcagagaacaggagatggcactgggcacagcacccgcaccgatgcccaaggcggaggccgcagctgctgccctggtgcagatggaatggaacccag

SEQ ID NO: 19556 - DNA, 449 bp, Zea Mays
gcaatagtccgtgacagagcaacaatcattcacatcacttgcccacgttgcatcaaaataagcataaaactgaagcggactgttttgagcataaaaaagacacctagtggatgttccttgtaagtagcgtaggccccgaagcaaatgtccataatgcaccgaagttggagcactcgcaaactgactcaagatatgtactacatgagctatgtagggtctcgtcacagtaagatagactagacttcccacaatatggtggtaccgagaaggatccgcaagaggtgtgccatcagatggacagagttgtaagtgaagatccataggggtggtagctgtccatgtatcagtaataccagaccgtgcaagaagatcttgattatatttgggttgagaggtagtaaccttttgtggagtgcactacttcaatgccaagaaaatagcttagagag

SEQ ID NO: 19557 - DNA, 545 bp, Zea Mays
ggccttgatgaaaccatattgattctgatgaactaactttgtgatcacctgttgcaaacgattggctaaaatttttgtcaacactttaacacttgtgttaagtagggagataggcctatagtcaccaactgagtctggagaactgtttttggggatgagagtcacgtatgaaccattaatgctgcgcatgcagagagatccttcaaagaatttattgcataattcatagaagtcaggggcaatcaccggccagcacttttttacaaagtccgtattaaatccatctggaccgggcgatttatttgacgacagacttttaatgatctgatcaatctcatgacaagagaaggggtgctgcacttttttacaaagcccgtattaaatccatctggaccgggcgatttatttgacggcagacttttaatgatctgatcaatctcatgacaagagaaggggtgctcaagttctgacaaattgtcaatcggctgaatcaaggaaggtaagttaaaaaccatggatgtttgttgagaggtccccaatctgtt

SEQ ID NO: 19558 - DNA, 658 bp, Zea Mays
ctggtgccgtggcctaggtataaatacctggcgcgttgacgtactccctcggtcccttcatccaatccgcaaacaggtgaaagaaattggtcgggggaagactggcgcagccgtggagggattctgtaatccatcgcggtcgcaccctcgaagaccctccaggtgattctctggtatctgctgggtgcgtggcggccttggcattcgagaatggcggcctgcaccgccgggattgccctatcaccatcggaactggtcgtcatccgccgtgcgccgtgaatagctgaatctgctccgcggtcgctggcaagaccctccccaaaggtttgctttctccttcttcatgcgtagctctagtcgaagccaggtttcatggacttgcgcgttggtgtggtggtgctctggcgcgtcgcggccatgatgggtcgggcgccgtcatgcctggtggcctggtggaagaaaacacctctgccgtcgatcagatacttaacggccaggattctgagaaacgtaccgctttggtgggttgggatccagaccgtagatctcgtggttggcggctgtgattataaacattatacccttcgtccaaatcgtacgcgggccgtcgatcctggatcgttcagtcgtgcggctggcatcgttgtttaaaatctcc

SEQ ID NO: 19559 - DNA, 491 bp, Zea Mays
cacaggagctcggtgtccaccttctccggtgagggcgccgccgcgggagggtagcgccgccgcgcggctctgctgggaaggggggtgttgctctgggccgttgatctccctgtgttcggcttagattaaatggtcgatgttactttggcccgattcgatctgaatcgtggatatgaaattgagtggctgagattagatcctgaaataccggtttgtccaattagatccgagccatcgatccttgatcctatggttctgagagcttaccggttcgagtgagactgatttaatttgagcccttggtttagatcggacggccaccattcaacgataccctttcggctgcgtgtttttcaaaagagtccctggactatataagaatcaacccgccatcctacgtgactatgctctgtgtcttaggagttttaccccgagccccctgctgttctcaggttttgaggcgcagtccaggaattaaaataaaaccagaa

SEQ ID NO: 19560 - DNA, 829 bp, Zea Mays
agaccctgtctttttgagtatccagaagcggggtcacaaaactattcattgcaatcactgacagcttataacccccccccccgagtttctattccttcacgaatcgagtccctgacggcgggtggtgtcgtgtagagctccgatgagctcgtgtaccagccaattcactcaaagatcggcgcccaaccttagccgagaccgaattcaagacccaatgagcgtttcccctcactcaatttcacgaatggctacccaatttgttctggccacggtgacaccgggcattgcggacagacaaccgcgttcctggtgatctaagggatcctagttcaatcaagttggtcggggagcatcaggggcacacaagaacactaaaacgagagggcagagggcatgagcagacctgaattgagctggtcgcagtgaggattctttcacggtggcgaaaacgtagtttggtggaagtgagcaatacgtggtctctggtggacaactagaggcaagtgtgggtgcgttggcttcgtgataacatggcgcaatagacccggccatcaatttataggatcactaagcggtggccggtgaatttgggtttgagacgcgcggcggtcggaggggtgggaggtcactggtgctcgggttagtggctttcaccgtggcagcacaccggcgttcaccgtgcatgcgagacgcgattcacagcgacgtggtctaacgctagcatgtggcgcacgatggtaatcggtcaacgacggcgaggtctatcccgatcgatcgatgagcaagtggtacagggagcttagacgcgaccgggcccaagttgatccag

SEQ ID NO: 19561 - DNA, 863 bp, Zea Mays
agaatatcatcgccatccaacaagcttgacacaaaattcttctttttacgatgtctggcttgcaagtggaagagcttcgaatttgcacccccctccttgagccatgagattcttgatctcaaccgggccatggttcatttcaaggaaggcaatggtaatgaatgcttttttaccttgttcttcaactagatttgagccggtgataaggttcttccatccccctcaatctccagcctgtgaaggatttctttagccaatgccaactgagaccttatatgtcccacttgtttatcgctccatccaactagcctttgagttgtcttctttaatttcagatagatggtttgaaagggcacgtctcattcaaaactgagtcccaagcactctgaactgtgtccgaaaaacatccaatttaggccaaggcctcaaaatggaatctttgtctgtctgatgtattatcccgaaggccagcaacagggggcaatgacccgagtcctgggaggctgagctctaaagcaggacattaggaaaagcagttcccaattaactgagcaaaaaactctatccaatttgacaagcactggatcattttgctgattggaccacgtaaaacgacgtccatgcagggggatctccttgagagcaacatcctcaattagtcgtttgaagagattcatcatagcccggttaaggttagagttattcttatcagaagcttgtaaaatgagatttaaatccccagttaataaccatggcccattgtaagcgtccctaatggttctcaactcctgcaagaacaataacttctcctgtccatgcttataaattgtagatatgtgagaagaataatccgtctccatagt

SEQ ID NO: 19562 - DNA, 437 bp, Zea Mays
gttgcaagcgtgggcaaggggggtctttggtgtggggagtaggaggccatcgtgggggagttgggtcgatgacgtggaaacaagcaggggtgacgacgtggggggagtggggtttgcatgcgtggggaagagaacaagcgagggtggatgtgtggggaggagtggggtttgcaaacgtggggaagagcagggaatggggggttgaaggtgtagccttgtgggggaggagagggagacatcgtggagaggagtggggttgatggcatggagtcgggtagaggcgacgacatcgagaggagcggggctatagacatggagaggacagaggagtagggtcgtcggcgtgggaaggagcggcggtggtggcatggagatgagcatggcgacgacatggcgagtagacctgacatgttgtctaatttgacttttagttttct

SEQ ID NO: 19563 - DNA, 762 bp, Zea Mays
gctagcacgaccacactccaaatggtgaatcgtgtgactcaggggcgtttatactggttcaggcaggtgctctacatccaatgtagtactgatcttagtatttctcttggtcgtgtgttacaaagggcgcaagtgagaatgagagggggagggaaaggagaactggtacagaatgctcctagctctcttgccagcctttgtaactagtcacccccttttatagttcaaggggagctccctttacagagagatggttcatttgaagtagagcgagatctgctatctacgagagttttctataacgtagctcttctaacgtcgttttttgacacgcgcataagtgcatgactagtatggtgggttgctctgccatgtcctgttggtgggctactatagagactctggtgcttagagactggtgttgaggctcctccgtagtggaactcggctagtcccacgtcatagagttggtggactttaagggtcagacatgatgatgcctcgtcccgttgatggagactctccatcaatcccccaatgtgttgtggtgtcagttaaggcggtatttgggggtgacgtgcctcatcgtggctggcgtgggtcaaccatgtttgcctcgttttcatgctaagcaggtaaaagccatgcgcctgccagaagcgtgacgggggtcgtggagctagggtccacatatgcactccccccgttgtgtgtctccacgtctccgccctcgcaaagttgctcggcgggagttggtcgggt

SEQ ID NO: 19564 - DNA, 490 bp, Zea Mays
ggcggatggacagcagcaggaccccgttcacggtcgcggggagtggctgctgttcaccgacggggtgcagggttatgtcgagcggctggagcgcgtcgtgccgctccgcgacggcgtggtgcacacggcgctcgacatcggatgcggggtgtgttgtactcgcatcgcatgaaagcttgccgattcagaaactactcgttggaagtctctctgttcacgtgtcgatgtgtgtccctgacaggtcgcgagctttggggactatctgctcaactatggcgtactgaccatgtccattgctccgagggatagatttgaaccgcaggtgcagctcgccttggagcgtggactgcctgcaatgatcggagcgcttgttgcccacaggctaccgtatccatcgaggtccttcgacatggtgcactgtgcggactgccgtgtcccatggactgctcatggtaggacatgcaagacgtcatgctattcctgattaaac

SEQ ID NO: 19565 - DNA, 357 bp, Zea Mays
ttgactcgatgtcagcccaacttctgcgtggaatcatgcccgatgtccgaaggtcgggtggttatcccgatccgtttcctcctctcgtctcgtgtattcatggttcccacctgtgtgctgctgctgacacctcctccccacaaatttcacctctgttgtcgacttcggccgtgaatccaccacagatcagcatagggcgccgcttgatgttcgatctgtgatggcggcgtgccaccacgagggccttgctgcttatggcgctgctcatggtactcccaaacagcttccaaacaacaacgtggaaattcctcactaggtggaaacctgccctgggatccaactgtccaaaataatccc

SEQ ID NO: 19566 - DNA, 488 bp, Zea Mays
gtccactagagggcgaataccctgcttagggccacaagctggtcgcccaacaaggtctccgcattgtgggtcgggcaaagactacacttgaaatgggctgacccaggaaggcgatgggctcacgtccggatcgttcacgggattgggtatgatcccatggaagttgttcgtttttcccgcgcccgacgtcctcaaacgccggggatagctcgaaatggagccaccggattttcctcgggataaccaaagtctgttctctattagctaggagataaggtggaagagtgtgatcagcaagtgcgtggggagtgccctacggtcgtgtatataaggcctaggaggaaccccatcatttttatctcattagcacctctccatacaggagacaccacttgtaaacacaccatacatacaaagccacctaggaagtagggtattaccccctcaaagcggcccaaacctgcagaaaatcgctcgactctctcttc

SEQ ID NO: 19567 - DNA, 529 bp, Zea Mays
tgggaactcacctcccacaggaatgtcaagtccctacgtcgtgaggtcctgtcggcaaccccaggggtcccgaaggttgccccacatcaacgatggaggagcaccaccatctccttcagggcatccgattgccccgacaacttggcaagggccggcatactaccactcattatcgtccctgtcatcgccaatatgcgactgcaccatgtgttgattgacggtggggcaggcctcaacgtcatcagccatgctacgttcaagcaactgcaaatcctggggtcccatctaggaccctcacgcccattctctagagtgggcccacagctggtgtatccccttgggagcatcgcactcccggttacattcgggaccgaggagaacttccgcacaaagaacgtcgtgttcgacgttgcagaagtcaacctccccttcaacgccatcattggcaggccggccctgtaccagttcatggccattgcccattacgggtatttggtcctcaagatgccatccctgactggggtcctca

SEQ ID NO: 19568 - DNA, 1106 bp, Zea Mays
tccggctccgccccgcttcgccgcttcaggaccaggtgcgggcgggcaggctgcgcacctcctctctctctctcgtccggtgctgtccctctcccttatcgccgtccaattgggtcggggatcttcgggattcggtttcgtgcggatcccggtatcgtgtgggtatcttattgatgcggagtaaattgaagtgaagctccccaacaaaggctagggccaggggtgtaggagctcctttttaagcgagtggtagtgaagtgctcaaagctcctggtggagcaggaaaacctgaaggctgattcgtgcgggtgatgatcaaattcagaattcttcagcgtgtgggctgcattgcacgcgttaaaattgggaagcaaatatgcattataggtgcgctggagacagcgtcatgcgtaaggtctgacttcgtatccagtcaggttgtcggctttgacatgcaatccaattgtggttcgctctccatggcatcgaaatgtgccttagtgtctagtaactatccagtggactccttttcagattaattgggactctgtgatatccgagaccacttgcatgctctcttggggctacaccgcctgtaccctaatgtagttgctaagctcttagttcgcctcttgcgatgtatgcttgctttgtagtgtatactcgataagtgctcttatctgtgcttctagcaagacaaataaaaaaggaaagccattacaatgatgtattgtgtgctacaggccaggtgcttcgtcaggcatacttcttggcgccactactctgcccagcgtcatgctttctcggttaattcaactgtcaaggctcctaccagctgatcctaatggacctaaaggtgtgtttctattttgttgtcttgatcgtgttggctattaaatgaagatctgcctcaatcccacattcaaatttaacaattcaaagggtttcgaagtgatatttgttatctatttcattgtccatcagtttctttaatgtcatggacacaatttgctaattataatctgtcttacatttccagaatttgcatacctggaaatgcagtactgggcagcatcaatcagctgtctcagtgtgctagctttatt

SEQ ID NO: 19569 - DNA, 415 bp, Zea Mays
accctttcaccatattgaatccttgccgtcgatctcgcagggacgactaggattggatgtagccatacgccttcgctgatttagccggggtcgttcgattacagacgtgtgctcgagattagatcaggagtggccgtttcaaatattgaatctggtccgtgagtgttgaatccaagggctagagtggtttgatgcggtggaatgattcctgcccgtggatcttggatcctgtggtgtctgtcgtttaccgcttcacgatttaatatgagccatgcaaaagcaatctagcggctctggtgcgcgcataccccttcgccttggagtttatgctaaagagaccctgacaaacattatcaacccgctatcctgcgcggtgaatactgagtcttgggacattttgcaagttaacccccga

SEQ ID NO: 19570 - DNA, 856 bp, Zea Mays
aagcagcttcgtaattttcgactttgttttctagatctttgatggtagcttcatttttctcgtcctcaagatcttgttgcatcctcagcactttacttagtaatatactctgccaaaacaaccttcgtcagaaaacatcttaattcaaaaaacaataaaaagttgagagtttttaccttgaaattagcgtagaacaagctaccggcgatatgctgtcgctgatacctgcagaggttcgcttcaatcttcggcaggccaacgttctttgaaaaagtcctaacaaccttggcctcggttcgattccgaaggcatcttagtttcccttcattgactccgccaaacagcagagcccctggtttgtacccacaggatacaacatatttctttagctcttctttttcagtctctgataactcttgtcccagtatatcttgaaaattgaagtttttctcttccaaagtatcttcaatttgctcttttcctttctcaattgtcgtgtccaccgcggccgcagcagcttcttcctcagccatttttagaagtatgttatcaatatcaccaagtgtggtttctagattaggatcttcggcggtctcggtttcggctccggtggcttcggcttcggtggctgctctggcggcttcggctccggtggcttcggctccggtggctgcagtttcggcagtgccagcactttcaataaatggtattttcgacgccgatgttggtggcggtgtctgatgaatgacatcggccacttggataattctccgttttttcggcttagcaggactttctgttgccgaaggttccttttccttctgaaaaaacttcatcagttctggtgccagcggac

SEQ ID NO: 19571 - DNA, 331 bp, Zea Mays
tggggagcatggggattagtggtttcatattcgtaagcgtacgacatcacatgttttgcagggtagatatagaagtggaggtcacattcacacacggaattcgccacggcgagctgaagaacctgtcgtcctgctgctgctggtgaagagtatggaggaggattcagaaacagcagggcgcccagcgtatgcagaattgcagacgcgcttcagatgttgactgcccgaacggagatacaggaggagtacttgagacttttgactaatgactgcccgcgccccacggtacttgaacatgctttggacgaattaaacgcgtctgccctttgca

SEQ ID NO: 19572 - DNA, 809 bp, Zea Mays
gtgaagatgactccaaaaggctattctttagaagaatttttggctctgaggacaagtgccctcaccatttaaaagaggtttcagttgaaataattaagaagtgtggtggtttaccattggcaatcattactatggctagtttgttgactactaaatcatataccagagctgactggttgaaggtttctaattcaattggatctgggctagagaaaaattgtgatgtggaggaaatgaacatgatattatctctgagttacaatcaccttcctcatcatttaaagacttgtttattgtatctaagtatgtttcctgaagattatgtgatcaagagggattatttggtaagaaggtgggtagcagaaggatttgttagtgcacatggtagaagaaatctggacgatgaaggcgaatgctattttaatgaacttatcaacagaagcttaatacaaccggtagattttcagtatgatggtagagtatatgcatgccgggttcatgatatgattcttgatctgattacatgcaaggctgttgaagaaaatttcataactgttgttactaatagaaaacaaatgttgccctcacatggcaaggtccaccgactgtcacttgagtaccatggtcttgaaaccttaagaacaaatcccatttttactactcatgttcggtccctgaacatatttagatactctgaagaaatgcttcctctttcaggcttgcactccctaagagtgcttgatctagatggcaatgagaatttggaaagctgttaccttgaagatatagggaagttatatcagttgcga

SEQ ID NO: 19573 - DNA, 438 bp, Zea Mays
gccatgcagggctccgctccggtctctaatgcacgagatagatccgaaatggaacatctcgcctagagcgaagttgacggcggtggtgaaggtgacaaccatggagctatccgtagtcgatgtcgcaccccatacgtggcgcgctagctgccggtgtttagtaccgacaacacactatgtgataaccgtggagtgcttttgatggtcggcaatgtcaatagtagctcgatctttcgctcaaaacacgatggggcacaaaaatttatacaggtttgagtcaccgagaagcataataccctgcgtcatgtgtgtgctggagtggaattactcttggggtttgaggttatagagtggatgagtgtaaagttctagctatgcctaacagaggatctaatcattttgtaggggccctaccttatatacttgacaggattagag

SEQ ID NO: 19574 - DNA, 1001 bp, Zea Mays
tcagcatgggcgctgccgctgcgctccactccgccgcgtgctacgctcacggcagattcaccaacggtgtcgcctatccgatcaacctcagggtcgtcgtcggtttgagtggctggcttcctagctccaggtatggtataataaataatccggaagagagagagaaaaaaaacaaaatatgcatggttatggttatgttaatacgtctccttaaaacgcatcctgaatcggctgactcttgttcgagatcatcaggaccctaaggagcaagatcgagagctcgcagctcgcgcttcgaaaagcttccggcttgccaatcctgctcagccatggaatgggtcagcacacagcatagcatccaccgacgcgtgtgttcggatttgttgattcatctgctgcaagctatgaatgaaagatctaaagcaaaacatggtttgttttctttttatttgcagccgatgaggttgtcacctacaggaacggcgagaggtcagctgagattctacggagctcgggattccagtacacctacttcaaaccctacaacgggtactgatgctatccagatctctcatggacgtcagttttttctcccccccagaggttaaggagtcacaaaatgctctttttttttatgcaggcttggtcactacactatccctgaagagatggacgacgtcagcaagtggctgaggtcaacgctgggactctgagcggcctatctcgtggctaatctcaaagtcaaatacgttggcatacatagagaaagagagagagaggtattgacaatatgcagagggtttgataggctatgtgatttgtgagttgactgtcatggcttggtaggctgtaactccacgcgcttaatttctctcactgatacatatacataccatgttagtttaccggtaatgtaccctgttactaccactaaagaggatgcctgtaatgcagtatttgtattgctcggtttttaaatacatatgagtttttgcaacata

SEQ ID NO: 19575 - DNA, 656 bp, Zea Mays
tcgttagcctggtcggcacactacctgggctcaacacgacaagcgggtcgttccacgtccaatcaggccatccacgcctagcaaaataatgatgaccatcccacctcaccacgtcgagcaaaataatgatgaccatcccgcctcaccacaccactacagtaattattgggcgccaaccaggtaaaatttagaaacattcgaaatccccacgaggagcgaggggtgggctgagcaagctcccattgagccgcaagctaggtgactggcccataggtcattttcttatacccgtgtccaaggtcgtacctcacattctccagctaacgaggtggccacgaagcccccctttgatcgacaagatcgatcaaagggccggtatgggatcaaataaggaacgactggatcagatgcccccagcgggttgccccccccagtgggactactcgccgataccgtgcccggaaagggggtggtcagatctcacttggataacccgcttgtaactggacggcccccctcagcgcatcgattaggtcaaagggggggccttccctcagaagagggatcaaaaaactctcttcgagggggatgcatatgcgaaagaggtcgcacaagcacattcgcacgtcatgaacatctgtcatgagcagggagca

SEQ ID NO: 19576 - DNA, 618 bp, Zea Mays
tggttgtgcggtagtgaaggagtcgcctccagagcacagggaagtccccaattccccttcgaccaactgggccaaacggaggttgagcgagggctccacatcgcatgggtgacgaggacttcactccccgggtgtggcgaagtcgtggtcatctggctgccgtccggcgcaacccctcaatgtcgggcccgttccatcggaggtctctttggtcggaatccatgcaccaaggaacctgcgaaggcaattgatggcgaagtagggtctttgttagtttagaacgagggtgagtttagtctccgcctaacatggtcttcgctctacgatgaggttgtactcggtctcctccccaacaataggaattaccgaacaaggccttactgagttagtgatttgataaacaattacaaactacaaaggggttcactgactatgtgttgcttgcttagacaaatacacgcagggcgaccctagcttgcacatcgatattgggtctagccccatctctacgcatgcaaccaacgtcctctaaaataccttgcactcacggctgcaatccttagcccatcacgaaggaaaccaaataggtacaattattcggtcaacacacaccgctgg

SEQ ID NO: 19577 - DNA, 424 bp, Zea Mays
gggaaactctggtggacgatcggaggcatgagctagtgctttggatgcgtaattacctagtggagctcacgggggcagcaatttatagagtcctacgacggtggcgtccaatttgaaggaagtgtgttggctgccgaagagaggggaagtcactagtgcaatcgctatcgtggcttttactggggcagtgtcttaggcgatgaacaagctacctaaggcggtctactgcgacatggtaaggctttgaggcatgtagcctggccagataacggcgaactccggtgatgccagcgcaattgaccgcggcgggacacgacggccggtccggccagcgaccggattcaccccacactggatattttcaccccgcccggatgttatctactcttatcgtggcacgaatctcccaggcgggcgcgaattg

SEQ ID NO: 19578 - DNA, 721 bp, Zea Mays
gtgcgctcttcgcgacctgagccgttccactaccaggtgaggccggtttgccatcgtcttcttcgtcaatctcatgtcggatctcgcacggattgcgacgaccgttgcaacaaacagccagccggatgccagcttcacggactgacgaagccttggcataaatacagcatgcccgcgacttcctcccctctttgtccgttcatccccaaagctatcaccatcggtgaggagcagtgatttaggaagaaccgagttggattatcgttgtcgcctctgcgatgtgccccggtcttcaccgctcgggcttcggagggtggtcatgaagatttgcatggggccaaggatcgtgttggtctgggttgccatgcgtgtgactgacccgaggctatgagattcctcgtcggagcgttctagagtcaacaatctgcctcccatcgtgtccagcgccatccctacctccacctctgtgagaccatccttagcgtcaccttatccctctcttccggtagtgtcaaacttgtgccgaatggtgcaccgtttagtcacgggttgctcgacggatgtcgggtttgctgctgagccactccacgccatggccttcactcttgtgtcgcagtctcgggtgaagatctcccccgtcgaatcaccatcctcaaggcaccatgttgctctagtcggtttctggtttctgttgaccagggctactatgtgtatctcgccg

SEQ ID NO: 19579 - DNA, 477 bp, Zea Mays
ctggggatggatgaataggcgacacttgttgtgtcatcttatgggtcattttcattggtcatgttacttttgtgggtgatcgaggttgctttgttggctgaccacggggaacaacattcttcgtaacatatttggagagtaattgaccaaaagtagggtcggctttaaccagtcgaccagatgctttaaaagtattttgcttcgacgtacatacttctagttgttgaggcttaaaggtgcatagatgttgcggtctctggtcgcctaccagaccgtccagccgatccagtcgaactgtctgcatgggcaccgaaccattcggttgagccagttgggtcgtctgctatgcacgaaacagtaagcttcaattggcttgccgatcacgcttgcccccctcggtaccttcggtcctgatggtgatcttcaaggtatccccccattatgggtcgtttgtgcaacaacctacctagaagtgac

SEQ ID NO: 19580 - DNA, 503 bp, Zea Mays
gtcaggtcgagccagtggggcgcgtgagtccgcacgattgtggagcacgtttatgcatgcgtaaacatgtgttatattttgcgtaaatagaaggtgcgcacgtggtagggtcgagttgagatatacgaaggtgggtcagcatcgtgttcgccggtcgggtagttggttcctactcgtgtttatgctagcatatttaatggttcagacttgcataacatgagagcggcaacgaacttttcattggttcgttcaggtgggtccacacaccatcgtgattagcgcgcccacgaagctagaagttaccgtatatatcggaacataagatatggagctgatcgtgcgtgggaattcaggcggatttcagcgtaaaacgtgaaccaaaacaacataaatgggtataaattttagtgtaaaccatcgatctatttcataacgaaaacatgtatggaaacaaaaaaaatctaatttaaatgctttatttactccataaatataggatctct

SEQ ID NO: 19581 - DNA, 1049 bp, Zea Mays
tcctaagcacctaagacaatggcgtgtgggtccatgccgtcagatgtctcccccaccaaataccggatctcaacagaaagcagaacagggcggatgcgatccgtagaaatcgtaacaaacctaggcattgaactgacccggattctctatgctcggtgtataaaggcggatacctgacccctgaatcatagccatcgtaagctgcatcaggaagagatagccgaggggatcatcgccgtgggaaggttcgccgttgctggtaactcttgcctgcaccgccattaatggatcaatgggagatcgagcaggatcgccagcacacagggattgtaatcgaggtcgattcagagcacgaaaggccatggcgcgaacgaaattttcattgattgcgcagcatccgccacggtgcgtggacaacctcgtcagcatgctaatccttggtaaggacgcctccattgagttttcctctctctccgcagcgtgtagcatccgtccgaactagaaatgggcgccatagctggtagttgggaggtccgtccatgggcgccgccgcggcgagcctgtgcgccgccgctctggtgaccgggtgtggaagaagacgatccgttgccgttggatatggtgtggatgggctggattaaaggtagcttaccattcggggcacgtattggtcacagggggcagctcgattggcgccggtgagatcgccgccgcgcctggcggacggtgtggctcgggttggcttgagggtggaagatggtgtaatggtcgttgatctggccatggatgatcacgattagaccggccacataccgcttcgtgtgtcaatatgagtcgttgatccatggatgaacgactctggtcacatgttaatttcgctcttgatccgacccatgggatcttgatcgaacggacaaaatggcacacttgttctttatacccgtgatctcatcctggccctggattttcaatcgaacggcttagattagaagataccccttcggccaggctgttttgttaaaaagaccctaaccttttattaaataaac

SEQ ID NO: 19582 - DNA, 298 bp, Zea Mays
atcagaccgtatgatagcccccaacggtcagctaacaagaacagaacggtcacctgcaatacactattcagggtccagtggcacaccggaccggtgctgtttagggtccggtgcaccactgcgcagacaaccttttgccaaataactccaacgactcttttggtggttgaggcatataaatatccccaactagcagattgacgatacaagactcactccaacctactacacattaagtgcaacatctccaagcatccaaagccaatcccacaccacatttgatcaatttgtgtttgag

SEQ ID NO: 19583 - DNA, 743 bp, Zea Mays
acggagcaccgagcgaaaagttatgcccgttttatagaaggtacctcaagttatggtttttcagggcacaaattggtaggaaccgtagcggcggctatagagcacaggggcacaaacctccctggtataagcaataggtaaacaccagatgatgaaacaagaaggggctgcaatgcaatgcggcttgcaacctaatctagggctagcgtggcgagaattcacacaaggcggttagcgagggcaaatcgagtaatgtggtgtctcgacttgtaatctgggtaaggtggatgggatagcggcggaaacaaataacaacgatggagcggttgaactacgatgacgacacgacctaaaccaacaacaagactcgacacggacacaaactcaacaaagcaatctaaaatgaaattgcaaggctaaacaagggttctaggacagcggaacatatatatttttttgtatggcaattatctgaagttataggatgaaaaatctaaactaaactagggtaagcctgatggtaatacctgagtctttgaataccacttgatagtaacgggggtgcccgatcttccgtcaggtgaagataactatcgatttggtggagatgtcacacagacgatctagcttccaatcaacacgactagaacaccacaatcgcagcaccacttctcctctggttatcaaccatgcactgcgtgattgacctcaccacgagggctaattcctgcctgagaatcaaa

SEQ ID NO: 19584 - DNA, 636 bp, Zea Mays
atgtgtacctcaaggtgtcaccacttcgtggaatgagaagattcaaagtaaaaggcaaattatcccctcgctttattggacccttcagaatctttaggcgagttggggagatggcctacaagctcgagctacctaatcatctatcagatgtgcatgatgtattccaggtgtctcaactcaagaagtgtctccgtgtccctaaggaacaactaccaatggaagagctcagtgtttaggatgatctgacttacacagagtatcctattaatattattgacgctttgacttgagtaacaagaaataaagtaataaagacgtgcaaagtgcaatggagtcaccatggagaagatgaggctacttgggagagagaagaagagcttcgaatagaatttccccatcttttccctagtcctacctaaatatcaaggacgagattcttgttaaggggtaggtaggatttgtaaagcccaaattgtaaataataaaatagagcttcggactcctcctaagtatcatgctgttgttgtgcctggcaatgcccttctagctgctggttatggaccaaggtaggcgccagtggtggtggtggtggcaactgaacccaagtagcttgggaatgactcgtcgaagcaacaa

SEQ ID NO: 19585 - DNA, 388 bp, Zea Mays
ccgctgaacatgccggggcaatccatcagttggccatctagtgaatattttatttatctatatcactatataatccaccacttcaaataaatctagagccaccctaacaaatgcacgcaggaaaacaacacattaaaattaaacggacaagatcctacctaaacttctcatttctcttactcacatacaacgaacaatattctttggatcatcgctcgtcccaggctcccaccccacaagcactgcgattattttctcttactcacatacaacaaacgaggcagtttctttcgttatttattttctgtttctttcctttattttctttattttccttgcttctttattttctttcttctctgccttcaatcatgtatgctgcgttaat

SEQ ID NO: 19586 - DNA, 514 bp, Zea Mays
tggcgctggtgctgaggcttgcccctcttgtgggctggacccccagtgttgcccctccttgcgtcctggccacgaggctgatcaacacccgaagacttctttgactccatggtgtactggtgttgcatctccacacccaatgcctactccactgtagtacggaaatccaccaacggaaaggctcccagggcatgcctgatagaaggtttcaggccctgacgaaaattgctcgccttctccatttcattgtaagccacatgaggaacaaagcggaccatcttgttgaagcccacttcatactcggtgacggacttcttctcttgcttgaaagactgcaaatcaatcttcattttctccagaaaagtgactgggtagaacctcctctcaaactgcctgatgaaaacatcccaggataggactcctggtgaagaggagtgagctgcctgcatgcctctccaccaaatttgagcctctcccttcagcagctgagtgccaaagcgaacacaataaccat

SEQ ID NO: 19587 - DNA, 460 bp, Zea Mays
aaatctttgatggaattcccaatcaaccacgtatcaatccaaaagagagtatcattaccgtttcccacatgggagatcactgaaatggcaaccaacgccttgacttgtggctgaggagggatatcaagaccaatccaggacctgttagggtcggttttctatagccacaaccacctggcttgcagcgcccagcttctgtaaagcagatttgggaggccaagaccaccaagatgcagcggcctagtaaccttctcccaagccacaaggcagcaaccaccatttatctcctttctacccttccagaggaaagcccgtctagttttatcaatagctttgatcacccacttgagaatgctcatagcaatgaggagatagactggaatggctgagaggatgaaacgaaccaaggttgttctcccagcgagattaagaagggatgccttccagttaggctacctcg

SEQ ID NO: 19588 - DNA, 495 bp, Zea Mays
atcaccgtcgtggtcgacgggtcgggcgaggtggtgcaggcggaggcgtacttcgcgcacccgagctacgcggaggcgctctggcggcgctgcggcggtgaggaggccgagattggagagtacaccgtggaccatgccggcgagtacgtcccgaagagtgagcgccttgccgacgctgctgggcttattgacgccatccataggttcgtcgccactgccacggacaaccgacgtcgtgctcacggattactaccatagttcagtgaatatgtcacgtgtttcctcttttcctgggctagtgcttcggttgcagctgagtctgtcacgaactgtaattcatcctgcaaatttgcagacactgcttttaggctatgcaggtcgtcgtattatgtattcagcatgattgaatccgagttttacgaatgagaaatgttataccacactttgtttggacacatgattcttctcttttcttttctttttctctccggtgag

SEQ ID NO: 19589 - DNA, 519 bp, Zea Mays
atcttgcaaacgatcataagactcaggattcccccgcactggacgacgggttgattactgctttcttcggggactctttaacaaaaagtacccgcgaaggggtacagtagcatcctggccgcacgattcaatatcgggggctgagattagatccaaaccagccaacccacccgagccaccgatcccgagatcaacgccacatattcagccagcgaagaggtaagtgcccaatctaatcgtatccgtctccggccagatcaacggctaaaatctccccacgcccggatctaatcataaccgttggcgtcaacatcagcggccagggaccttcttcaacctcacgacgccaggctgagacggcgttcaccccagcgaaccagcgccccggacccctggcagtacttcggtgctcgattcctagcgaatccaggtgctaatcatcgcggtaaccatgggaagacgcgagcgaggcctcaccgagacttggagcgcagatccactcgcccgcggtgatgcaag

SEQ ID NO: 19590 - DNA, 718 bp, Zea Mays
tgaagctcggttacttcggggagacagagaagaagcttcttcgttttgccggcgaagaaaccatcccagagccaaaagatgacgaagtggtagttttcaaaagccttttcaaagctggattgcggtttccgcttcatgagatgattgaggaatttttgaataattatgaaatttatcttcatcagctgactcctaacgctatcgttaggctcatcatcttcatttgggcccttcgaagccagggaatggatccaaatgctgaagccttctgccgagtacatgagctacattatcagatgaaggccagagaagatgagcttcatgagaattttggctgttacaacttcgattaccgcaaggatatgaaggcaccggtgctaagctaccgcaccaagtggccaactggctggaaaagtgagtggttctatgttaaagctaatgagaataaaagggagaagctaaagacgttagtactgagcccgctgagtttgagctacgggttgactaggcccttgtgccgtatgtcgtcggggtcaccatgccaacaggctgtggcagaatttagagttgtgactgagcagatcggcactagagatctggtgcaagaatacttagcctatggggtatttccgacgttgagtgaatggaatatgccgaagctgaaaggagaaaagaaaaagaatgaacttgttcgattgccctatcacttcaagttcaa

SEQ ID NO: 19591 - DNA, 931 bp, Zea Mays
ggaaacgcgtccaagcgcgtacccgcaatgtttactttgcgcagaggaccctggatttttgaacaaacagtaaagaaccttgggcactattgtcttgtctcactgacgtttgcacaaaggccctcggagtctgattcctttacaacgtcaagtcccccatggagatcgccggtgagcatgctttccggtgaactcgtaccggcagatatgctcatgatcagagccctaacctggctcacatcgaatcccacctataacgaccttaacccccaatcaattgcaaagttctagctcaacatcaccctgtccacggtgatggcgcacaccgaggacaatctaaggtgttcccgataatctaatggggtctcactcaattgactgggccgataagcatctatagcacacaagagtgccaaaacgagggtcagaagggtatgaacggacctggaaacgacagtccacggcgcggtggttcacggtggcacagagaacagaattgggggaaatcccaaattggggagctgtgggtgacgattggaggtgagggctggttcactaggtgcacaattacttagcggagcaagctgagcataaatttatagtctttgagcggcggctccgaatatggaagggaggtgctggcggccggagagagaagtatactggcgcgggtgaccgtggctgtcaccatggcaaggccctaggcgatagatgggctgtctactgtgatcaattgcgacgtggtaagatggctgacggtgtggcataaccgcgaggaacggtggcacgacggtgatggtcacgcggccacatcgccgggcaagtgggcacagcgacagggcgaaacagtggcccaagtttatctttaactcgatatttcttaccccgagtagttatctgctcgccaccgggcacgaatcacgcaaatcag

SEQ ID NO: 19592 - DNA, 1198 bp, Zea Mays
tggcttggtctgttttatcttgggtctcagttgtctaccaatgtctcaacataactgcaaaattttgagctggaatgtgcgtgggctcaatgaattggccaggcgtgattctgtgcaagaactagttcgggatactggtagtaccattgtttgtttgcaggagactaaactcactacaatcgacgacgcaaccatccttcgtaccttgggtcagaattttctaaacaacactgctgtgctgcctgcaaatggatctaggggtgggattctgcttgcagcttcgaatgactttttctcactttcgcaagtgtacaccacctcacacactgtctcggccatgatcactatgaaggcggacaattcagcttggtggatcacaggggtttatgggccacagtcgagcgctgagaaacttgttttccttcaagaactaagtggcctcgcagcacaacgttggacaaagtggttggcgttaggagatttcaatctcatatatcaagcctcagataaaaataattgtaacttgaatcggcgcctcatgggcgcgttcaaatcagcactggacaacctacagatgaaggaaatccacctcaatggccgccgctacacttggagcaacgggcaagtgaatccaacgctaacaagaattgacagatttttctgtacaacggaatgggagttgctttttcctagctactatctgcactcccttccgtccctcatgtctgaccacactccgcttctcctccagggagaattgacgacgacacatagcccctctttctgtttcgaaaatttttgggtaaagatggagggattcaaggaggctgttcaggctgcctggctgaaaccacttcgttcctcctttacacccatgaagcgccttcatatcaaattagcgcgtgcaacaaaggccatcaaactatggcgtaagaccaaagtgggagacacgagattacaacttgcaatttccaaagaattaatcctccgattcaaaactgctcaagaggagcgtgtgctcacccaagaggaactggatctcctgaaggcactcaaagccagagcactgggacttgctgtaattgaaaaatcgaggatccatcaacgagctcgcctcactcgcattaggttgggcgacgcgaacactaagttctttcacctatttgctagctccagagcgcgtaagaacttcatccat

SEQ ID NO: 19593 - DNA, 611 bp, Zea Mays
caacatcgatcgcagctcgatggttcatgcagagaacaacggaacacgacgagttataaaggttccgacatcggtgaggcataataccctatgttatgtgggtttctagaggttgtattgctctgagttcgagggtttacaagcgattgttgaaggtaggagatgaaggtgccctagtgatctagcgggatctaacctatttgtaggggtacctcctcaaccttatatagtcgatcgaggagatgacctagtacaaatcaaagcattcatgcgtgtctatcccactacttgctacgatcgcgccgagtcttccggtagcatgttgacctctttcgcagatctcgtgcccgtctgcatgagcaaatcgagtctcgcgacatttaattagcctttctgacccggcgtgtgagggtttaagccgactgtcggtacctctcagttgaggcccacaatacgtcccttggatgacttatctggggcctttcgggcggcacatgaagtaagtctatgccttgatggccctgggatatccatcccccacatcagagcaaagtgcgatgccttgctagcctagcggtgagaatgaacgagttgtccggattcgaatgctt

SEQ ID NO: 19594 - DNA, 938 bp, Zea Mays
gaatttcctaaggtttaatgtgattaaaataggattagatgagaaattaattttctaactgagttcatgtcaaaacagtgatactaaatgatagagaatattattacaaaattttagaaattggaatggttcaatttggaccaaaaatggaatttctatgaattttacaagtttctagatttgtttttgtattaaaaatgaatttctaatattatttctttgtttttaaacgtctctggactgggcctcgaattccagaaagtccaggggcccgcgcgcataaatgcctagactcagtgaatagtattacctggacggcgggttgattacttaagactgtggggtctctttagtaaagttgacccgcgaaggggtatccttagatgtgggccgctggatctgaaatatgcggtcccgattagacccagagcgtgatggtcggtgatctgtgcgaactgccgatgacgcaatggacggctctgatttaaaaagaccagatctatctacgcccgttggatctagatcaacggcgctggctaatccacccaaccggtaacccattgatctaatcgcaaccgtcgaactatggatcaacggtcacaaccctttctctcctcccccaggtcaccgcagagcgacggcgatgagctccgcggcggcggtctcaccagcgaactgcgaaccggtgctccagcgcgccaaaccctgattaactagtcctacaccttgcgctaaacgagacggacgtggctgaggtatccgtacctggaattggagacctgacgaggccggacacggtgcgaggcggatccgtggcggtggaagaacaacggcgagcaattcggagtgctccgcttactaattccacccgaatgtgccaccgacagttttgggcgttgcccacgaaccccccggacgccttgccatggccggaaacc

SEQ ID NO: 19595 - DNA, 436 bp, Zea Mays
gggtcggtcctttgcagccatagccatctcatcctaagtgcccagcagagttcagggaggctggaaattcccaaacctccaaagttcaagggtctacacacttttccccaagccaccatgcaatgccctcctttaacctctcttctgcctctccataagaaaccttttcttatcttgtcaatttccttaatgacccacatagggaaatcaatagccatagcagtataaacacacatcccagtgagaacatgttgcactagaattcttctccctaccctatttaataagttagccttccagttaggtaatctatcagcaatcttatccaccaggggccagagttgttggttggataatctatgaagggatagagggaggcccagccacaccacaaaccatggcaggactgagtacatataaaaataacaaaattgga

SEQ ID NO: 19596 - DNA, 1223 bp, Zea Mays
cccctccctaccttgccgctgtccctttgaccgcaagctcacgtccttcctgtcggcggtcgcctccctcgccgactcccgctcccgctcgcccttcccccctgccggcgctgtgcctgcaactctcactcccactgcctacaacgcccttatgtccgcctactcccgcgccggccgccacgacgaggttcttcgtctcttcttctcccttcctttcgcgcctactgcgccactcttcaccaccctgatttcctctctcgccgcctccggcagcaaaagcgccgcattggacgccttctccctccttgcttccggcatcggacccaccacctccgccttcaccgcgctgcttaagtccatcgacgctgcctcttccgagtcggtgtatcgtgccttcttcgcaaccatggccgctatggagtgcgcccctgacgctgccacgtacaactgcctcatttggatactctgcgattcccagcggctggacgaggcatggggcgtccttgacagcatgctagaggtaggcgtgtgccccaccgtccgctcctacaccgcgatcctgcacgggtactgtaagcagggcagggtcctcgaggcggagaggttacttgataccatgattcaagtcggatgcgcaccggatgtcatctcatacagcgtgctcatccaggggctttgtcgtgtaggggaatttggcaaggtggaaagaattttaggggagagtgaggcgaaggggtggacgccgaatgctgtcacctacaatatttacatgtctgccctgtgcagaatgggtttcttggatgaggcattccggcaagtagatgttatgcatagcagaggagtgtacatgaccattgagacagtgaatattctattcgattgcttgtgccgtggctcgatgttttcagaagcattgacattgctggaatgcagtgaagaactcaactgggatgttgatgtgttctgctataacactatgatgagtaggctctgcgacactggtgatattgctagagtcctgaagctgttagttgatcttgtaaagaagggaattgggccagatatgtttagttttactattgcaatccggagcctctgtagggctggaaaattcaaggtggcaaaatgcctactggataataagggaattgaatatgacgtcgtggcattcaatactttgattcatggtttgtgcatggctggagagctacatgaaatgttgc

SEQ ID NO: 19597 - DNA, 654 bp, Zea Mays
caacaaggagctggtgaggctggaggagatcgggacagccatgataagcctggaggagtgctgctgggagatgcagctgcagcagcacgaccaccagctggtggctgtccccgtcagggtcaggaaggacggatgggcaagcgatgccatgctttatgtaagcgcgatctttcaactgcattgccggccatttgcagttttagtggcactgctttggattaggataataatagacgtggatggcaaatgtttgatggaaatgacatgtgtaactgatagaattgggtgtggttaactgttcaggtggacgtggagctcgtggacgcgaacacacgcccggacgtcgatagggcagtctcgttcagggagaagccgagaacgtacatggcgcctccgccgacaatgcgaggtagccgcaagagcttggagtcagcgacgtgccatgatgtccttgacctgaagcagctgcttgatctggctgagaaggaaggccgggtggccgtgtatggcaacataaggagctccgacaccagcagcgtgagcagcactagcagcagcagcagcacgattagcgtcagcagtgctagcaccagcggcggcgcgagcccggaaccggcctcgacgtcgaagcgccggttcctgccatggacgagg

SEQ ID NO: 19598 - DNA, 320 bp, Zea Mays
tactacagggcgaagctcgacggggaggtgtttgcggtgaagccagcgaaaggtgacgtgtcggcggagctgaagatgatgcagatggtcaaccacgccaacctgatcaagctggcgggcatatccatcggcgctgacggggactacgcattcttggtgtacgagttcgccgagaagggctcgctcgacaagtggctgtacgagaagccaccgtccgcgctgccatcgtcgtcgtgcaccgtggcaactctctcgtggggtcagaggctgagcatcgcgctggacgtcgcgaacggcctactctacatgcacgagcacac

SEQ ID NO: 19599 - DNA, 679 bp, Zea Mays
atttgatgccatcggctttgtataccctgattatcactacccactgcgaaggcaagggaagtaaagaaaagctatcgctttggccaccactgttgtgccgaagggcaagaagatgaaggtcctgacccatcggccgcgatacattgaaccggccgtggtgcctgaatttggcgaaggaacctcttcaactgccgaagtaaaacaagctacttcgattgcgcagagcgccgaagagccgattgtagcgccgaaggtgcctacagtcgggcctaccgatgccaaagatggtgcggccgaagagccgatagtggaaaaggtattggaactgccagaaattctgagcccatcagcaggagcagaattgccaaaggtacaaaaaactgctgccgcaactcccaaaaggaggatggccaatgtactagacgctgtcatagagaccatgaaggccttaactcctgctcctaccaagaaagctgccgaagctgccaaaaaccaagtcgaagccaaagctgggccttcagcgcccactgcgacgaaggccgctgtgcctgaagataaggtgggtcagcaaatttcagataccggcaagacgatagagcaagacatggcagaaaaacaaaatctcttgtccccgaagccttatatgaagatattgattacattgtttgacatgcttcgg

SEQ ID NO: 19600 - DNA, 473 bp, Zea Mays
gaacatgcagaatgtcttgtgaaggcaagatcaaataggcaaatcaagtctttcaggtgaaatatttagtaattagtattggttctcacagtaaaacatatatgctcaaagacttctctattccacaactccagatttctatgattttttttcaattttgatgctatttgttggcatgtcgtacttttcatgtttctgtgtggcctagatatctattttcatgttcttgtttctttgtattacctaaacaaactctcctaaatactgaacatcgtcgtactagatatattacaaaataatttacgtgaactgatgtatttcttgtcacagtgtcggcttgcactccaaaggaaacacttgcaatactgaagttataaaaggatttttcagatcttgcctgcatactaccagatgctggaggtactgtgtttcagattcactgcttggagcgatcagcatatttatcagtgtta

SEQ ID NO: 19601 - DNA, 504 bp, Zea Mays
caggcgcatcaagggcagcaaggtcataagatggcatccctagagcatccagatccactgtaacattccttatttctgcagtaccaagtaacccttgataaaaattaaagaaggctgctgcctttccttcctgggcggtccagatctgcccatcctctgagtgaattgctgcaatgaaattctttttcttcctgaaccttgtttgtgcatgaaaaagagaggtattggcatccccttctttgagccatccaatccgcgatttcaaccttgccatggtacgagagatagaggagagggcaagggagtgctttttgagcatgtttcggagccacaattcagcaggagataaggagcgattgtcctgcgccacctctaattgatgtaggagctccctagccatctcaagctgcagcttaatcttcccaacttttttgtcattccagctcaaatgtgccagcacacttgccctcacaccgatattgtctgtcaacacatcgtaaaaaa

SEQ ID NO: 19602 - DNA, 391 bp, Zea Mays
taacagtttccttcgacatttcccagtcattcaccagtggccacactttgtaagcaatatgctcttgtaccaaatccctggtaccaatataggtgcacatagtgttaaaagccatcaaacatgcttgcacttcgtttccaattgcattggacggccttttgatgccgaagcatgactgtacgggacgttggataataccttccacatcttccctctcactcaggtcattcttcaaatagaaccattgtttcatccgagaacccgaccacttcttttggaatgttggcacgaggaatcttgcatccgaacggggcacaaagctatagcacccgaagttgttgtggtattattccttcccaaatgcttttgtcttgtaagataattcatgaat

SEQ ID NO: 19603 - DNA, 747 bp, Zea Mays
tgggcctgctatgcataaaactggcatcccttgcacgttctcaccacctggtgtgtgtctgacaccgcgagggagaccacaatgactggtcggtggcgcgggcgcaacacgatggaggggtctaccggtggggtccactagttagggacctagggagagggggaaggacacgacagggggctgccaggtgggccctgtacgtctaggttgccggttctctccagtcgcatgagtcacaaaggatagaggggggggggttcttggcgaggggctagccggcgtcgaggcacgatgtgcggtgtggctgggacaagagagaagagaagaaggggggcttgtggggcatcggtggttagcaagagaaaagggggatggagtggaagcatggtgcgcgacatctatctatggtcgtcggtgttgaccgaggtgggggacaaaggcgcgacgtcgccgcacgaccctaggttacggtggcctagccgcttggcctaacgaccacgacaggggagaaaggaaggaagggggtagactctcacccgcgtggacgaaggcaagggtgagacttagcttggcagtgcgcggtccagtgcattggtggtggattatggggcacgaccaatggcgatactccaagcgcggtggagcaagacacaacatggcgacaactcgatggtcttaggcttcagcgcgacgaggcgaggtgcggggacgatagttcctagttggcgaggcgaggtgtgggcacac

SEQ ID NO: 19604 - DNA, 299 bp, Zea Mays
gggtcgcactctaaggcccaaaccgctatcaccagcaggaggatttgacacaaaactggtaaaagccttggaaggaggcagattccaggctgagtatgcaacaggagcaccgatgttcgacaccttgcctctgagtatcatctcgagccggctgaccaaatccacaacagaaactcttctgttggtaacccgggttgaatcagcgaggcctcgatatagataagccgggtatgctctgtcttttagtggctgaatgttcctgaaaatgaaatcggcgaccacagcttctgcagtcagaa

SEQ ID NO: 19605 - DNA, 462 bp, Zea Mays
cgtcaagaaaatgctcctcgatgacaagaaaggcaagtgggccgacctgctacctgaagcagtctgggcactgaacatgaccgagtgtcgggcgaccggaatcactccattttgcctgctatacggatcggaggccatgaccccacaggaaatcaaacatgggtccccgcggacaagcgcttcagcagtacccgacgtcgacgagccaacttccaaagacctcattgacggagaccgtgtcttcgccctgcaggccctcgacaaatatcaagcccaaacgaaggcctggcgcgaccacgcagtcatcccaagagaattcaacgaaggggacctcgtcccaagagattcacagggtaagctagaaccgaagtgggaaggaccatttatcgtcaagacgaagtcgtctcccagcgcgtacagattaacaacacaatctggcgaagacctggaacattcctggaa

SEQ ID NO: 19606 - DNA, 399 bp, Zea Mays
ttgatctatatatgtgttcataagctttgcactttgtattgatcattcctgtcaatgagacaattgcatttttgggacttcaaatatgacgtttcgcaataataccatccaaaacatttattttgtaaaaacgggacaataaacatcttccaattgattatactactatttatcgtattttttcacttttctaatttctttccacgtattttatactcacatttacccttacatctcttcgtcacctgctgatctgctatgcgcagccatggacgaggagagaaaggatcactcgatctgtcaagaactgcccgtcgccagacggtcgcccctacgccccatgctggccagagacgtgcaggccgtcgggctagccctcgccgtgctgggcacgggcac

SEQ ID NO: 19607 - DNA, 536 bp, Zea Mays
atctgagcaaggttagtgaggtgtgtcatggcgtcgctctataggaattgtaggcagtacaacgcgctcatacactgaacagtgatcctcccaacttggtcgggatgcatagcccatacgtccttcacgtggctcactctgttgcaccacatggggtcatccctctcttctcggcaggaaagagtcctagtgggtgcattaccatctccaagggatgatacccacagaaggttgtcagggtcttcagtgctgtggcctcggtggtgtcgtccgccctgaacccgatagtcaagggaacgccaacccggttgcagagggtgagcctccagagtcagccaaacccgaaaacgtggcacccgatgctcctcgtacaactgcactttgtacgtagggggtgtagggtaacacctcccacaagatggagggaaaaccctcgtgagaatggtagtcgaaactgaaacgagtgtctcctccattgatgggggtgggtgaagtcatctgtgaaagagggttagatgtaagtgttatggcagtgg

SEQ ID NO: 19608 - DNA, 502 bp, Zea Mays
ggcatactttgcgcataatgtggaggataactcgggcgactagactccgcaagagtcggcacatccgcacatgatagaagtagatagactcagatatgattagataagtagttacaatctgtaaagggacgtatcatcggctagttatataaggctgaaggggtagacctacaaaaactctctcgacattccactcatcacaaccacgcccaccattagattgataggagatcccatccatcaccacccgcaaatcatctgtaatctatgcaccaccagcaaactcaatacacagcaccaaacaggacgtagggtgttacgcaatcaggcaacccaaacctatataatccccttgtgtactgatgtgctcctgcacgtaccatcgagtcgcgatcaacgatgtcatcctctccaaaagcactgagtgagttaccctatagtgcgcagtcggaacataaaaaacgacagtcggggttcattttttatagggccatcaacctaa

SEQ ID NO: 19609 - DNA, 438 bp, Zea Mays
atggatgcaggttcacatattggcaaggtcaaggtgttattcgcaaataataggatctggttgcgatagttttaagactaggtgggatcgcgggttgaatctatactcttctagggactcttttgcaaagttggcgtgactgttataacgcacgcacaatctttgacgtttgatcaagatccgaaggcctacatcaaaccagctgaatcggtattcttaggatataattccatccatccaaccacgatcggacggtcacaaagcatcgaggcgaaggggtatggccgcatctaatccagaccgaccatctaaatccaatggcccagaggccatcatctccacccgatggcgccccacgacggtgaacaggcccctagcggcggcgcccatggccggcaaccatgcataggtgccccggtgaatggagtaacacgcgaa

SEQ ID NO: 19610 - DNA, 1355 bp, Zea Mays
aaccacatacgacaactctctgatccattttcctgcaaacttttcattcttgtcaaagacttccttccttagtgcttccagtatcattccattagccctttctacctgaccgttagcccttggatgtgctattgatgcatatttaatctggatgcttcgttgttccgagaaatcaaagaattcagagctagtgaaattggatcccaggtcggttatgatgctattcggtatcccaaacttaaatattatatcttgtatgaactccactgccttggctgaagtcagagaatcaatgggtttgtattctatccatttggtgaatttgtcaatggcgaccaacatgtgagtgtatcctccctaagctttcttgaagggtccaatcatgtccaatccctagcacacaaatggccatgtcacgggtatggtctgcagttgctgtgctggtaaatgctgctgctttgataagaattagcaagcttcacacctctggactaactcggttgcatcactttttgctgtcggccagtagaaaccagacctgaagaccttcccaaccagggtcctggatgctacatgtatcccgcactgtccggcgtggatctcatctaacagttgcttcccagtagctgaaagaatgcacttcatgaggactcctgttgcgccccttctgtacagtgcatcccaatgagggtgtagtgggctgactgccttgcgatgcgttctgctgcatctttgtcatccggttcctcttcattctttatatatctgatgatgggctccctccagtcattagagtctgactctggctggctcaaaacgttgcactcttctgcttgatctgaggaaatacttgggcatggcacctcttggacgaaaactccaggtggaacctgggtccgactggatcctagtttcgacaacgcgtctgtcgccacattgcgatctctttccacatgatgaaattccagcccttcaaatttgtcttccagtttttggattgctgtgcagtacttgcccatagagtcattcgagcaatcccattctttatttatctgacttatgaccaccagtgaatctccgtataccattaacctcttaatgcccagtgatatggcaatgtttaatctgtggatcaaagcttcatattctgctgcattattggatgctgagaataacaactgaagagcatatttgagttgctcacctccaggtgcaatgaaaaggatccctgcacctgccccctgcagctttagcgagccatcgaaatacatccaccatacttctacagtctctgggttgtctggtacttgttgctcggtccattctgatacgaagtcaactagtgcatgagtctt

SEQ ID NO: 19611 - DNA, 571 bp, Zea Mays
aactaaacacaacaacgatttgcggtggcgcgactacggtctggccacagtgaagtggggttttggtggatctggtcactaaactgggtgccgacatgcaagagctctaggacagatcgagcttggtggttgagaggggagctctccagacctgagcaacagaacctctgcactcacatgatgagcacagactcgagcttgggggtgggggaaccttcactggaccatgccctaaagccatcagatgagaagacaggggtatagttttctgaacttgtccagcacatggtggagaggaatttaccagatgccagcactgcatggctgtcacacgtgtccaaccagcacatacaccacactagctcataatttagcacaattatccccttgtccatgactgaaattattaaacaattggacatagaccctcctgctcacagctcacaaacagccaagactggatatttcttattagcaagtggaacatctagcacctatgcattacaccctcatcttcattcaaatacacaggcaagagcaacttcttcagttaccaattgcagccctgaac

SEQ ID NO: 19612 - DNA, 1131 bp, Zea Mays
gctgcatcgaccaaaagggctagagatgatgatcaggtataatttgttgtctaatttgcagtgtttacaaactttatatctagataattatattgatcggaatgataatacatgcatagggggattatattgaatggaatgatcatcataccactgttgtttgctcattgtttgctgaacaagttagaaaaggaaatagaccgaacacacacttgaataatttgggctacaacgaggtgattacgaggtttttccaatgtaccggtatcatgttgaaaaaagtcagcttaagaacaaatgggacaagttgaagagtgatttgactgtttggagaaagttgatgaggaaacaaactggtctcggttggaattgggacaatggaactatcaacatggatgccgagtggtggaaaaaaataaaaaatgtgagcatctaaaatttcttttcattcaacttttttaatataataatgcaattgcttacttgttagcctaaatatgtaggagataactggtgttgggaaatttaagaataggcctctccaaaatgaagatgatatgaaggtgatgtttgggagcatcattaatgaagagacagatcattggaatcctatgtcttccaacccgatcatgccacctagtgcagatcaatcccctcacattatctatgtgtgtgtcttgtggacaagttatctatgtgtgtgtcttgtggacaatttatctatgtgtgtgtcatgtggacaatttatctatgtgtgtgtcttgtggacaatttatctatgtgtcttgcagatatgtagcgatgatgatggtgatgagattgaggattgtttcagaatggtcttaggcggtgctatgttggcacaaatatatgttgacatgtaccttactaaaaaccctacaaggacgtctacaacaagtggaatgggatttatgttagagcttttcaacactccaggggaatgccatagacaacttcacatgagcatagaaattttctttgacctccatgggttattggttgacaggtacgggctgaaagaatcactacacatgtcaactattgagagtctaggtattctgttattcatttgtggagggaatgagtccatcagtagagttgttaatagat

SEQ ID NO: 19613 - DNA, 665 bp, Zea Mays
ttcaggtatgtggaatgcgctttgtgagctgtgaagggtcgcccgtttgaggcaagaatttctggcatgcttcgcacgaacgggtcacccggttggctgtgcacacaattgtcggccaatagaaaccttggcatatgactttggcagacagggcccttggtcctgaatgtgatccgcatatacccctatggacttcgtggagaagttctatgccttcggcttcagttatgcatttcaacatgggttggcttatccccttcttatagagatgtctgttgactatagtgaagtctctgcttctatgttttaatcttttggcttcgctttggtcggaggaatggtagtggccttagagataagggtgattggtgcccaccagttttcggccattatcagattgactatccggtgcccgtcagcatcttgtgttatttgcagaccctcggggtttcttacggctagtgtgctgactatatgaaaaaatacatcggatggcaagggtttgcctgtcgctgctgctttggctagtgtgtcggcttcttcgatcttgttccactcaatatgttgtcatgtgaaacctttgaattgtttttctaggcttcgaatagaagcaagatactgcgttagtaatggctctttggtggagtagtctttttcgatctggc

SEQ ID NO: 19614 - DNA, 1050 bp, Zea Mays
gcttatagaaagaaactccaagtaaagctcgagaagatttatagaaaggttctctaaggcatcagaaccgttcaagagatatatgcaggagtaattaaacggataccagatattaaagtgaaagcatgaggtcgtgttgccaaatactttctgaatatcacagaaaattagaatggaaggaaggtaacatgttcttcacgctgatctctattgctatacaaatgtaaattccttgggttttactttccttggtctgcaggttgtctttggacaagtcaaggtccctgagatgtgaacaaatccacggctttccttggtctgacctctatggctatacaagtcaagaaatgcgcttggttcacgaagtccttgaaaactttcttttagcgcacagttcttttgggacaactaagacccattgtaatctgttttgtatccaacatttgtacattccaacttctcaacgctgcaaatatattcatgttgttacctcactcagttgaacaaacggcttggcagcatatttcaccccatctatctactatcttccttctattacttttcttagttttgtttcagttgcatcacttcactcctcaaactgtattccctcatctatgctattggaatttgtcattgcatcaatgtcatatttttgtcagatgccagccagggaagtgatgtatactgcctgaattgaaactattatcaatttagatccctaactgcaacttttgtgcttgctataaaatattaccagactcctctatcaagtatcagtgtcctctcagtagcaaaagacagggccagattataggtcacatcatgacattttttgcataagtacttacacgacaagatattattttgttgcataataataaaaaagttgaacacatcaagtcagaacgttatattcaccacaaccacctaatctattttaaaaactctacaaatttctaagcataaacttctatactctgtacgtgcttccatgtatattaatagatctatatattgcttatagaaaaactatattattactttgtg

SEQ ID NO: 19615 - DNA, 847 bp, Zea Mays
attaagccttggtgtcatgtaaaatttggagataattaggtctaaagtcaagctgacagtcagccaatgaactgaataagggcaagctgaaagtcaagctgacagtgatgttgggcaagctttgagattggttcgaccatgatccaataattgtttgactatgattactatagcaagattgtagctggatcatagggctacaactttgatatagagagatggttgagtcactacatgaatttgggaacaaatctccctgcaaattgctctgtcaggctgacttaataagaatctgatggtacagtaaacaaaaatcttctgttcagccccctcgccgctggtgacctttgcgcccggattcgcgcaggccgttgcgattcgtgcctcgggcgagtggattacgctcgacggtaaaaatatttcgtcgtggatgaacacaagacactatagccactctgtctcttgcccacctgcaccggcgacgtggccgcacgaccattgccgcggctatcgccgttctcctcgggtatgccacgtcgtggcttgttactgtgcgatagtaaccgtggcacacttaggatcgcaatcgttgagccgttgcatcggtgaacaccacgattaaagccaccagtgttcttctacctctacggccgccagcgcaatatgtccaattcacgagccaccaccctcgaatcctataaattgagcgtgctctcagctccgctaggtagtcaagcacccaatacatcaactcgtgcctcaaatcgtccaccagagctcgccaatttgagacttcccccaaatcgatcaaaaacactgtgcggtgtgagctcaccgtggctagctc

SEQ ID NO: 19616 - DNA, 504 bp, Zea Mays
ctctattttggttggatcgttggttgcacggtaaatccttagctgagctcgcactgaacctggttccatcagtgcatatgtatatcctcaggatcaaatcagtgcatgatgctttgcccaataaacagtgggtgaatgatgatcgagatgatctatccctgcaggctttctatgaattttttacatgttgagatatgcagcaagactttcagcttaaccctaagattcgtgatcagcacgtttggtttccttccgcgataggcacattatcctcaaagtctgtccacgatgccctcaattcaaggaactgggtacatgacatcagaggagctatcactgtaaatgttttgtctgatttcctcaaggtttgggagctatcactgtaaatgttttgtctgatttcctcaaggtttgggacctcactgcagactgggccttagacccggatcaagaggataagcatatctggcagctttcaagctcaggtttctactctgcaaatcg

SEQ ID NO: 19617 - DNA, 550 bp, Zea Mays
caagtcagttataatgctattcggtattccaaacctgaatattatatcttgtatgaattccactaccttagctgaagtcagagaagcgatgggtttgtactctatccatttagtgaatttgtcaatggcaaccagcacgtgagtgtatcctccctgagctttcttgaagggtccaatcatgtccagaccctagcacatgaaagaccatgttacgggtatggtctgcagttgctatgctggtaaatgctgctgctttgataagtattggcaagcttcacacctctggactaactcggctgcatcactctttgctgtcggccagtagaaaccagacctgaagaccttcccaaccagagtcctggatgctgcgtgtatcccacactgtccggcgtggatctcatctagtagttgcttcccagtagccgaaagaatgcacttcatgaggactcctgttgcgccccttctgtacagtgcctccccaatgagagtgtagtgagctgactgccttgcaatgtgttctgctgcagctttgtcatctggctcctcttca

SEQ ID NO: 19618 - DNA, 751 bp, Zea Mays
atcccaaaaccagcatatcggctcttgacaactcccccaaattgttctgcttgcaagatcatccattaaatgtttgactaagtagccacccacaacattcacggacaaaacatggtttttatcctccatctcaaccttactgccatcttcaagaatagccgtataggctggaatcgtagcgcgcaggctgaacacatgctctttcctacgtaccaatcaaggaaaattaacaaaaattagacctatcactctacggatgaactacaaaatcagactcacgttgggattaggatatggaactcactctacgaatgcgctgtaatttccatcaagctgtgacctgtcggccatctcattgccgtccattttgccgcctctcatgccgtctgtgcccttccacccgctgcagatgggatcatcccccatcttgttgaagctgttcatgtccatcgtcgctcacttctgatcttgtgtttgggggattttgtggttgaagtgctaatcagccgccgccatcagccatgtatctagggttatgttggcgcttggtggcagaagaacggaacaagaaaggcaagggagcacaggagagacgaggggccaactcagtcttttggctttgggggcaagggaaagaaaaaaaatcggaagggataggaaaggacgatgcgtgcagttttctgactgctgctagtgcctgaagtgttattccgtgaatacttagattaccagtgttgtttgctgaattagc

SEQ ID NO: 19619 - DNA, 366 bp, Zea Mays
gtcgagacggccgcaatcaacagcaagtgcacaacatcgccaaccagcaccccgctgctgacgcccctcgccgccaggaatatccccccccagggccgcggaaatggaactcgcggtaggggtcgggggcatgcgcagccgccgcgccgattctactgtctcttccatggcgaagactgcgcccaccaaaccagagactgcccagagacgaaagccaccaaagacaggatggcacgggcgcagccagccgacaaccccagagttgtcacgcacacttaccagcaaccccctccaccatacatccacgcccccgccccgcatccaccgcaccacgcttaccaacaccatcaggaagtacaaatcgta

SEQ ID NO: 19620 - DNA, 641 bp, Zea Mays
gccaaggttggtctttgaaagcatagcataagccgaggctactaggctggaggatgttgatgtactcgaagaagaacggttgaacacggtaattcaatcagcacggtaccagcaaactttgagacgttatcacgataagaccatgcgatgtcgatccttcgcagtgggagacctcgtcctccgccgaattctaacgggggagggacggcacaagttgtcacctctatgggaaggaccattcatagtagcagaggtcactcggccgggatcatatcgtctcactcaaatggacggcacggaaattgggaactcatggaacatagaacacctcaggaagttttacccctagctgtatttcaaaagttatcgggacgacaatgtactctgtaaactggaaatatatcatcaataaagagacctcaagaatactcaaattgttcatggtcgacctgcattcttacttgactcggggtgaccattatgccttgctaacggagcaatcggcttaagtcggcaatgacttaagacggtgcaacatgcttgcgcttacttaactcggggtgaccactatgccctgctaacggagcaatcggcttaagtcggcaacgacttaagacggtgcaacatgcttgcgcttactt

SEQ ID NO: 19621 - DNA, 479 bp, Zea Mays
gcccgccatctccgtgcatttggtccaccaccgcggatccccatcgacagcgaggtttgggctccagcgtggccacccgagggttgatctgaccacgtagaagctgtgtgagggagtaaccggtgggaagctagctgaagctataggaattcctcgccggagttgaggaacccgctgaactcacgctccatcgtggctagtgacaaccgtgctgcgattcatgttgaatctactcctgctgcattcgccatcacctagggatcgtgtagatactctagaactcgccctagggctctgcgtatctatccgggggtactcgtctgagtgctccgtcgcgtgcgggataccaccaccgcgttcggccaacgtgagggacgagaaggccctcgaattcaccgtaccccttcgagcgtggctggtttggtaaagagcccatgtactttattattataaacccatcgtcctcccttacatgaaaa

SEQ ID NO: 19622 - DNA, 685 bp, Zea Mays
gggggtgagagagagaaagaaagatatagagagaacgagttgggcctaggttggggtttgctgcccttttctatgtccaacatcgggaacaatttcgaaaccaaattttattcataactgccatgggattacaagtggggtgtaaatccgctcctgccatgaaccaccgaggggcctcagcagggacatcacgcattatggttcctctagctcctgacgcgtgtgacaccccatttttctagtgccactaatggcgcttgcccttttggggggtaggggtcatgagggttaggtgccctttactctccccttcaatggagggtccaccctagttgtttgttggggagctagggtcccagcctaagtatgagcagagggtgttgaagatgaggtctccaccgacatcaaccatccctacaaatccaagatgtcggtggtagagggatggccgcagaccatgaggcatgagatcacccctggggtgtgacgcttgtggggtggaaacaacttggagatgtcaccaaagccatattggtgggcgaaccttccttcgtcgcacaacgcggagaggcatgcataggacgagaagaaagcccacagatcatcgtatgatgggctaggtaccatatggatcaccatttgaggccttatctcatcgccctcgaagggcgagattgatccttgc

SEQ ID NO: 19623 - DNA, 765 bp, Zea Mays
acttagaactcttagtcgatagtagaaattgttttggcttatgtagagaggtgatgacatgtcgtaagtagtcatcacttcctctataattataagtcgagtctatacgcgttaggcattccttaaattgtgcttcgcaaataagtgtatggttgtgtttatgacttgaatagatgtcttcgagtgaactaataggttcctaaggcaattatgtgtaaggtgtttatagtgacgctttatcccgaaaggtgttaagtctgcgcataaataagagataagtgtattttgtgtagtgtggattgattttgagtgcatgtgttgcaagaaaagaatgagtgtgcatataggcgatgaatgggtgtgatgaaatggtgacatgccttcttagtcatcatgtcgtcggttggtgacctaactgaaggtcgtagagaaaggtcgattacccatgtgttattattgtcaccttgcggttctgtatgaattgcaatgtgaagtagtaggctctctatgtgatgctagatgtctaggtagactttcgtgaattgtggtgctcggaccgtcgagatgaaggttaagtcggtcgatgccgattaagtagttaaaatgattaatagaataatcatggggttaaaactagaaactagtgttctcgcacccgtttgggatgttgtagcccaattgtgcatggttatgatcgcgggtaaaaattagtagtgctcatgtggtgtctaagctaaaatgcgaactagtgggtgaaaagcacct

SEQ ID NO: 19624 - DNA, 404 bp, Zea Mays
aaaaaaagagcaaaccaatgagggcaagttgtagacaaagatgtatccacgaggttcggttgcttgctgataacatacatccttgttatgacaagtctgcaagcgatgaatcatcactaactagcgtgacaagctaggcccacgtcttgggtgccgcaagaatcaatcaaatgttccattccaactagccacgaacattccacgagaggatttgtactatgtgaggtgggatcaaaacctctcacagtatcatcggttggaggcagagaacaatcacctacactctcttgaacaaccacaatttctctaagctgtctaggttagcctgctagttgtctcaattaccaaaaccagacatagttctttcagcaagaagatcctacagtggtaatacttccataaac

SEQ ID NO: 19625 - DNA, 434 bp, Zea Mays
acccctcccctaccctaatactgttcaccatctggcggctacagtaccccctacctcccgcagcggcgagcgccaccctctccccttcctcgccgcactcttctctctcacgccaaatgcaggggacgactgtagccgtcccctcgcctccttcgcgcggacggagccggccgcggcagtctacggaaacttctcgttccacctcgcttcgcctcgagcactccgcggaagggcaaaatttcgcagtgacgcggcggcggatctcccgtcgaccggtggagtcggccccgggccccctcggtttcggagaagaggacgtcgagttcgtgaccacccagtgccgttcgcgacccaatacgaagaggagtccaatccgcttccggcgaggaacgtcgcgaccgattcgttggcttccgtctccgaccatcgacggc

SEQ ID NO: 19626 - DNA, 764 bp, Zea Mays
gaaggatcgatggattcaaggacagagggtggctgatattgcgccaagacttcttcaagttgttccgaaaagaaaaatcaatacaaggacagtgcaagaagctataactggaagagcatcgatgtcggatattcgaggggccctatctgtgggggcaattgttgattatcttcacctctggaacttattgttaactgctgaattaaggcagaacgttgaagataagcacatttttaggctggctgccaatggaaaatattcagcgaaatctgcctacgaggggcttttcattggctcgattccttttgaaccgtatgagaggatatggaaaacctgggcgcctcctaaatgtcggtttttctgtggttagttgctcaaaaaaaggtgttggacaactgatcgccttgcaaaaagaggattggatcaccctgatagctgccctctttgtgaacaagaaagtgaaacaatagaccatctactggtctcttgtgttttctcaagggagtgctggttccttttgttgagaaaatttggactgcatactctgtcccctcaaccagaaaatgattgtttcctggactggtggaggacaataagtgaaatggcagctggacaaatgaagatggggattaactcccttgttttgcttggtgcttggaccttatggaagcaccgtaatcagtgtgtcttcaagggcggcaatccgagtattgctgctgttctggagcaggttggagaagtgcgaaggttgtgggagatggcag

SEQ ID NO: 19627 - DNA, 478 bp, Zea Mays
ctgacacgtcgccgggggcttttaccgtgaccgccgacgaccaattcaagccacagcggcatccttatcgccggcgacgagcggctatgctggcgttctgatccactcgggttactgtaccatcagaagttcagtttaagtttcttgctacatgcctgacagagcaacttcagaattctttttctccagattttctatggcaacgtgatccacactctgcagcaaatttgtagagtaatataccatctacaaatttgttatgggaatcatacccaaacttgcactagatcatgtttaaatccaagtccaaagttagctcttttcactgaagttctgaatttcagaattccaccagcctgacagtccaactttgggcttacttatctctggatttttttaacaagtgagcttaccaccttaagcaaagttgttcttctataatcaggttacaattttgatgtggtgacctaatatgaat

SEQ ID NO: 19628 - DNA, 572 bp, Zea Mays
cataaacgcgttgtagtccaaggggttagtaggtcttgagtgctctgtggcccgaggggttcgtaaatcatgagtggaaggcaggattgtgactttatgatgggtcgatctcaggctaggcgcgggatccactcgaatggtttccctttggtgcgcccgacccctctgtcaggttctgccacgcctagccctaggctcaatgtcgcggatatcgttcgggagcaggtgcctccaaggtagacgttacctatctcctccaactgaccagtgggctccagttactagaggcctttccctagtacgctcactaaccgatgggcccaggggctagggatcttatccccgacagtagcccccaagcccccaaagggagagtgtctcccttcgtagcctgatgaagggtcgggtggcgtttgtcctttcaccttttgagtgatcgtggtgtttattcctactcaggagttaggttgtttcaaggtgacttgttgtcccttgggtggagttaggctcttctccctcctttgtaagtcccggtggtcgtttgctcactgatcaccctcgacgtccctttc

SEQ ID NO: 19629 - DNA, 450 bp, Zea Mays
gctcttgacaactttgatccagagtttgccagcgatgcaagaaacgttcgtatcggcgtggcaactgatggtttcacgcctttcaatatgaccgctgcgtcgtattcatgttggcctgtcattgccataccgtacaaccttccacctgctctttgcatgaaatatgagtttatgttcctatgtcttgttatacctaggcctgagcatcctgggcgtatgcctcaatgtgatgcttcaaccactgattgaagagttaaagaagctatggcaaggagtggaagcctatgactgcttcaagaagcagaaattcaatctttgtgttgtgtatctgttctcagttcatgattttatggcgtatggtattttctctggatggagcgtgcatggtagattgacgtgtccttattgtgctaaagatacatattgtttttgtcttagtgctggtggaaa

SEQ ID NO: 19630 - DNA, 551 bp, Zea Mays
aggaggaaatccccttaattcggaagaacagtcgacgctacatagccagcggggagagtagtggtgttccttctccagctttgtctgctctcattggtctgcaagaattgtctctggcaaattttgatcactctcgaagatatggtccctgaagatctgttgtcggagccggcagatggtgggatgatggaaatttgtgctgatgtgcctgctgtcgggttagagttattccgagcagcgtctcgtgcctcctcgaccttggagcgcggttttaggagtcaagaggctgatttggattgctccgttcccatggaagtggctgaaaatccttcagccttagaggtggctgctatagagaacttggtccccaaggatggcgcttgcgtttacccatcccccgagggtgttgccggtgatgatccgactcgggtgggcagcgtgagctatgacccagcccccgagggtgtccgagcaggttctccttctcatacttccatggatgttcacgtcgggtcttctcctccacattctggttgcatggcagcagcacg

SEQ ID NO: 19631 - DNA, 766 bp, Zea Mays
ctggactgcttgggtctgcatcacaaacatttgctcaatagtcatcgggggtggaggtggcaaatgttgctgcgggtctgcctcctcttggggtgcctgttgttctggctgagcatgcctcgcacctatgtgcctgttctcagacatctatagaaatcacacacatatatcaaatctgactctgcagtctttcagcataagaaaagatgtatagaaaatcttcatagtactgaacaaatgaccatcttcactgacagcttcttagataaagaggaaagtggaaataaatggattacccaactaaataactgactttattaataactacaccaagttgcaggggatacccacaccttggtgacaatcattacaaagatccaacttcattacatgtccatcataacaagcatccaacataagataagaaaactaactctaactaagactgaatagactaagacactaaactaagcattattagagactccgactctgtcgatctagggatccaaatctatccgggtcctgcagtttggggtaccatagtcgaagcgaccacggggcggtaaacggtaagggtgctgaatcccgacaagggcggaagaaccaccatccagatagtggcgtgcggcgcactcaacacgcaattccgcaacctccgcccaaaccttgcccaactcgttaaggtcatggtccaactctgtgttgagcacgacagccaggttgaccatgttgttcagcctaggattgccctcaccaactggcg

SEQ ID NO: 19632 - DNA, 420 bp, Zea Mays
gtcattttattatgttggatgaaaatgggtaggttagggcaagagtagcctaaggtaagacagtttatggtgagaaaggactccttgttgggtggtaatgcatctgaagatcgagtttgacttctctccttccttgacgaggttgatcttgttcttttctggtcttggtctcattgagtcggggtcagtgtttatcatcggagttaccggagaatggttaagatagatatggatgagatagactacatgatgtaggtcaaaagtttgtttgatgttaggtggagataggcaaattatgcaatccatcatgactctattggttgggttagatcatgatcatggtgggataagtcaagtggttttggtcacgcaaatataacttagatccagtctcattattttggattagatccttgttgt

SEQ ID NO: 19633 - DNA, 436 bp, Zea Mays
ccatgatgtacaatacaacctaccctcaaatggtgagatcgctgccatagttgttggtgactacacgactggggaatacacgtacgatgttcttgtgcacgatagagagtgtggcctaaaacgtgtttcatgcttgcatccagcatacatgcctttgcaatatccgctgttgtttccttacggtgaacatggcttccatattggtattaggtactttggtgctaacgaggttggttcatcaaaacgaaaatacgttacgatgcttgagtttgtaaggagacacctgcactacagattggatgagccaaacccatatacgtgttacggtagattaagtgatcaaatagatgtcgatgcatattcaactatcgagggcaacatgctacagttcatagcaagccaccaaagcgaactgcgttcagaaactatccaaggc

SEQ ID NO: 19634 - DNA, 499 bp, Zea Mays
gagcctcatattctgctgcattatttgatgctgggaatgataactgaagagcatatttgagttgttcacctccaagggcaatgaagaggattcctgcgcctgctccctgtagtttcagcgagccatcgaaatacattcaccatacttctgtagcctccgggttgtctggtacttgttgctcggtccattctgatacgaagtcaactagtgcttgagtctttattgctgtgcgaggccaaaactcaatgtcgtgagctcccagttcacaggcccacttggctattcttccaatggcttctttgttgtgaagaatatcccctattggaaacccagtgactactatgactttgtggtcgtcaaagtagtgacggagcatatgagcagttagaagtactgcgtacaatagtttttgaacttgaggatacttctttttagagggtcccagaacttcactgatgaagtagaccggatgctgtactggatatgtgtgcccttcctc

SEQ ID NO: 19635 - DNA, 699 bp, Zea Mays
ctcgggttactaacagaagaattccctctatggacttggtgagccgacttgagatgatccttagaggcaaagtgtcaaatgttggtgccccagtggcattctcagcctagaacttgcctcctcccaaagccttcactctttttgtgtcgaatcctcctgtcactgatggcagtttgggccttagagtgcggccttctgctgaagaagttagtgccttggttgcctcgctcggggagattcctgatgatgaacggcaggtccattttgaggtgcccctgaaccctagtgatacagagataagcgctatgcttgatttgctggctaaggactcttctgacgctgctcctgctggggcagtagtagtggcgcccctcccagaggctgatacaactttggatactcagaagcctgccagtactcgcccgaggcgcccttgccgagccaatcaacttgatccttctgctgatgagcagaaaaagaaaaagagacgcctccggcgagtatccagtttggatcgggacgttggtacatcggttcctgctgctgaagaagtgcctgtgactgaatttactgacgctgaccccaatgggtggacccaatctgttgctgatccccatgtgagtgctccatctgttgctgatcccaatgggggtgctccatctgttgttgatcccaatgggggtgctgcctgtgttgcta

SEQ ID NO: 19636 - DNA, 875 bp, Zea Mays
gttaatttctgtcgtatactcattttctattttaactctgtacgttaaatgatagatgccagataatgaacaatgcaatacttatttggtattgtttaattagaatattataatgtcttaattatgttattgtctttttagtctttgtaaaatgaagctgtgaaacgaaacgtcgatttattaaaaaagttgaaagtcttaaaattgagtttcaacatgtaagggacgaccgtgacagtttactgtcttatattggaacatgcaaaaaaaatggctgaaaaatatgtcattgaattagactgcgccataaaaaatgtctctaccattaaggtatgactatatgtttagataagtgatcgttatctagataaattaaactggctaacacgttttcaatgacatcgaaaacatgttggtattagagaaagatcataagaacattggaaactaagcttacaactgtgaaaatattaaatgtatgtacatacctatttttttattagtcattacatgtaatgaactaatgatgatctgttatatctcaataaatataagtttatctgtatgtttcttaacatatgatgtgttcacattgtgtaaaaattttttacataaatgtttaatatcttcaaccttattttacctgcacagatgtctaatatgacgtcatcagaaatcataactgagtataaggacatgaaaaattgctggctatttttcagtcgtgccttgaagaatctgaacagacaattttgcatcgagagaatttacgcaaaaagttgcacaacacaactcttgtaagaattctctaaaactcaaagatctagtatatgtatatatgtgcttttcggctattactaatttttttggcaaga

SEQ ID NO: 19637 - DNA, 724 bp, Zea Mays
accaaatggaggagggaatagaggtggagcaccatatggaacacccatgtggaggagcaccatatggatattcatattaatatggaggagggtatggtaaatgaatggtaggtgaggaggagcattactggtaggagattcaatgaaaggaggagtgttaatggttggatcatcattgggaggagaaggagcatataaggaaggtcgatagtgatatagaggaggagcatatgaatatgaaaacaactattgtggagtgcgagaacgaggatggacagaaacatctctttgacgatgatttatgagagaaaggtcatcaaagaagacctcctcacatcagcaaggatgtctaaaagttatgaagattggttcttgaatagacctgagcatgggccacccgacccgacccgacctgctcgaaaaacccccgacccgaccaatgcaatgggagggtaacccgcaataatccacgggacaggcacgggccatgacttttgacctaaaacttgacccaacccgaaaaaacccgacccaaagccaaaaaacccgacccaacctaaaaaaatctaacccaacacgctcaacagggaagcaagggccaactcgacctgacccgacactaggcacggttcgaatacatgatgtgtcaaacgatccacgatccgactcaacatttgaacatgtttattcttgagcaagttggtgaaggttataaagttcagat

SEQ ID NO: 19638 - DNA, 580 bp, Zea Mays
tcgggccctcctgctttcgcatagaggtcctaagccgcaagcctggctgttcaattcagatgtcatcatgcctgataggatgggaactggtcgggtgggttagctaaaatataatccagaaactgtaggagaagaccttggggtagtaggataatactatcatagaggtacatctgagagggtagttttcttttataacttatcatgcatgggtgcggaccaacaggccgggtttatggggacagaccccatcgggttggtgtacacgtatgcgctacctagttaaaagggaaaaacttcgacccctcagacttgctctatagataaaacttacagagatattttagcactgggggaggcactccttcagttgtagctagatagttgtcctcgggtcgggggattcccattaccatgaagggtccttcccagctgggggagtgttacagagccctaatttggtctggtacttccgtaagattaggtcccaatcctgggtccccatctgcgtttgacgaaggaggccccgcctttggctatggtcattaataggtgaacctatcagaaatctggacccgtg

SEQ ID NO: 19639 - DNA, 360 bp, Zea Mays
gcgggaattgcagagagtttaggggctaaagcataaagtttacgcagactcagtactactcgttggtggaccgcaggtttaatttgtaattcagtaggggctctttaccataattgccgaggtgaaggggtatcgcgaatccacaaccgtcagatctaactcaacgcgccagattagatcttaagcgcagtgaaccggtacgccatcccggccccttggatccggaatcgatggttgcaatttaaaaaagcgaagacttgatttggatcgtggattcaaagatctacgactcagattaaatgacgtgaagcggtatgggagtcctgatccggttcgtccatcctcgcatcaacggtcgac

SEQ ID NO: 19640 - DNA, 553 bp, Zea Mays
gagcatgaggtactattccatgcggtcagagagtaccttgtggaacatcgaagggttggggttagggccattcaacgctctcatttgggccaggtgcttgtgcagtttcgcagtgttttggagcgagacaatttggttttgcttggcccccagcaatatttagatgctactttcaccgctgttcgccacaatgacgcctggaaccatcgggctctctttttcaaccatgagtgttggctgatgcttctgggtttccccttggattaccgttcctcggagtacttgcaagcaaccattgggtcgtttggtaggctgattctttgggaggaggatcggggtaatgtttccagaaccctgcttcgggtccgtgtcacttcccttgaggaggtccctcaattcattgttttttcggaggctgagggcttcgttggtgattcttggactgttcggtgtgagattattcaacagaacatgcttggggggcaggctcaggatgaggaccctattcctcctgccccggaagatggtcagcagcttccattggttttcttcg

SEQ ID NO: 19641 - DNA, 534 bp, Zea Mays
ggatagtgatattctttctctagctctgtctgctcttgttagccttcaagatttatccataacagattttgatcaggcccttgaggatgtcattcctgaagatatgctgttggaaccgactgttgatgatatgatggatgtttgctctgacgctctagacgtgggattagaggtatcccgggcggtatctcacacatcgtcgactttggaaggcagtcttcggcgtcaagaagctggtcaggattgcccgactcccatggaggtgactgaggatccttcagtcttagaggtggctgttgcagaaaacccagcccccaagggtgatgccggcggttacccagcccccgagggtgtcgccggtaatgatccggctctggtgggtagcgcaaactgcaacgcagcccccgagggtgttgccgatagtgatccggctccgatgggtagtgcgagctgcaacccagcccccgagggtgtccgagggagctctccttcccactcctccatggacgtccacgtcgagtcgtctccaccacg

SEQ ID NO: 19642 - DNA, 711 bp, Zea Mays
aagggaaggagcaaactgtttgaaacggatgcggtggaatgtcactgttgcccctggtccaatgccaacagtaaaatgtttgtttgagtatccacggatatatacctgcaaaggattgccatgaaatgaaatatcaaactaacaactacccacttaataaaaaaataacctggatatttaccgcatgattattatcagcaatatggatacatagactgtacttctcattaccaggaatgcatctttcccacttacagacaagtgaatgtatattttctacttttccctgtactgatattaataaatctccatgaaccacttctttagttttgaagtcagcggacacagaagcatctttaggcatcataatatcaacacatgatgacacacttaaaacttcactggaggaaacacacagcccattcaatacatgacatacggtgttataatcttccatctttttgcttattgcctcataagaaaaatccaaatgaaaataagaattacggtagaagtcattccaaggctgaactaatcttagctcatcatcgaccatatttctggaaaatatctcatccatcttcattgaagtaactccaatagattgatccccaattgaccccttgatgtttatattaccaccaatggtaatggcgaagctccaaagtctatcttgagcatcaatcgagactttaccaccttgcaaacatc

SEQ ID NO: 19643 - DNA, 904 bp, Zea Mays
gttagtactcgagcgtgttacaacttgtgtgcttgtgtgttcagaaaaaatgggatccttcccttttatagttcaagggtcggactttataatgggggcttgtattcttctggaaggagctcggttggtggccttgggtagcgtggttcctctaatgttgtctgtagggtcgtgcgtagctggactttacaatgggggcttgtattctgctggagggagctcggttggtggccttgggtagcgtggttcctctgatgttgtccgttactctcatcatggcgtattgtcccgtacactcgtcgtacgggcccctttagctggtcttctactgacatcctcgtgatagagcacggggtcccacaggtcagttgtatggagcagccatgcgttgtgcggttttgtctgtcatcacgagcctgtgtcactcactggcatgcgtaggcgtacactcgatatggtgtatctattgcgcactacccgatattcgtgccactgtagaagctccgatgcttaggtactttatgaataggatcgtctggtccctcaaggctgtgggagcgtgtctagggccgtacttggggaggtgcagtcatgtcgatagcgttcacttgatgtgccctcgacttgccgctcgggcgactggccacaacctgggatgccatgtcttgtcttagtcggcgtggactttgtgacgtttgacttgagtttcctcggtggtcgtcatgactaacgaaattgctcggccgggacctggttggttgcttcgcctcgtgaactttgcttggcagggacctggtcggtcgctccacctcacagacttgctcggtagagacctggtcggtcactccacctctcgaagttgttcggcagggacctgatcgatcgctgtgcctcgttgactcgc

SEQ ID NO: 19644 - DNA, 698 bp, Zea Mays
tagacttgcctggtaactattgttgtacgagaattctgcttaaggcaaactattatcccagcttctaccatgctttagagcgcaagctcttaacatatcctccaacacttggtttgttctttctgtttgcccatccgtttgcggatgataagctgagctgaagtttagcttggtatccatggactcatgtagtcttttccaaagggggggtaaattgggttcctcgatctgatacgatcttctttggtactccatgcagaaaaataatccttgacatgtataactctgctaattgggctcctgagtaagttgtcttcataggtatacagtgtgccactttagtcaacctgtccactacaacccatattgaatcatagtcgtcacgagtacggggtagtccaactatgaaatccatactgatttcttcccatttccattctagtactttgagaggttgtagcaatcctgctggtctttggtgttcggctttaactcgttgacacacatcacatagtgcaacatgagtagccacatctcttttcaaaccgtaccaccaatacttttcttttaggtcctggtacatctttgtacttctagggtgaatagaataaaccgaatcatgagcttctcttaaaataagttggcgtaggtgctcgatttttggtacacagattctctttttaaaccatattgtgcct

SEQ ID NO: 19645 - DNA, 663 bp, Zea Mays
acgtataggaggagtcgtataggacgtagagagagagagagatggagagtcgtaggcagccgcttgatgtgcggcccacatgctgtgtgaagggaaggggtgccaactaggatcgcccgctactctccgtgtgtcctccttattacccgtccgcatctctttacttagtcttttttccgcgtctcactaaaaaaccatatcagagttcatgtgctaattctaatcacaattgtcattcatgtctctcttgcgattatgaccacggtaacacggtaactatggcagaggaaatggcgttgtatgcatgcttctcatttgtgcgagtggcaactaagtaaacaaattgaggaaatgatgttcggtgtaaagtaatactttccctctctccctcttctctcttctctctctctatccctccctccactctctttcctctctcttccctttccatctctcctctcctctctcttccctctccctcctctctcttccctctccctcctctctcttccctctcccttctcctctctctctccctccctccactctctttcctctcacttccctttccctctctcctctccactctcttccctctccctcctctctcttccctctccctctctcctctcctctccctctctctcactctctgcagagacg

SEQ ID NO: 19646 - DNA, 747 bp, Zea Mays
tcggtgtggcatgatctaatctcagccattgaaagccagatccatggcccccgcgtgttcttctaccttctaccagtcccgaaggcagcgccgctagtacactatggtggagcacccgccgaagtgacgctggatcgaccctcaaggcacgagagtcaccggcagatggtgcaatgcgaagaggatgacaatactaattgagtgaggtactcataccgagatcttagaacagaaacacccccgaccacggtgcggtgcggaccgccaacgccggcaagaaattctggggtccccggttacaaatctcacacgccgaggccatcagcaccttccttgcgatctggcgaagcctctagacacaacactgaggctgcgatgagcagttggtttaaccacgccgacttcctctcctcacccacggtgacgcttctctgcgatggtggctcggtgttttgttagagatggttcgactgcggtggggttcgaacttatagagggctcgaggtcccggcctcccagccacgcggggttatcgagcggccggtgagtttatcacggcgaggaaagtggctcggtgcaacaacccaaaggaagaacagactgactcgtgggatccacgcgacggcgagagaatgaagtggggcgctgtaacactccaaaatcgtatcttggtgaattaagaaaattctctaaagatttaaaatttcaagcatattataacaaagttatgaattgagactatcttcc

SEQ ID NO: 19647 - DNA, 371 bp, Zea Mays
ccaggaggggctccctctgagagaggtccgaaaccagaagaggaaggccattagtccaacagcacaggaagatgagctagatcaagagatcagagatctagaggccatccaccaacaagttgagagaagggagaaaatgctttggctggctgaactctagaagaagattgatgaagctgccgaagagatgcgttatattacacaagacgagcaaggacgaaggccacaacagagagagcttcgtcaggaaagaccaagttatgatgatgtatggtatgatgatttcaatcatggtaactttgcttttgaggatgcttcccccctagcagcataattgcaggctaccccatggctacctttgtacaaactgc

SEQ ID NO: 19648 - DNA, 544 bp, Zea Mays
gtgaaaccggctctccatatctcctcacgtcactacttttttcgtgaaggttagaatatcatatcagggatccgacgtgtattagtttttaacatattattagcatgctctaccacaaactcagatctaactaacatagtgacatcaactctccatcacgcctaaagacgacaatgggtacaaaatacctctatggccataaacaatagacccgatggataaggatacatgtgtgtggatctgctcgtgggcactgacgtgggtacatctaacctcactgctatcaactagcgcgagagggaaatgttatacgtgcacccacaaatacgacatgcccgctccatcccccacccatctccgcttccatacaccctcgtcggtatctagaggcattttgttcgttgccatatatagtcacattgttaggatctaggtcttgttgaactattctacacaacatgctttattgtttttgaatcatcaacaacaattgactatgatatagattgattgtgacgattttacataatctagtacaatgaat

SEQ ID NO: 19649 - DNA, 679 bp, Zea Mays
gttcagtgcaattggttggaccgatgagcttcaagggcacacaggaatgctagaacaagagcgaggagaacatgatcggacatatggatcactgactgcgacgagctcacacacacggtgttcttgaccgatttgggggaaatcccaaattggtgagctctggtggacgatttgaggcacgagttggtgtattgggtgcgtgactacctagcggagccaatggcacactctatttatagggcccgaggcggtggcccgtgaatttgagatggcgcggtggcgaccggagagggaagaggttactggcgcaaacaattcgtggacattaccgtggcaagatcttgggagaccaatgggctatgtattgtgattaactgcgacatggtgagatggccgacggtgtgtcatgaccgcgaggaacggcggtatgacgacgagggtcatgcggccacgtcgccggtaaccggataagcgacagagcgttcactgtgcttcaagttcatccacggcgagacctttttacccggggattgttatctgcatttaacggagcgtgaatcgcggtgctggcgcgaatccaaacgcaagatcaccggcggcgaggtgctctgcaccagagatatttctggcactgtaccatcagggagccattcagagcatctgacagcacaatttgcag

SEQ ID NO: 19650 - DNA, 689 bp, Zea Mays
ggttgtttcagttgctaagtgttgcgcttctgtatttgatttcttccaaacgtgcaacttgattgtgaatagtgttaatgcttcttgtaagagaagggatcaattggctcaacaacaccatgagaaacttgtgagcatgttggaaaggggggattttttcaggtagagggaaaaataaaaaaaaccaacctagcacaacctggggatactcgatggggttcacatcataaaaatttatgtcgtattgttctcatgtgggatgctattctagaggtactagagattgtggctgatgatggctctagtggggataagaaatatatggcttctggtttgttgaaacaaatggagagctttgaatttgtgcttattctgcatctcatgatgaggttattaggcaagactaatgatttttcacaatgtttgcaaagaaaagatcagaatattgtccttgctgttggattgattggagccacattgcggaatattagtgaagtgcgtgataatggatgggaggaattgtttgaggaagtaaagaccttttgtaaccaacataacattattataccaaagatggatgatacaattactgtccgaggtcgctcaaggggacgtggaggtcagttagtgacttactatcatcatttcaaaaatgagatctttattgttgtgtatgatcaagttattgt

SEQ ID NO: 19651 - DNA, 422 bp, Zea Mays
cgagatttgtaagaaaagggatatagaaggattggtttgtagttcgcttttttttctataattggttccaaaaatctagagtctcatttttttagtcaataatgggtgattagtagagcataggtatcagctacctattatgtagaatataagagatggatgggttagggcaagaatagccagaggtaagaaagtttatggtgaggaagaactccatgttaggtggtaatgcatctgaagattgagtttgacttctctccttccttgatgaggttgatcttttattttcccggccttgagctcattgattcgcggtgagtgtatatcatcggggtgggggaatgtggttaagatggatttggatgagataggctacatgatgtaggtctaaagttcatttgatgttaggtgggaatagacag

SEQ ID NO: 19652 - DNA, 568 bp, Zea Mays
tgtgatcgaggctatggaagtggatgggggctctggcgtgggggatgcggaggcgggcaactcaattaggggaggagtaggcgttggggcgggtggaggagcgcagcaggcctcgccggtgactgtgtttcggattcggctcaagcagtcgcctgcgagcctccgtcacaagatgcgcgtgcccgagctgtgcagaaacttcaggtgagcacccctgcgcttccgtttttattttctttgtttgtgtcaaaatcgagtgttttgttttgagctcagctcgttggatcagtgttggatgtgaatctctactgctctataagcatgtaacattagcgtccatagggcttcaccatgcccccgcctacccgcgcgtcccctccgtgtgcccgtagaccccgcctccgtcctagcccccgtcaccgcaacgacattggcgacgccctccccacgccagcagcccttgccccatgaccatgacctacccccgtcctcgtcaatccgctccgccagcaagtataggaagcgacgtcccattccacagtgcttccacctcgtccgcctaacgggc

SEQ ID NO: 19653 - DNA, 463 bp, Zea Mays
ctatccacaatcccaacacaaatgatgacagggcaaatcatacccaaagcagccagcaaagctcacaatcttcgagaatgcagcaaacttcctataggccaccagccccaagaggcagaggggggagaagcttcggaggaaggtttggtactcaacccaggagattgttctgcttattctgtaggaaggataagggacacatgacaaggatgtgccaagtcacgatccaaaagcagaaggagatcgctgaagccgaagtacgacagaatcagccgaagcatcttgcatactgcttcatgctattcgccatatatccctaaatatgtgggcaatcagtaacacacagtgtccgttgcttcggtaagtcattctcaagctgcttgggctcagataccaccaccactggctcctaccttggtccataatcagcagctagaagggcatcgccaggcgcagcaacagc

SEQ ID NO: 19654 - DNA, 589 bp, Zea Mays
atgtaacactcctgtgtttcttcttggggctgggcatccttgtgatgtttcctttttggaatacctaacaattcatcgtctgacagtgcatctgctattagttgttcttggggagaccattgtcttttaataccagaaaacaaaatccggttcttctgttttgtagtttcactttcgtttttactgatctggcggcaaggaattccatagtactcacaacaacaacatgttccaaggtcacttgtctgttggtttggttgttcatccttttgtgtcttgaaggtctgttcatcagctgtttcatttatagtgttgttttgacttgtcaacacaccgcattctttgcatttagtgacatcacttgtcgttgacattccaaggtctgacatctgtatgggtatggaagaatggaagggacaaaagggttgagcaaagacagattatagagggcagagaaaacccatctatctaaggttttacctagctaactgatgtcattgtggacaaaagtcacacaatacccaacaatcatttcaaagaagcaaatcaaacatgaacacaaaggacaatgaattcaagcataccggca

SEQ ID NO: 19655 - DNA, 566 bp, Zea Mays
cctagaatcaattaaaacaagatagaaactgaaatgacaatttttacttacaaattcaaaagtgctccaattgcgctcacatccggaagcggaacaacaaaggctaacaattcgctttgcaaaggattgaatctcaaatgcaaggccaccatatgcatcccaccaacgaactaaaaaagagaagtttgagtgttgcccttgcaatgcctctcacgaaccacatcttcaggtgctttgcgaagcatggatgcaattgacttagaagacttcgacatgtgttgattgttttggcttgcttcagctgagagccttctcttttgggctgttccggaactgggctgaacaactgaatgggatgctctactttccccttctccaagtacttcaacttcatcatctttatcaccatccttatcaccatccttatcatcatccaagtcaataggcttatgtctagcattcttcttcaaataatcactcatctctttgctgattgccgatcttgtctttgggcacttagcaacatcaccatgaccaccaacaaggtgctgcttcaaccttctaac

SEQ ID NO: 19656 - DNA, 471 bp, Zea Mays
gagaacagacatgcagatcgaacttgggcccaaagtgtagctctcggcccattaaattccactatgcgtgacctagtgcgcccagaagcagggtttggcgccgacaggtggcccccacctgtcagcctcccttgggtggtcggggattatctgggcactgacgtggtggccccgctcgtcagtcgtgcgcgcacccgattcgttcactgaagctgcgcgatggcaattgggccccgaccttcaaccttctatgctgggagaactcacgcgcccgtgccactagattgtggggccaacatgtcaggtccgtcctcaaccaccaggccaaactccgcagacgccatcgcgatcctcgcgtccgtgagcgttgacccggacctcatcgccacacgcatataaaaggaccggaccgcaaccttctctcctttcgcaaccactcacccacaatcgcctgcgctgggtccctcaccg

SEQ ID NO: 19657 - DNA, 497 bp, Zea Mays
actaagtacaaaggaaggggagaaggatgtttataagatagctaggattcgggaaaggaagacaagggacctcaaccaagttaaatgaattaaggatgagatggatgaactcttggtgaaaggacaatacatcaaacagaggtggcagaggtattttgacaatcttttcaatggtgagaatgagactatggacacccaactatatgactcctttgatgatttaaatatatgctttgtacgtaggatccaagaatcagaggtcaaagaagctttaaagaggatcaaagggggcaaggcaatgtgcccgacagaggtgtggaaatgccttggggatattgttatcttttggctaaccaagttgttcaaccatatttttcgatctaacaagatgcccgatgagtggagtacattagtaccaatcttcaagaacaagggagatattcaaagttgtaccaactatcgagggattaagctcatgagccacactatgaagctat

SEQ ID NO: 19658 - DNA, 472 bp, Zea Mays
ctgtcatcccgtccccatctcaatactcaaagcgagagaccgagagccttctagacgctgccgttttctttctattttactctactttttttaattagctgggaaggtgcagtcttgcagacagatggagcgtcagggtgcaaagcgggaggtatggcaatggctgatcccttggatcgccaaggtgaagcgacaggagacacgtgtgcaacggtgatttttgaggtgacatggatgctgcgaatggccgccgagctgcatccgtttaatagctgggaaggtgcagtcttgcagacagatggagcgtcagggtgcaaagcgggaggtatggcagcgtctgatcccttggatcgccaaggtgaagcgacaggagacacgtgtgcaacgatgattttttagtgatgtggatagggatgacaatggatcggattcggatcggatattgcaaatatccgtctgcaaccatatccgc

SEQ ID NO: 19659 - DNA, 546 bp, Zea Mays
atggtctgcagttgctgtgctagtaaatgctgttgctttgataagaattggcaagcttcacacctctggactaactcagctgcatcactctttgctgttgaccagtagaaaccagacctgaagaccttcccaaccagagtcctggatgctacgtgtatcccgcactgtctggcgtggatctcatctaacagttgcttcccagtaaccgaaggaatgcacttcatgaggactcctgttgtgccccttctgtacagtgcatccccaatgagggtgtagtgggctgactgccttgcgatgcattctgctgtggctttgtcatccggttcctcttcattttttatatatctgatgatgggctccctctagtcattagagtctgactctggctggcttaaaacattgcactcttctgcttgatctaaggaaatgcttgggcgtggcacctcttggacgaaaactccaggtggaacctgggtctgactggatcctagtttcgacaacgcgtctgctgctgcgttgcgatctctttccacatgatgaaattcc

SEQ ID NO: 19660 - DNA, 827 bp, Zea Mays
cttgcggaccatacacacatgtaagccaccatggtgagctggtgctagaatgaaagttcacagagacgctatgttcatccaccccactgcccgcacaaacaccaatgctatttttccaagccaccaggatgccaccactagcaccaacagaaggtaggaatacaaaattgtcaaaagctagtcctagcatccgcaataaaaggaaccgataaacatccaccattttagtttcttgaagacaaaccacatcaactcgagcagaatccaccaaagtgcgcaccgcatcctgtctagcaaacccatttaggcctcgcacattccaaattagaatttttgaaggatccataggggaagaaaaaagaacgactaccagcgagggacccaataaatcagcagattggtccgccctgcagcagctccttaggcctagaccagctaaatagcgctgccatgaccgtgatctacacctctgaaagcccttttctgaaaactctggtatactcatcaagatcttctggcctgatagtctcagttcttcaaccgccgggctggcgatggctaccggggcagttcttcaacctcacgatcgggatggacccccccccccccgatgagtcgttggtggagaccgccagtcgagcacgtgccgccggctgggacagcacagccgcacaataggtctttgcggcggacgtcccaccagctccaatggggtcgtcgatacgtagccttctcaccggcgaggttgggccggagtccacccagcgttgtgccttggaacgcccggctgggagggacggctcagcagcagcgaacgacgaagaaat

SEQ ID NO: 19661 - DNA, 402 bp, Zea Mays
ctggttgcaaaaaatgaccacgttttgcttcgtgctcgcttgcgcgttgtggtggtgcaacgtatttacgcctagaagaagcaggtggcagcgaaggcgctgcagggtagcgccaagttatgttccttgttttcataattgttgccgttacaatgcacaggcaccgtactagtatagatatatgatgctaccgtggcttcaccctacacgctgacactttgggctcgctcccacgccccgcctcggcactgtaccctgtgggtcccacatccagcggtcgtgcaatgctctctcagctactgccctgtgaacctagctactgcgtctgcccagcacctgaccccgcccgcataactaccacaccacgtataaaagtagtgcagagcaagcactcaaacccac

SEQ ID NO: 19662 - DNA, 389 bp, Zea Mays
ggaacacccctgacaaactgaacagctactaatggagccattagcagaactaaccaaaattgggtgacccaacctctgcaccgaaagaccagcccgcgacacaaaatcctccgaaacaaacgaatagctagcgccagagtcaaaaagagcatgggccgcaaatgaatcaactgaaatcgtacctgttaccacgtctccttgctctctaccatccacagcgggtagcacataagctccagaaatacccgcagaagaggaagctcccagagtgaaattaacagaagaaccccactgagccgccgggtgaggcagacgcggagctccaaactgagacggcataggagtagacggtgcaggagtaggcgcggccagatactgaggaaaaccct

SEQ ID NO: 19663 - DNA, 724 bp, Zea Mays
gcagattctgccttcttcttgaccaaagggaagcgtgggagcattccgtcagtgatcttccagtagcaaaaagtgggaccatcgatgcccgcgccagtgccgcgttgatccaaaatgcctacggcgccctagtcggagcagcgaggagtgatgcggattcgatgacccttgcacgtgttcagagcacgaaagcgagctctcaccttcgtattctggagcgagggaaagaggtcgtcgaggcccaagtcgcggtcttggaggaggagctgggcagtcagaccaagaaggaggagaaattcctaccctacatgcaagataacaccttttattagtctcttctgaagctagggtccgttgcctacttcctccctctgattgctcatgtcttctctggtcaaccatacaagggaaatttgacgccaccgaggggaacttcgtcaaggtgcaaagccgcctggaggagctagataaggagaggcatctcctatcggaggtggtgagcaccatgtgtgtgcacttcggagcacctccttcgtcggagtctgaatcgctcatcttgagggcctcgctagcctagaggagcttgagaaggaatccttctgccaagggatctaccaggtcttcgctgtcgtaacgtctcactacaaagggggatcgagttggaggacctaagcaagcactactacgatgcctggagtgattcgaattttgctggcatgatgaa

SEQ ID NO: 19664 - DNA, 667 bp, Zea Mays
gtttatgaagctattagaggcgaggaaaccagatcatctttaattaggtaattttaactttttatcaagttttgtggtattttaaggtgctgaattgaggtaaatattgctttagtctatgtttgtagtatattatgttttagcggtatatttagccacacgatatcttaaagagctttttaaaagtggctcgaggcgacaatttatagagctccgccactgcggtcggacacgccgccacccctccttcgctggtcaccgccaccactccgccgacgattttgtcaggtaaatccaacctctttcgcaccttcttggtcttgctaggatttattttctctgttttcgctccttcttcttggatggcgacgaacgtgggctggacggatggtaggagcgagcgcggcagcttgtatttcagggtttggggacgacggtgacgaacaagtgttgttggggcctggggatcatggtagaactgactctggatcttctcgaacgcgtgatgttgttctagccacgctataaagcatcccgcacaacacttccctcatggtcgtctgctcgtttggccctagcatttcctagtggtgatttcctcttcttggtttctttcttttctttcttaccctcatgatctaggtagaaatccgttcgttgatttatc

SEQ ID NO: 19665 - DNA, 413 bp, Zea Mays
gatcagcgagcgtacagctgttccaggggaggaggtggcagccctgcttgcgccctagttagaggttgaggaaggttcgcttagtcttcttcgactatctgcgtccagttttctgttgtttcttccttctgtggggctgattcggctcttggaggagaaaaagtcattattgaaagcgccgtccttttcggtgatctgccaacaatggtcaaggttcgcaaactcctcaggagggatccttcctttcttggtgaattttcatttggatggcattcctgtgcatgcttgggaggttgccacggtggaacagctgctcaatccctttgcttcggtgttctgcgtgcagtcggacctggatgaccgcacctcttttcgttgttctgcatggtgtgttgatcccgctttgattccag

SEQ ID NO: 19666 - DNA, 592 bp, Zea Mays
ggaggagttactggcccaccagcgggaggagaagctatgtacaggggccacctgttctaaggcgaaggagcacgagcttgctgagcttcgttctgaggctgatcggctccaagacgaggtgacacgcttgcacttggagtgccacaatgcttggggcgacgtggatcgcctctgggaggaggggtcctaactctattggaccctccgtgagacgagtcttcgggcagaggaggccaagtcgtcccttagagaggctaacactcgcatggagaaggtgaacttggagctctagaaagagcacaacgtagccggaggtcggtccttttctcggcctcttgtcttcgttatctggtcctcgttgttgtcttagccctttccttttcccagagctccagaagatattctcccaagcctaggagcccaagaaagcggcggaagtggtgaaggcagcagtggaggccaagatgcaacagctctcgcacgctcgtagtggcaccattgctacgacggcctaggtggcgaccatgtgaaagtcgcctagatggagggggtgaataggagaaacctgaatattataaactttatacacgaa

SEQ ID NO: 19667 - DNA, 581 bp, Zea Mays
gtttgatagaaccttaattgtgggtcgacaccacatgtccatgcctcccattctcccaagcccatgtgtcgtgccgtcaaaagggtccgaaccccgaggcctcgtgcatgcatttcttcttattaagtcgttgcggcttcgaggccaatcaatgtatccacgtcgttccaaatatcaccgccgttcatttaaaaaatcaaagttgtccatgtgtcctgtgtcactctagcctccactctcgttctaaagcacagtgcccgttctaaagcacagtgatgcttctgtgtgtgaccgcacatccaagagccaagggtgcaataaaaaaataaaaaatctcggccacatctgtaacaccgccttcgattaaaaaaggtgaaagaactctccacactattccttgccggtgttagcagaccaaatactggaagagacgacgctatcgagggcgaccaacgtggaagctgctttcgctggctctacctcctccgaccatccctttctcttcattttcccctttccatagctcactgcgtcttccgtactcgacgtcgacagcgatggcgtagctgctcccgtcggca

SEQ ID NO: 19668 - DNA, 334 bp, Zea Mays
ctcaagagtcgaaatgtgaataccataaaaaggatgatgtctgatatgtatcagaatgaggtttatccaaactctgctagctataacatacttatgcatgggtatgtcaagaggggacaattttcaaagtcattatatctgtacaaatatatggtgaggaaaggaatcaggccagacaatgttacatatcgtttgctcattcttgggctttctgagtgtgggttgattgacattgcagttaagtttttggagaagatggtcttagaaggcattttccctgatcggttagttttcgatatattgattacagctttcagtgagaaatccaagatgc

SEQ ID NO: 19669 - DNA, 466 bp, Zea Mays
tctggatcaaagttgtcaagagccttccatgcatcatcatctgatgggtgcaccattaacacatcttgtttgttcgtgcaatctttatgccacctcatgtgcatagcggtcttcctcgagagaaacaaacgtttcactctaggagtgagaggcatgtaccgaagctgtttatgtgcaacctttgtcaccaccttatcccctttttcatttacaagctccacatacctcgacttcccacattttaagcatttttgctctctgccatgttccttccaaaaaagcatgcagttgtcttagcaacatcaatcttctcatactccataccaagaccttcaagcaatttcttggattggtacatgtctttgggcatcttgtgaccagtaggaagaacctccctaatcaaatccatgagctctttgtaacaattaatagataatgcaaacttggacttgattgacattagtcg

SEQ ID NO: 19670 - DNA, 705 bp, Zea Mays
ctatggagatgtctcgccgtggtgttgccctcgacaggacgacgctcgctgtcctgctcaagtcatgcggtggcttggacgacctggcgcttggtgttcagatccatgcgctggcggtgaagacgggcctggagacggatgtccgggccggtagcgctctcgtcgacatgtatggcaagtgcaggagcttggatgacgcgctgcgcttctttcatggaatgggtgagaggaattcggtctcgtggggtgcggcgatcgctgggtgtgttcagaacgagcagtacacacgggggatggagctgttcgtgcagatgcagaggttggggcttggagtcagccagccggcttatgccagtgcctttagatcctgtgcagcaatgccatgtctgagcaccgctaggcagttgcatgcgcatgccatcaagaatgtttttagctctgaccgtgttgttgggacagcaattgtggacgtgtatgcgaaggctggtaacttggttgatgcaagaagggcattcattggtttgcctcaccataatgtggagacatgcaatgccatgatggttgggcttgtgcgcacagggctaggagctgaggccatgcaactgtttcagttcatgaccaggtctggtgttgggtttgatgtaattagcttatcaggtgttttcagtgcttgtgctgaggttaaggggtactttcaagggttgc

SEQ ID NO: 19671 - DNA, 597 bp, Zea Mays
ggatcaggtgccggcactgggtcctcaggggctggacggtaggagccaaagaggaggcgtgaggtctcaagagtgccatggaactgtggtggccggatcagctgtgcgaagatgtggcagagataatgtgcatatggcagttgtcgccgggcacgaagaccatccaagactatgtcctcgatctcacaaatgaggaagtcaacaacatcaaactccgaatgagagatcagggcaccgaggagccagagctggatatgagtagcagcctccctataacccatccggggcagaagcgtttgtctcatgagctgatataagtacttcgctgctgtagtgaaatctaccggagaacatcgtgacccatctgagaagggcggtcggaataaagccacgacgtgagctgtagctggagcaacttcgccgtgagggcgacgaggaggatcagaggtaccgtagcacaagatgtgaagacgagtcgatgactcgttgaatccaaacagctgtcaaatctggctagcatgcagagtaacatcctctcgctcaaagcggaacctcatccactagtgatcgaggtcgatccatactgacacatagaac

SEQ ID NO: 19672 - DNA, 505 bp, Zea Mays
ctaaacatgacctgtcagactgactaaagaagatcctgatggtacagtgaccagaaaaatctgttggtttagtgaaccggccgccggtgaccccgcgcgtggattcacgccggtgagttgattcgtgctcaccggtgcccagataacatctcgcggtgaaaagatcttccccgcggatgagcttaaggcactgtttcgtccggccgccgtgtccgctctaccccgatcaccttgaatcaaccctcgctggagttagacacctcgcggtcttgtgccacgtgccttagcactttaaccacgctaccgtgactcgtattgacctatccagagatcgccggtgaggttgccacggttgcggccaccaatcgtgtgcgccagtgcccctcttcctctccggccgccaccacgccaaaccaaattcactggccactgcttagcacccctataaattgacgacacggtctgctacgctaagttatcaccaagccagagcacccgctcttgc

SEQ ID NO: 19673 - DNA, 802 bp, Zea Mays
cggtggattatgcgaaattaaagtgtaaatgggagggatggggatggggcgtggcgaacctaaaggcgacagtactatgcaggattcaggggtgccgggatggtgaaaacactgattcatattgtaaacaattcctggattatgcgaaagaatgtagggaaatggaacgaagaaggagagggggaaacgaaccagagcggagaacggcggagggcaaacgatgaagcacgatgattagggtgagtgggggcggtcgtcgatggcgatcgtaggagcgggttacagcgacggcgaggcgcggattttattagggtttcggtggggccacgatgagtgggttgattgtggtcgggtgggtctcggacattgaccatattggctcggtcggctagcggggagcgacgcgggactgcggggacctgtagtgtgcgcacgatcagttggtcagcgtgtgtacgttgtgttcatatgaagcataaattgttgtgtaaaggatcgtaaacactgggagtttatacaagcattaatcccgaaccacagtccgcacgtggtataaattgttgtgtgtacgtcatgttcatatggagcataattttttgtgtaaaggatcgtaaacattgtgcgtccgattgatatgcagttgttatcgtcaacttacacaagcataaaccccgaaccacaaccccaccgcgacccgaccacaccgctattccgatttatgtaactgttgccgtcaaaatacgcatgcataaatgcggcacaaccccacgcgcgaccccaccacgaccccggtgcacccgcg

SEQ ID NO: 19674 - DNA, 706 bp, Zea Mays
gttcggtgtctccgaaaagcttagcctgagatatattggaccgttcactatcttggcccgggtgggcagcttggcttatcgcttgcaattgtcggattccatggtaggggtacacctagtttttcatgtctctatgctgaggaagttcttgcgggatccggaccatcagattgagatggaaccaattgcggtgcagcaggatctgactttggagtgtcgtccggtgcgtatcttggaatcctcggagcgtgttttgaggaagagatcaattaagtatgtcaaggtcttatggactaatcagtctgagcgcgaggctacgtgggaacttgaggagctgatgcggctgaaatatccggaacttttcgttgtgggtaagtgttgttgattcattaatttttccttttgtcattccgatagaagcgtcagaattcgaggtcgaattctttttaaggggggtagagtgtgatacccggtttgcaaagaggagaagtggaggttattcgttttgttctttttcctcttttgggtgatgcgctttggaaatttggaatttgtggaaaatattcacctataagacagtagaatttctttggttatttgcttgcgacggggtcaggagctgtcacgtgggcgagttgggccttgaaccttgatccggcccattagtctccccttaaccctagccgccctccccctaattcccccc

SEQ ID NO: 19675 - DNA, 570 bp, Zea Mays
gccatataaagcctcaaatggtgccatctttatgctaacctggtagctgttgttataagcaaactctgccaatgcaagatgatcttcccagctacccttccaagacagaacacaagcacgcaacatatcttccaaggtttggatcgttcgctccgactgaccatcagtctgaggatgaaaagcgacactaagagaaagtttggtgcccaatgcactgtgaagactctcccagaatttggatacaaatttggagtctcgatcagaaacaatggacttaggtaccccgtggagcctgattacttccttcatatacaaggggaccaattctgaagctgaatttgtggtcttcatgggaataaaatgcgcagacttagtcaagcgatccactaccacccaaatagcatctctgccccgaggagaatgaggtaagcccaccacagaatccatggtgatgtgctcccacttccactctggaatttccaatggcttcaataatcctgtaggcctcttatgctcggccttcacgcgctgacatacttcacaggcgaccacatacttagaaacgtcaac

SEQ ID NO: 19676 - DNA, 500 bp, Zea Mays
ggagacactaacatgttggtcgtatgcatcgtgaggaggcagaaccgtgcaccacggtctacgctaggttcttataaagtagtagagatagaaggacctgatcgatcacgtgggcgcgctattttagggatatgtttttatggcagttacaaacataatgctaggttttgagcgtaaaaatcatcatgtttaagcataaaatagtgttatacataacataaaatcctatttctgttaccttgcatgcgggtcctgtttttatggaaggtacaatcatcacccaccaggagtgcatgcggttttcgatttttatggcatgtacggtttcatattcgtaaattatggcaggtccaaccattatggtagattaaaaaatcttatgcatgcaaaaaaatccaagctgtgtgggcgcaacccagatttgagcgtaaaaattctcacgttttagcgtaaataatgtcagatatagcgtaaatgttgattcactcctagcaacaacc

SEQ ID NO: 19677 - DNA, 998 bp, Zea Mays
ggaaaggtccctggggttctgggtaactggaaataagttcctgtactattcctgtgtgccgctgacagattacagaaaggcccttcggttttcatttcttcacatgggaaagtccacgacggcggtgggcgcagggaggctccggtgagcacctgcaccggccgatttacctaaggactgatgccctacttcggtcgaaaccgaattcacgccccaaccattgatttccctaagttaattgcacaaatggctacccaaatatccctggccacggacgcagcggaagtaatcaacagaaccgtgcgttcccagtgatctacgacggtttagttcaaactaaagggccgaggagtttgaggagagcttagagatgttagaacaaggctagagacaacatgatcggacctgaattgcactgtccacggcgaagtgttcttgcggcttgtttgaaccgatttgggggaattgtaagattcgcgctcgttggggatccactgagggtaattcttggtggcggggttcttgactaccctacggagctagtggcgcactcaatttataggcgcatcgagcgacggtgaagaatttggctaagggggtgctggcggccggagaggagaggcgagctcagtatggggaaaagtggctttcaccgtggcagtggctccggtgatcgccgggcatgcaaccgatgagtcaccacgatgagaactagtgcttaagcacgtggcgcgcggcagtaatcggccggcggcgaggtcttatccgatcagtcgacgcgcaagggaggtacggcgagcctagctacggcagaaccacggtgatggcacggtggccgctgattaaccatggcctgccacctccccgttttaatgccacgttgcaaaagccttttaccgtggccgccgacgaccatccacgctgcggtggcgttcttatcgccggcgcgatttttctgaagatcggtgaacagtgcgctttgattcagtacaaagctt

SEQ ID NO: 19678 - DNA, 613 bp, Zea Mays
tggatctggtcgtgcaaaagttaatcattcatcattgtgaagctccattcgggttatctccacaattacctaatgcatgtgtatcctcgttttttgcgcaggggaattctatgctcgtatctatgggtgacacttggcgtatctcacgaaggactaccgacatcacgatgcttgccttactctcaatgagtattgactgttagtagcgaggtcattcgtttgcatgttcaaaacttggtgcctaactaacattttaattacagagggtgtcacgtcggttatgtcgtgctgctgctcgttgtggatgcagatccctcgccgttgttgacgtgcatcctcctgtgcagcctcctgtggagccttcttcacaccaccatgatgcttccatgatagcagttggaccttcgacagctggacagagctccttgtgttcaacacgagatatgtttgctgatgacgatgacgacaatgctgaggacgacgatcctgaggatgaaagggacgatgacgtcgtgtccgcacatcacgacatgattggaccgtcgcagctacaggatgctcccttgactcagttgtcatagctcacccctcgtagatggcacccacatctccc

SEQ ID NO: 19679 - DNA, 761 bp, Zea Mays
ccgggtccgcccaccaccgcctcgccgccgtcatggacgccgtcaacgagcgcaagctcccacccgagctcagtgggcgcggcaacgcagtaaggtcggtgtctcagccccaggtccctcctccataccgttcccaggaaaaaaaaccgtagcttggttgtgctgtgccggggcaattgaatctagattcaacatgatgtaggctgaaagaatagttgttcatacggtttgctagttcagtgcaatttgtttcacaaaatgctacacggaagaatatccaccatgccggcgcattcagtcattcacaatttcgcaggctaaccttcacaaaaagtcaagtctttactgatagacaaagacatgatagggtctctgaagcactactctaggagtgaaaaagtacagtgttttccgttgtgctaccattcctcatcagcgctactaaggcctcacatcttgtttttccccaactcaaatgtccatttctagatttaccctatcagcttcttcttgcatgtcaatacctacaaggctacaacctctttttaatcacgcatgtgcattttgtacaattaccaaatattgtttgttttaaggtatctccggggtgatgatttatggtggacccagccggaaaaatataggatggacaattgcaatttaaatgaaccacttttacctctagattttatcttcttcatgccaagataagagggacaccacgaccttgggccgtcattgttgctccatccatggccgcc

SEQ ID NO: 19680 - DNA, 569 bp, Zea Mays
gtggggggcaggggcgctgtggacgggaggttgcagttgttgcgtcgcgtggggaaggaaggtgaccatggcgcggagggcgtcaccttcgtgtcgtaggacgatgggtggtggcagatgcgtaggatctgcgccaccaagctcttcagggtgcctgacgttagctcttacaacaccttgcgggaggatgagctaggctgcctcctccgtgccgtcgccgcggccgcggccgaggggatgccgtcgaacctgactcggcggatgttgtggtggttaggtggtgatcgtccttgatgagcaggagcactagcaggaaggcgagcgggagcgagaagacgttgtcatccctcgacaccgttgcccccgctctctggtcccggcatccttcgccttctgctccgccgccaccgacatatatgaggttgggaggaggtacatatacttgctgggggctcacgacgattgcggatccggccaaggatgacggtggtggttggggctcgcgacgattgcggatccggccaaggatgacgggggtgctgggggctcgcgacgattgcggatccggc

SEQ ID NO: 19681 - DNA, 1190 bp, Zea Mays
ataaaacacatacatcaagactttgatgaatctactattacctaaaacgaattttattttggtacagaggaagtatatatacgagaattatgatactccatccgttccaaaatataatttgttttagacaaataatcatgcattcattattcattaacatatgaatgtcatccacatgtatgtctatatttctacttattaagccgatgcaacttcctccccatatagaccgtccacgtcggctacaaaatcctagacacacctgcagatactacttcgcattgtagccgtacacgtggccgaaagctgttccgactgctccaccagtatgcgtgggcgcgtggctgctggcctgctgcttctgttatgaaaggaaataaaaaaaaaatgggaaacaacatcgcctagaaggatcccgtggccttcagctgcttcaccagcacgtgtggccgatctatcttgctgtaaaaaaggaaataaaaaatgaacaacatcgactattagaagggtcccattctacctaccgtgtcgcaccaggacgaccctaccgaggcagcagcgacggtgcagctgcctacgccggtggatatctcccgtgtctgtcgtttttaggtaaatagatcattttcatgcttcccttcgatttttccatgttcattactcactgtacctttctcttgtatttggtttgaaacatttgtaatgtgctctcggatctacaccgaaaatcacatgcttttttgttccctttttctctccatctacaccgaaaggcacaaattatttttggtctcttttttatgtcacattagaaaccctaaatgtgttttcccctggaaaaaatcttgcaaaaactaaaatcgcgtagtgtggagcttcctttgtattttactggtcgccgcgcatccactcacgcgttcgtgcgcttcaaatgctacctaaaagccatgcttcttcgttcttttacctgctttacaaacgagtttacggtgttgtatttccctaaaagaaggggtgattcgctctgagctaacaaaaggcatgtttagaggtgcaatattatcccattagaaaccctaaatgtgttttcccctagaaaaaatattgcaaaaactaaaatcgcgtagtgtggagcttcctttgtatattcgctctgagctaacaaaaggcattttagaggtgcaatatta

SEQ ID NO: 19682 - DNA, 558 bp, Zea Mays
ggaggaatgacggaacgagaagagctaagttacctgaagattagaaaagaatgaaggcaatcccaagtcatgagaagccatgttgtagctcgacgaaggaaggtcaactggaacaatctgaagagcatcgtcgggggttgatttagctccactagcagatatcagaattctggcatccggctcgccgacctctaaggtgactccctcgctcaaagctaaagaagtatgcatcgctatcactccatcagatcatggtggagacgacccgacgtggacgtccatggaggtgtgggaaggagagctcgctcggacaccctcaggggctgggtggcagcttgcactacccatcggagccagatcactaccagcaacaccctcgggggctgggttgcagcttgcgctacccaccagagccagatcattaccggcgacaccctcgggggctgggtaaccgccagcatcacccttgggggctgggttttctgcaacagccacctctgaggctgaaggatcctcagtcacctccatgttagtcaggcaatcctgaccaacctcttc

SEQ ID NO: 19683 - DNA, 1212 bp, Zea Mays
cccgtgggcacctgcggtgtttattttgcgcaaaggaccttggctttttaaacaaacagtaaagaatctggggcactatttccttgtctcacggacattcgcacataagtccctgcacttttgtttcttcgcagacccaagtccccgatgctaaacaccggtgaacatgccctccggcgatcctataccggccaaaataagcaacgactggacccctagctcggctgacatctaattcaacccctaacgatcattacccctcaatcaattgcacaattctgggttgggaattcactgtccacgacaacggcggaaactaagaacacaccgacgtgttcttggttccccagggcgatctagtttaattcaaagggtatatgagtatcaggggactttagagaggctagaacatcacgcagaagagcatgagctaataggtagacatctggccacggcgaggtgttcacgggtgcggacaaactgatttgggcagagaaggaaattggagctctctggtggctaatcggaggcagtagcgggtgctctggcttcgtgatgacttaacggagctagaggtgtgctcaatttatagtatcccagagcggtggctcctaatttgggcatggcgtgctggcggccggagaggaagaaggtcactggtggcttagtcatggcgttcaccggtgcagcggttctgagatggtaagcctagacgtaccacggttactactgcgcagtaaagagccacgacgtggcataattgaggtcaccaaagtttccacgacgacaccggcggtccggccacgtcgcacggctacaggcgcggttgataagcttcacctcgtgaccaaatccgctcccactccgatcttttcaaccggagtcttcctttcgctcgtggccatataaaccgaagttttcccctcatccaatcgggcaacccaacgggcgtcgagcaccgcgagcatacatatgagtcgagaggagcgcagaaagagagggagagagaaggtcacgcgggcaccctgcctgtatctccccagtccccaccgcactgggggtatggtctgggtgagaagccatggcacaccgacgatgaacatgccctcaccgaggggatctggtggcggggccgtgtgaaattgcttgaaggaatcgccgagctaccatcatgccgcatctcgtcgtggtcaggcacatgcacggctccaa

SEQ ID NO: 19684 - DNA, 592 bp, Zea Mays
gaaagtggaggcactaaaagctttagaatcatggctaagctaagtattgatcatgatgagagagataccctagctttcatgtatcttcacccatgaaaaagattctaaaaccctaatttcccctcttgagccattaaaccccaaacattgggttaaagggaaaaattaggcaaatggccaattcatgaaatgaaacctttaccaaagatgaagtacattaataaatctacaaaatgtagtaagggaagtattacaaaaaggcccaacaaaaaccccaaatcaagcccctaagtgcagagcacactagagccatccatttttctctaagtcccaaaatcagccctaacctaaagatcagaagtgttcacccctttgttggcgccaaaaccacatggtccaaataacaaaaagtggccaaactagtcaaggcatacccctgaaaaatttgaaaccaaaccagggtcgtttgacatggtttggcatccattttgtcgcggggtgaacagtgcagacagacaagacttggcgccaccatatcttccaagctaggtcagatctccccttagaactcacatgaactagatagctctag

SEQ ID NO: 19685 - DNA, 541 bp, Zea Mays
caagggtgctgaaacaagggtaaggagggcaagaatggacctggagacggcggtccacggcgcagtggctcacggcggcacgaagaaccgatttgggggaaatcacaaattggggcatggtggtggatgatcggaggtgaggactggtgtactaagcacgtaataacctagcggagctctgcggcatcaatttatagagagtgctcgatagtgcgatgaatttgggcgaagaagagctggcggtaagataggggagcagtcaccgtacaccgctaaacgtggcattcactgagctatgttcccggcgacagaggggctatctaccgcgacctattgtggcgtggtaacaaggtcagtagcatgggtgctcgagttaacggcgatcatcaccgcgacggccacgtcgcgacgcaagtgggtacaacaacagggcggccacagtgccccgacctcatccacgacgaagatcttttcaccctgagttgttatccacgcgtcaccgggcgcgaatcacagcgccggcgtgaatccgggcacaagg

SEQ ID NO: 19686 - DNA, 365 bp, Zea Mays
gcaactatgccctcgtgcgagtcagcattggtcccctagcttcgttgcacagaatggcaacaatgatcagctcgcgcttctcatctccgtttactgctgcccagcaaaagaattaaagaccgaaccctaactaaagtactgcaaacaagcaagggtctacctgaaggacgagaagtttcttcgttacgacgagctaggtagcttctactgctcgagcttagtagcctttttctttgcttaccaatttatcattatcgtcgtcctacatgaccaacgggaaacatgccaagtttctccgagggaattatctgtcatgtttctttcagtttttttctgcttcaggctaccggaagcagcttttcaac

SEQ ID NO: 19687 - DNA, 727 bp, Zea Mays
gtctgatgcccgcccgccataacgcatgctagacagagggagcccacaaccacctgtggcaaaacacatgcgtaaacaaatcataagactgcctctagccgcctcagcatttgtgcatcctggcaagccccacctacaccctctgccctgagacaaccttgtcgtgcacgccgagctgctatattaaagtgttgggttgcagatcttgaagtgatacctcagtgcagaaagccactccggcaagacctcatgcacccgcctgagcacacaccagtcacttgtcacagtcacaactaaatgaatgccccaccatgagccaagttaccctgccaacctcgggatgttgcgactgcactgtggcaacgtcgccactcatagtacgtcggtcaagactccctccattataaattgtcgttcctccgcctataaatattgatgcccttgccgcggaacctcacagtccagccaccatatcattgtcaccccacatccgaacaacgcgtgccttactcttcaaaccagagaacaagccatcaccgtcgatttgaatcgtaggtgagcatgccataatcttcgacctctccctccatcgaagtcattcttaaactatagaagttatgcccttaccatcgattaagacaactttccccatggccatcacttgcccattgaaaatatgcaaggaaaatctcgcttaaacaattgtcatataataagcataaccaag

SEQ ID NO: 19688 - DNA, 400 bp, Zea Mays
gttgttcagagttggagctgtatcaaataggccctaactctgttaacatcattccttgctctttcctggatccgccccattcccactcaagccagtagcctatgtaagccatccgctcccacctaatatcaccaacaaccctcctaatgcatgcacaactcccaccatgccaaagttctctttaaagatgaataaataaataatgagggaaaggatcaaaggagcatcaaatataaccccgcactcacgcacccagccacaaacgcatagttgggcgcacaaaatgcttgaatcatggccattaaggattcaccatcacacaaccgttcctaatctaggacaaaaggcacggtgtctactcaaggacacttggatgtattgatgcaagtgcaaactaggt

SEQ ID NO: 19689 - DNA, 442 bp, Zea Mays
tcgctgcaatacacgacattaaaggactcgcgcagcacctccgggacctaggataagcaagtaatcgatgacaaggggtagaagcacaggtttaggaagagaagaaacctcgcaggacatgtaaatatgacaagggcctggagttgcagaggagtacaggatgggcacgaggccgacaaaatttgaccatcacatttggtatgtttggttaactttcgcatcatataggataggagtataggactaggatccatttcaaattatcgtgcatttcataatggtttctgaagctttggtcaccaagtattcctatttctcggctggaatttcacgtttgcgctgcgagggagtgtttcgtcttcgactcttcgttcagacagaccccgcgcggactggagccaagccgctgctacctgccgcacgctgccactgtcaggtccgc

SEQ ID NO: 19690 - DNA, 459 bp, Zea Mays
cagaatttgaagccgcattccgagaacatcatgtgccccaagggatcgttcaactcaaggaagatgaatttcgggaattaactcaaggaggaagatctgtcaatgagtacgtacacaaattcacagaattggctcgttatgcacctgacgatgtcagcacagaagccaagaagatggcccgtttcttgaaagggctaagaccagaactcaagactatccttgccagccaagatttcctcagcttctcgcacctttcaaacaaggccatacaagtggaaagggcaagggaagaagaaaaaggtcatctcaagaggaagttccaagtcctccaagctcagcagcaggacaggcaccagagaattcgatcattagggtttccacccaagggaccaagcttcaacaagctagctggacccactccgtcatgtttcaggcagcagggtcaaagctcctttcagg

SEQ ID NO: 19691 - DNA, 359 bp, Zea Mays
cggagttattgaagcaatcttttgaaccttcgccagttctgcctcttgcaatgaactcaaagtttttggccgctccgctgctatcttcgagattgcctcttcgaccgattctaccctggctttggcagtagtggggtgacttggctcaacggtagaagaaggcccttcagcaagcttcggtactttggccgtttcaatatacctgggtcggtgcgtcaaaactttaacctttttcccttcggcgtggtagagatagctgaagcagcaacctttctcttctttccctactttcgcgaggggtaacaatagtctaggtaaacaaagccaatgacatcaaaaaccctatttaacgttttctt

SEQ ID NO: 19692 - DNA, 438 bp, Zea Mays
ccagcccaatccccacccacaggagccgagcttcccgctcgctcgcctatccgccctaggctccaacccatttgaatccacgtcgtgttgtcatgtatcggcgattcagcggcgggggtgatcgaggtttatgacctgcgcaaggtgtgggaggtctgtgcgctcatgaccaagaccgccgcggccgccgctcgggcgaccctcgaccgtgtcgccagtcaggtacatcccatgatgcaccgcgataagtggcatgtcaaggtcctctccgagttctggtaactcgtaagcgcccccatgaaccctaaccctaaactccctcctcctccatgcccctcgatcgaccagttgatggaccccatgcgtgtcgggggtgttattgatcgtgtcatagatcccgaggttgctggggttcaatgtcggcggggcaggggatgg

SEQ ID NO: 19693 - DNA, 485 bp, Zea Mays
cacgccggccacggcgagcttacttcgcacggtgttttggactgatttggggggaaatcccaaattggggttctttggtgaacgatttgggacacgagtgggtgcgctgagtgcttgaataccttgcgaagctgagggtacgctcaatttataggattcatgagcagtggtccgtgaatttgagatgtcacggtggcggtcggagagaagggggggcactggcgcaagcaattggtggctttcaccgtggcgagctcaccggcgatcaccgaatatgtgtaacccgagctattgcgacgtggtaagacaccaaggcacgtggcacacgatcattgagtggctaacgccggcgaggatgatcccgaccagctgttgttcaatggggtacagcgggtgcaaaggtgagcgagtccaagctaatccgagcaccaagatttttacccttcaccgttatccatctgcgctgggcacgaatcaccgtggag

SEQ ID NO: 19694 - DNA, 315 bp, Zea Mays
cgctcagagaggtgtccatcttatactcgagcatcgcaagatctgggcggggctggcgcgtagaatgggaagtacttgagcatcgcaagatccgggcagggctggcgcgtagaatgagaagaatgagatggcggggtggtcctgcacttacgatgggatgcaggccgatggtggtcctgtgcgctggatggtgacgaggggattggattgtgattcgttccatgacggcgagacgtggattgcgtttggggcgtggaggatataaaaggggcatgtgtggtgcatgggaagaacaattggacggagtacgaccga

SEQ ID NO: 19695 - DNA, 924 bp, Zea Mays
gaaatctggcggcccagattagatcagagaagtgacatgtaatgaagccaatccagaccgttggcgcatggatcaacggtcaagattttacgcagctatgatcaaatcccatacgcccgatctggaatcaacggcccagatggaattcccgaaagggtatcatctgttctaatcacagtcgtccgatgtgagatcgacgcctaccacatttttgccccatcccgagcaccccaggtggcaggtccccaaagccgagcggcggcgccatggccgacgtgacacagccccgcaatcccaaagcccgaactccgattaaacgaaagctacgcaaagtggagatgatgacggactcgaaggaaagctccataccagctattgggtcacaggaacgcctggccacagcgcagcacgagtttatggcgacggcgaggaattccggtgagctcggtggtctatttcgtccaaggatcccccacgcagaatcccgagaccgcgacgaaccaccctgtcagcactaagtctccacgtggtgccaaaaacagggggccgacggcggcggcacacaccttgtgcagtgcggtttctacgtcggtgtacggtcgtcgatagggacgattgagggagcacgagtccgcgaccatatatacacaggcggtggcggcatgcgcggatgtggtttatgcccgcagagtccgagctccagggtgtttgataggcgagatttccgggctgttacaacaacccgatgtttactccatgtgcgagattgagagaggaaaaattgtctagcgggtcccatcaagtggccaaccactcggcaccagagagcacacatggcgaggggagaggtggacgaagcagtgagaattattgagtggatctcgggtgagccactagcttgaagatgaccctgacaagctgagc

SEQ ID NO: 19696 - DNA, 416 bp, Zea Mays
ggccgacatgctagtttcttccgctcctcctcttactctgtccatggatccaagcagaggcacagtgtagtgcacttgagcctaagagtatcgagcacatgagaaagccaagaagagagaggctagcaaagggaggcgtcgtcgatcgaggagatggacagacatcatcagagtcggggtcatgggcagcagcggtggcgaacttgtcctgcccgttgttccctttcttggagctagaggaggagggcgaaggccacgaccacgctgcatgaggggggcaaactagagctcccgacggtggagcttgaggcgtcggggtaggtgctagcggcgtgccgagggctcgacatgttctgcctcgcgaaccacggcgcgcccacggtgctctgcaggcccatcagcgagaggagagggag

SEQ ID NO: 19697 - DNA, 660 bp, Zea Mays
gacgtaattgaattctagatccgcccctgaggtggactaattaccaagtaacacaagatgttgataggaagagacgaaatgatgaaaataaaggcgcttagggaaaaggatctcaccaccaagtggaaacgaatcctctacagttacttctaatcactgacgaccccacacttcagtgacccatctgtagttacttcacgagaagtagaagtaactctagaggatcttgttgccaagtagtagactttatattgtgtcaatagtactctcaacattttctagtttatgcaggtcactttatttgtagttaaaccattaacagcgataaaaccgaatgaagaagcgcgtaggaggagccagcaattgaaggcccttcttgccccgtgcaacttacgcaatctgaatggagtgttgataaggtagggacttcattggctcgtgcaaacattggatatgaatggaggtcagcgtaaatgaaaggctgtattagataaaatcaacaacataaagaagggaataagggcctatttggcgcgatttcttcatatgcttctctagatgagccgaagcatttcatgagaaaccaccttttgcagctctggctgctacagtgctacccaaatactgctccgtctcacgtactactaaggagaaaatgac

SEQ ID NO: 19698 - DNA, 1123 bp, Zea Mays
tataacagccatgcttgtgttggccctggtggcccctttaagtttcaatgtcgttaatgtgcagtgctgcagtttcatccagctgtcggtaattaatcggggtccttttctcctccatgtctgactttagcatcctgtgctggaatgtaaggggtttaaatttgcaagcgcgccgagatgcagtgcgcgtgatgatctccaccaccacttgccatcttgcctgtttgcaagagactaaattatcaatggtcgacaggtccattgtgacggcgcttggaggaccaaagcttaataattttagttttaaacctgcggaaggaaatagtggaacccggggtggtattcttttactttgggatagcgacctactcggattatctaattttaccatcggagaattccacatatccgcaaatgtctctcttaaggatcgtcgtgcttccttctacctgacagtcgtctatggaccatcttgcagaggccgcaagcctgattttctaagagagatgagtgcacagaggcctcctccaccttccccctggttggtccttggggatttcaactgcacatacaaagcaagcgataaaaacaattctaggatcaaccctcgcctaatgcttctgttcaggcaagctctcgacatttgcgacttgaaagaaattcctttgcaaaacaggaagttcacttggagcaatgagagacgacaccccactctcgtaagactagacagattcttctgcaactctgagtgggaggagatgttcagtatatttggactacatgcgctatcatcctcggtctctgaccactgcccgctgctcctatccaatacaactatgccgaggcatccacgttcctttaaatttgagaatttctggaccaaattaccaggttttcagcatacagttgagcaagcctggttggcgcagacccaacatcgcgagccttttcataggttgtactacaaactgcagttcacggccaaggcgcttaaggaatggagctccaagttaatacctgatgctagactctttatgtatatggccctagaagttattctaagactggacatggcacaagaaaatagggggctatctgacatggaagtgaacctccgaaatag

SEQ ID NO: 19699 - DNA, 395 bp, Zea Mays
gtggaagtgttggcttatctacctattactcaaagaaacaccactgtctcacctgacacctccggtgattgctgcaaacagaatgctttgttggttgttgaatgaagcaaattaatgtggacagtggtactgcaaatcaggtggttcctctataggatacaccatgtgtggagtctgcaacaaggttctagtctcaacttgcacatatggtggctcttgcgagttgtgacatgatcgtctgacatcaaagcgtgaaagacgttaataaatctgttcaggagaagcagtcatctagcgtggcaagcttggaattgacaatgagtgaggtggacactggtagatctagtagcagggtcaaaggatgatttcttttaccaagtatgcttgcattcgtg

SEQ ID NO: 19700 - DNA, 396 bp, Zea Mays
gccggccagccgtctataaatagagtgcgggcactgcttcatcactgcattccgcacatcagcaactaagcaattgactcgagctcaccagaaaacccacgtagccccaattccctctctcttcggttcttagctccgccgcgaagaacttccccgtggccagaggtcctcgggtgagtacctatccaattgtttcatgtttttgcttgctgttagcctcctattgcccccagtatcaactaatcgaattgcggccgaagcctttcaccagaacgcgcgcctgctctgtagaacgccgccgtaaccccttcaccgtcgacccgctcttcgggtcttgtattgcccaaaccaaagcgtatccaggaaccctggtgaacccaggaacctttccctagc

SEQ ID NO: 19701 - DNA, 656 bp, Zea Mays
cgggatgcttcaggtggtattagagccataggactaggcgtagaatgcaaccctaacctaaaaagcttttctcaaaaaatcttaacttcttaaaaggtcttcccttctttctccattattaacaaattgttcttctcttgactaccaaatggagggcacctttgtccttaaagtgtcctattgcttggagctagaaggattcccttaccttcttcaatgttgttcgcttcgcctcagagttcgcaagaaaccagagtatgtctgaaaggaatactgagagaatggagttgagaagtgcttcatggcagtctacctgggggaaagccgaagctacccaaaccacccacctttccagatcaccaccactggccaccgcttccaagacacatgccaaaatgctgccctaaaagcccactgcatgccaaactacaactatgaattcgccgagacaccccttcactacttcccatccagcaacaaaaataaccctccttggaggaaaaggcaccaagctttatcagggagagatcataatgaggaccacccctccgtaatctacatggccgaatatctccacacccttgacacccactttgatgaccttttctcccattgcacccacctaaactcctgggtagaaagcctagagcaacgaa

SEQ ID NO: 19702 - DNA, 348 bp, Zea Mays
ctcgagtggaggcaggaagagaaaaacataccttggtcgagcatatgataatggatcctatgcacttggagctgaattgatagcaaaacccttcctctttttccggatgcttgagacctttcatagagatcccaagtatgtccggggttataaggtcagctcttaccggactggaccacagagggcgacagagatcgagtttatacgaacgacctcatcggactatgaaccgtttgtgatcaaaccgggcttacagggccggacccctactagactattcctgatgtgaacacctccaactatgtttatcagattccctttccttttcccctcttcctggagctttgc

SEQ ID NO: 19703 - DNA, 327 bp, Zea Mays
attttttttaaacaaaccggcaagagaggtccccactgtgttaaaaagaaggggttgcccagacaagcactgtacaaaacgcaccaattatacaattaagtacagaagggaaaaaaatacctccgacagaggagcgacgggtcaaaaaacacggacggtggtggttcaagaggttatcattgtgctctgctcccagcctcccaccatgatccaaactctcacctcgtccttgattttctaaagcaccgtaaagtttgcggccaagcattcaggtgcaaatcagaatttgctgtccagacggcgattttgatccatagtcgtttagtg

SEQ ID NO: 19704 - DNA, 307 bp, Zea Mays
ccagacaagggctagggagctccgtcgataatcattctggctactctgcccttaagggagaacgggaaagggtgcaccactgctcccacacccttctttcttagatgtcctcttcattcaggggagagtggagacgttgcccatctccgacaacgaacccaccgtgctggaggaggagcccccaacgcgatgcgcgacaatgacaaaacaagcgccgtaatgtatggcgtcaccacgaagctggagagcgtgatctggctcagcccgtttctcgagacgaagtttctgagatggaggaaaccccaac

SEQ ID NO: 19705 - DNA, 723 bp, Zea Mays
catgccatagacatcaggggtgatccaagggaccttatagtggagctcttgtcgtgagagggagacaggaggtggggggaagtggtggtgaggtgatctaggcagagaaagatttgctccagcgagcatcccgaccgcggtgagggatgatcaggtgagctaagtcctacgtgagcttcagtgtggggtttggagcgctggtggctgaattggacaaggagcagggctgcattggccgggcgataatgaggcacagcggtccggcgtgcaacggctccgacgagctcgaattcactatggtgccgcatacttaagacaaaatgggggcagggtggagttccttacctaggggtggttctcggggagacttggcttgatgctggtggcttcggtcggctggacggcgaggaagcgtggcgacgatggtctccggtctgcatagggaagagggtgagcaagggcaggacgaagagagagggaagaggggaagccaaggcaggttcctagtgcatcaccctcaggcagagctcaccatggcaagggctacgacagaggctcagtgacaatggtggaacgacctttcgacgacagcggcgctgcttgtgctaagggtggggagaacgagcaacgaaagtgcaaatggtgagtgggggggcgctggaggtctgaggtcttaacttgaagcccaggagaggtgcgtgggatagggttgtgggtaacggc

SEQ ID NO: 19706 - DNA, 1089 bp, Zea Mays
catgcgttcaacgcgggattagtgcggacgccttgccctttcccttgggcatatccaaccggtctcgcgggatctccgggcgaacttcatcggagtccataactcggtcggggctcttgggcatataagaaccagcgctcccgtagccattgatggagccgcataagataaaaacattgccgccacggttggggccgtcctggtgcgaattggcgctctggtcgggcagaattcctcgccgaagacatggcagcgccaacaatccctcgccatcgttccgctcagccgcgaatccgccccaacgacgacaccagggagctcgactgcaatctgcacggtgagaacgctgtcaggtcactcgcttttatgtcggctacgtgtagaaccttgcagggtagggatcggggctctggatcgtcggagtaacgactctccggcaaggcctcgccgtaatggctggtggcgccgccgcctggtagctgcgtgaggaaggaaagacgtcgggccgttaatctcatgatcaacggctccagatgaatgactgtgtgctgtgcgcatggccgtttgatttcgcgcatgcggcttagattaaatctgtgcagcgtttcagtaggtagatctatgccgtccatctcggatcggatggatctaagttgatagtcggtactttatatccgaaccgttgatctgctatcgaccggatctggacggatctctggataccgcagattgtagccgttaatagtggatcggacggatcctgttgtataccgtttcatttaaatcgtggatctaatccaaacccttgatctcagatctgacggccctgtgatcgcgatacccccttcgcggatgcgatatgcaaaagagccctcgcagttctgcaaaactaacccgcagtcctgtgaataatgttctgagtctagggtttaattgcgctatggcccctgccttatctgtaaatagtgcgcccagtccagggaattataaaatccagaaaaaagtgattagaaaatgattttaatgagaaaataaatgctagaatttgtgtaattcatataaaattcatatgaagtcctttttagtcca

SEQ ID NO: 19707 - DNA, 561 bp, Zea Mays
cgccgactccggtgcaggatcacacatgacctcggacgctggtaaactttccaccatttcctcgcccacttcattcactccttcatctatcattgtgggaaatggtgccttgcttcctgtcacagccactgggtcacatattttttctttcccgcatcgcaatttagttctcaataatgtcttggtgcctcctagcattattaagaatttaatttctatccgtcgttttaccaccgacaataattgctccattgagtttgatccctttggcctttctgtgaaggatttgcaaaccaggaatgtgatcgccaggtgcaatagctccggtgacctctacccgttctatgcaccctccaccagcacccctgcattcctcgctgcacccacctccctatggcatcgtcgtctcggtcatcttgggcatcaagctttgtccaaacttattacctccagtgttatttcctgtaataaagatgatgtcaaccacatctgtcatgtgtgtcaacttggtcgtcatgtttgtttgccattcagttcatctagctctcgagcttctcacaa

SEQ ID NO: 19708 - DNA, 1376 bp, Zea Mays
tctagttagaggattaaaatataggggcaaaggggtgaaaataatgggaagaaaaaaataaataaataaggcaaacagtatgaactatattcacatttagaattctattaaattttcgcaagacttagaaattcaaaaccataatttgaatttagattgaatctttgatttggggataaaacaggaattttttaaaaaagaaaaaggaataagatgtttgttgggccgtcagttccccattcggcccactcctgtcttcggaaccggccaattcgatcccgcgcagcccatctggcgcgctcgcttaccagccactgccgtgtggggccatctggtcggcgtcatccgcatcttcctcgccacgacgcaacgcaacaaccagggagtaccgaacccagccgtaagtgcggtaaaacgccatgattctcggggcggatttgtagctgatagttacgatgtggacttcggcctcgtttccccctttccctggcatataaagctcctgtgtggctgcgagttctccacccgtgccgcgccgggcaagtaatatcatcggcgtcgtccgcggttcaaggttcgtggtgccctgccttagcaattggggtcgcgtgggcctgcccgtgggtgctagcgacctccccagccccgaagccgagccgggaactgcgcaatttctcgtcggtcgccgtccgtggcggattcatcgtgcaacctcatcgtggcgtccgtctactccccaatctccagtaagaacctcctcaaccgcatcgcgttcacctaaggatcatgtagagctcaccgagatggaaaatagggcactggggcccctaatcgctcgtctccggcgtgctgcgccgccgcacggtgctgtggcgccgccgctttgttgacagggagaggagagtttgggggaagggacgtgggtcgttgaaacggagatgtacggctgggattgaatctggattttccctgggtcggtatgtgcgagtccatccgatggcaatcgtagggtcagcattagatctcagtactttaaatcaagaccatcgatcctcgatccaagggtgaccggagtgtaccgtttcattgttaggatgaatctaatcgtagccctagattcctgatcgtgcggccagcgcgatccgataccccttcggcgtggtaatttcgcataagagaccctcggcttttcctataccaacccgccgtccacctagtttatatcctgtgtcttggaattattacaccgagacccatgcacttcatagaatttagggcgcaatccagggaaaatagaaaatcagggaaattgatttataaaatgaattttttatataaaaacaattccagaattttgtaaaatccataggaaattc

SEQ ID NO: 19709 - DNA, 636 bp, Zea Mays
atgagactctatgccaaggatctaatccacgtcgtcaatttcgtcatccacgaccagtacgccttcttcatcctcccgagtataggccgaccggcgcaggcacatcagccgtggtggcgccattactagcgcatagggtccacgtgattccacccccaaacacaagaacaatcgatgccctacgacgaggagaataacgcaaacacaaaaagggcacttgccggagacggacatcgccagtgtacgttggtcacggcaaggggcgggtccgcggttccccaatctcaccggtgagcaatcccggtcggagacagccgatgcactgtttgataatgtgacacgcagctccgtcatgttacgacgaagctccagcaccacccttcccaagtcttacggcggtcgacagtgaacacagaccctctctcctggccccgagcaccgcgagtgccggcgagaccataaaaaccctcagggcgtattcgttttggccgggaacggcgaggaatgggaataaaaccacgtggatctgcctggtctggaattcttccccacccatggtagaagatgtgttcggttaacctactcgaggatccatccccggtcgattcccggcttctaccctgtccctggcccggg

SEQ ID NO: 19710 - DNA, 446 bp, Zea Mays
gctcaggccagaactcaagaccatcctggctagccaagacttcctcagtttttctcacctctccaacaaagccatgcaagtggaaagggcaaaggaggaagaaaaaggccatctcaagaggaaattccaagtcctccgggctcagcaacaagatcggcactagaaaactcgatcctttggatttccacccaagggaccaagcttcagtaggccaactggacccaccccgtcacgattcagtcagcagagtcagagctcctttcatgccccctcagttgcaagcaaccaacccccggcgaatgtgtgttggcactgcggagatcccagtcacttcaagaacaactgtccccagctgaagccatcaggacctggttactccaactcgatgaatggccccaagaatacctcagcatccgcccccaaggcgccctcctccatcagccagc

SEQ ID NO: 19711 - DNA, 520 bp, Zea Mays
ccttcctccaggcaaatgccgacgtgttcgcatgggaaccgtcgcagatgcctgggatccccagggaggtgatcgagcaccatctgaagatccaccctgatgccaaaccggtgagtcagaagcctcggagatagtccattgagcggcatgacttcatccgtaaggaggtccggaagctgctagacgctggcttcatcgaagaggtccatcacccagtatggctggccaatctagtcatcgttcctaaggctaacgggaagcttcggatgtgcatcgactacaccagcctcaataaggcctgtcccaaggacccatatccacttccacgaatagatcaaattgtggattctacccttgggtgtgacctcttgtcctttctagatgcttactctggtttccatcagatccagatgcctagacaagataggaagcatacctcttttataactgtggatgtgctctactgttatgttgtgatgccttacggtctgaaaaacgccttgccaacatttgtacgggc

SEQ ID NO: 19712 - DNA, 576 bp, Zea Mays
ctaggtttcaggagcggttgccaaccctttatgggccaacctttgactccaaaaaatcttttcgggatagcctggaccaccttgtggtcatgtgttaacgagaaccctacagtctttctcgacaagctagaaataatatcaaatattgaatattgaaaagatgggttgagtcgtcttacttggtctcggctcgataattgttgggccttggtgccacttctggtgcggccatttcctgactcggtggtcaggcctatgggtcacgtgattctagggcgcctgtcgtgcctatcccaaccctgcacgtcgaaaccggcaatacatcagttaccatctctcgctacttatcggtgtatgtccttggtcggatggtcgtggtcgagtaggtcagtcatcctaggcttggtgtcgttcggtattctccttcgacttgctttcttagggcttcattcgccccttcgtcgctgttgcctcacaccgccaccacccaccgtagccaccatggggttctagagccactctctggccaattaaaatcacttggacactcttgtcccatgcgagctcctccacgag

SEQ ID NO: 19713 - DNA, 701 bp, Zea Mays
attttaagggggtctttagcaaaacttatggccgaaagggtatgggcggatgagagctgttggatcacgattgagcgatgtggattagattgagacttcattaacgtggtgtgatctagcagcccttggatcagggatccacggtcagagactaacgtgtccccaaaaccgtccgatatgaattgaatggcccgatcctcgtcttccagctcctgacctaatcctagccgttccttagactatcgacggtcctggcaccttctcttcccctggccacgcatcgcgatggcactcaacagcccgcacggccgcacccgctggcggttagcgtgcccggtgccctattttcctaccgaaagcgagcaacgcgaagagaagacggaggcagacctagctgtaggttccttaccgcggattcgggcacggagacgaacgcccacgatggaacgcaactcgcgatggacgccacagctccggtgagccattgcccgagttccgaccgaccgttcatcaaattgtcggtcgggatagcttccccgtgcccagtcgaagctccgcctctattccctggattcgggccgtcgacagaggcgaggaacggcgacagcggtggccgaccgcactccccctactcaattcgcacacggtgaagccctcgatgaccctctggtggtgggcaggggcggtggtttatattcccc

SEQ ID NO: 19714 - DNA, 472 bp, Zea Mays
aaaaaacttatttagatcttaactagtctaatctagtcatatccaacctaatctagattctatctaatctattatgatctaatctagagtaagttactcgatactggtacaaaagataaggccataccctaatccacttacgcctaaattggtgacttagatcaactcggccatacacaacaatttgacctatattataggttacataacctatccaacaaatctagaagcaaacaaccaaaccagattctgactaatctcaatcaactcatagctacctactaaaccagctactctaccttctaagtcgttgcctacaaatctatcttaacctcttgtccctaacccggatgaagacaccaagacttgagaaggagatcaaactcgttgaagaatactaagagtcaagccatatctccaaagaaagcaagatccacattaccctactctttcctacccaagcctatccatg

SEQ ID NO: 19715 - DNA, 329 bp, Zea Mays
tctcacactacaaatcgtaccactaagaaatccagaatacaagcttaaattttatcagctctataatatacaaatcgtaccactaaaaatcgtaccactaagaaattgctgtcctggacctggggctccggtggcccgcacctcggtgtgtgctccttcgacggtggcggtggtgtggggatcatcaagcgcagcgctacctcgtcgccgtcctcgatctcggtcttcactgcgatgcgagcacatacaattgggcggttacgcagcttaccgtccgattttggcggcggccgattggagcattagaccttctgcgtgctcacctggcg

SEQ ID NO: 19716 - DNA, 317 bp, Zea Mays
taatgaaatctaaaccgactaggagatatatagggaaacctacttgtaacccaagccacgccggattatataaggcgagctagggatccctcctaaggcaaatctggagaggatctgatcttatacatgccccccgctctctcatcaaacatccaaaccctagccctcgttgtaacctccagatatcaaagcaatactacccaccgcaaacaggatgtagggtattacgcatttcgcggcccgaacctgtataaatcgcgtgttttgtcgcatctccaagcgaaccatcgagctacagtcgatgttgccaacttaca

SEQ ID NO: 19717 - DNA, 497 bp, Zea Mays
tagggcaaaccaaagtaattactcctagatgatgataataaggcacgattaatgaaaattaaccacgaccattattacaagaacctagaattgtcagcctatctccgagttctaagacaaggagcacatggcgaggcagggggcggataaagccaacaacttatccgaggaaaaccatcacaacaattggaactttatatgcgcaagagaggaactttttggagtcgatttgagatttatggaaaaaggaatttcacagcctctatagatgcttatcaaccaaattgtgttataatccttgctgaaaacagaattcacatgattatcatcaaggtcacagtatttatgttataagtcatggtatatgcatttgtgttatctgttataagttatggtatatgaatttgtgttatctagaaattgtttgttaaaccaaaaggggcagtaaggtaatgttggctttgtggcgtcattctgtccgttggatattgtttttt

SEQ ID NO: 19718 - DNA, 405 bp, Zea Mays
ccacgaatcacgggaacgaatattaccatgtgcacaccgtttacgactgcataacgctgtgtaacatgatagcgtaaaacatgaaccaaaacagcgtaaatgagtacgaaatttagcgtaaatcgtatatctgtttcgtaaccgtaaatgggtcccgaaattacggcataataatcgcgtgcgtccgatcgtacgcgggttttggctcaaatatattttagcgtaaaatgtgagctaaaacagcataaatgagtacacaatttagcgtaaatcgtatgcctgtttcgtaagtaatttacggcgcgaaaatcacgcgccaccggtcatccgcgggttctggctcggacggatataagcgtaaatcgtgaaccaaaacaacgtaaatgagtatgaattttagcgtaa

SEQ ID NO: 19719 - DNA, 384 bp, Zea Mays
cggcgaaagggtatctaggaatgctgaccgccagatctaaattctacgcgcccgattagatccgcaattccgtgaactggaaaggaacaggtaccgtccgatcgaggatcgtcggcccagatttaatgttggccgaatcaatacggatcgcccgattcaacaccaacgcctaggatcaatgtttcccgaaccggtgtctatttctaatcagggccgcacatcttgtatccaacggttcgcatgatctcggccactttcttccccaccagaggacccatcgcgaaggcgggcaacccccgcggcggcgcgctcgccggagaccgcgccccagtgctcccgtgccctcgacacccacgtgatagctctacagaaaattcaatcgac

SEQ ID NO: 19720 - DNA, 671 bp, Zea Mays
ttcttgagaatctaagggtcttatgtgttaaaaccaggacccgtatgcactaatctttacactacgcaggacgacgggttgattaaaaggaaccaggggcttcttttgtaaaattagcgcgctgaaggggtatcggcgatagtgagccgctagatcgatatcggaccgcctagattagatcgtccattaagtgaaccggtatgcacccccgaccgcctgatcacaatttgatggctgggatttgaatgtgccacacacaatatcgcccaccggatcatagatcaacgcctatcattacccccggccgaagggttacgctggatcacatcaccactattcgtagggagatcaacgatcaggcccattctctcccctaggccatggtggattggttgccggaacagagctcccgcggcgacgccattgccgcccacaccaaatccacgcccaagggcacaaaactacgatcctgaccgcgctacgcgtagagggaaggcaagcaaactcgtacgattgatcttaccaggaatccgaggcgtgatttcttttgcccacgatgggacgcggctctgtggcagcacagtggttccggggaggaattcctagtaccttggtcctcgaccgtgcacgtagctacacctgacacgattcacgaacactagagatccccc

SEQ ID NO: 19721 - DNA, 398 bp, Zea Mays
ggacctgttctgccaagtgggccccccaactacagtacacaccctcccacgcaaaagcaaaaagacacacctcagtgtagcactagagctggaggagttgtgaacaatggatggtccacaacaacacttataagccacgttccgtctctctcagtggccgatatggtactaatcaaacaaatcccatacgagcacctatgtcctgtcgttcgtgtagcccagcaattgtacgtgcggcccagctgcccagtgtgcagcccagcgcccctcctctcgcttgtccgactgcagccgctgcctccccacatcccccacgcgagctgcccccacgttcactccatgcgtcggcctccccgtgcgcaactgccccacctccgtgcgttctcttctctctcgat

SEQ ID NO: 19722 - DNA, 297 bp, Zea Mays
cgaaaagctccgctgaccgaaaccaaccgatggttaaaaccccaatcggccccgcctcctcctcaactacttcgcgccacatctcccctatcttccccgttctctatacccgatccaaactaaactctagcgcccgtgcggtgggagctgtgtacaccacgaagctccaatcccatccaccaccgacgaacggagttctgtgcttgcgctagggagccacgaggagtcgctggtgaagcgtcgtcgccagccgtggggagattgtcacagtggtgaccagaattcgtgctcggacac

SEQ ID NO: 19723 - DNA, 562 bp, Zea Mays
gggtatttggtattcaacatcaacttttggtggccagaacttatgaaaagctgaaacaatcatgaccatagttacgtgttataatctaaagactagcttcgtccatagattatacatgcccaaacgtcatgctaattactttcacgtaatctgctactgaaattaatgattttgtagcattccatgttttttaatgcgactggttccaaatctacagacagtcacttcaagtccagttaccggcccagcctattattgcctggtaactgagccacatttcgtccagaaatagcaaaacatcagccgcatgcccgcatatccacaaaagtagcagcagcgccagcggccagccgccagcgcaccaccccattcgaccattccctaaaatctcctactccgtaccctaccgggcccatgcgtcagtgtcttcaacgcccacccatcgaacggccgcgccatcgcgaaatcctagatcgcacggccgagatctctcagcaacgacatataaaaatgtagcgtcagcctctgcgcacgagctctctcctctctttccgcctccatc

SEQ ID NO: 19724 - DNA, 1460 bp, Zea Mays
cgcctggacaatttctggtcgatttaccatctagtcggacgactaattgcccctaatcgacggctagtcggacgacctgatactctagtcgagtcgtccggctgatcaaccactaccaggcgacctgcctgactaatcgcgattaatcccgattagtgggacacttgaaaacagtggaaaatttatcaggggaagtggaagggttattttgaaaactgatgcacgatgggagggttgttttggaaaattatcatgactgcttgcacggtttggaccaagtggttggtttgcacctgatacattccctttacacaatatttactaatgatggattttgtagtgcagatgaagactggatgtgttgcacttgtattatgtttaaacataagtgttgatccacctgatgtaattaaaatttccccttgcgcaagattggagtgctggataggtaaacttttagttgactatatatttccaaatttcaaattagttgaaaaaatacagtaaatgaactgcttttcacggtgaaaccatgtctttcttttttatgaattgcgtttctgaatgccagatgagagcatattgttaatcagaagtacacaagtcttttaatcctaggcacattggggtaggctggagatgaaacccagcatgagcaccaaccagaagtaaaaagagaagggaaaaccttatacaaatatacacagcgcatcaacagtatagtaacattattaaagaatctaaatctagacttctagagtcttgttcatggttcattcttgtagatagctcatagctggttttcatgtgcttccatagttccatccaaggaaattctttgtgtgcattcggtccttccaagtaacttctcttttggcatattgctgatttaaagtaaatcacaagaaggaaactatctttcacctacttttttcaaaatacactgttaaaatctatattctgaaaatgagattgtttttctcaatagtttttagaggaatcttccatctgtttaaaatttgaagttgagaattgacatttaattgtaaaggaagtgaatttttctaatgtaagatactgcacctattggctgtggccatggatatataaacttatttattagtccttgggatggttataatgtcaagcaagtgttaccagactttaggcaatgatggtaatttatatttgttgataggtttgcacttcattactgttattaacttattacacttggtgcagttggtttgtgttatgttcatagacctattccttccttttcagaccctttctctatgacacctcttaaagctcttgaaagtattggaaaaacgttgcattcacagtatgagcgctggcaacctaaggtaaagaacatgcttgtctgtttaacttcaatgttattttggtgaggattatttgcatcttcatgtcctatttctagtggcacttgcaggctc

SEQ ID NO: 19725 - DNA, 739 bp, Zea Mays
aaggccttgaggtgttaattttgatagactcaggcagctcccattcattcttatatactcgtttagctacgaggttgtttggagtaactaacctgccccagtcttcaagggtgcgtgtggcagatgaaagttgtatgtcttgtactcgttagttaattggagttgtttggtctgtccaacattgtgaatttgtcacggatttttgtattctagacttgtccagttatgatatgattgtgggcttggactggttgtcattgcacagtcccatgaagattcactagttgcacaaatggatggtcatttcttccaacaattcttcagtcctgctacatggtctctctgctgcattgatgctaggttctatggtcgaagttgccgtggttgattcagtcagtccttcttttcaggatgctggtttacctgaaccgcaggtgtccttactgacagaattgcttcagtttttgctgctcccactggtttaccaccgtctcgggagtttgatcactccattcccttgttggctggtgctaccccagttcatgtgaggccctacaggtaccctccagccatcaaagacgaaatagaacatcaagttttagtaatgctccagtcgggtattatcaagccaagtaccagctcattttcatcttttgtgttgttggtcaagaagaaggacaacacttggcggtttggtgtcgagttccatcatttgaacgccattacagtgaagtctgtg

SEQ ID NO: 19726 - DNA, 393 bp, Zea Mays
ctttcaaaggcagaacatattcgtgtcattgataattctcggacacccgaggaataaaatggttgtgtacatggatgcctttgattgatgaattggtacgtgcttgggaggaaggggtatggacgtatgaccgagctatgaagacaaacttcaaaatgcatgtttggtaccagtacttcatgcatgacttaccgacgtatgggctattctgcgcctggtgtgttcacggtaagttcccatgcccagtttgcaagcaagctcttaggtttgtttggttgaagaagggtggcaaatattcgtcgttcgataaacatcgacaatttctccttcctgaccatccattccgcctagacatcaagaacttcaccaaaggtgtcgtagtgacagaccgac

SEQ ID NO: 19727 - DNA, 602 bp, Zea Mays
ggaagacctgggcacctttgaattgcaaagttttcatttggttggcaatcaagaacagagtgtggacagccgatagacttgctaaaagagggctgcctcatcctaatgcatgccctcattgtgatcagtccaacgagaccattcaacatattctcatctcttgtgttttcgcccgtgaagcctggacttcgatcctcggcaagtttggtctgcaacccattgcccctctgccggactgcacgcatttgtcaaactggtggagccaaagcatcaagagtgttggaaaggacatgaggaaaggactcaattccctaatcatcctagtggcctggcagctttggaacatcgtaaatcttgtgtctttgagggttctaggccttgtgttcaacacgtcgtgttagcagtggctgagaaagggcgcatttggtgtttggctggagcttcagccctccaagacttcctgctgcatcagctcccgtcggggactccaccgtaattccgtgaagctagtggtcgttctctaccttgtgtgtgtcgccctgttcttagccgcggtctgtacttggggctggcaagtcttgtcatgcccctctttgtttttt

SEQ ID NO: 19728 - DNA, 381 bp, Zea Mays
tccgaatagaggcacaaaacgacatggaatttagccgaaacttcacgaataggtttatgagggtgaatatgagtgaagtgtgcgcttggtttgaatttaggcgaagaaaacgggattagggcactcggctcggaaacgatcgctcgaaacggggaattgagtgaaattgaagcctggaaactcggattggcgtgaaatttggcaaggatgttgctgggagtgttatgaaggtgcctgaaaaatttgggttcaattggagcatttttggctggtttgggcatttcaccgagcacgtggcgtgcgggaaattaggtttacggtgaaacggctatttgaggtgggaaaaccctcccgaaggagctagaaacctgcaggagtgtt

SEQ ID NO: 19729 - DNA, 526 bp, Zea Mays
ttaccttagcataaggatcatcggaagcatgttgggcgtgaccttgatgtcgatgacctcccatacctctcttgttctcatgtaaacgacgacgtagcatcgctattcgggtggctgcatcatctatgtttccgtcctcatcaaaaacaacattttcatctgtgttgtttcctcccatatcttcctcatttggtagacggttttctaactcagtaacattatcggttaaagtagatatccgcatatccaacctctccatgctgctaccaagcttgagatcaattagtgcatcggtgactaccttgctgatggcatcgttcatccatctctgggcatcctccatagcagcttgaagttgagctctgctaacacactcattgaaatctttgggagagttagtctgttcattccctatcattgcaaacaccaaaacaatagcaaaaaataaaggttatccctaaaaaatttctgcgcagctatggtggtgcctctcaatcatgcaaattggcagctcatccacaaaccc

SEQ ID NO: 19730 - DNA, 555 bp, Zea Mays
ggatttggacagatttggagggatattctttgtgggctgcttgcaacctcttccactcaagtgatggtaaatgggtttccgggcaaacatattgttcatcgtcaaggactatgacaaggtgaccccctatcaccgatgctcttcattctagtcatggatgtgcttgggagaatggtcattgcagctaaagaggcaggacttcttcaaccccttgccacaagatctgtacatcaccgagtctctatgtatgctgatgatgtagtcctcttgcgaccagctgccgaagatatagcaaccatagtggatattcttcacctattcgacgtggcttccgggctgcataataatgtccagaagtctaatgtatatcccattcgttgcgacgagagtgacattgcggttatgcaaggtttgctgccctgtggaattttgtccttcccttgtcaatatcttggacttccattaacgctgcggaagataaccaaggaacaagcgcagccaattattgacaagtttgcaaatcagcttcctggatggaaggcagacttgatgaca

SEQ ID NO: 19731 - DNA, 1031 bp, Zea Mays
ggactgggcgccaataacagaaaaacaaaggggccataatcacaattaccctaagactcaggcttccctacagtgtggactgcgggttggttattgaaaagtggaggggttcttttgaaaaacaaccagggccgaagggtatgctcatatctccaccgtccgatcacacttggatggaccagatcacatcgcacgctttatgaaccggtaaccacccacaaccatccgatgacatcccaacggcctagatctaaaatctctaccttcccatcggaccgttcgatccagatccgctggtcagggttgattgcacaaggattacactgcgcacaaatcctggccacacgctcgtaggtcaacggcataggatgactcccccacagatctaatcctagccacccctggttagatcaacggcgtaggacccatcttccatctcctgacagcgcccggcgacaaagcccgagcggaccacggcagcgcccagatagcgcgacccgcacaacaaacttggatctcaacggtgctacgcatagcgggggttggggtgagtgcagggggcaaggtcttaccggtgatggcgacgcacaggacgctgcccacacagctatgcggttcagcggcggaagactaacttcggtgagcaatcaagccgtccctgtgggtccaattcctacaccggtgccacaacagccttccacgggcccaggagattcacctcgaccaacaacaggggcaaggtccggtgtggtagatggttaggtgcggcggcgccggtctcacaccgacgagttcctgggttcttttgatgggggtcaaggggctttgattggtccattatttatacaccaagaccgagccgaaggggtcggacgtcttgttgtaacctacacgcgatagcggcgacgaagatccaggcgaattcgatccccaatccttgcgcggaatccgtatgcacgcagtgacgtggagcttgggtgaagcttctgatagcgggaccctcatggcagcgactcccacaaggaatgcac

SEQ ID NO: 19732 - DNA, 767 bp, Zea Mays
aaaacttggagaaaaatgtgcccaaagttgggctgtcagtcagcctaaccctgaattttggtattcagggacatccaatgaactttgggagtcttttcttagatgatccagtaagtgcttggctatggttgctataacaaaattatagctggatcatcgaacaacaactttgctactggccgatcaataggttgccatgtaaaagcttaagctctaagccctgcaaaatgctttgtcaagtgtctgaatgaagaactaatggtacagtaacctgaacatgatcccaggttcatcccccctcaccgccgatgaatccgcgtcgtgatcgttgtcgccgttacgattcacgctcacaagtgaccggataacgattcggggcaaaagatcttcgcctggggataactccggtagccggccgccatacccccatgccttatggccagcgcagatcagttcaccagcgttggctgtccgtcgatcggctgccatgtgctaaagcgttagaccacgtcgctgtgaatcacgtctcgcatgcacagtgatcgccggtgtactatcacggtgaaagccactcatcttgagcgctagtaccctttttcccctccggccgccacgcgtcttcgtgcaattcatcgaccgccgctcatgaactctataaattgagcgtgtcgtgagctccataggataattacgcatccaaagcaccagctattacctccaatcgttcaccagagaccgcaaattccttacttcccccaatcctgttt

SEQ ID NO: 19733 - DNA, 694 bp, Zea Mays
ccgatggcttccagcttccttttaatcgtgcgcagccaatcgtcagcatcgaggggattgctagatccgacaaacgtgggaggcttgagcctcaggaaatctcccatcctgtcttgtggtcttccaccatttgggcgttgattttccagacttcgagtgagaacctcgatgagtcgggtttggttggctagaacttgggctaaatctaagggtagttctagaggtgcggggaggtgggtctcacttccttctctaccggcttctctttcagcttttaggggaaaccttgctccaatcccggaggtggtaggcgtggttttatccgaagccatctgccagggggagagagtcactattatgcacatgccttttttccaaccaagttattttattcaatacaccaataaattacaagcatacaactactacaagtcgtactacacatgagcgttttctgaggtactaccgaactctttttctaacgtgtccccaaattccttgagaaggtcatcaaggctagctagggacatatcctcgatgtcggacaaattctctatcctggcgggagtttgtgctggaggggccttcttcctccgctcagcttggcctccttggttcttggtcttcttttggattttctttgtgggggcgagcttccttagcttcttgtcataatccatcttcagggtttggt

SEQ ID NO: 19734 - DNA, 2044 bp, Zea Mays
ccaatgacgacgtgtctcgaagaggtcgagcaatagtggtaatgtcgtggggaggtagaattgtccgttgaagaagaggagatcttggtccatggactaagttgatgcagctctcccgcctatgatggtggtggtgatggcgcgtagctcgagtaccattgcctatgatggcgtcgtacaatgctgattttgtcgagggcattaggttgacacggttgaattgccttgctcatgttacatcatggctgcgatggagaccatgatcgtgggagaagtgatgggtgtcgaggcaccggtaggattggcataagacaggaagaacaagcaaattctatggtgctcaacggtcagggacattgacgaagatgatggtatgttcgtcccattagaattgcttctctagggtcacaaagttctagatgatgttgccatggtcgaccaaccatggcatgtcgaagatgacgtcgatctggaacgtcttggtgttgatgtgaagccaagtgttgaggcaggcttcctggcgagcaatctcattgccactgttgacaagctttatggtttggatgcgctgttccgcaaggttggccggcttggcaaagttgatgtcgatgatgttgtgggtggtgcctgttttgacgaggatgagcaccaagttggcaccttccaggaacatggtgtgtcgaccacacgcacactagagtcttggggctgatcatcatcatgaggccagggtcgacaccgtcgttggcatgacgagcgtgatgtctaacaagtgcttgcacttgtggccacaggcaaagggttcgtcacagttgaagcatagcccaatgcaatgacgctccatcatctcctctgttgtaaggggcttgaaggggtgaggtggtgtagccggcgtaggtgtcggatgaccccggtgttatcgaggcggatagggttgttgatggcacctttgaatcttggggaagccgatgtgtggaatgttgtagatttggtgttgtcagcgatgacaaccgcctgtcgcttgtatgctcatggtagggacatggccatctctatgtcttggggttctagagctcgacatgtcttcagtggctcgagcaggtcagcagtgtagacgttcacctgctgctgttcgtcaagtgtctcggtgcgcaccacgtgtgtcaagatgtgctccatgtagtcgtcgatggtgctagtcttctgcaaggatgcaagctctcgtagtgtttgcgtcgtcttggcggcccaaaatactcgttgacgcaactgcaaagcatgcccagttggtgacaactttatcccgcgttaggtgcatcagtgcatgtaccattgtttagtgccacctagagatgaaaagatgcataccatactcgctcgatgtcagtagtcttttgccctgtgaagaactgctcacagcggttaagttatggcagtggattttccttgctgtcatatgttgggagcgacaattgtggtagcgtggttggaggatggggaaggagctgattgctgtagactggtgagggtatggcagtgttaagggccccttggtggcgcctccctctcctagttggcgacgaacagtttgccacttcttccacaagctcgaggacggtcaatgaccttgctgtctcctccttgaggaaggcacgtcgagcttgatctatggcgtgcttggtctccacttcgagctgcttggtgacagcctcacattccagcttttccttggctgcggtggcgatctcgtttttggaccctccttgcttcatgttgcccaggcagacgtcgaccttggcaaggtgctcttgcaccttgtccatgtgcttggtgagatcagcagcgagggtctcgagccactccatttctgtggacatggtggaattgttacccatgggatcgagacggttgggggggggggttgttgaattccaagcaaactagagtgagagataaagggaggagcaatagctctagtcttgcttagattgaaacggatacattgccgagtatgtatagtccttattagaattgtataccaagc

SEQ ID NO: 19735 - DNA, 975 bp, Zea Mays
agctggagcccatgtgggaaggcccttacattgtcaagtcgaaggcctcccccagcgcatacaggcttgcaacgccaaacggcgaagacttaaagcattcctggaacattgataatctgcgcatattttttgtttgactcatcagggccagctcgcccttgtaatttgcaaaaacaattttgttctggcccgcactcttttcctcccgggggggtgaggtttttaacgaggcggagtcatgtaatatacaagagaaaaatcccccgcaaaatccacgtcgaaacaagaccgcacagacggtcttcgacattcgactaatacaaagtcaccgcgaggtctagcggcagccgccctcgcgtgcgacaactccgcgcagaagtcgcctaagggtgcagccggagtagcacaacaagtgcgaaaaatcgaagtcttccacgaagactatccgcgcagaagtcgcctaagggtgcagccggactagcacaacaagtgcgaaaaatcgaagtcttccacgaagactatccacacagaagtcgcctaagggtgcagccggattagcataacaagtgcgagacatcgaaatcttccgcgagggctatccgcgcagaagccgctcaagggtgccgccggattagcactacaaatacgaaaaatcgaggtcttccacgaagactacccgtgcaacaatcgcctaagggtgcagccgggctagcacaataagtgcgaaaaatcctagttttccgcgaagactatccctgcagaagtcgcctcagggtgcagcatggacagcgcaacaagtgcgacgaatcgactacaatggtacagccggacgaagcctaacgagtgcaaaaacggctacaccaaactgtccgcacaaagaccgactacatgcgcaccagaccaacataacaaatacaccagaccaagcacgtaacgccctcgcgaacatagccgagtgtgcgaaggcacacaacc

SEQ ID NO: 19736 - DNA, 355 bp, Zea Mays
cggcataaataacaccagcccctaaacatgtatggttcatcagtatatcaaacatcatgaaataaaccataactgaacacaaagctgttgaaataatacatgactgcatttgatataatggataaaaaatttgaaatggacagcctcgatctccagttttgcaataaaaatggttcaataaaaaatgcccccatgtgctcatgatcaggtagtatgtacagtcctaaaaaacaagggtatagatttaatttttctgctaaaacaacaccagcccctaaacatgtatggttcatcggtaaatcaattatctaattaatcagtaaactgaatttatgttacatgaagcagaaccatg

SEQ ID NO: 19737 - DNA, 671 bp, Zea Mays
gccgaaggagaccatcaccaagtctagcgaaggtgaactggtccggctgaagtatacattcagatatggggataaattcgaagaaccaaacgatgactagctaaaatgcatcgaagttacaagtgatgaactgcttggatcatattccaaggtagaagataatgcattatccacagccttcggaagtcgagaaaagaagagattgaacagagtttttgacgctattggcttcgtctaccccgactaccgctacccgctgcgggggcaagggaagaagaggaaagctgctgctctggctgcctcggctgaacctgtgccgaaggctgcgggcaaaaagatgaaggtacttacccaccgaccacgttatattgaaccgaccgtggtgcctaagtttggcggggaggcctcttcagctgatgaatcaagagaaactgctcctccgatgcagagggctgaagaactggctacaatgccgagggcacctttggttgagctagttgaaacgaaggttgacaaagataaggttgaaaggtcaacaactgaagaggtaacaaagatgtcagggactttaagtccttcaacagaagcaacaacgctgagggcacaaaagagttctgccataactcctaggagaaggaggatggtaaatgtattagatgtactggagacaa

SEQ ID NO: 19738 - DNA, 1007 bp, Zea Mays
tgtccgacactttagcttggctgacacctaattccaccccggcgaccttaatccctcaactaattgcactaatccgggtcggaatctctctgtccacgacgacggcgaaaaccgagaacaatccgacatgttcttggtgatccagggtagtctagttcaattaaatgggtctacgagtagcagaggactcaagggaggctagaacatcaagcaaagaagcttgaactggcctgtagagggctagccacggcgaagcgttcacagtggcgcggaaaacgtatttgggggaaacacgaaattgggagactctggtggatgatccgaggcaagggctggtgcgttggatgcgtaaatacctagaggaactcactggggcagcaatttatagagtcttacggcggtggcgtctaatttcgagaagacgcgttggaggccggagagaggggaagtcactggcgcaagcactaccatggcatttaccggggcagtgtctcaggcgatgaacaagctacctaaggcggtctactacgacgtggtaaggctttgaggcatgtagcttggccggataacggtgaactccgatgatgctaacgcgattgaccgcggcgggacaccccacacgacggccggattcacccacactggatattttcacctcgccccgacgttatctactctccccgcgacacgaatctcccaggcgggtgcgaattgtggtggcagaccaccggcatcgagctcacgacaccggagatctttatggtccttgtaccatggcgattttcatcagacaccctgacagcgcgttttgtagagcttcattccctacttttcatgtaacaactcgatcacttgtctgcatcaatattgtcgtccaaagaaccagctacaagtttgttataaagatcttactcagctacttactcaattccacacaacttgatcttcaagttcttccagttttactggtagccataattcagtcagtagtagctactaacagccca

SEQ ID NO: 19739 - DNA, 471 bp, Zea Mays
cgcaaggatgctagaacagggatgaaaaaggaatgagcagacctggggacggctggccgcggtgaggtgaactttgcggtggcggaaaccagttttggggagaactaggaattctcgagctccggtgagggactgctagcaattggcggtggctgagtgcgtgaggatgtggtgaagctcactgcggggtcaatttatagatccccggggcggtggcgctcaattcgagcggatagcggaggcggccgaagaggaggaagaaccctggcgtgcgtgggtacgtgtcctatggcgtggcggtaactccggtgatcgacaggcagttagagagggtcacggtgatgaggtggcgcggctaagacacgcggcgcacggtcggacggtggctatcaccggcgttcttatctgcccagccgtagggtaaaggggaaggcacgaggggtcgccggagtggaacccagctcaccggcg

SEQ ID NO: 19740 - DNA, 398 bp, Zea Mays
cgttagtggtgctacggtctctgagacttggaaggggccacgaggcacaacgtaggaagccagcaatgctataaggggcagtcaacagtgggaaattaggaccgttaggcgtggggtttatggtgttaggatttgttctttgctatgtaatatgtgctaggccaaaaaatacactatgggtcgatttcggatatccaacggataacccgcgggtagaaggtaatatcctaatccgtgcccgcccgacttcggatcggattcggatctgacccacgggtcaaaacatgtatccatatccggctccgtcgggtcggatatccggcggatatccatatccacgggtcaaattgccatccctagtttcttcatagcctagctcaccgcaagatgctctatcc

SEQ ID NO: 19741 - DNA, 575 bp, Zea Mays
aaaagtatcaggagaattaggaagataagcgccaaagtgatgtaccaaagaatgagtagttgctcttagagaaaggccaacattctggattatgattatagcttcgcctaaacctttagccgcataaatcaattgagaacacaaggcttttcctggatgtgtaactatttgcaccacatgtgtgtcattggtagaagcatctagggagcatgttccaccacttacaatcagatttttctgtggctcaaatgtataagagcataaatagcaaagggggcttaaattacttcagaccatgaacaggatatacaagaagtgagcaaaagttcacctgtgcttcaggatggaaaactaacaagacatattcaggggtgactcttaagaaagaaacaatctgtataaacataagctgagtgagacaagaactttagcgaaattgataaaaagtattcaagcgaagagaagatgaattagcgaaaaatcttccatttacatgtatactcgcagcagctagacgtatatttcttctgttggagattacaatgggtgatgcttgcaatctatctgaaccacgg

SEQ ID NO: 19742 - DNA, 409 bp, Zea Mays
gctggaccctccggtgatcatgtgaatcactcccctgaagggtggatctgcgaagtcttcttgctttggtggtggcgggtggtaggtgttggtttggatgctgaggcagtggaggtggcaacactagcatttcttggtgttgaaagtgttgttgctggtgaaagaggttggggttttgctgctcggggtaataggggtgttcgttttgatattgatgctggtggtattgttggggttgataggtatgagcgatgactctttggttgtcaactggcgccgacctggccatttggttttttgttgctttggtctctaggaagtctctggttgggtgtgctgagtctttgccatggaaaagacaatagaatcttctctgttgttgaggtcctcggcccctgcctctgcccct

SEQ ID NO: 19743 - DNA, 369 bp, Zea Mays
cccacatgttagtgtctcccttcttccccgtgcgcgccctctcctctctacccctgcatccacatggtcctcaatcccctcactagtcaatgtctcagctatggaaggaaaaatcacgtcactgccatagaaggaaacacataccctcgccgctatccacgcctcgcagcaatccagcacgcaggaatcccatcgtcgacgacgcgcaggaccaccccgcccaatcgttcttcccatgcaccgcggatgccccgcccatatcctccacgccccaaacgcaatccacgtctcgccgccatggaaggaatcgcaacccaatcccctcatcgccatccagcgcacaggaccaccatcggcccgcatcccatc

SEQ ID NO: 19744 - DNA, 428 bp, Zea Mays
aagaaatcttaagtgatcgtggggatgtctgtgcattttccggtgcgcgggggatttcagctatcttggagaatgcgggatgtgatcacaacaagaccatggcccaggccgaagctaccttctccacagatgtcacgaaggatccttcagctgaagcaaccttgatgggcggaaaattctataatgatgtctgggtgaatggtggccgagagatgactcatgaaattatgaagaaaagtgaaaacgacatccatgacgcccgagtagaagcaagacaagctgaagaagttgcagagcgcgaaaaacgtataggtaatatcttttgatgtttagcttcggcatttgtttttgtgacttcagactgattattttttcccactttagctgaattatctccgctgccggaaccgttcgatctcctggtcgat

SEQ ID NO: 19745 - DNA, 305 bp, Zea Mays
cggaactgctacataaactctccgaacggcgcaaggaggcagcggaaaagtacttgtcacacttcatggtggatcgccaccagaagatcatccgtcaaggggagatcgatatggaatctctcctgcctccacttcagggtcccattgtaagtgctccagatctatctcttacgactttcatggatcaacgaggagatcaattaaagcaatatgtagatgaatctattaaaatgcatctacgttcatacgagaaatcagctgctcctagctttccatcgcgagagtctaatacagagccacccgcg

SEQ ID NO: 19746 - DNA, 676 bp, Zea Mays
gtggccgcggcggagtcctcgccgcgtgtggaggttggcaaggcatctgatcttcctagtgcgaggaccaggtgccgacggcgaagggcggtgtcgaagcatagtgtgggcgatttttcgcgaagtggtaggcgccgccgtatggggatggcgcgagaccgtctttgaatagaccagaatggtaaacgagaattattgacttcgccgattgggacgagcattggtgagggggatctgcggaatctttttgagggtgaggaattgagaataatgttgttcaattatagggagatgggcatcatcgaaggttgagctgatgtagtaggtggtgccctcgctgagtgtatgtgattgcaacttgtattgtaatgtggtctttttggccgttttcgcgtacttgtgctgattcagctgcacccttgggtgacttttgcgcggagtgtcgttttggcgtatttatttcgcatatctggcagcacccttaggcgacttttgcacggagtgtctttttggtgaaagactttgattgacgcacttgttgtgctagtccggctgcacccttaggcgacttttgcacggggtgtcttttcggtgaaagacctcggttgacgcacttgttgtgctattccggctgcacccttaggcaacttttgcacggagtgtcttctcggtgaga

SEQ ID NO: 19747 - DNA, 678 bp, Zea Mays
cgccttgaccgtgggcaggtctgccgcaaggaagagagggtcagcgccaccatcgatcggactcgtcatggaatcttgcatcaccgcgggcgagtgggtctgcgctccaagtctcggtgaggcctcgctcgcgtcttcccatggttaccgtgatgattagcacctggattcgctaggaatcgagcaacgaagtactgccaggggtccggggcgctggttcgctgggggtacgccgtctcagcctggcgtcgtgaggttgaagaaggtccctggccgctgatgttgacgccaacggctatgattagatctgggggggaagtgtgtgaaccactgatctgatcaccgacggctgcgattagaagccatgtatcccttcgcgactttatctggtgactgttagatcgggatcctacgactactaaggagttcaggtgcataatgtgtgcggcccaatccgtgccgcctaccgttgatccaacggtccagattacatccagaaaaccccttcgtttgtttaaatctgagccttccatctcagatccagtggccagtatttcactgtaccccttcgacccgggtattttcttaaagagaccctccactttaagctattcaacccgcagtccacgggtcttattccctaagtcttggaatttttgcacgccggcccctgtgctc

SEQ ID NO: 19748 - DNA, 373 bp, Zea Mays
aagccctctatgatgcttgataatctccccaggctccccattcacaagtactcttgttgaagaagagtacaacaatttggaaatgatgctgcaccaaacaggaccaaaacccaaatgcttgaaaatttcaaacaagaaggaccaagaaaccgaatcaaaagcttttccaatatccaatttcagcaggatacggggcaccttttgcctatgaatagcccttgcagagaaaagggtaaatgaggccaatagtcaataggagatgtgtaaacaatgcagagtatatgcacgcgtacagcaacaacaaaaaaaacgtcctttcttcctgtggtcaatgtaaagttcgccttaaagaattttgcaatctttggtcccc

SEQ ID NO: 19749 - DNA, 358 bp, Zea Mays
gtgccattcaccatgagaaagccgaagaggctcgtaatgtacgtgttgcgctggccatagatgagttcaatccctatggaacgagagctgccccgtacacatgttggcccgtgtttattatcccaatcaatctccccctggagtgtgctttcaaaggcagaatatatttgtgtcattgataattcctggacacccggggaataaaatgggcgtgtacatggaacctttgatcgatgaattggtacatgcttgggaggaaggggtatggacgtatgaccgagctacgaagacaaacttcaaaatgcatgtttggtaccagtactccatgcatgacttaccgacgtatgggctattctgc

SEQ ID NO: 19750 - DNA, 666 bp, Zea Mays
caggtatacccacgcgcgcctgatcgtgtgttggttctggctcgggcggattccagcgtaaaacgtgagctaaaacatcgtaaatgagtacggaatttagcgtaaatcccatatctgttttctaacagcaaacgaggccgaaaattacggcgtgaaaatcgcatgcagccgatcgtgcgcgggttctggctcgaggtgattccagcgtaaaacgtgagctaaaacagcgtaaacgagtacgaaatttagcgtaaattctatttatgttttgtaacagtaaacatggcctaaaattatggcgtggaaatcgcgtgcagccgatcgtgcgcgggttcaggctcggacggattccagcgtaaaacatgatctaaaacagcgtaaatgactatgaaatttagcgtaaatcctataattgttttgtaacagcaaacggggcccaaaattacggcgtgaaaatcgcgtgcagccgatcgtgcgcgggttctggctcgaatgatttcagcgtaaaacgtgagtttaaacaacgtaaatgagtacagaatttagtgtaaaacacgaccacaatctcactttgcaagagattgttgtaaaacacatcaaaaatgtcataaatttgacgtaaaacacagtaagactgtttttaatggaagcataaaacaaaacaag

SEQ ID NO: 19751 - DNA, 463 bp, Zea Mays
cccccgccgttctctaggtctaaaacagcagcaggtagcagtacatgtgttaaacaagtcgtcgtcggtggtggtggttcgcgagtaggcgctccgtcgcgtttttgtttaggagccgagtgagtgagtgagtgatcccttgcatcacgccgataggtacgtacgtcctcccagtcccagtcccaccttctcggctgctgttggtgaggttcggtgcgccgaaagtctcagatccgtgaccgcagaatcaagtggatagtcaagcttttatttcccctcgcgtcacttgctccgtggtggccgcgaaatcaactgtcggcaacttgcttcaagttaatcagggagaggggagattcacatatcttcaggagacggaaggaaacaatctattaacgcacatcgcaagccaaccgctcgttttttgtaccgtcttcttgtcagtttatggacgtgtagccatccg

SEQ ID NO: 19752 - DNA, 449 bp, Zea Mays
cttgtgtggaactttaggtaggtaaaactaaatagtctcaaaattgaatagcaaggtaactgtagctcctccaataccctccattccccttctcccaaacaagccctaagtgggtttatcgacccacccagtaggtccatcgcctcttagaagccaccatcattctactagcattatcacaagcaacacccgctcttagatcaaaagtgtgtttcctttcaatggctcacaactaaaacatgcagggagacaatgtcggagtgggctaggaagacattgacatcggggaggaccaaggagaaggcgaggatctggatgacagggaggtgacgttgacaccaagatctaccacttgggtgccttcgtcaacagcctcgacgccaagatctaacgcgccaagtcacccactatgtcggcactcgggcttggaatctcgacgcgaagactca

SEQ ID NO: 19753 - DNA, 400 bp, Zea Mays
gatggagataaagatgagggaaagtgttccaacactgatttctcgggagagtaggcgtcgatctgatgggaagcagcggcagtgctggagggagcttgaaggacagagcggtgacgcttgatgagcggtggtgtcatgtcccgacgatagcttggagggagctcgaagggtaggggagcagcactagaggaagatcgaaggggtgggcggcggcgctggagcgtgagagagtagggcgacgacgtagggagttttttagatgagaagtaggtcaaaatagggatgagagggagggcatatgggctgggatggtgggctgtctaagtgggctggagcccttatcccctctcttttcccccttttctccttccatcttgctaccattttatcgctgcatatg

SEQ ID NO: 19754 - DNA, 988 bp, Zea Mays
tatgtgtaacaacagtccgatacaaagtggcaggtaatggaataagaactgacatcatcattcatcaacagccgacagaatgacatcatcaacagtgaatatatacagaaggctgaaagaaggtaaaaggcaggatgtagcggctatttggaaccccagaattactctcctgacataataaggatccaagacacagcacaacaatggcaggatgttaagaaattaaaaatccaagaggaagacgaacgagccataaccgaagcgaagcttcacatttcagaaacctgactaacgtcgccaggaatcatacacgaggctataggagtctatcccaggctctcccctccaactgaaattaccatctggcatcaagaagaagcaatcgaaggcaccacagagggtgcattacagaccaaggaaaagccgacatcgccgccatcgcctcctcttttttttcttcttctaatcctgactgaacctatgcaccacaactaatagcaggaaggcgctagtaggtaggttgttggtacgattgccgccgaacaaggcgggtaggttgttggtatgatcgccgtcgtaccacgtccttacactacagcgtgggatccgtaaagagatgtggtaacgcgtggtggcggccgacgtacgtgcaagcagattgattagaaagagagaggatggattggttggttgttgttacctttcgacggcacgacgagaatgccgaagcttcgttctgggggggccgggcgctgcacttgttcggtggggcatcgtctgatcgtctgagtttcgctgatcgagcttggcttggcggagctgagaggtgggtgtgggtggccggtcggccgtgggatactgggatgcggcgacaacgagaagatattggttcacctcagggtcagtgctagggccttttataagcctttgatgataatgacccggtgcgctgcaggatgctatgccgcatcgctcgtctaggtctgct

SEQ ID NO: 19755 - DNA, 595 bp, Zea Mays
tgaagatgtctccatggggattcaagtgagtttgtccgtcctgagtccctcgacgggttcgagtctggtctagtgtgtgtgtcccttgctatgcatgtgccctcccttttatagcctaaggggaacacgtacaatggagctagaccccggcaagtgggcctaggaataaaataatatcacccgtggagtgtaggatagagctagtggaccaaagtcttcccttacagtaggtagatctcctctcctggtcactctgtggattccctagccagactcaccttcgccctatcgtgttagggtgtgggtgaaggctctggtgtaggttgtggcgtagactggtacgtttgcgtgtgttagaggggtgcatggacggtatcatcccgtccccttcgcatgttcgtcttgcagcgggaatagtagaagtcatgatgaggggcatccatgaacggcacaatgagtcaatggttttgcctcggtaacgagtgggttactagcgcaacccatggtttgcggactgcgcacgtcgcctgccgctggtgtagagaggcatgtatcatgtctgcattcaatgcgagcgacccctattagaaatatg

SEQ ID NO: 19756 - DNA, 514 bp, Zea Mays
gccactctttcaaaaaaaaaaaaatacgcgcctaatactgcagctgcagtagcaggtttgaacactgctaccctaccctcagtaccctggaaggaaggatcgctgctgctgctgagcctctctctgcctgatgagacgccaagtttattgggacctaggagcactgtcccatgccacacgtgcacgggcgcaatgccgacgcgccaggccggtagcagcgtgtttgcacgaacaaacacgcgtgagcacatcgattagccgcggcgggagtacaaggggattaaattgggagtctggaccctggaaacatgggatcctggaagctagtactaattaacaagctgtattttaccgcggctgcagaggagggagggaatgcgaggtgccgcgcatgccgacgcacgagaagaggagaaggaaacttgaagcggaagggtacgtctgacccacacgatccagcagaagccgcacgagcggcaaaccgaccactagcctacgtgctctgaggtttgac

SEQ ID NO: 19757 - DNA, 399 bp, Zea Mays
gggatagggtagaagcagtgttcatcctcgctatgttccgccataggatacaccaactcgattaggaggaggaccacacctagctcagtacactccacaatggtctccacggacacctcccactcgtcaggctgctcccactggcaccccgacgaggcctacaggacagaagaccggccctacatgcttcaagtgcagtcagattgggcactatgttaatgcttgtctggtggggaattctggtacaccagctcataacaagcaacagactcctggcaagggatactctattgccagagttaatcaagtcagcgcagatgctactcttgatggtgctgacatcgcactcgatatgttttatattaatgcaattcctgcaaccatattatttgattctgg

SEQ ID NO: 19758 - DNA, 424 bp, Zea Mays
gttatatgtgtgggtatgtttgggtatgtgtggttttgctgaatgaatgtgctattgctgcagatggcgcatgacgaagaggttgaggaccttggcgatctagacggcacgctgcccgacagcatgctgcccgaggcctcgggggtggagttggcgccgccgtccgatgcgggcaagggccccttagcgacccccgcaccgactggagctagcgaggaccccgcgccagcccctgcgccgacgggtgaggacgcctcaaaggcggtgggcgaaccagctgccgaagaccccgcggcgacggccgggccttcgcaggtggcggaataggggttagggattttaagtgtaaacttttgtctgtgtgatactgaacctcggttgctgcgcaggttccgacgtttgggcctgcccaagcaaccgctgg

SEQ ID NO: 19759 - DNA, 458 bp, Zea Mays
cttcggatgcggacttggattattttgcagcgttagatgtggctgcagtggagccttcgccgcgcgtggggggttccgaggggctcccgggtggtagtactgggtataggcggcgaagggcggtggcgaaacagagagtgagtgaattgtcgcgaagtggtaggcgtcatcgtagtgagatggagagtggtcgtcttcgcgtggacatgactggtaaacgagaattgttttcctcgccgattggggcgagtgtaggtgaaggggagctgagaaatctttttgagggtgaggaattgaggataatgctgttcaactacagggagatgggtatcatcccgaaggctgagccaatgtaatatatgatgccctcgctgtgtgtatgtaaccgttgtttgtatgataaggctgcgcgccttcgtttatccggctgttcccgtaggtgattcctgcatggagtc

SEQ ID NO: 19760 - DNA, 667 bp, Zea Mays
aaggggcaccactgccaacgtaccagtaggagcagcgtcggaggaatcctcagctagcagatcaagcatggcatttatatccgcatcactagggttcaggggcacctcaaaatgaacctgtcgttcgttatcaggaatctccccaagcgaagcaaccaaagtactaacttcttcagcagagggtcgcactctaaggcccaaattgccatcagtcacaggcggatttgacacaaaaagggtgaaagctttgggaggaggcaggttccaggccgagtatgctactggagcaccaacatttgaaaccttacccctgaggatcatttcaagtcggcctaccaagtctacagaaggaattctcctattggtaacccgagttgagtcggctagccctcgatacagatatgctggataggccctgtctttcagtggctgaatgttcttgaaaacaaagtcagcaaccacagcttcagcagttagacctctctctttcagcagtcccacctcagttagcaacacacctgcctcagccacttcctgatctgtgggagactcggtccagctcggagtgcgaacgtctggctgtcttcccgaccgggaggggagagaatttccataattatcaactatgaaccactctagacgccatcccttaatactgtccttgagg

SEQ ID NO: 19761 - DNA, 563 bp, Zea Mays
cttctccattggtgtcacggctctagcgcatttgctcatcggactgggcactcgctgctcgtgccgtggaccgcccgcctgcgtgcatcatcttcggtatggctccctcaaccgcattcgctttcgtgctcgcatcgtgtaaagccatttgggttaggttggggcgctgggaccttggactcgcctcgccggtgaagtcctttgcctaggttgtcgttcggcgccgctgtcgggctagaggaagaagaaggtgcctgtgtccgtcgattggcacgcacacggttaggatcaggcgactgcataccccccttcgcgtaaggtgatcgtggcccttcagtgtcgatcgtgcggtcgagagttgtgctcggagttgtgcgttgtgggccacggatcttggatccaatggcctgggtcggatgtgggaaaatagtctagctggggtctaatctggcgcgcaagatcgggatccaacggtccgaatcttcccgtaccccttcgcccgagaatacttgcaaaagaaaccccctgttattttaaaaacaacccgcagtccatccggtata

SEQ ID NO: 19762 - DNA, 1106 bp, Zea Mays
ctgcttgatggtgttggtaagtctgttaaggcacctcttcatggcggtggcacgcctcttgatgagtcacttctccacctagctgctagaggtgacagagcgtgcgggtcctaagcctgtaacgacaagcatgtcagggtcgacgatgcgcagcttgccggtggtggtggtgaggaagttgagggagccgaacaagatgtggcttcctagtgcgaaggtctcgccaccggtgagcgctgaagtctgagccatcggagtggattgtgtcacttggcacactaaaggtcccctaccgggtgcgccaactgtcatggtttcgtaaactcggggacgatagaatttgtattcggtggggatgctagcgtggactcactatgaatggtgaatcacctcggactcaagcagagggttatactagttcagactttcgccctagtccagtgtagtgctgatcgtagattcatagtactgtttgaggattgtgttaccgctgctgcatgcgtgggaaggaggggccctgcccttttatagctcaagggtaggaccttacagaggagacttgtttcctactggtaagagcgtgatctgttgcccctagttgacgtatcttctttaacgtatttcatagggtcatgtgtcgccatactctcggtctggcataccatcacgcttgtccggacgtctttcatagggtcatgcatcaccgtactctcgatatggtgtactgtcacgctcgtctggcttacgggtccctgtagcgagtctgatgttgatgtcctcatagtggcgcatggcggctcccatagtgtagtctcatggtgcaatcgtgcgcggcgcgacctcgcctttcgtcatggactctgcgtcatcctccaacgtgcatatgtgtacactaagtatggtgtatcatcctatcctttatggtataaaactcactgtagggactctggtgcttaggtcccccattactggagatgactggccccacaagacagctgggatacgtcagagactgtatgcggtggcatgtcataatgttgatagggacttctcgacgccccttcggtatgtcgcacacatgtctaggcgtggtttcctgatgatgc

SEQ ID NO: 19763 - DNA, 1110 bp, Zea Mays
ttgagacctaatttgcaattttagaaattggagaagtaaaggaaaactactatacaaaataaaacaaatatgggataaataaaaccttgctatgatggtttgaccaaactgcataattaaaataggttcaaattcccaaataagtttgaatccaaatttggatttaaaagagttaaggataaaagaaaacaggaaataaaataaaaaaagggaatacatggcaactgggccgcagaccacctattcggcccaccagaggaaatacatcgcgcagcccactccgcgctcaccggccacggtcactgaccggcgggacccgaatcccaggtaaaaaaaaactccctgtgcagtgccatctcccattgactcgtggggcccgcttgtcatctctttccccaccccgtccaacagaacgcgcgcgcccgggtcccgttggcgagctcagcacgttatcctggatccacctccctctcgctgactgcgagcccgaatgacagaccatcttcctcctcgtatcgttgcgcctgatgccgatgtccgcgcaccgcaacaacccgccgcgtagatctcgggccgacctactggtcaccgcctcctcctcgctcggactcggggaaaataaatacccacatgttctcccctgctccctcaatcctcgaagccgaatgattcctgcggcagggctccagcgtcgggggaaaccaccacgccatagctgagcgccaccccgtagccgcccaggtcaccaagagaggcgaggttgggatacaaagagaaggatagcgatgtttgccgtcgtcaatgtccaggacagtctgatcacggtccgtgagcgtcgcgagatggattgaaacgtgagcgtgtacatggatgggctcaggatccttcggggcacaggggggcggcgtgcaccagaaccttacgccatggcagagcctccacccatcggccccaggtctggacactgcataatacaaggtaagcgagccatcgacaaatctgcctccctcgcctctacaaactagacttgctcaaaaatggaatcccctcgatgtttcgtccggtcccctgctcgctgctgtggcaccgccgtggcactgcgaaacgccg

SEQ ID NO: 19764 - DNA, 610 bp, Zea Mays
aaaaattgcaaatgcagaggaatataaaacatcacccaccaaaaacatatgaacaatgtagtgtttgtgtggtgggttacaaacaaagcaactccccgatgaaggcgcaaaaggacactatgtgcaggatgggaggaagaagagaagatgacgattttctctatgccactttgcaacgtgggcatgagatgagtgatgagttggagggtgatgaaaagtattggtagatctacaacaagcatcaagtgctcaaactggacagcaaggagtggaagatgacttcattggctctgaggagccatggttcttagggatggctggggttggagttggttcactggcaagctgcttgatgtatccaatgagcatgatgtatcagaatgctggggtgagtcttgagtccagcaatggccaaactgagcacagcaagcaagcatcagatgaagaggacaaggattattggaatgtggtccttgacaggataaacttagagctgtcacccgagtcgcctcccttgcctaatatacagttcaagttacctagctactttgctcaacaaaaggaaatgacaagtaatcaagagatgatatcctagaaaaaaataaagcaa

SEQ ID NO: 19765 - DNA, 398 bp, Zea Mays
gttggcgtggtcataagcgggccggcagtaattgtagcaacaggcgcacagaagcagcggtccaaccaccagttagactcgggtcccacctgcaggctggcatcctcccctgaggcgggactcgggggccattgtcgataccctaaattaggggtactctctcctacagcatagaggcatcgcacccatgcgacgtctcctagccgcgtggaggaccgtgcctaactccaccggatgggcgggccaaagggcgccatgtggcaaggaaaggcaccatgcctcagtaaggccagacccccacaaagggtcaccgggcccctatatacatacaggtccggagcccccaggtaggtccgaaccccggcagggttccggaacgagaaggaccttggagtgtg

SEQ ID NO: 19766 - DNA, 653 bp, Zea Mays
caccggagttgctccggcccgcccgaggccttcccaccgccgttctcccctctctgcccgtggattcatggcctcttccccgccattgagttcgctgtggtgccctcttcctctctgcccaactccggcaaccccggaggcaccctagcttgcgcctgcctcaactctggcgacctcactgccgcggagaggagctgcgccgcttcgcacacgtctgtttccccggtctgatttcccccgtccgatcttgatcgcatggcccggaccacgggataccgcttcccacgcgcgcctgatgccccgacccacctgtcagcgccacccgcaaccgctcatccttcccggtctagtttcccctctgtccgatcttgatcgaacggctcggaccccctcggaccccctccgtccgatcttgatcgaacgactcggaccccctcggacccctgcagtcgtccgtttccccctggtgctgggcccgctcggtcagcgcgctcttcccctctgtcgctgacactccccgtctcgcttgtcagcgcacgcccgcccacgcgcgcgccctcagtcgtagatctaatctcggccgtcggtttctgatctgacggttagattcacccgataccccttctggcggtagttttcttaaagagaccctc

SEQ ID NO: 19767 - DNA, 278 bp, Zea Mays
tcccaatcgccgttagctccattcccgccatcatggcgagctcgtcggcgctcgccgtcccctccatccctctccctctccgggcgcctataaaaggagccgcccgagccccgtcatctccacaccagctccggccaactcctccgcttctccctgagcaaataaagctagcgccgccgtgcttcccgtcactccggtgagctccatttcccccttcctagtgaacatcagtccaattaaccagtgcgcgaagctccgccacacactcacggtcacag

SEQ ID NO: 19768 - DNA, 1517 bp, Zea Mays
ctcaaatatctctatccttgagattagcaaacaaaattatctgccatcaattctgcttgctgaggcaattataaaataaaactatatgacaatgttgtgaccgcatcaaatgaaaaagcacaaagcatgttgagctgtagacagtagatactcagtttcacgcacatcatccaaaatcttaagttattgggaaagaaaattggagtgtgcaagacacatttggaatttatttcccattgccaaaatattgcaggtttcaaatgtaatgcatacctactgagcagcattagcttatgtcttgcaagtatggtttatccccataagccaagactaagaagcttgctttccctcaaaaaattaaacaaaagaaagcttgctcttttgttaagttggttccaatagattgtttttaggttcggttcagattagtttaagttttatatggccttccacagcattaacatgaacttaaaaacatcaggctccgccataaaaaactggcatcctacttgaaaggttgcaacatgtagtcactgccaggacacatgtgataataaaaacaaaatagaaggagcaactcctctcgtcttcctcacaagcaccagctctgctctttttccaactgtgtacatgaaaagcagctcaggttcaccactattgcggggtgtttctaactttccgccaaagtaggactcctacttgcatgtatgagagtcttggagaggactgtataaacaaggggacaaagggtgaaggccacaggcatcaacgaaaccaacacaaggatctcattcaaggcttgtaaggagcaactgaaagcgccaaaaagaattagggtagacagttttaatgcactagattcatgtatggggcaagaataagagggtcctagagggtcaagtagggttgtgagagagcaaggaccatggagttatgcttataaaatttgtggtcggcttcaccaaattctaacctcttgttgtggctgcttcaacatcatcttctagggttttctaagagatccgtctacgttgttcttgatatagtggaagcttgtgtcatactggcaatatcctttcaaagatccgagggcaactacgcataggggtatcaaattctaacaaggcggcaccacctttggcagggatggtggcccagatggccatgttagggagccatggcgccactaggagggccaagtatgagtcaatcgggagtgtgacctgaagctcttacacagaaactttgaactgcccactgtcaagggctctatggacaactcatctcgacctccacgccactaacaacactgtcagcgggcaggcacagcgttaggagtgatagtgtgataccacaaccatctccctctatttagggccacattgcatagggcctaagaagtaaagggaaagttgttagctgcataggttggtctcttaatgtacatataacatttgacaatcttgaatttatccctgctgcaaagcttatatatctaatgacgttttgaaaaccac

SEQ ID NO: 19769 - DNA, 474 bp, Zea Mays
gaccccactcgatatcgtcatattgtgggtagtcttgtttatctgttgctcatgatgttcatatgatgggacaccaggcctgatattgctcatgctgttcatatgttgagccaatttgtatccacaccaacttcagttcattatggtcatttgcttcgtgtgcttcgatatttacgtgggacacgatccagatgtttactctatgcttttggtagcccacttcggctacatgcgtattctgatgccacttgggcaagtgatcctgttgatcgttgttctactacaggttactgtattcttcttggatcctctcctattgcttggaaatccaagaagcacgcggccatatctcgttctagtgctgaagccgaacttcgtgctcttgctactaccactgctgaaattatttggctccgctggctattggctgatcttggtgtatgttgtgacactcctacacctctgttatgttat

SEQ ID NO: 19770 - DNA, 577 bp, Zea Mays
ctcttttccgatgcatacaccctcgccgcggatgcgctttccacctctatggtgcccactatggcggcaactaccgcgccgaccgaccccaccgcacgcgctccttcattgtccgtcactaccttttcggtctccctctttgtgcctgctaccttgatgctcgtccttggctccgtcggttccatgtgcctccctatcatgtgtgtgtctcccttcacgacagactgcttccccgaggcacattcgtggcatttgatcggaccatgaaccggttctttgtgactgtatcaagctctgccaccatccgatctccccttaggaggggcgtcacgcttccgggccatttgtgttccggtgccatcgtctccatgacgatagaggcatcaccgtcatcaccgatcatgcccgtcgttggtctgctcgccactagcggtcccagcggtcatcctatcggctttgtgggggtgccttttttggctctctcctcgcgcctcatgtcaccactactctctcctactgctcccaccgaataggttgttgattttggcgcatcgtaccacaccactcctaatcccgg

SEQ ID NO: 19771 - DNA, 741 bp, Zea Mays
gctaatctatgctcgctgaaggatattaatacatgtcaaacataaagaggaagaagcttcggctaaggctctcaaacgaagcgcgctactagagctgattgttgggtattaacaggtggccaggtgggcctaaacactcagagacaaaagacacctcaggtgcacgacaagacggtaggtagggaaatgtagcatctcgttatgtatgtatcattccgctacaagatgggggctttataggtcggtccggggtagccggataggtggcccaaagtacattactgcccccagtcagcgaccacatttttacaacatgtactgtacaacgaggtaattacagtgccgcagcccccactagttacgtgtacacacaattatacccactgattacattgacaggtgggccccacatagcatcattgcgtgtccacgaccaagataggtacgtcttctgcattcgctgccttcgtccagacgagccttcgcatctcctaccggcccttatcgagatggctcatttagaaggcttcagttccggacatctcgtcccttgtagtggtcgaggactcccgagccctcgtcttcactgaccgatggccgatgtcaatgaagtcattgtcaagtgaattctctggtcagctacagtgctacagttagttgaggtggttggcgaagacttcatgtttctgtccaaaggcctgttcgacattcatcccaacaatacccctcgagggaccgatt

SEQ ID NO: 19772 - DNA, 329 bp, Zea Mays
cgccggtgcgtgatcgtgtactccattgcgagttgtattatcgtggttgtggatgaacttgggtggactccagagagcttgaagttgtttcattttcctctgtacaacatgtgccctcctttttatagcctaagggaggcatgtacatgggcgctaggccccaacagttgggcccagaaatataataacatgaagaatggagcgacaaatagagattggtggaccaaggtcttcccccgcggtggacagatgtcttctcttggtcactatgatgattttttaccagactcaccttcgacatgtcttgttggtgtgtgggcgaaggcttt

SEQ ID NO: 19773 - DNA, 470 bp, Zea Mays
tgtgtggttgtagcaaggacaagggcgatgatggagcgaaaacggtaggtggagaagtaaatgaaggcagacgtaggatgtacatgggcctagagctatcacaacgggcgaacaggaggatgttcatgttgtccacaatgtcagaggtgaacgtgaggatggtcatgttgtccataacgacagacgaaggatgagacatgagatggattggatgaggatagtataccagcatccgaagtgatatggtagaaggcaccaaaattagcaacctagtcaatgacgataagagtcaggtcatcattctaaacgagctagcaagtgactgttggtcccactcactgtgccacatgttccaggacagcaccgagtggggtgggcgactggggcccgtcggtcagcgagcacgtccggagaaagacaccggcaattgggggcatgtcgataagttggaggagaaaggtagcgtctac

SEQ ID NO: 19774 - DNA, 378 bp, Zea Mays
gtgatcgggtgttcggaccatcgatacggggcgggagcactggtggccgccaccagtatctggcgatcgttgagcttctgctgcctcttgcttcttgcgatccgtgtccaccgaagatgacattgacctctctatcgacgcgcgggaatgctccgcctcctcccacttcctgttgtggaggttatcgaggttctccgggtcctcctcgtggtggggggaggtggtagaggttggaagggtcggccattcctgacggagtgcttgaaatctctgcagtttcgaagagtatgacgcatgtccttgtggtacgggcattgggcgtcgaggatgtcgtccaatgttcgttcgcctctgcggggtgcccctcgagcacgagag

SEQ ID NO: 19775 - DNA, 1541 bp, Zea Mays
gtggtagaagaagtctcaaggaagaagaagaagggaggacgacataatctgtaggatttttgtgttcgtattgttcaagtttgcatccatacaatggcagccgccatttaactctctctcacagctctcctctaggctacacaaaaccctgtagacgagaactgggcctgtggacacggcttccccttcttgggcctgcttctgcgacttgggcttcattctcggaagagcggcacgccggctcaggagtagtgggcgtaacactccatcccccttggagacctgcttgcccccaagcaggtgcagcagggaattcttggcgaagccgagcgacatcttcccaagtggccacctcgtgaggaaccatgccgtcgttgcgacgggcgtggcgttcttgaagaacctgcattggaacctacaagtcatgtgaaatatctggcagagctagactgacccgctcagggcgcttgtttgccggcttgagctgcgaaacatgaaacaccgggtgaatggaggatgattctggcaaaagcaacttgtaagcaacaataccgattctagagacaatagtaaacgacccaaaatatctgaatgacagcttctgggaagaacgccaagacagtgaactttgaacataaggctgaagcttgacaaacactgaatcgcctactgaaaaagtacgttcagacctgtttttgtcagcttgtttcttcatgcggagttgagcacggtgcaaatgctggttaaccaattcagtcataacagccctctcggatagccagctagtaacatccggactggtgcaagcatcaagtgcagtaagcccaaagtgatgaggagaatgtccatagagaacttcaaaaggggagcggccaagtgaagtgtgccagctggtattataccagtactctgccaagggtaaccacttaagccatttcgaaggacaagcgttgataaaacagcgaagaaacgtttccatacactgattgacccgctctgtctgatcgtcagattgcgggtgataagcagaactcatccgtaactgaactccagctaaagaaaacaactccttccaaaactttgatgtaaagacaggatcacgatccgaaacaatcgccactggtaagccgtgaagcttgtaaatatggtcaagaaataaatgagctacagaaacagcagtgtatgggtgatgcaatggtaagaaatggccgtattttgagaacttgtcgacgaccacaagaacacagtcggcgtggccagatttaggcaggcctgtgacgaaatccatagtgatggtgtgccaagctgctggtagaatttcaaggggctgcaacaggcctgggtagcgagagcggtctggtttgacttgttgaaaagtggtacacgttttgacaaaagaagcaacactggatttcataccaggccagaagaataactgtcggatacggcgaagagttactggtataccactatggcccccaacagccgtgtcatggaaagctgacacaatctgcgtatgaagggagggaactgccccatca

SEQ ID NO: 19776 - DNA, 708 bp, Zea Mays
cccttgaaataaatgaaaacagatgtatttgcttgtgatggtttgaagccaagacacaccaatttagcactaaaacgtgaataccaagcacgaggagcttgttttaatccatacagggccttatcaagtttgcacacataggtcggatgagttgaggtgataaacccaggaggctgcttcatataaacatcctcttccagaacaccatgaaagaacgcgttctgcacatctagttggcgaagacaccacccttgagaaacagcaaaagataacaccaatcgaatagtagtcggtttaaccactggactaaacgtgtcttcataatctatcccgtatcgttgcttgaatcccttggcaactaggcgggccttgtaacgatcaatggaaccatcagctttctttttgattttatagacccatttacagtcaataagattggtagcctgattagcagggaccaagtgccaggtgcaatttcgcataagggtagaatactcatcatgcatagcctgtgtccaccgtgcatcagacatggcttccttgactgtttctggttctccagtggcacaaaaatgaccatagcgaatcataccagggaacaacttcttaggttgcacaatattattccggagtcgagtccgaggacgctcagccagatcaagcattggaggctctggtatagccgaagaagcaggcaatagagaatta

SEQ ID NO: 19777 - DNA, 781 bp, Zea Mays
gaaagagtggatgcaccggtcaggacctcggatttgtcggatcccctaaattttctttttagggagcaacatacaatggaggtttgattcaatttacagtatacagcagtttattgtgtttagtacctgcgcctagtacttcataggtgtattatcctttggtttcaggtattagaaattgattggggggcaatacagattgatgatagatgggaagaaggagaacaacagactgcctcagagtcagtgctttatgatcggttaggattgctagcagaagatgaacgtgaaactactgaaaggcaagatgcttttactagtagatcgtttggtgtccgcggaagcgatgaaattgatgatgaaactgttgctttgccctgcaatgattgcataccacaagaaagggtatttgtttgcaacagatcaaatccaataatgaagattggtagtttgtacaaggatatgaaagaattcaggctggctatgaggcagtatgcgatcagtaatgagttcgagttaggaattgagtcaagctcacctttcagatatagagcttattgcaaaggaggtgattgtccatggagaatcaatgcaaggctacagaatgccgggtctcccacagtagtggtgagtaatgttttagcacacatttattgtactctcgatagtggatgaaattagggaagctcacaatgattcctttctgtgtgcaggttacagtaatcgtggatcagcacacatgcacttcaagtccacatcgacgtcgaccactaggcgtttc

SEQ ID NO: 19778 - DNA, 681 bp, Zea Mays
gcagaaaccttcgaaatttgcgctcataccctggcttcaaaggacccatatgtagatactaagcctaactattgcatttggtgtcagtcgatgaagaaatatctcgaacttttttagcacctcagcaatcatctcataaatcgggaaccgaagcccaacacggaagaagcttttgaacaccagaacttcgtcatccttcggctctataattatttcatcgccgacaaatctaattaagttgtcatcattcttcccaatgtacccaagtttcttcatcaagtccaaatcgtcagctttcacagtagatttcccaaattcaatatgactaggtttacttgggcaaaggacattggcatccccttcaacgtcttcaccttcagtctcacccttggcttcaaaattactcttttctagggcacacatttcttcccttggaacggaaatgctagaatcgttcatcacttctgaaattggagctgtctcagtcacatctgcctcctcgcctttgttcatcaatctagcagttgttcgaatcctggccattgcaaagcgagtcgaagcttgatcgaaaacttgaaagtacgaaagtacctttggttgcagtaaaaattttggcagcacaacgacgcaaatgcaatgaatgttgtaaaaacctaaagtcgaccaatctatttatatagc

SEQ ID NO: 19779 - DNA, 610 bp, Zea Mays
ctatgccctactaacggagcaatcggcctaagtcagaaatgccttaagtcggtgcgacatgcttatgcgaacacaaattagggtgatcactataccctagtagcaaaatagtcaactcaaatcgggagtacttcgaaaaaagaaatatctcgcttacagtgtcagggatgtttttgagcacgctgccgccggaacaatcagttcgaacataactgttgcacacatacggaactcacattacacttttctctaaaaggtgctgactcaataaacaagtgttttttaggtaaatcattgcgctggagtattcttgcaggaagcatcgtttgcaggaccaacagaagaagatggacggcttgcagcatcaggcacggccacgacatcggcgacaatgtcttcaggcaccacgacgtcaggtctcctcatcaggatccacccggcgcgaacagccttatccatggccttgtcgcacattgccttcatgatgacgtggtcatcctccaaggccttgatagtgaggcgggtagcctccagcttatgcgtgacaagcttcttggaggcacgcagctccttgatggtagaatctttggtggacaatagcttgccgagt

SEQ ID NO: 19780 - DNA, 926 bp, Zea Mays
cagatcctgcggcgcggattgaatccagtctttaatgaaatggtacgcgccgaggatcgtcgatcaagaaatctacgacctagattttatgtgtattacaatcaatgccgtccatcggatcaaccatcgatgcacccgatttactttcccggactggttctctacttctaatccgagccgttactagagaatctaacggtgctggggaattcttccccaacccaaccctggacacggcggcgccgcccacccgccgcggcgatgaacgccggcgagcaattccacgcgctagggtcgtccaaaatgcgattagctaacgctaaacctactgaacaacaatgcgaacacgtggatggcgttagtacctcgattgaatggcggtagtctcctgctcgcggcgcgcagcggaggacgaggtacggtgaggaattccggcgtggcccgcgacagattccgagtgcttttgccacggatgccaccctaccggccagatgaagcccgcggacaccccaccgaggaccggatcgacggctttgcagggattactcgcggcggccgctcctctcttctctctcgcggttagtaagcttgcacggcggcgatgttcttcggtctctagtgcggcagctatgctagcgaggcgattggaccaggcagcttatatggggtcggcatattgacccacgagcttgcccctgccgggttgctcgggattccgttgcacggcgcgcacatcttgcggaggagacagttccgactcaccgggcccacacgcagtgagacacgcgcgcccattcctggcacctagcggctgatcaacggggcccgcttggcagcgagaccaagtttcttgccaagtgcgcgtgagagcgggatgacaagggtggcccacctgtcggcaccaccaccaggcggctggacgggcc

SEQ ID NO: 19781 - DNA, 514 bp, Zea Mays
gcgataatacctcacgtccagtttaccggtggttatgttctgattattttccgtgccccttgggacatctccttcttctttttatagttgaaacaaggagtctggtaggagttttattggaggcggtctaatacccaggctaactattagctttaggacgttctaaacagaatctagcgtggaggtttgagtgcttggaaaggtcttaaatgcaaatttagattgcggtagatgaaacaatttaaatatttcaaggaattaaaacgagtcaaaattttgttcatggatcaacatagaaagagattattcaggtattagaatatagttctttttagataatgatttctttggaacccaaaaaacacatatagggaaaacaaaggattggatctaatgaaaatgggagaacacaattcgtttcaaagtgctccttatttaagaaatcaaaatcttaaggctattttcaacagattccctatcacatctcctatctcatcttctatttcaaacttta

SEQ ID NO: 19782 - DNA, 342 bp, Zea Mays
tgataatagaagaccactggagtttgaggaaggtgatcatgtgtacctcaaggtgtcaccacttcatggaatgaggagatttaaagtcaggggcaaattgtcccctctctttattggaccattcagagtttttaggcgagttggagagatggcctatcaactcgggctacctgataatctatcttgtgtgcataatgtataccatgtgtctgaacttaaaaaaagtgtctccgtgtccctgaggaacagttaccaatggaagagctcagtgttcagggtggtttgacttacacggagtatcctgtcaagattcttgacacgttgactagagttataagaaat

SEQ ID NO: 19783 - DNA, 401 bp, Zea Mays
gattgtgggcttggctgctggttgcgaacgtactctgggatgtatggggagtaatatgaggaggtgcgaaggacttgctttggttgattttgtcgtgcctcagcttcggcaatttccttctgtttctggattgttacctggcaggtccttgttgtatgtcccttgtcttctccatagaaaagacagaacatttttcttggttgggagttgaatcttcctccaaaactcctggattgttacctggcaggtccttgttgtatgtcccttgtcttctccacagaaaagacagaacatttttcttggttgggagttgaatcttcctccaaaactccttcctcctcttccacctcttggggccggtggtctgaagctgttttgtggttgttgttgttgggttcttg

SEQ ID NO: 19784 - DNA, 545 bp, Zea Mays
gcagtgatgtggtgcgaggttttggcggcggactcacccggctcggcgagaatccctggagcggcgcaggcggtgcggtggggaaatcgcgagggcagaataaagaggggaaggaggcggaccggttccagatcctataagaacgtggccacggccggagcgcttcaacgatcatcccggaatccatgcgcccgccatgctcggaggagttcgttgcggtaggtgggagacggctgacgtgtggaccccgcgtaccagaggcagagcgcgagtgcgagactgcggctgatgcgtgggcccataaagacagtggcagtgagggcgagcgcgacctggagtgggttggctgacgcggagggcccgcgtgtcagtgggtatcccgcgcgcgcgtgtggaagcgtagaagttgggccgcgcgggtggaaacaggcattgggccgaaaacgaggtctgggcccaggtaagaccccttcctctttttcttttatttctacatttcttttctttcttttcaaatcccatttgtattcaaatttaattcaaac

SEQ ID NO: 19785 - DNA, 605 bp, Zea Mays
ctcaactgcttatgttcattgttggcatgtcttagttatagaaaagtacataaaagttgatagtgtgtttcacagatctagactcactcaaaataggtctttctgtactcaaacatttctataacaataatttgatccaataaccctgtgactgtaagctgggtgaagggacatcatctatcagactatgaactttagaaatccgggtcatcttttgtggctctcttcgagctcaataatgtctgtatactattactgtgtacacatggtgacatggatatactatttttttttaccaacaccatgtcttgatggctgttgtgcttgaataattggaagcgagaagtactatcaaagaatcttttttggggaaaatgtgagaatggtttcttcaccacttctcacttcacagttgtgtaggcatggttttttcattgtgacctccattacaacccttaggcctcgtttgggaacacataaaccggtcggtttccacgggacggccggcacacgggctatctgaaaacatgttttagaggcttgtgtacggatttgtttcaccccgtgtaccaccggtttgcacagggtaaggttttctatgcccc

SEQ ID NO: 19786 - DNA, 570 bp, Zea Mays
attccgcggctagcatattagagtttggcgcactggggccagggattgacctcctccggtgtgtgctccgccgtgggggctggaccgccgccgtgtcatgtggtcagagggaggacgatgaactctcaccatcagatgttagttggacggtggtgattagaacagacgatacccgttcgctggagtcatctgggccgttcatctggtctcggatggatgtaaacgatgcgcacttattttaaatctaggccagaagttacgaatccgacggtgacatgtgagggcgggggtttagcatggcccgatctaatcctcgccgttcggatctaatccaacggccagaacggcccgataccccttcggcctgtaagttttgcatatgagtcctcaggttcttaaacaattaacccgccgtccatattaggggtgatctgagtcataggatttcttgcgcagtgacccctgagctttctggaattcggggcccagtccagaggacaaataaaaccagagaaatgcatttaaaaatgaatttttagtattaattaaatgccagaatttgtataatcc

SEQ ID NO: 19787 - DNA, 510 bp, Zea Mays
ttgagcgagccaacagaatgatattggaggcactcaggaaaaaggtcttcgataagaatgaaaaattcgcaggaaagtggataagggaattgccttatgtcgtttggagcctaagaacccaacctagccgagccttgcatggaaacactcctttcttcatggtctatgggtcggaggcagtgctacccgctgatctcaagttcggggcgccaaggttgatcttcgaaagcatagcagaagctgaggccaccaggttggaggacattgatgtacttgaagaagaacggctaaacgcggtaatccaatcagcacggtatcagcagactctaaggcgctatcacgacaaggctgtgcgacaacgattcttctcagtaggagatctcgtcctccgccgaattctaacgggggagggacggcacaagttatcacccttatgggaaggacccttcatggtagcagaaatcactcggcccggatcgtatcgcctcactcagatggatggcaccgaag

SEQ ID NO: 19788 - DNA, 327 bp, Zea Mays
atcagatgtgctactactactctcacctacgggtacatcatgagcaaggctagtaggtacaagttggtcaaagtctcgatcgtgtagagcactgtctcgaatgaagttatgcaatgccatacaagcaataattatcttcgattgtttcctaagcgaaaatgaaggtagacttagaagaattctccacttcattttaagcaccccaaatgatcgctctataacattacgtagggacgagtgtgcaaagttgaaaacttctttgctaccaataggttgcctcgcattttgccattctgaaatgtggtacttctgacccttataaggtgc

SEQ ID NO: 19789 - DNA, 732 bp, Zea Mays
gccaacctccaaccaatgcttgttggcactatggagaccctagtcatttcaagaataattgtccgcagttgaagacatttgtatctgcctactccaactcggtgaatggccgcaagaatgtttcagcacccgcctccaaggcaccctccaccaacagccagctaagcaagacccagtttcacggcaaggctcgagtgaaccacgtcgacacccaagaagctcagcaagcccctggtgtagtgcttggtgagttcctagtcgaatttatccatgctcctgtacttttttgattctggagcatcccattctttcatcgccactagttttgtggaaaagcatggcatccccactacatctttagaaatccctttggtcactcgaaccccagggttagacctactatgccacctcaaatgctcccaagtcagaattcttttaagtggggtagtattcttggcggacttagccatactaccatcccatggaattgatgtgatcctaggaatggattggttgacccagcacaatggcatcataagcatcatagataagactattcttctcaccgaccaccaaggaaaatcagtttcgtgtaaagctcagccaccgacccaagttccaatggtgttcagcctagcagcagaatgtatatctgtggtagaagaattcatggatgtgtttccggaagagttgtcaggaatgcctccggaaagagaggtagaattctacatt

SEQ ID NO: 19790 - DNA, 581 bp, Zea Mays
tgctgaaatctatctgctgaaggagagaggtctgaccgccgaggctgtggtcgctgactttgtttttaagaatatctagcccttgaaggacagagcatacccagcttacttgtacagtggtgttaccgactcgactcgggttactaataggagaattcctgctgaggatttggtgagccggctagacatgatcttgagaggcaaagtatcaaatgttggtgctcctattgcctattctgcttggaatcttccacctcctaagtcatttttcagtttcgtgtctaatcctctcgctggtgatagtggtctaggtcttagagtgcgaccctctcctgaagatattgaagtgttggttgcttctctttgtgatcttcccaatgatgagaggcaagttcattttgagatgccaacgagtccagatgatgcagaaataaatgttgtactcgatatgttggctggagaatcttctgactcggcccctgctgaaacaatggttgttgtggttataccagagactgtcaacacagtggacacccgaaagcctgagggtactcgcccaaagcgtcttcgtcaagtcagcc

SEQ ID NO: 19791 - DNA, 373 bp, Zea Mays
ggccttggcatcgatggcttgagagacataggatgatagaacatttccagagacttatacgtattctagataggagaaacaaaagcaacatgcagataaggagaggtgacgtgagggagttggcctaggataggattgaagacgtccttgatgagccctcgagagcagttgctgtgatccaagtttcacctgctcaaagccgaacttggagagactgccagcacctgcttgattaggccacgtcgtgggggacacgccagcatgcgagagacagcacaacgacatcaatcaaagcgatggcggtgtccttatccaaagtttcagtgaactgaaactaaagttcagtagcccgactgatagcccaggttcgaac

SEQ ID NO: 19792 - DNA, 788 bp, Zea Mays
aaagctagctagtagtagaagttatgagatagatgatcgactaataaggacgaagaagcttccaagcaggctgcgagataaaagtccagttttcgaatgcatgcatggtctagctaaaacagttcagtcgacgaaattcaccgccggtcaaaatccaagatccgacaagggggaaacacagatcgatcgtgcttacgcatgctactacagctttcgttacatatttatatgcatccataaacgaagcagcgtacatgcacactccacatcatttctcctccacgtgtgacgtgcttatcctagactagtaggccccgcttgagacttcggctccccagtccccacccatgcatattatagaacgggaaagaaagagcgcctagcgccctagcctagatgagagaaatgctcgtgcagcgactgacatgatgattcgcgcgccaggataggagtgcgtgactttctttcggtctggccggccggcggctcgttgtgttgagttgtttacttgttttattgatttttttgtgcgtttcgaacccgcgaccaaatcaggcttcatccacacacatatttccccccgaatccaaacccctttcgcttctctcgcctttaatttcgttcgggaatacgggaaaagaatgaggggccccctccgatagcccgcacatgggctattttttggactccgtatcctgccgaccttaccgtgtggaagaaagaatcaaacgtaactataggttgggtagtagtaaaagataggggacgaaaagtcggtttgggtttcg

SEQ ID NO: 19793 - DNA, 757 bp, Zea Mays
gttgaatttgggagcgtctcgggtactagcacgagggtagttttagagagttcttaagcatgatagattgataaacacagagttgaagaaaatatcatttgaacgtcatgtcctcctagctctcccttcacacttggttctggtgaaaatactaacctaataatcattggtttaacttcatgactgctcttaggagagtgtggatctaattcgatttagtatcatttgaacctcatgaaccggcctctaggtcatcggccttgcagttcatccccttaatgctactgtagtattctcttttatagattaaggaagggagaggattacgtattttggtggaatatggccccggtcggccatgacctaatgatcctaatcttggagacttggacgtggagtcatacgcagcaccatgcgttcgatgatgtcatagtgtcagatgcctagctatagatcgcatgggtaggtatgtctagtcgtatcaacaaacaccaaagtatatcataggatacaacgtagctagtaattgatgtagcaataggtaccttataatacttcccgatacactaccatgcccacatgttgctatagaggtgatgcacatatcaaatagaggtcttgattacgtcaactgtcgaagtcttagtgatagtgtacctatcagactataacgtcacacaatatatttaatatgatatacgaaaaccttgtctataatactagtgttataaaactatcaggggtagatccccatcat

SEQ ID NO: 19794 - DNA, 541 bp, Zea Mays
ggatcagaagcaaggggtcgcacctcagtctcgtcacgctccctgaagcgaggtggaggaatgggcagagcagaaatgggagcgggagggggaatagtggaagctggagtggtggaggtggtgggtatggcagaagtggtggatggctctggagcgacaggagctggtgaagtgggaggtggagtagacactgtggcggaaagtgtggagggagcaattgagcgaggccgagatgcgaggcgacgaactctataggcaatctgatcagaggagatctgcaactgtcctcctcgttctgcctgctctgctaccactgccactgcaagtgctgcacgagcggctctatccatacggcacttcttccgaccctctggctgctcaaggtaaaccttcttccccttgacctgcctaaaggggcgagggggtcctcgtcgtctcttccccctgacgccgagacattctttgtccacaccatcctgatctgagtgctgcatggaaatgtcacgagagagagaaggtccaagcagaacaagagatgggc

SEQ ID NO: 19795 - DNA, 700 bp, Zea Mays
gtggggatcgagcttagaagccccaccgtgccccggggacagtatttgggatctggctgtggaggtttggcgattgggggccaacgacgtcggaatcactcgccgtacctcaagcgccgccacggtgccgcttcgggtcgtggtcggagtctacggctgcttggcgttcggtaagaacccctccattgaattcgccatactctccgctctgcgtagcctgcgtttaaatcgaagttgggcatcggggtcgtctctcggcatgctccggccatggcgccacctctcagcttgggggcgccgccgccttacgctctggtgaggggagagatgagagtgggatgggggaatatgtgcgggccgttggatgttgagtgtgcggctatgattgaatcctgagcgtaccccttcggctaaagtcgatctcggccattaggtgttgatccaacggctctggcgtgggcgggattattgatctaatctggtcctttgaaaacagatccaacggcctggattgggtaccggttcgatttagttaacttctaatctgggccactggttttggatcggacggaccacagtgcctcgtaccccttcagcgcgactgttttacaaaagagaccctacgcttgggtataatcaaccctcagtacacatgtcgtataaagtatttacgcagtgacccagaattcttatagaatac

SEQ ID NO: 19796 - DNA, 364 bp, Zea Mays
gtggaatacatcatgcacatcagagagatgatcaggtagctctaattgataggccatctccccaactcgcctaaagattctgaagggtccaataaagcgaggggataacttgccttttactttaaaccttctcattccacgaagtggtgacaccttaaggtacacatgatcaccctcctcaaactccagtggtcttcttcgattatcagcatagctcttttgcctggtctgtgctaccctcaagttctcccagattatatggacttgttcttctgcctcttgaatattcaggctcaaagaactgtctttctccagtctgatctcaatatagaggagtcctgcactttctgccatataaagcttc

SEQ ID NO: 19797 - DNA, 539 bp, Zea Mays
agtgggaccatcttcgagtagaccggtttggtaaacgagaactattgtcctcgccgattgggacgagcataggtgagggtgatctgcgaaatctctttaagggtgaggaattgagaataatgttgttcaattatagggagttgggtatcatcccgaaggttgagccgatgtagtatatggtgccctcactgtgtatgtaactgcaacttgtattctaatgtggcatgttggccgttttcgcacacctgtgctgatccggctgcacccttaggcgacttttgcgcagagtgtcgattgacgtacttattgcgcttaaccggcggcacccttaggtgacttttgcatgaagtgtcttttcggaaaaagactttgatggcgcatttattgtggctgtctggctgcacacttaggcgtcttttgcacggagtgtctttttaataaaagacttcgattgacgcacttattatgcttattccggctgcaccctgaagcgtcttttgcacggagtgtctttttaataaaagacttcgattgacgca

SEQ ID NO: 19798 - DNA, 361 bp, Zea Mays
atttgcttgaatgtaagtgtggaaataagggggatagtgtttcccgctaatcttatagtaatgggtactcagggaatagatgtcatcctagggatgaactggctagataagtatcaggcagttatcagttgcgataagaggacaatcaagttgatgtccccactaggagaggaagtggtgaccgagttagtcccgcctgagccaaagaaaggaagttgttatcatatgactattgataggagtgaagtagatccactcgagattatcaaggttgtgtccgagttcctagatgtgtttccaaaggacctaccaggcatgccaccagagcgaaaagtggagtttgccatagagcttcttcctg

SEQ ID NO: 19799 - DNA, 846 bp, Zea Mays
ccgcctattaacagtcgtctcaaagtaatggtctctgctgcttttttttacgattggaagttaattactcaatcggttgccatccactcgttcatataaaggagcagtggagcatatcctgtacgcaaaggatgccggtgcttccatgcgcaaaatgcatccaacccatcggtccaatattcaacggtgttgtggtctttttacaaataaggtcttccactacccacgctccccacgctaagtgatgttcttttttttcaaaaaaaatccgacaccccttctttccaaacagcagcaacatttaactagtctcttggtgatgccctaaggcagcaacattcagaaaatatagtagctcagtttacattcaaaagcaaaatactgaggctttatttggataacattaacacatataaatagaacagcactagcgttgggatgcgtttgcctgctgtttggggagaaggggcgtaccggggtttttttaatgaacaacactaatgtgggaagcgtgggaagacttatttgcaaaaatgtcataacaccgttagatacagaacggatcggctggatgcattttgtgcctgggagcacatgacttctttgcgtacaggatatgctcccacctttatccctgtaaaaattatgtcaaacacacagtctacaggttttctatattaaacatagattcaaaaccgatctacaggttttctatattaaacatagattcaaaaccgatttgaaaacaaatcagactccgaactggttttctcggtgtcaggctctccggctcagccaccagtttggacagcggaaagcctaaagggatccaatttttttccccta

SEQ ID NO: 19800 - DNA, 395 bp, Zea Mays
ccgttgttgccgaggttggtgagcagaggcatgtcgccttgaccgaggagaggcccgatgcgtcggctgcagagggacccgaagcctcgatcgcggggcgcgcagatccttggcccgtcgtggggagcatcggcctcatccccacgcagctcaatcctaatgagtggggagcgcagccgcttgtgttctggggccacgataccttagagcctctccttgcccttaatgatgagggagaggaaaggttgcggaaagttttccgtgactatagcgatgtggtgatgaggtcgcttaagacggccacagaagtcctttcccaggacattcccagggtcttccaggtaaggatttagacgcatacctcgtgtggtcagagcattctttgtgatattcta

SEQ ID NO: 19801 - DNA, 665 bp, Zea Mays
gtgagcaccgcgaacaccagtccgatcttgccgatgatggtggccacgccgttaagtttgacctgcagcggcgtctcgtcctcgccgccctggctcagagtctccatcaggttaccccactccgtgcgcatcccgaccgcggtgaccagcatccgcgccgatccatcctgcactttggtcccgccgagcaggaacggcttcgcggtagacgggtgcaccggctcgctctcgccggacatgcttgactcgtcaaccacgagcgaatagccgtcgatgtacaggccgtccgccggcacctggtcgccgatagatagatgcacaatgtcgccgacgacgatgtcgtaaatggacaccttctgccggtagccgtcacgggtgacctgtatgtcaatcttcttcttctccctgtccaggtcccggaactgcagcgattgcttgtagtcgctagccgcggtgatcatgacgacgaggaagatggtgagcacgatgccgaggccgtcgtacatgccgctgggccacccctcggtggcgagcccgatggcgacggagatgaacgcgcagaaggcgagcagcaggagcgtcatgtcctggctggcgtcccagaggaacatccagaacgtcctcggcggcttctcggtgtactggttggcgccgtagacctcggc

SEQ ID NO: 19802 - DNA, 642 bp, Zea Mays
atttctgcgggtaatgaaattgaaaacccgaatttagttcgagcctaatcgggtaacgggtcgcggtacccgaagtacccataatggccgaagttaattttgttgtgcgtcttgtagcttttctataggctttcagccaaaagaagtccagttgccaagcccactaatgccccaccctggagccacgtagccactacccatgaacatccaggctccaaacatcacccaaactagcccacgcgcagcacccaaactagccaggccgcccactgtcccagctcccaaccaagcaccaggcgctcctagggctaggaaccctagccgccgcagcgccgtcgatagccggtcaaggctccaacgctcctcggctccgatggttgatgcttcctccgctctcgtcctcgttcgacactctgactgaccgtcggtgtggatcgtgctgtgctaatgcctcctctccttcattcatctgccatggtccttgaccagctagaagttccccgtgctccttcattcatctgccatggtccttggctagctagaagttccctgtgcctcctctccttcattcatctgtcgtttggtgcctcctccccactcctccagtcatccagtacaacgacgaaataggagcaacatcac

SEQ ID NO: 19803 - DNA, 385 bp, Zea Mays
ctcgccggtggtgggcacctcctcaggtggccgcggcaaccacaccgccgcgccccaggcacttgatggaggagggcgggtccccgtgcggcctctttgcgccgacggtcgagagagagagtgcaggggcatgatccctcttcttgcggcttgcggtttcatgcggaggtgagaggcagcttcatgcgggagagtggaggaggggtggagaacgcggtagcgaggagacggcgcgcgagggtgggggaggggcggagaacacggaggtcatgctgtggcgacgggagcgacgacgcgcggggggcagctgaggcgctaaccgtgcttcgacagtgagctttggtttgggccacaacaagcaaatgggcctcccagaaagcgtgta

SEQ ID NO: 19804 - DNA, 632 bp, Zea Mays
gactaacctgagttaggctggccgcggtgagggtgttcttgcggtggcgcaaaccggatttggggcgaacgcgaaattcccgagctctggcgaacgattgtggctaattggcagtggccggttagctgatgaccctacggagctggtcacgggctcaatttataggaggacaaggcggtggccagtgaatctcgggaggacgcgcggcggccggaaatggagaagaagacgggcgcggtgaattcgtgtcccgcggcgtggcagttgttccggcgatcaacggggagcgagggtaagtcgtggcggtgcggtggaaagtgagagccacgcggcgcacggccgagaggcggcggttcaccggtgagcctatcactccagccgcaaagcagaggggaagtaccggggaggttcaccggagtgccgtccagcgcatggcttttaccgagcggccttatctggtcaccggcgacgtgaatcgcaacggcggcggcgtgaatctcaacggagatcggtcgtcggtggtgagggacggtcgtgctgtcgttctgatctgtccgagtcactgtaccatcagaagttcggtttcggtttcttgctacatgcctgacagagcaacttcagaactctttttc

SEQ ID NO: 19805 - DNA, 919 bp, Zea Mays
cgagtccgagggaaagataggtgacagaggggggagagcagagaagagtgaagaagagaatggaaatggagctggagccgccgtcctggcctcagggaatctgaagagactgggcggctaattaatattggcttcagggccttaaacagctgttggactaccctgagcagatttaagttgatcgtctgattgcccactaggacgattaatcactctatatcgcgattaggctgacgataaggccgatcagttcctctgatcgaatcgacacctctgatcgagtactggtagccgatcagaccgactaatcgcggttagttggaggatatgtaatcactgctccctccaatactatttcttaggccggtgcagtttgagaaatttccctcttgttaggcgtcttctaggaaccaaagcaggcattaatggccacatggaaaccaaactgttggctgcaactggacactagcatttttttgtgatgtgctgagtagcaaccacatgcatgtatgcatgcatgatgcatccaaggagtgaatgcagtgaaacaggaatccaacatagggctgtgaccttgcaagtatgagctcacaatactgcgccatttaatgcctcttggtctatggtgtttccgtgatatctggaatttgagcccctgctcctaagaaacggtgctggagggagtaattacctttgccttcacattttatccaaacggtacctgaatggacaaatacgagcaaccaaatcaaacgaccttgtatgagcacagcttagcttaaatgagcctggctgagctcatacgagccagactaggtgatacaggtgaccaaacaggttattgatatcccaagtgccttatcggtagtatctaaagtatcaggatatttgaaaacaagccatttcttgaggtattgtg

SEQ ID NO: 19806 - DNA, 685 bp, Zea Mays
attgatcactgcattttggatcataacacctgaatcttattggacaaggtgtggtttaaaaggaacatagctcatcacattctgggaatcctggctatttggacactggcgctttttcatacagcttgcagccagcggatcgcttgactttaagaagtctgccacaccctgctatttgaatgctctacaatcaggagggtgagcccatcaaccatctctcggtgcgctgtccttttgaacaaataaagtctgtcgagttttcagggatgcaagttgtgtttacatgagttctggtgtgagtcttgctgttgtagcacagaagttatgtgtttgagcagtgttaaaaagcgcaactaaacgctcgcttacacacgtacttttaagcacttatgtgtggaatgcacctcgcctaggccacaggcgtccaattcagcgctggctgacgggtaaatagcgtggaatcaggaagaagggaagctagctcgtgcatgggcaagcagcaggagtaagcgcgagtacagtggaaagcagcacacacagaaacaagattttgtgctgtggccacaaccaccacctctacatctgccgttggtgtcagcagcaaggataatctcaagcactaactcctcatggcgtcaacggtgcagcgcagccctgcacccctgcaccacacatgtgcctccca

SEQ ID NO: 19807 - DNA, 650 bp, Zea Mays
gtcagcaagtgcccaaaaatggcacaccaatcaggctttggccccacctgcagccttgtaacctcccctgaggtgggcccgtgggccactatcgggtaccctgaaacaggggtaccccttactacagtatgaaggtgtggtacctgcgcgtctatctctagacgcgtgataaacagcgcccgaccccaccacatgggcgactccggggctgccaagtgactagagaaggtaacatataccgtgatatcgtcagtggatccggacccccatgggaaagtgccagaccccagcatacatggcccggacctccgagtacgacccaggacctccacgttcccccggatgggacctggacccctctaagtaaggtccagaccacccacgacaaggtcccgggatggagaacaccctggcctaggtcaaggacgtacaggggtccagcgcagacacttgtcagggtcttgcccagtgtgcttccgctccccgctcaagcgaggacccgatgctgccatgtggcctattgcccgtgacataagctagcgggcggagcctgacgtaaggcctctgggccacgcgatcaatacatttattgcggaaaagacgcgccgtctatccgccctgctgacaggcgatgtgccgtctcggcattt

SEQ ID NO: 19808 - DNA, 443 bp, Zea Mays
gttgtcgcccgcaaggcattgagggccttgtgtcagatctatgaagaagaagtggccgacaccccgctcagattctttccgccctttcagagagaccgtccagtttggatggccaggatgtgtgcattggaaggtcagcagctgcttgaggacgacccctcagtcgtgtacctcactgcatacctgctcaccctggatgcccagtatgatttcttggctcggcaccatcgtcagatgattgcccgagcagaagatgcagagaagcgcaatcgtaagctccatgtggatctcaccatagctcaagcccgtgtagccgccttggaaagtcgtgaagtcattgctgttgaagccctgaagcaagccagggaggagcatgtccagaagatggaggcctacttggtaacccgtaaccaatgtagagctctacggatccaagagcccgc

SEQ ID NO: 19809 - DNA, 1411 bp, Zea Mays
gcccccgaacgaaccctgcgacaacgagcctggggacgggcatggcagaactagagaggggggtcgggcaaaccgaagggaaaaccactcgagtggacccctcgcccggcccgagaccaacccgtcataagtgactggccacattaactatgcctggcaccgagccatgacagaggtgttggtccacccctctccaatcatggcctacgagtccctcgggctgcagggcactcataaactacgaacccctcggactgtggtgcatttatggctcgcgccccagcccgcggtgcacttatgacctatcggactaagcatgagtgtgcagatcgcttacagagcacacaagacaagccacgtcgagccacaagctacggaggccaggggttggcttagctcgaatgatagcactcggtccccacgctgctcgcgccatccgctataaagaatatgagacaaccagaccaccccggagcccacaggcgcacatggctagcttcaccccatggtggaacgcttggttttaccatcgcccggttactccttgaggacaccaccgctggcggcccccctccttggcctataaaaggatgaggtcgatccccagatgaatgagaggacagtgagacaagagagacccaggcagacattcagacgcgaagacgatgggccgacgagaggaaggaggacgcactgacgaggacccacaaaccggagccccgcctcactctgtagcccttagtgtcaccacctccacaacaagagacttgggagcctctcctctctctctctctcgttcgcttgtaacctctactacgagcattggtcagaaatggtgtcggtagcgcaagccaccaaagactgaatgagaacgttctgctcgaaccagtataaatcttgtgtccaccgcacacaccgtctggagcccgaaacgcacacacaaatttacttgtcggagtgaggtttaaaacaccgatactactctaacaaagtttaggggacgaaggatgtaaaataacaataaacaattaaacacaacaattgtcaattgagtgactgacgctatgatgcacacacacagcaggctcactgccattcctagctatgacgcacagttgcaaattgctcactgctaactagctaacttctaacacatgacatgctcactccacacttccacaatccacagaccacacattgacatagttgcatgctctcactcaacacacacagcagacagggaagacaacatgctcacggctcactcggtcattcggtcattccacacacacaacatgctcaggctcagtcgctcattgctcaagtcactccacagtccacacacaaagtcacatacaagaaattgactgctcacaaaaactataaaaaaatccatattctaagttctaat

SEQ ID NO: 19810 - DNA, 568 bp, Zea Mays
aaccgtggcgtgtcatttgagtggcttcgttaatttgtttttttactgtccgttgagattttaatatagattttactgccattaacttagttaattagcctgttgtcaatttatgggtgtattatggaaaaacggttccttgagagcagccacgtctattttaagacactgaatgcgttcgggttgtgatatacgaaaatcctattccatttcttcttcttcttcgtgcttggaaagttgtgctgtggcgattgagttgttgtatctcaccaaccctttttcttggcgtgcagtaaggaggagagcgagtgatatctttgaacccttgtcgttatgaagcttgcacgaggggcggcaataaagtttttgggcagcgcaactgtgcgaccgctcgaaaccatttgacgatgatcttcgctgcctaacggacgaatcgacgcgtctatattatcgacctgcttcgtctacttttgtgcttgatcaacctaagcaccgacaaactcgacgtgagtaaatatgttaattcagttgtttaatgtgctgatctatatattgctatgcgtagtgc

SEQ ID NO: 19811 - DNA, 570 bp, Zea Mays
gccccacccatctacccgaccacagaagtcgtcggtgcaccaccttgaacctagagctctgtcaccaaggaccgcagggagaagagaatccgctcactgctgcagtgctcgggttgtgtcggcgttcgggcaattgcacaaggcgggggagcttaaccatggttcgtgggaccttgtggtggcggcgttgggctcggggcgtcactggtgccagctcaattgctccctggagacacctcaccaccgcggatccacgcatctctatgggcagggcacaacaccatgtgattcacggtatggactcctcccccgtgctcgcgttcatctatattgtgtgtagcatcgtctgaagcatagttgtggggtacctgggttgttggtggctcttgccggcgatggccgctgctggggagagtctggtgccgttgtccgccaccgtcgggggagagggagatgtctgggtcactcgatttagatgaaatggccaggattagcgatatgatatcgattgggggcggtttggcctaaaccgtttgacgaagatcggacgcataaatgtgcgcctcggtc

SEQ ID NO: 19812 - DNA, 790 bp, Zea Mays
cccacgaagggaacatgtcaatatcttaatcttgtggcactgtggggtttaagtggcacagtgctctgtaactcgcggttcaaagtgagttaaggctaaacatcgtatttttttacaaaattacactgggtgaacgtacacatgtaaactctaactatgagcattttcgaaaactgggtcatcgacgaagtggttaatattagaatattagctctcacggagagtcgaacctatacatacaattctacaaatatcatattctaaccacagatgaaaagatcctgcgcattaatgttgcagcggcgagtcaaacgcctaatcttctcacacgcacgagtgcgtccaactaacaatgcattaaagcatccaaagcatccttcaaaaactaaaagaagcgttaagcttaaggacttgtttaacctattagtttgaagatagtggactcagagtgcaggcatcacattaatcttccttttaatgctagtacgaacccaggagtagactactgcaagaaactgacacgttgttagagggaacaaagcattaacccagttgcttgaagatactgccattgaacatcatagcccaacttgaataaacaacacagagtttggagcctccataataccaccacaagtgtcattagttcaagctacagttctaatgtcaacccataggaccactctcgattttattcaattttttttctggttcgtgtaatgttccatcatatatttgtcttatatgctctaaacatccagtggtggggcgggtggggctcgagccccct

SEQ ID NO: 19813 - DNA, 575 bp, Zea Mays
gaaaggctatgccccattaatttctactctggtgtgcttgaacttatgtgtgttgcttgaatactagatctatcaatctacttcaagaaattgtataattattaggtacctactgttgtaggggtgttgtgaaaaacaattggtcgatcttttcattgtttgtgcttactagtgaatagatacttgctccgatgcagtcctcattttgcttaaggcttggttctgagtggatagcattggttacaacaaaacaattggcaacaaaacccaacttagaggcggctagcattttggggcgacctcacccctcacattacctcattctgcaccttgctgcgtgatgggcctgatggcactggcacttccattgcaccctgcagcgtcatccctgattcagaactgacaccctgcagcctacagattgagaaggggagccaatgaattgcaccagttccctgaccctgagtctgcttgttgctccttgacggttcatccacacctgtggtggaataagcatcgcccacagtgagctttcctcttcgttccgtactcttgacattgacaaaatttccatt

SEQ ID NO: 19814 - DNA, 692 bp, Zea Mays
tggagatcgacctcctttggttcctctttccccatagtccattgagtctctttccctctcgcttcagctcggtgtggtgttgatttcctatttcttcccccattccacatcatacctcctttttggattggtgggaaaatgcctcagaaatagtgaatgggctctccaagaagggtctcaatgcccttatcattttgggagcttggctgatctggcttcatcgcaataggtgtgtttttgacaatgggtctcctagcctgcctttaatcctcaagcagtttgaagatgacaggagtgtgtgggaggctgctggtgccaagggattatcctacctgacagcccctcttcctgctaattgaggaatggaggcatctttgtctctttgggttggtggctgtgttcctatggacctgtttatgtatgcatgtttttggcctccgtaaggagtccttagtttttttattttgtattttttatgttgtatttttggtcttctcatgaccatgtaacctccctttttaatttataaaatggtgcagtcctcctgcgcattcgagagaaaaaaattatacatgtaaaagtaatgagggaagtaccaatttaaatatttgggttcataggttccataaaccacatcgtagtatccatcaattctttccaccaactccaaatcagctgtcaacatatcccac

SEQ ID NO: 19815 - DNA, 446 bp, Zea Mays
attacaaactccgacactagcgatcgaaggctccaagtctatcttggtcctgcactcaggggtgccataagcatgatgaccatggggcagcgcacagtaagggtgctgagtcccaataggggcggggaaccatcctcctaatggcggcgctccgcacgctcagcacacagttccacaatcttcgcacgagccttgcccaactcgtcaagggtgtgctccagctcggtgttgagcacagcgaccagattaaccatgctactcaacctgggattgccctcacccacaagtcagacaatcacactcctggtactaccgatcgaacatcgggggtagtacttcaggtcgagaccgtcatccaccccccactaaacaaagaacaatactatgaaagtgcactccgtatagcatcctacatggctgccttggcaatatcccgctcactgata

SEQ ID NO: 19816 - DNA, 854 bp, Zea Mays
caactattgcacattgtaatttttatgtagttgtattacctggatcacctgcatgcagccgctgcccctcaaaataagcttggtacacctcgcattaaattctttgataagaatatcataaaagctttgactaaagccgacaagaggaaggtacgccatggggccgaacctttcggacattgtgaagtaagttattcatatttaaccaagtgtattttatgacaaattttatgtcaaatatatgtgctttgtttctagtaccattgtttgcataacaaactcatggtccatttcaactttcactttaattttatattttagtttcgaagctcgaccgagacatgctattcagttgtacctaagctcgatcgccaatccgaggcaagtttatgctgtattatatacatacatttttaagatttatggaacaaatggaataggaatgtggtcatggattcttattatttttgctgaacaaccagccgaagtgcaggaccaacatttttgatgcaccgcgccctgcccctactcctcggtccacttttaacatccaacttccatcgatcaaggagatgatgtcaagtaagatcaacgagatcccacctcgtcatcgatctaaattcacagacaaacttgctgcatatgacttggaggttgacaaggcatgcatagccataaaagacagcattgacaaaattattgagaagcaatatgacatagcagacaagtttatagagcttatcgacgaggtactacgtgccaatttcgataatttagaaaacgagacagatgagccacaacgttcgaggaattcggctgatttagcatgtcagtcatacaattatccattttca

SEQ ID NO: 19817 - DNA, 491 bp, Zea Mays
tgggagaaaatgcggaagcttaaaccgctgcacacggggtgaaccccttttaaaggaagactcccttgctcgtgccctgagacgccgtgaaaaatcttgcccgacgcgcaccgaagcaacccggcctatgacgcgggggtccgggcccacaagtcattcagctagggcgtaagtctccaagtgcgaagaaggcgaaacaccacgcgaggagcgaatcaccgcgcctcttcatctccaccgaaagcagcggcccaacctgtgacacgggggctcgggcccataggtcatgctccatgggcgtcggtctctaagtgcgaagaaggcgaaccatcgtgtgaggagcatgccgccgcccgcggcgatgcgcctcttcatctccgccgaaaccaactgcccagtctttggcacggggcccgggcccatgagtcatcctccttgggcacaggttcctaggtgcagagaagtcgaaccgccgctcgcgccagtactac

SEQ ID NO: 19818 - DNA, 609 bp, Zea Mays
tggtgatcgaatgtgccagtaggtcgtgtattctcgggtgaagatcaatttctgctatactatcccatagatcgatggaggtattccatcatgctgtagctgacagccccctgatgtaccatacccaagcattgttgtccaatgcatcctgcaccattgttcttttgattgctctctttgccacatgtgtgaacgacagattttccctgaaaccatttatcacaccaaaaaagttttcggctgtcatcacctaacacagaataagctgaaatgcagaacatggacatagaattagagtgaacctgtaaatctagagcagcccatggctgatcaggttagatcttttttaaccatagccacctcattcttagagcccaacccaaaatttccaggtccaaaattcctaaaccaccaagatcaagtggcctttggacccgaccccagtgtttcattcaactaaatatggcaactgatccgtgaatacagactacttcagagttcagagtaacctgtatcaagcatgatgcatatgtgtgctttgaaccttgtagatagtattccttatgtttccatcctgttcaactcagtaccatactaagttagtagtat

SEQ ID NO: 19819 - DNA, 274 bp, Zea Mays
acataatgtacatagacttgattctagctaacttatgttccactaactgtggcaaaagcaacggcggcagagataatcatatatatggatctacatatgtgctgcatggcacgctacaacatctacaactgtgctggtcaaagtgcatatggtattatttgcctggccgcatcctccactagtaaccagcaaggaaacaacaatgcatgtatatgaatgtgacctactccctccactccccacccagtccaaattataagtcgttttaagcaag

SEQ ID NO: 19820 - DNA, 429 bp, Zea Mays
cagtgctggtgcaattaagcaaacatacagtagatcgagctcttaagaactagccacactccaacagtccaactgacaaaacggaacaaatatgcatggctctatgcatctgttaaatcatgttgtgtgtgcatgtttgtgatagatgtgcacacgggcgtggcgagttagacgacgttagtcaacttaaacacacggccggggcatggcatggcagctccgttctatactagcttcattgatagcagcgcagtgcagctatgtcgacgcagagctatatagctgagcaattgagcgtcgatcgatgacctctccctctctctctcccttcacatcacgtgccgcgtcgcaggtctccatgaacagcggtcacctgctgcttcccggcctctccatcatccatggccagatctggcgcaggcgtttact

SEQ ID NO: 19821 - DNA, 425 bp, Zea Mays
cttgggaagtgtacgtaggcgtagggggttgagagagtggtggagcaagaatggcgccgccgtgcagcagagaggtgggggaaagctgccgcgctggtgtaggattggagaagaaacagcctgagccggtgatcgctctctaggtggctcagattagatctagtttcattaaaccgtggtcgtggatctcggatccagcggctagtatcgtgtaccgcttcagtttaagttatatatcatctgtgccattcattatcgatcggacgctcacgattagatcttaccccttcgccctaccatttttacataagagaccttatgaaattagaaaatcaacccgccgccccgttctgatgtgctctgtgtctgggatgtcttacaccaaggcccctgcctttctcagatttaatgcacccactccaaag

SEQ ID NO: 19822 - DNA, 275 bp, Zea Mays
ctgggcgccaaccaatgtatcgtgtccacaacgatgggaaataatgccttattgggacaaccatccaatctcaaggaatccatgacatgagctccaccccattgatgcccaaggacgaggagaaatgtgtggagtacctctaccttggggctcaacgatgggcaggagggattgggcaatggccatcagtacaactagcaccgaggagaccgctttaaccctgatgaagacagaagcttcagccccaaccactggatgctggggcctcaggcttt

SEQ ID NO: 19823 - DNA, 439 bp, Zea Mays
ttcttcttcatcaatcgcttttcctgcagcatcttggtcattttgagtttgcttttgatgatcattttcgttgtgactgtcactgtcactgccatctccttgctgcaagtcctgagctactgcaactttttggcgcttcctactcctaacataggtctcggagtaggtcctcccaccacgtgcagctgatgccctaggcaagtttctgccctgggtagcttgagttgcacctaaaacttcatctactgcactccaaagctcctcatcttcttcagactcctgaacccactcattttcccacaaaagctcttcaagcactagtgggttgcttttctttccctttgaaccttgctctcttatctttgtaaatctgttgttcatcttcctgttgtagctcacatagaccaacttgcatagcctttgatgccagtttcagcca

SEQ ID NO: 19824 - DNA, 998 bp, Zea Mays
gtcctatgtgtcccatcgtcctcccctccgttccgcattctcctccgcacaatttcgtccagtggtgtctgcgatggtcaggaacggtggcaactcatcatgcgactccaaaacaaatgccatttgctcttgattagcctctctaccactgtttagttggttactcaccactttgttctaccgcacacaaattctgagagagcaagcgactccaacacaaatgtcatccaagccctaagcacagattgctcctcttcctgcatcgacccaacatctaccgctcaacttcttccttcttttcctgcatcgatcgaaaggtctgtattgatcggcacaatgtttgtcgctagatacgcctcttcttttctttattttcaaatcatattcttctggattattatgttattcgtggccgtgtgctagactcacatgtgcaacctttctgttatcaccaattgtctagtttcaattttctagaataaaatacaactgaaaatacaattcggatcagtcgagaaatattaaatcatctcctattcaaatttcactaacaagggatttaatctccctcaaaccacctcaagccgaacaggtcctagagtatggaaagggatgggaaactaataaattaatcatgttgttctgatgttgttatttcacaattgtgataggcccccaacaagctcaattctggtgtgggtgcacatgtcagcacaagtagttgtgagatcaaaccctagttaatagcgactaggctaggaattccaatgtgggagtgagcaattctcggttgagcttttcaagcaacagaaataattcaagagaacgaattttctggtggaaggggcaggtgtttctggttaaatggaataggatgggctaaggcaggagaagtattgagttgcttttgagtggtgtaaatgatttataggattgatccgtttagcaaatatggcacctgcaaataatggggttccaaacccttttttagtacgata

SEQ ID NO: 19825 - DNA, 862 bp, Zea Mays
agaatcaactctaatggcacgactacaatacttgtattttcctttcttcacaacaccttggtcatccttaatcttgatgaagtgttcccacatttcagatcttggtgccattggttttctggcatgtttttccttatcaacttcctcatccccttctgttcctttttgctctctttcattaccttggttatccacattctcatcaacccttaccactgcaccatccacctctgcattttcagtttcaattcttgccccaatctcatcatcaggttcagaggacatctacagaattgaatagtaatacaaatcactcaaatagtctgtattggggccttgggggcaacaaatagaatagatttgatgaaggaaaaacatgagtacacctagttccacaactaagaaaatctagggataagagcatacttacgttgcaattacaagactcaaaggactccgttgcgagctggggagtggtgactttgagcattggagaggccgagttcccgagcagctgacgtcgagcgagcggaggaagactccactaccggacacggacagtactggtaagctaaaaatagacacagtacaaagtgagactaacaaggtttagggtaccaattctaaagaaaaattaccatctatttaacagagtagagcatatccaatcagtctaaaaacaaatagagaaacagagctagtacttcatatctgcagctctaagcctctaatgacacctgctaggactggcagctaaacaacatatggccaaagcccaaaacaaggtctcagaaagacttggctaccagctgtctgtcgtggctcggcgcctcggccgtcgtcgtcgcctcgtcgggggctc

SEQ ID NO: 19826 - DNA, 587 bp, Zea Mays
taactctaggcgttagttagctgactctttctcctctgtacatgtatataagcaaacccatggtgatgaatacattcgagttcgtctttatctccctctttaactcttacatggtatcaggcgtttccagatgctgatcttctgctgcccccaaccctctctcaaccacgtcgccatgctaaaatcctcctcctcccctcgaactccgacgctgagtctcccaccatcactggcctgcaagttgaaaccaccccggcacctcctgccattgtccacagcatcaacatacaatctcgtgtccctatgatccttgatttcgatgaaagcagttacacggcgtgggttcgcgcattctctgccgtcttcagccagtatggcttgagcgatcatgtcaacggttccccggcgcaacgattctgactaggtccagatcgactgcgtcatcgtgtcgtggttttacaaccggatcgccagcgacgtcctaagttccatctcccacgatcgcgacacgatgtactccctgtggcgcgccgctcgtgatctctttcgtgataaccgtgaaacacgtgtcgtctacctctccgccg

SEQ ID NO: 19827 - DNA, 367 bp, Zea Mays
atgatagcgccttagagtttgctgatatcgggccgactgaatcactgtattcaatcgttcttcttctagtacatcgacatcctccagtctagtagcttcagcttctgctatgttttcaatgattaaccttggtgcctcgaacttgagatcagcaggtagcactgcttccgaaccatggaccataaagaaaggtgtgtttccatgcaaagctcgactaggttgagttctcaggctccaaacaacatacggcagctctctgatccactttcctgtgaacttttcattcttgtcgaagactttctttctgagcgcatccaatatcatcccgttggctctttctacctgcccattggctcttgggtgtgcc

SEQ ID NO: 19828 - DNA, 1248 bp, Zea Mays
ggcctgaagttaagctgtcaggctggttcagtctgaaaatcagactaacagattgatgccatcaacttcaagcctacattcaagcatgatccaataggtttttgtggcagcatcatatggcaatattgtagatggtatgtttctttacaactttgatacagattttgagttgagttgccattcaaaactaagagaaaaccatgctccaaaaggctctgtcaggcaactgaatcagttctgccatggtacagcaacccgagtggatcagaacgccagcgtagcttgctcgccgccggtgaccctccctgcgctaagattcgcgccgccgccgtctcaattcgtgctcgggatgtcgtgataaacgcttggagcacaccgccgtggataagcccggccattaaagtatcccggccaccgtacaaagttcaccgcggtggaaccagataacctcgccggtgcactgcccccttccggccttatgccgcgtgtcctaaccgcgccaccgcatcgccatgactccctctcgcctctctgttgatcgtcggaatgaccgccacggtagaagccacctagcgcttgcgccagtaccttcttctacctccggcctccgcgcgtcgtcgcccaaatccacggccacctctcgcgggctctataaattgaccgtgcccccagctccgccatgtacccaagcacctaccgcaccctcctgcatcccaaatccctcactagcaagcacgaatttcagattctccccaatccggttctaaaacaccgtgaactcaaccccgccgtggtcagcccaactcaggttagctcttcccctctgctcccttgtttaagcattcttatacgtctgtgatgcttgctgacccacacaatcgagctaggagcccttttgtcgccgggaacgcgactgtcttgccgcaatgttcacggtcaccatggccagagcaatccttgtgaccatttgtgaaattgggttaggggaaatggtcgggatagatccaattgcgtgtcagccgctcagagaccctagccgttgccccaatcgaccagtacagtgcctcgccggagcctctccgcgcatgaacgccgtcggggacctcgaaccgagaatagatggaagtgcgggggtctatctgtaaacgtcagtgactctgttaaacagtgaaagaactcgttcgcagttagacagaaacgcgggggtctctgtgcaaagtcgccagggcgcgggcgcgcgcgggcgcc

SEQ ID NO: 19829 - DNA, 480 bp, Zea Mays
acggttcaacatcgaagcggatgagcttgcgcctgacacagggcaccatcaaaaaccgactccaagccatcttcacaaatcgcggggctcggggattgcatctagcagatgcgctcgcgtgccctgaacgtcggtcgtgagcaggggggcgaaacaataacagaagggctcacgctcagcgcgtcacgaccaccgccgaaaggatctacacctagacagcagaattaacccagtaaaccctcgaataattcttacaaattactcgagcgctcaggggctacatctagcagatgtgcttgcatgcaccaagaaaaactcgattccagacgaaagcctctacacaactcgaaggagttgagtaaaagctcgggggctattttcaagcacccaggaatggggtgcccaaagaacgcccgagaaactccctaagaacggtctgtccgaccatgtcccccgccgagctagtctgcgaggcggagc

SEQ ID NO: 19830 - DNA, 661 bp, Zea Mays
cgaccgatttgggggtaatcccaaattggggagctgtggggaacaatcggagctaagagttggtttactggacgcacaattacctagcggaacaagctgaggcttcaatttataggctgctcgagcggtggtgatcaatttgggcaagatgtgctggcggtcggagagaaaaagggcactggtacttggaacagatggctttcaccgtggcggctcctccggagatcatcggacatgcactccgtgattcaccatgatgcaggctaacgcttaagcacgtggcgcgccctggtgacagatcaacggcggcgaaggttatccagtcgaccgatgagcaagggaggtacgacgagcttagccacgacagaaccacggtgatggcacggtggccgccgattaaccggggcttgccacctccacgctttaacgccacgtcgcaaaagtcttttaccgtggccgtcgacgacccatcccgagccgaggtggcatccttatcgccggtgaggccttttctgtaattccgatgaacagtgctcagattcagtttaaaacttgtctgacagcccatcttcagattaaaatttctccaaatttcacatggtacgatgcccaaacacctatagcaaagttgtttctctacaatggctctgcaactttgcca

SEQ ID NO: 19831 - DNA, 361 bp, Zea Mays
agttagataaggctcccctaggtagatattgttcagtccaactttggatatttcagtgatggctaaagttctgaacactcctgttatttaccccatatttatctcaaccttagccaaaagtgagacacggcaaggagaaaagatctgttgtagatatttcagatcattatgatctacattgctcgactgaaccctccttgttcagccccccttttctctctgcttttgctaaagacagactaatatctattaacaaaacttgttcaccaaacaaggatcttcaaagctactatagggttcttggacctaaactacatagatccaaagttatggcgcccaaatatcagctacatcacactgg

SEQ ID NO: 19832 - DNA, 404 bp, Zea Mays
cgagagagggaggagaagcttgtagatctcttatgagggtggaagtggagcttagaagctgagaggtgtagtcctagctaagtcttggcttcgcagggctccggcctcctggtcctcaccggtgctcctcctcctgttcgtctttatgggctcgtctcagtctgaaggcatccagtcgtctccatgttgatctattctctccgtctgtcggcccccttgccaagagaccagcttctcccttttataggctaggataggtgtcgaccagaggtggcttccctaggaaggagccataagggtgggtgagtccacgcgtactcgcgaggcccgaggctgtctggctgccacgtatttatcgcgggggtggcgatggtcccagctgccatcattccggctacgccgac

SEQ ID NO: 19833 - DNA, 284 bp, Zea Mays
cgagtggatcgcggacaccggtgctacctaccacatcactcccgaccctggtatactcacctctgttcgccctccttcttcctctcttccttcgtccatcatggtggcgaatggctcgtgtcttcctctcacatctgtgggtgccgccggcactcccggctcttttcgcattcccgatattcttgtcgctccttctttggtccacaatcttctttctattcgccgttttaccgctgataattcttgttctgtcgagtttgactcttctagtcttactgtgaagg

SEQ ID NO: 19834 - DNA, 339 bp, Zea Mays
attggcgtccccaacttcctcccacatcgagctcaagttgtccctcagcgccatcttggatctggggaatagaaggctttgggggaagggatccaccgcggtggagcgagagacatcggatgggatcttgggagaagaggaagcgagagagagggtggggggtcgagttagggtttgaatggaatatggtgctgtaggtggtggcagtgaccaggaaatggtcgagcggagtagaagtcagagacggagcgtagtggcgtgggtgtcgtggatgtggcggccagcgccagtgggaagaagaggagctcgagttggtggggatggccttaccgtgggcgg

SEQ ID NO: 19835 - DNA, 535 bp, Zea Mays
gtcatgcataacccacccgccgttgtctcatgcgggcaccaaagcgccaacgcattgcagccatcattgatgtcctgcagtcccacgcgcacaagccgatgctgctcgtaaaacgaaacgtcatcgcaagcgtggctgcatgcacgcgcaccaaagcgccgctgctggtcaaaaaaaatgactaaataaattattcataaaatagttttctgtacatctaaatttattatacagttatttactctctcgtatttttttgcaattatttattccattttatgaaatgattacaagaagtaatctaattataaaatttatcacatgtagatgactggtattgtgagccgtgaattcgaagtgttggccccgcatggccaaaactacctcacgtgggcatctgatgtgcagattgtgcttgggggcaagaagctcaaggttgcaatcgggcttggccaaaaggatgaagttgccaccgacgagcaaaatgaccaagcattgcattttctgcggcaccatcttttgcctactctcaaga

SEQ ID NO: 19836 - DNA, 328 bp, Zea Mays
accagctttgaagaaactcttaaaaactactatttcatcttttcctggcttcggagtagtttcttctccaccaaagcgaatcagctctttcttttcttcgttgaaatagcccaatttcaacatcttaggaaggtcaccttcggagactatggattttccaaaatccagatgactgggtttgctcggcaccgcgctgctataatcatcttcagaatcggtctcttcaacatcaactcgctctgcttcagcagcagggatgtcctctggtgttaccaacccagagcgcttcattgcttccgaaataggaacagtctcagtagcttcggtc

SEQ ID NO: 19837 - DNA, 726 bp, Zea Mays
gtgcaatttcaattttcatcttcgtccaccagtagtgctgctttagatcatgatacatcttagtgcttcccggatgaatagaataacgactaagatgcgcttcatctaaaatttgctggcggagttcttcgttcttcggcactactatgcggttattgaaccatatcacaccttgatcgtcttctttgaaacatttggctgttccagcccttatcttttcccgtatgtgcttcatacccacattatccttttgagcatcaattatcctttgcaggaggatagactcaagctttagctgattcagggttccttgttggaccatccccaggtttagcttttccatctcttgacataaagtgttgtcagaggtgttcaccataagacagtggcaggaagccttacggctcaatgcatctgccacaacattggctttgcctcggtgataatgaatttctagttcatagtccttaataagctcaagccatcgcctttgcctcatatttaattctgactgggtgaagatatacttcaagcttttatgatctgtataaatatgacagatatttcctagcagatagtgacgccaaatttttagggcatgaaccacaacagctagctccagatcatgagttgggtaatgctcctcatgtcggcgcaactgccttgaagcatatgcaattactcggccctcttgcattaatacacagccgagtccactgcctgacg

SEQ ID NO: 19838 - DNA, 611 bp, Zea Mays
ctctcccgccatgcgcgtgcaaccaggcaacttcgccggcgttcatcgaagcctcgttgagtccccgtcgcgtccgttgcctcggtgagttctgtatcaccgtcaacaactcgggacaccccttggttcaccttcttctcccctggttttctcggtccgcgctcaccgaagtgttttcccatgcagccggagtccgccaccgtcgagccgaggcttcaccgcatccccgaagtctcacaggcgctcctgagttcgcgctagaggtgagcaacctccttatgcacttaattcgtccgttactgccctagtgcccgcgcaatttctcaccggagttgatccgcgctgccgttagaccgcctcgccgtattcatcgctctctggtgcctacgcgccggtattgcgcccgtgactaagttcgccaggtcaccctgatcatgcatgagcccttccccaagcccgtagagcccttccatgtccgttcctcacgtctccggtgacttcaccgtcgaggggcaggagctgcaccgcccggagccgtaaaaccttctcggcgttgatctccaccgtttgatcctgatcgcatggtccagatcaccgggtagcgattcgcg

SEQ ID NO: 19839 - DNA, 635 bp, Zea Mays
gcaattttgtctatcaggcgctctgaatcaagattctaatggtacagtgttcggatcagatcgccaagttcagttcatctcgccactgatgaccgtgcacccgaattcatgcctgacgctacgattcgtgctcaacggagtactgatagtttctcagggtagtaaatatcaccgtgtggatgaacttgagtcgttgttcacttcggccgccgtgtccgcctgattcacggccgattcagatgaactcaccagagttagccacatatcgaccatgcgccatgtgccttggtgtcttaccacgtcgcagtagcttgtattacacacgtccggtgatcgccgatgagctcgccacggtgaaagccaccaattgtttgcgccagtagcttcttccctctccggtcgccaccgcgccatctcaaattcacgggccaccgctcaggggtcctataaattgagtgtgccatcggctccgctatgtagtcaagcacctaatccatcaactcgtgcctcaaatcatccaccaaagctcgccaatttgaaacttcccccaaatcggtccaaagcaccgcacgaagtgacctcgccgtggccagcgtgctataggtccgttcatgtcctctggttcctcgtttcga

SEQ ID NO: 19840 - DNA, 1062 bp, Zea Mays
gttacatataagaactgaaactgctatcaatcgtttattaaagacaacaattggattggtacgtgtctattatgttttatacttttataaatttatttaaaagatacaattcatttttataatcatgatatccataatataagttaatagttgtaataatatgaccttgttttattataaatttattgttttaccccccaaggtaagcgggacaaatggactccaatattttagagcttacatagatgagcaacgagaacaaatgcaacagatcataggggtatgcaaaatgattataaaaggctagcccgcgcgtttgataaatctattgtcgcaaattttccttcacgcgaggttttgaaaccggggaaaacacacgcgattcatcggctacatattggcatgatcaatcacaacccccttacggaatgtcgatggacacatatcctggacaaccacaaactcctacacaaatcggggtaaacccactgatctgtgcatggagggaccattcgcacgtgagcgcggatcgtccgagccaacgacggccaaccccgtatttagaactgaattatcgagatctgcctgagccgccgcatcccgcgcaaaccctaaacgaacaattcggaccattcgcgcatagcgccaaacagtccgaatacatcactagatggttcggtcatgtggccagatagtccacgcacacagccagatggtccgggtatttgatcggacggtccggcacaaagtacacagaacctaatgatattgattattacctgactacacatccatcctagccaaacctcccactgcatcatacaacacctcagcaccataatatgacatcctagatatgtgggggcgagtactttttggccccctctagaaggctggaaagggacaaccagccatacgagccgcatcaagaaagcattaatgcctcacaaaatccaagccagtgggtggggagacaacataatatccaaacacccacacctatgctggactagagagtcggttgactaccaccggtcgctattgacatagtaagagaggaga

SEQ ID NO: 19841 - DNA, 337 bp, Zea Mays
aaccaatgcagaatggccacagctttctgagacgacattttgatattggatcctaaagcatcttctggaagctcccattaggaagccctttatgacatggcagaatggagggaggatatttccacccatatctccaaaagatccataacccatataatccttacaggattatagcaagttcacttcatcatacttttttcattgcaaaataacacagtttaggactattgtcaccatagcgagctgagagccaatgaagaatgggcctagctttctgagatgacattttgatattggatcctcaagcattacatcagagctcccataaggaagccca

SEQ ID NO: 19842 - DNA, 897 bp, Zea Mays
ttcacgcggggcggatcttgatgaggaggcccgatgtagtggttcctgatgacattgtcgccgacgtcaaggctacgcctgatgcttcgagttgtccttcttcctcgattgctcttgcaaaaaacattgccgacaaagacgtttcgatgtagtgatatcatgcgaaacactggatgtactatgaattctatgtgtgtgtgatggttgtgttcgaatattttgtggacaaggcaccagaatgtgtccttggtgctgacaaggacaacgttcttttttcctggagtactaattgtttcgttattagggtataacagtcaccctgaacaattgtgaaagtaaatgtggcgtgttggttttgaaactttttctgacttaagctgatcgcttggctggtaaggcatagtggtcgccctaagataggtagatgtgatcatatcgcgctgacttgagtcgattgtcccgttgtagggtatagtggtccccctaagtcgagttagcacgagcatgttgcgccgacttaagtcgtcaccgacttaagcctatcgctctgttagtagggtatagtggtcaccctaagtcgagtaagcgtgagcatgttgcactgtcttaagtcatcaccgacttaagccgattgctctgttagtagggtatagtggtcaccctaactcgagtaagcgtgagcatgttgcaccgtcttaagtcgtcgccgacttaagccgattgctatgtcagtacggtatagtggtcaccctaagacaagtaagcgtgagcatgttgcaccatcttaagtcattgccgacttaagccgattgctctgtcagcagggtaatatggtcaccctaagtcgagtaagcgtgagcatgttgcaccgtcttaagtcgtcgccgacttaagtcg

SEQ ID NO: 19843 - DNA, 330 bp, Zea Mays
aagcacaagccacacacgtggcgccgcccgcgttcagcaggagaagggagctccattaaattaaagtttgttcttcatggaagacaacgcaaccgaaggtttcgaatcagcacgtcttcatttaatttgaagaataaacaggccagctcgtgataatgttccaattgtttgtcatcctcctcactccaggcctctagccaaatgattttagggcagcagctgtgtgtgtgtttggtagggtgtgtcttagggttaacgtggcctggcgtagcagggaggcaggctggccggcctagggattacattttcattttgtaattttagaaaacc

SEQ ID NO: 19844 - DNA, 689 bp, Zea Mays
atgaagatagattataggtctataactttgatgcagatgaattatgaggttatcacatagaatttggagaaaatcggccctaattttgctctgtcagtcgttctgaagaaactatgtgatggtacagtatcccgatcggattgcaagctcagtaagctcaccgccggtgatccacgcgtccagatttgcgctggtcgtcgtgattcgtgcttggcacgcagaggatatccaagggaaggtaaaagatctcacgagggaatggatttgatcgtggattgaagtttatcaccgtgcctgtagccgttgcgacgtggccggaccgccagcatcgccgttgaagctccggtgacctcggttgcgccacgccgtagcttgttactgtgcggtagtaatcgtggcacccttaggagtataatccttgagcctttgcaccggtgaacgccacggtcatagccacccgtgttcttccctatctccggccgccagcacgccgtggccaaattgagagccaccgaccccgaatcctataaattgagcgtgcccttggctccaccatgtagtcaagcactcaacgcacccacccgtgcctccgattagtcaccagagaactccaatttgggattctccccaaatcggtcaagaacaccgcagaagtgagctcaccgtggccagctctccacaggtccgat

SEQ ID NO: 19845 - DNA, 475 bp, Zea Mays
gcagaattgccgaagatgacaaaggctcctgccacaactcccaagaggaggaggatggccagcgtgctagacgctgtcaaggagaccacaaaggccttgagccctgctcctactaagaaaattgtcgaagccatcaaagtccaggccgaagccgaagctaggccttcagtgcccattaaaacgaaggctgccatgtctgaagataaagctgagcaacaaacttcagatactagcatgacaacgggacaagatgtgatggaaaaagcaaaatctcctgccctcgaagctccggctgaagatgttgattacatatttcgacatgcttcggggaaaaaattatccaaagaagaaatcctagaagccagacactatgcccagaaactaaaatatccgaagggggccttagtgttcaatggcactaacgaagatgatttcctatactgtctcccggacaacaaagaaatatccgtttgcc

SEQ ID NO: 19846 - DNA, 288 bp, Zea Mays
gacgtgcttgccccaacggtctgtttgatcacaccattcttggtttttcggaagaaagccaacctctcgttccgtttctcttccatctctcgtgcgatttcttcttcaatctccttcctgtctgcctctgtaagatcttccatcgtgactttgatcacgttcaagggatgaacttcagatttgtctggcgccgctttcttcgctgtcttgtcctccatagccccgactatgattggcgatgaggacgccaatcaccagcagtttgccgccgtgaaacgattacaaatc

SEQ ID NO: 19847 - DNA, 720 bp, Zea Mays
aattgccaaccacttttactatcgatgagggtattgcactgaactcactagtcggagaccataacgatgtcactgctgatgagtgtgttgcaccgaaacgaaaacgaaatccaaggaaccaaaaagccacattgcgagctttggatcgaagaagactccttgatcgtgattctgatgaattttgatgtgtaatgcataatttcatattatgtgatgtactatttgattttttattaattcacttaattttatggagctaatacatttaatgtttttatattgaacaggatgagtggtaggaaaacaaagcgcgctgctatggggtttcttaatgcggctagcaggatactccctggtgcacgttcccttttccaagggagttcttctagccagagcagacaggaggcgttgctgagacacggccggccagaactatgtgatacatctatcgctctacaacggagtaccgatgtaaatgtttatgtaattgatcttatttgtcagtcacttatgtaattgatcttatgtaaatgtttacgtgtctctatttcatgtccataggaagaggaggacgacgaggaggaggtgcaacaccatgaggaggaggacgagcaggcccatgaggaggaggaggtgcaggcccatgaggaggaggaggaggtgggcatagatgctgaggcggatgacgatactgaaagctctcttgtgagttttggtgtt

SEQ ID NO: 19848 - DNA, 357 bp, Zea Mays
gcggcgaggttggggcaagcgaggttgggacggttggtgagaaggagaacgagtggacgacacaccaaggggggcacgggggtgacgcacgaagtcaggagtggagacgtagatcgtgggcgtgggcacgaacggtggagattgaccgaaggcagaacacgcagatggcagaaccaggagaggtagactacttttaggttcttaataagtagtaaagatgggccttttcgtgcctctatatgggccatttcgtgcctgccttaaacgggtcgtgctcgtgcccgcccataggccgtgacctcggcccaaacctggcccgaaataacgggtcgtgccggcccggcactaaaatatttc

SEQ ID NO: 19849 - DNA, 574 bp, Zea Mays
agcaacccaatcggcgtcgtcgtgctcctcctccataaagatggtatgtcccatctgatctggacctgcaggctcaaagacaggggatgtacaaggtgcagtctcatcgaatgtaacctcacaagtctccataatgtggttaatctctaggttaagaacacgataagcacgataatgtaatgcataacccaaaaaaacccatcagaagaccgggactcaaacttgtccagattaccctgttttagcacaaagcatctgcagccaaataccctgaaatgactgaccttgggtggccgtccaaatcgcagctcataagaagttttgttcagattagcccgaagaaagatgcgattggacacatggcaagcagtgttgatcgcttcggcccaaaaacacctaggagtcctaagctcatcaagcatcgtcctggccatctcaacatgggtctgattttgtgttcaacaataccattatgctggggcacatacgaagaggaaaactgatgctcgagtcccaaagaagcacaaaaggttgcaaattgtcacacctaggttttaggggcaccaagacccgg

SEQ ID NO: 19850 - DNA, 521 bp, Zea Mays
cattattctaacacaaatattaaggataagcgggtcttttcctctctgactcaatgtcatgtctaaccttcgtaactatcttgagccagagtattaactcttcggtgtcttgtgcatggttgttgcagcttcggcactcaatccctttgtttgcaaacaattccttcgtcataaggacctttggcagagaaggagacccctaacattgccaggaactataaacctttggcagacgagacccctaacattgccagaaactataaaaatgcaatttatccagcttttggagaagatgactactaggtacagaaaatgcagttcatctagcttttggagaagaagacccggttgctagagccatggagtccagtgaaaatcttgttttattgtccagtgaaaacccagttgttggagccatcatggagtcttacattcctgcctcggtcgagccatcctttgttgaaaggtagtattgaatttcaagttagtttctttttcaagttactctactgcgatctata

SEQ ID NO: 19851 - DNA, 534 bp, Zea Mays
caactggctgcccaccaactttctgggatggcttagcctggtgggacaccttcaacgtcaccatcagagatgctacctgggcggaatttgaagcagctttccgggagcaccatgtgccccaaggacttgtacaacttaaggaggacgagttccgagaattgactcaagacggaagatctgtcagcgaatatgtgcacaagttcacagaattagcccgctacgcgccagatgatgtcagtaccgagagcaagaagatggcccgtttcctgaaaggactcaggcctgaactcaagacaattctggctagccaagacttcctcaacttctctcacctttccaacaaggccatgcaagttgaaagggcaaaggaggaagaaaaagggcatcttaaaaggaagttccaggttctccgggcacagcagcaggaccggcaccagaagactcgatcatttgggtttccacccaaggggccaaacttcagtaggccagctggacccactccgtcgcgattcagccagcagagtcagagctctt

SEQ ID NO: 19852 - DNA, 757 bp, Zea Mays
caagagcgcaaaagtgtccgtgacacagccacctccgcgtaggacggcgggttaatttggaataaaccgaggggctcataagtaagaatgacacgcaaaaggggtatgggacgattacagtcatgcgattggtaatcgatggtccagattatatctctttttatccgaaccggtatgcagcccaggccgttagatcttgattcaacgcttagaattttatacggttccagactatccttgcccgcccactagcagatctgcggtcacgatctatcccagccgagccggtaggaggcttctaatcgcagccgtccatcatagatccgatggttgcaagcttatcccctgccccaggtggtttgaccacggcggcgcgttggagctacggcggtgcgcccgccggagttggtcaaaactgtgacagatggccacaccaccccacctgactagtgcaaaacaacttggaggcgatcgcgagacagaaggtgggcttacctctaagtatcatggcattcgaagtcctgcccacgctgtggcgcggaacaccggcccctccccaagtccgacgagaaattgggtcgagaacggtggtctttcccgcccaccaacgtcacgatgagcacgcacgcaccccagcggccatcctcgagcacaccgcggacttcaaacggcggtggaggccaaggacagctgcggcggaggtcgggttcacgctgctctctctctctgcttggtgtagatgcccgaggagttcgcc

SEQ ID NO: 19853 - DNA, 602 bp, Zea Mays
atttgaatttgaattgaaaaccctagagaaaataaatagaaaaggcaatagaaattccaggaaaataggaaaagccaattcggcccaaggcagcccattaagcccaacccccgtgcgcgcgcccgcgcccacgcgtccctgagcctgacaggcggaccctgcctgtcggcgcaaacccgagcgccctctctcccttgctctctcgctgctccgtgggaccaacctgtcggtgccgttgttctcgcccacacccactttccctctctctgccccaccgaccacacctgtcagtgcgtccctaacctcccacccacggtctccccgtcgtgaacacgcccacgaccgcacgttctccggccactaccgagcccctgcgccccttttgaacctcgtgccctgctcgcccacctcccctcttccatttgcgccccctgcccagctccctcgctctgcccacacgaactgagaacctccgccaccgcccgctgacatccaccgcttgttccgtggccgccattgcgcctgtgccccatccagagccacggtaagcttcgccttgccgtcaacttctcgagacaccctttggtgtgccctccccctct

SEQ ID NO: 19854 - DNA, 382 bp, Zea Mays
agatgagataaaaatggtaggggtacttcctggccttatatacacaaccaaggagagctatccccacacaagtgataaacataacccactcgcttatctccctgtttgtagcaaaccgtcttcctacatatctggaatcttcctcattcattcgcctgagttaccaacggggttttagcctgccgggtgatcacaattgttctgcccgatatgcttgtgctcccgtagcgcttaactcgggcgttggccttcgccggctcagattgggcttaccttgcttggttgcacttggtcagcccgtccgcaggatgacccaggaggagacctgccaggcggtctaggacacgtttcagtgtgcgtgaggacccgggggatatccatc

SEQ ID NO: 19855 - DNA, 393 bp, Zea Mays
cggggatctaatcatacccactgatccaaaaatcaatggcccagaatcattggccgaaccgatacacaaccctggtcgccagatctcgcatccacggcttagatttaaaacacgaaggggtaagcgatccttttattcacgtccgtccgtgatcggtcctagggcccaggaagcgtcacctcacaagcaccaatccgtggcggcgcacggttcatacacgacggcggcatcgccaggggagcgctaatcccacgccccaatgcattctttccaatcaaacctgtgctacacgtagagggggaagtggcgaacatgagcaagaacgtcttactgtgaatcgcacatccgtcagctctgattacggcgcgtggcggcatgccggcacggagcaac

SEQ ID NO: 19856 - DNA, 280 bp, Zea Mays
gctttgataggaattggcatgcctgacatttttggactaatttagcagcatcactcttcgttgttggccaatagaaaccggatctgaaagcctttccgaccagaatccttgacgctgtgtgtaccccgcactgcctggcatggatttcatctaacaattgtttcccagtagtcgagtgaatgcatttcatgaggactcctgtcgcgcctcttctgtactgtaagccccctatgatggtgtagtgggctgactgccttgcaatgcgtttcgctgcagcctt

SEQ ID NO: 19857 - DNA, 548 bp, Zea Mays
cttgagtaacgacttggaattgttgagtcgcattttaagtccgcctgcatattcgtagagaaaaaatggctgatttactgtcagtatctttagaggtaatagccgaatggtttttttgcgacgccggcgttttagaggtaacagccgagtccttttgagccacatcagcgttttagaaataacgggcgagtgattactggtgacgtcagcgttttagaagtaacaactgagttatatcgagtcatgtcggtgttttagaaataacggccgagtgaagactggtgacgtcagtgttttagaaataacagctgagttacatcaagccacgtcggcgttttagaagtaacagccgagtgatgactgggcacttttagaatcggtgcatgaccctagaaaaccccatttgtaccgcgccatcgcatgtctctgcattctgagccctagccttactttctgcttccagaccttctctgtttccctttgatctcgcttccgctcagttcaccgacgagattgagatggtgcccaagcggaagagtcagaattcc

SEQ ID NO: 19858 - DNA, 547 bp, Zea Mays
gactaggtcaacaagcgcgcaaaatcgcaggtgcattacatccgtgcaaaagtctacaccaagaaactgtccgcgcaaagaccgactacaggcgcagccggaccgacataataaatgtgctagaccaagtgcgcaacgcccctatggacatagccggatgcgcgaaggtgcacagcctcatcatacaaactatagttacacacgtacagcgagggcatcacaccttacattggttcaaccttcggaatgattcccatctccctatagttaaatagcattatcctaagctcctcaccctcaaaaagacttcgcaactccccctcacctacactcgccccaaccggcaaggataacaattccctcttgccagccctgcccacacgaagccgaccgccatccacttcactcactctacgcttcgccaccgcccttcgccgcctacgcccagcactcggaccaggcaaaacttcagaatccgtaacacgcggagaagcctctgccgcagccacatccaaggccgcaaagtaatccaagtcctcatccaaag

SEQ ID NO: 19859 - DNA, 380 bp, Zea Mays
tgggtgcactactgaaactccctagctaaggctgtgtgcaggtccgggtcccagtcgaaataccctcctgggggccaggtcaccaactccttcttaagtgtactggcatccagcctcgacaagtcgagaccaaatacctgaggggccaagtaccagggaagaagttgacaacaacacacatagcaaagggaaagtagcattcagataagttgtaatgttgcttgacaagtaatacttaaatgtatcttacaaaaccaaaatatgataagccgcttccagcggaacccttgctttctctccacagatccgactactcatcatcagtgggatctcgctggaagcgcttggccatcacgtctacagcgtcctgcacgctcccc

SEQ ID NO: 19860 - DNA, 499 bp, Zea Mays
tttgggggaaatacgaaattgggaggctctggtgaacgatcagaggcgagagctggtgctttggatgcgtaataacttagcagagctcactagggcatcgatttatagagtccatcagcggtggtgcccaattttgagaagatgcgttggcagccagagagaggggaagttcattgacgcgagttaccatggcattcattggcgcatcgactcagaggaaaggcaggctacctattgcgaccaatgacaacgtggtaacaaggcagtagcgtggcaggcttgggttaatggcgatcgtcaccgtgatggtcgcacggccacgtcgtggcgcaagtggatgagacgacacaacggccatagtgctccaacttcatccatggcgagatcttttcaccaggagtcgttatccgcacgttactgggcgcgaatcgcgacaccagtgtgaattcgagcgcgaggtcaccggtggcgaggtgggatgaatctgaacatcttttcg

SEQ ID NO: 19861 - DNA, 581 bp, Zea Mays
ccctactacgagcatcgagccatcgaagactggatgtagggacgttctacccgaatcggtataaaccttgcgcccatcgagcacaccgtccatagcctagaacgcgcactatagaaatttacttgtcggagcgaaggttcgaaacactgacggttggtgccaggtaggggccttgcgcgttcttgacgaactctccaggttccggatggtcaacaacgacagtggcatagtttgggtccctagaacaaccatccattttgggagtctcgacttcatcatcaatgactgggggcaatgatcaaggcctcggaagccccaattccctcgacgaacaactcactcgacattgccaaaagcctcggcagccttcgattcggttccccttgaggaggtggcgggcagcgatgcgcactacgagccactttcaccgagatcgtgggaatgctaggccctctccgggattcaatccatgatctactcctatcggggttggaaggtggacttaaccccccatcaagcggggccaaccacaacctagcctaggagtacctcgtggccaattgctggaggaccgctccccg

SEQ ID NO: 19862 - DNA, 448 bp, Zea Mays
aactgtcgatgttttgaacctcgctcccacgagtaaatttattgtgcatgttccggctccggatggtgtacgcagtgggcataagatttatattgtttcaagcagaacgttcctacttccagttatcggtggcttatgctaccggcactattgatgatcaaagctcaaagtaggggttacaagagagcgagagagggggaagaggctcccaagtctcttatcgtggtggaggtggagctaagggttacattgtggagtcctatctaagtcatggcttggcagtggggctccggcctctggatcctcgtcggtgcgtcctcctgggcgtattctcgtctaagtctgtcattgtgcgtgtgtcctctgtccgttttgggaacccatggtccgggggccaacctcttccttttataggccgagtaaggggtcggtcagtagtggcttcctt

SEQ ID NO: 19863 - DNA, 557 bp, Zea Mays
ggaggtggggttgagcgggctctaggggctaaagatgtccctgaaccgacgggggaattggttgtgtttgaggctttctttgcagctgctcatcgcttgccaccacatcgatttgtaattgaggtcctgcggaggttcgaggtacaaattcatcagttgacaccgaatgccatggcagcgctggtgaagtatgtgtgggctatttcctcatatgatgggaaccatctgttgaagtcttcacaaaaagttattgtctgcactggcaaaagaggaagataggtggtaaaattgctcagtttggatcctgcacctttatgccgaggactaggaagacctcgaccgaagttatggagattgttccgtgtgtgagttctagttttatgtggcaccaggcgatgtcgaagggttgcccagcttgccccctgtcgtcttgtgctcgcactgctatgtggcgtttccacaatttgaggtggtggaggaggatcaagacgaggtggcccttcgctacgcaacccgcctgagcagtgggcgtgatttggtggaagagttcattgctt

SEQ ID NO: 19864 - DNA, 395 bp, Zea Mays
acaaaatggatgctctaggctctagaagacaaataaagcttgcaatcccaagcacacttggacactgtttctgaaagaagaagatgatgacctagaattcaaggacctagagcgaatgatggtcattatttatagggccactaagaagttccctttttggcgagccctgaagctcctaaactaggaagtgcatgcaacgattgcatggcatcactctattgggtccctcaaatggtttggcaccctaatcttctttgatttcttcgactatgttggtactacagcaggcgcaagatcctccatctaatggtctcctccaccatcaaaaaacgtgaatcctaggcatgccctagttgatggtggggttagcgtcaatatcttgttgatgtatgtca

SEQ ID NO: 19865 - DNA, 577 bp, Zea Mays
cacgactgccgggagtccagggaggtcttcgacctcgcctaccgccacataaaaccaataatcataccagttgccccacttgttgcgggcgtagggaactaactcaacaacttctgccgctgattcctagtcctcggcgtaaaggtgcatgacccaaactgtgcaatcttgcttccaatttttctcttctgccagtgcaaacagtaattcttggcgaagaactctacggagggctgaccgctgtacgaagtcactgcccagacatacttcgctagggccaccacaacattaggtgtcaattgatggatctgcacgtcatacctccgcaacacttccaccacaaaacaatgtgcaggcaaccgaaggccggcagtgaaaaatgcctcgaacacaaccatctcaccctccgactcaggaatctcttccacccccagaactcggccaactccattcccaaaataccccaaccggtgcatgtcttgcacacgaaccgaggagatcctcgaaacaccgaattccaccgtgtggcccgggtgtagctccactgccgccaaatcactgaaggtaccctcggacg

SEQ ID NO: 19866 - DNA, 671 bp, Zea Mays
cgaatatcgaaactctctcctcccttgcacgactttaccttaacggttgttccgaaaggaacaagaccacctccatgcccaaaccagaacaaaaggattccccctccttgtcctcccgatgctccccaaccaccataatcctatggtgcagaccgttcaagttcggatcaaatgactgaccatacagtttcgagtggttgtacttgataagagtacaggtaaagtctcgagtggttgtacttgatggaggtggtcttgttcctttcggaacaaccgttaaggtaaagtcgtgcaagggaggagagagtttcgatattcggatatcacgacggtaagattgcagaaaccagaacaaaaggattccccctccttgtcctcccgatgctccccaaccaccataatcctatggtgcaggccgttcaagttcggatcaaatgactgaccatacagtctcgagtggttgtacttgataagagtacagacagtgaagaatggtaaaccggtccttatacaagatgaacaatccttcatacccacacctaacccggctgaaccatcaccttaagaccctcccaaaccagggagtccctaatcatcccgctcaaaggtgataatggtgataacccttcatcatacccattttgaacaaaatattttctattgaaaaactc

SEQ ID NO: 19867 - DNA, 853 bp, Zea Mays
ctttatacccgcaggtggactcttagccgcaatagccgtctagggtagttgccggtgatcgcggcatctgttacggtgttccgctgagctcggaaatgataaggaagaagggatacacgcgagtacggttgttgcgacgagccaagaggggggttggttgccgtgaatccagggaagtttgttgagcttgctttagtttgttacgagtcgagaaaaaaatatattgactggtttggttgcctagtatcggaaggtggttggttgtcctgtgtagctggctcatgcggcgtttgcagatcgcgtctagctagggggtctcgtgtgtatggctgggcacaagcagcgtagacccgcccgatgtgcatgtgcatggcccatgcaacagagacatgcacggataaacgcaagcgcggggtgcggctgatcagctcaacgatcccaagctgaaagacgtagctgacggagaggctccacaaggcagtgtctccaagcgcaaggaagcaagcacgggttgcacgatgtggaaattggcttacctcagaattatgatgacatcatttgtggctagtgaaataaagaaagaacaaaactagaggtggaagtggctatcacgagagattaattgggacaagtctgaaaggagtggccgaggcaggtttgtttattttttttattttatgttatctttaccactccctagtttcagttcaattttaaatttgttttgaattgtcaaacttaagttcatatgcacaaacaagaagtccagcatgtacgcaaggtataatttatttattggcatatataaatgagtttattcatttatttagtctaaatgcctcgaatatgaaat

SEQ ID NO: 19868 - DNA, 479 bp, Zea Mays
aagctcagcccgagatacattggaccgttcactatcttggcccgagtgggcagcctggcttatcgcttgctactgctggattccatggcaggggtacacccagtttttcatgtctctatgttgaggaagttcttgcgggatccggaccatcagattgagatggaaccaattgtggtgcagcaggatctaactttggagtgtcgtccggtgcgtatattggaattctcgaagcgtgtattgaggaagagatcaattaagtatgtcaaggtcttatggactaatcagtctgagcgcgaggctacgtgggaacttgaggagcggatgcggcagaagtacccagaacttttcgttgtgggtaagtgttgttgattcattaatcttttcttttgtcgttccgatagaagcgtcagaattcgaggtcgaattctttttaagaggggaagagtgtgatacccggtttgcaaagaagagaagttggg

SEQ ID NO: 19869 - DNA, 482 bp, Zea Mays
gtatagatagtagcagcagcagtagtagtagcagtagaataatgtagtgttagttagtagtgtagtgtaagtagtaaggtagtgtaatgtaatgtagtaaccagggtagaagaagtcgactcataatgagtcggctttgagtttgtgttaccccctccagtatgaatcaaggactcagttgcttcaaatgaccaatgttttgttgattttcatttgcgcgtttggaagtttgtccatgtgcttgacagtgctggcattttagaggtaatggccgagtgatgactgggacttttacttttccgagtggtgatatggcactttagagataatgcccgacccaagaaaccccatttatactcacgtcgacgtgactttttgatttccgacccctaactccactttttcctttcagctgctcctctacttctctaaaattctgagcccgctcatcccgcccgagagattgcgatggctcccaagtg

SEQ ID NO: 19870 - DNA, 867 bp, Zea Mays
gattcaccaaactggtacgccttccttccgcgataaccgcgcgtagtaaccaacccagccgcgagctagctgacgtaacctccatccccgattgctactcctcgtacgcggggatataaccacatgccgcccctcatctctgggccatatcagccatctactcgaagaccttatgccatgaacacaacgagcacagaagagattaccgccgcagaggaacccggttacaccgttgttgaaagcctgctgacggatcagggagattcgccaagaccacaggaagattctcatggcctaactgagcattattggtgattggtgtgctcaagatctagtggacgtcgacgatagccgcggggctactgcgcgacatggtttccagcatctacgacgtgtcgctcggtaagaacctgtcccactaatttgtctggagctctagagcatttagcacttaatcgcatgatgaatcgagcaccagaacgccgacgtgcagacagagcgccgcctcaggtcggagcaaaaaggtaggagaagatctcagcgccgttggatatagtgaacggtcccgattagagatggggagggaaatagctttagtccgttggatcctttttgggtgatcgtgatcaaaacactgataccgattcggctcggggatgtttgggtcgttgatcttgaatcggagggccgcgggttgattccggattcggatgatgcccgatctaatcctgcccatcgattctagatcggatggccgatactcgcctgtaccccttcgacctgtgcattttgcagaagagcccctgctatttctgtgaatcaacccgccgtccaactcagggatttttgagtctgcttaaatctttc

SEQ ID NO: 19871 - DNA, 465 bp, Zea Mays
gagccccatctcaaaaactaatgtggtgtccaaaacccaatcatcttaggaacacacttgacaccatgcacaacatatctagtgatccccttcctagagcacctcatccacccaagatgacacattcccacaaaaagaatccacctaagagagaggtgagctaccactatgagtattgcgagagggattgtcacttgttgcattttgttttagaaggaagagagatgagaggcaaggttttgcagtgaatggtagggacatgtaccacccttctcatggtgtacatggtccttctattcagagacacgctgctaggcctagaggcacttttcctcaggttgctaggccccaagtagtgagaccacatggtggtcatgccagaagaggtgttggtcatgtgccatatgaccaaagatctcgtgtaagagagtttggttcccacaactctagcataccactgtttcc

SEQ ID NO: 19872 - DNA, 466 bp, Zea Mays
gaagtgcagatgaggccgtcacagaggcttgcgaacccactggtacagctcgccctccctctgttttgacccccacagatgctgcaggaagtgtaacggcagatgatgctgtttgccgattgcccgccgaagcatccgagctccctgcccatggcgagctgcgagcctgtcgggatcgagtggcctgggttaccttggcaagtaagagatcttcccgcctttccgcttcacgagccaatccaatggcatcagacaaatctcgaggtcgatcccgatggacctcggccgataaggtgggggataatccggcagtaaacagctcgatttggtcttgccgcgacacccgtggtgcgcgcgccagcagtcgctgaaagtccctcgcgtagacctctgcccggttgttgtgctgcttcaaattggccaagtctcccaacggaccagatgttgaatggcgcgtaaagcgctg

SEQ ID NO: 19873 - DNA, 728 bp, Zea Mays
gttgtcccaattcctgaaggagctgtcgtagccaggaagcctctgccacaccattagcaatggcacggtattcagcctcagcactggagcgtgtcacagtctgttgacgcttgctggaccaagaaacatgaccggtaccaagaagagcagcaaagctagaggtggagcaacgagtgtcaagcccaatcagcatcagtttagacggtgagggtggttggcgaggaggagtggtcagaatagcccgagatcagaagtcccctgaagatagcgaaggatgcgcttcacggtagtgagatgcggctcctaaggattgtgcaagtggaggcaaacttattgaacagcgtaggtgatgtcagggcgagtgaacgtcaagtactgaagagcaccaaccagactacattaaagagtaggatcggccaaatgctcgctagacgaagacagcttggattatgtatccatggcggtggtgcgggttttgcaaccagtcatgttggcgcgctccaatatctcaagcgtgtactgacaccgagggaggaacatgccagtggcggaacgagtcacgccaatccctaggaaatgctgaagtggaccaagatctttcatcagaaaaaaattgttgtaatgaagtgatggtccgatgaagcattgctggcgtggatgtagtcagaacaatgtcatcgacgtagagtagtaggtagactctgttgggaatacaggtgtagatgcaa

SEQ ID NO: 19874 - DNA, 377 bp, Zea Mays
tagagagagctggccacgacgaagcgttcacggtgcgtggaaacccgattttggggaaatgcgaaattggaaggctctggtggacgatcagacgcgagagctggtgcacagggtgcgtaataacctagcggacctggttgatcactcaatttatagaagccaacatcagtggcgtccaatttggagaaggcgtgctggcggccggagaaagaagaaggcctctgacgtgagctaccgtggcagtcactggctgaggagctacggcggtcactggtgagctattacggctggtaacggcgtggtgaaagggtcacgacatggtgcaatcacgatgaccagcgtacacctagcgatggccgctcgaccacgtcgccggc

SEQ ID NO: 19875 - DNA, 851 bp, Zea Mays
tctatttcctggattgcgcaccaattaccagaaaaagcagggtcctggcgcaagagatccaggacacagtgcacagtcacccaggacggtgggttattttataaatactacagggattcttttagaaaaacacctcgctgaaggggtacggggcactgtgatccgtccgatcctaaaccagtggcccagattagaaattgtctaaattgaaccggtatgtgatcaggtccgcacatcacagtaccaaaggtcagcaacgctctacgccatgatccaatactagccctcggatggaacgttaacggcccagaccaatccattgaagcggtacgcatacatctaattctaatcgtcggatagaggatcaacggtggacgtgttgtcttcttctttacgaccccaagctacgatggcgccatcgagcagccaccgtgggccccgacagggtcatcaaaccaacgacgcggcgcaagaatccccaccgtacctatcctaagcacttaagcgactaagacacatgaaaacgaaagggctagcatctcaccagtgatcacgccgcagaacccttgattcggaaggatgcaagccacggtgacgacagcaatcctcggactatagaggttcagcccaaattctggttcccgcagatgccacccacgtgagcgggccacacccgacgatctccagaagccgattggcctacggcgtcaacctccaatccgcccgatggtcgccacgccccaaatgtcaccataggcgagtatccacgatcgcgtgcgaatccaggccgagcaccacaccggtgaggaaccaccaagcgtcggagaccccatctcaccacctgattccat

SEQ ID NO: 19876 - DNA, 1294 bp, Zea Mays
gggggggcaaagaaaagaaaagaaacactagcaaaacagcccactagaaacccagcacgccacacaaacaaaatgctaaaacgctaaaactaactagaagctctttgcgggttgaaatcttctttgacgaaattggccacttctcgctcgctcttctcaagaccatgaaagattcttcgatttctttctttccaaatctcccaccaaaagtaaatacagagaccatcgaattccttgcgagcagttttctctacttttagtctgcacttcctccaccatccatagaccgacgagcactggtccaactttggcagataggagaggttgtaccacgagctgagccaactccaacacgattttgtgaatatgcaatcttttgctagatggcccaccgtctccggttctcgcttacaaagcttgcagataggatcattattccaacctcgcttctgaagattattggccgttagaatttttttatggagtagggtccatgcaaagaaccgacatttaggctccgtcttcgccttccaaactggagaaagtttgagcttggcaaaactcccgtggaactgagccaggtaagcactcttggtagagtattcgccatctgatgtccagcgccatctaattttgtctacttcctcaatatttatatggacttcatggatggcttcccaaagtctcacaaattcaattatttcagtttccccagaaaccggagaaataagagaaatccatgtattgtcgagcagggccttttgtaccttagtatattcctaattactaaaggatacaacaatcgactcagatgtttacatttattttacatttcgaattttagtataggaaaatccacactattgagaaggacacatgcataggtccaatgtgtaaccatgtgctcaaaagttccaccacgacatcctaaaagcctagcccgacactacctcttgttttttttcctactcttggatgctctgcttaagcaatactgttgctccttgacattgtcattgtcacgcatagctcggcactaccatgacttgaatatgacacaattgggtagggaaggggtatatctaccactttcctgctccaacagttacttttcgacctaacctcattgtgctaaactagaaagctctcttcctctctcacaccattggaacacctcgagcttctctcaaccttttcacttcaattctttgagagattgagcctttaaactgtctagagagctcaccaacctgttcttcaactccaagaacacttggttcacattcaagctagt

SEQ ID NO: 19877 - DNA, 638 bp, Zea Mays
gtgataatgcggtttagggatggaccctttctatgattgatgccacgcgttgggtgtgggtctatttctccatggtgagggcggaacattcaggtgtgtgcaagcgcatctattagatgtagcccctgagccctcgagtaatccatgtggattgcttggtgtttactttgtgataatgtggtttagggatggaccctttctgcgatggtcgttgcgctctgagcgcgagtcggttgcgattctgtactttgatggtaattggcacttctggtgcgcacgagcgcatctcttagatgcatcccccgagtgatccatgtggatctcttaggaatttgcttggtgatggggcagtttggggatgggcccctcctgcgatggccaccacgcactgagcgtgggtccatggtgctagggccaagcacacccttcgcctcgttcttgttattcacgcatctcccctcaggagaccctttcgggtttcttcaaggggaaggccaccctcctctgacatagtcggcgcgtggaaaggggccatcaagctgcaaacaggttatccaagtgagatccgacctccctctaatagggtcaggtcttgacgagtggtcccgctggggggctcgacccgctaggggcatctc

SEQ ID NO: 19878 - DNA, 1792 bp, Zea Mays
tgggtggcttgacatgacgcgaaatgacccactcaccatgtcatgcgcaggtggtaggatggtgtcataaatcaccatgtccgttactcatgcctttcccctatgtgctctttactgcttcgttcgaggcagcgcaaaccctgcaaaacgtacagtcttctttgcggctcccacggcgggggataccaatgcggcaggttcacatgcgttgtccgtgggggtccaccttctaggtaccgctttgctaccgtgttcctgtgtatagataggatacgaaggcgtttgaggtcggttatgcttaccatgctttctcgcccgagcatctatggcccttcccctcagagagcttctcccgtcctcgtggtgacctcccttccatgatattcttccctgcccccatgggcaccttttccttgtgctccgctacccaagagcgcctcaatgacctcgataggaagggattcctccctcatgagtcggtctcctgttggcgtctagaggagaagggtggtgctccggcgtcacgcgatggcaaggtcgtggtgatggcctccttctatgagtgcggctttgggcttcccttgcacatccttcgtgcgagggttgttcttttattatgggctagagttgcaaaacattaatccaaacatgatcctccacataacgtgcttcatgacgctatctgaggcctacctcggcatgagccccactggaagctatgggcgcttctgtccagcccgcaggcaactctggccaagccaaccaatcctttgtcggttcgttctacatctagctccggggttctcataaattcttttacctctcgatccctctttcatcctccatccatgattacgaaggtgagtggttctatccccggaaccccagagggagcgtgtctccattcaccaaccggatcccgatgagcaagcccaagtggacttatggcacgaagaagaaactcaagccgaagatcaagctagtgctggatatgattgctctacagtgtagacatggtctttccggcgatagattgatccgcacgttcatagagcgacttcttcaaccgcttgcgacccgctagaggaccatgtgacagtacactgggggcaacgactccgaccgtcattcagccgtgaatctatcgaagggggagctcagggtccacgtccttgctatcacagtaggagtcacatcggatttcctggacgagagtgggccactaccgttcaaccaagtgaggttgtgcgaccaggtaagccccctctccccttctacttctcgtgtttaggtctcaccgatgggtgtttttgctagaggctttgcaacgtcaaggtttctcgccccctctccctgaggatgccgctattatggcagaagcaagaagtgaaagagtcggtcgcggcggcacgcaaaacctagcttggatagcgcatctatggccatgttgcgatttctctccacatggtggaactctagcccttcaaacctttcctcgatcatcctgacagctggacaaaaattcttcatgtagttcgtagaacaatctcaatccttgttgatctaacttattaccaccagacaatccccatatatcattagcctcttatcctgagtgaggtagcaatgttgagcccgtgtatcaaggcttcatattctacagcgacatcgagaatttcttcaagtgtttgtacattgttgtctgtggtgcaccacaagctcgggatgtcggtggtcccgcggtgtgtacttcatctctgggccacttgtctcagtgcttgtccggttggtg

SEQ ID NO: 19879 - DNA, 444 bp, Zea Mays
tctcgtttatgtgtgcgtgtacaaaactaacaatgctgccgtgtcgatgaagacccgtcaccatgctcgagcttgccgcgtcgccaggtcccgccgtcgttccctacacccctggtgtcgcgagctcgcctcctccatgccgtcgttctcggtgccccctccctacgtcctcaccgcaaggcatggcgccgccgtttccaagtcgtggtctcaccgtcgacctcgttcagcattgacgccggtctcctccgccatggcttttgccggtcggtcctgctctctctccccgtgtgttgcgcgtcacgccgcgcttaggcaggcgcggtcccagccgttcgccgtcgatgtgccctggtcgccaacccagcgctgcctggttctgcaccgccgcgtccttgtgttctcgccgtggtctagaccgtcgtcgtctgttgccccgatgct

SEQ ID NO: 19880 - DNA, 1620 bp, Zea Mays
atttttattaaattctagggaaaataatgaacctaggaaaattggtttcacaattttaggatttttctgtaattttctacaattgttttagctctggagtaaaaagaaaaagaaaaacttatgaatagtactgggcaacatctggcctagacggcccagtaacacagggaaaacgcgcgcgtgcgcccgcgccctggcggctttgcaaaaagggcctcggggttttatctatctggagacaggttcttctactgttttgatgtgtcgctgacaaatcacagaaaggcccttccccttctatttcttccccgcgaatgcccctgaccacggcgcgcacgcagatcatcccggacgcggtccgtactggccatggccggcaaagactgctcaagctaactatctatgaggcttcactgacctacgacggcctcagaacacacaccaatttgacccgaacaccccgagaacggccggtccacgtgcacggcggaaaccgagcatgggagcacacgttcccgcggattggggtggtctagttcgatttaacgggtcggtgagcataaagagcaagcaaggatgttgaaacaaggaaaccgagggcgagattggacctgaatcgggctgaccacgacgaggtctagctgtgcggagttcctgagtgttttgggggaaatctcaaattgaagctttctggtggaggatttgaggtgcagaagggtgcgctagatgctcaaatacataacgaagctgatggtgcactcaatttatagacttcgggggcggtggctcacaatttgatcacgacgtgctggcgactggagagaacagagatactggagcagggaacgggtggctttcaccgtggagcttcctccggtgagcaccggttgaggggctacggcggttaccggcggctagggacgacgtggtgaaaagctttgagcgtggcacaaccgcagtgaggcacggcaactccggtgacggccatgaggccacgtcgccggtgaaaaggggcagaggacagcgaggccacagtagtgcatacacatccgcgacgagaccttttacctagtgaacgaaatccaaacgcccgtggcacgaatcccggcgaagaggtcgccggcggtgaggttgccgcgctggcggcctgatccttatcaggtcactgtaccatggccagtttcattcagatgaacctgacagtgtaacattaggtcctattttctccagattttctatggtaccaagcccaaacatctatagcaaagttgttctactataaaggatctacaactttgttatattaacttggggcaaattccttgaagttcctgatctgtagagctccaaagatgtctcagtaccactgttaatctgaacttcagactccaatagcctgacagtctgactttgggtgtgattatctccaaaatcttcataacaactgtgcttacactcttaagcaaagttatgctcctataattgggctacaattttgatgtggtgacctagggcaaaaactctatagtttgaaagttacaaggctccaaagttgagccaatatcactgaaatcagacttagacatttgagaaagagtggctcttttgcacataagtcca

SEQ ID NO: 19881 - DNA, 837 bp, Zea Mays
gagcaaaagacgcctaagggtgcagccggatatgcacaacaagtgcacgacacaaagtctttactataagacaaacccgagcaaaagacgcctaagggtgcagccggatatgcacaacaagtgcgcgacacaaagtctttactataaagacaaaacccgagcaaaagccgcctaagggtgcagccggatatgcacaacaagtgcacgatacgaagtctatactataagacatccgagcaaaagccgcctaagggtgcatccggacatacataaatgtgcgacatcaccctaatggcgcaaacgtcaattacgatcaccttaaaggtgcgaagtctttgccatctgacacggtcgaacaaaaaccacctgaggacgcaaccaggtacgcatcataagcgtccaccatcgccgtggaaagcgaggtccccatcccatttcacaacaagcaatttcaccatagtttacatacacacagcgaagggccgccgaccacatcgcacaaataatacagatcacatcttgttgccctccctctctattgtgagccaggggaggccagcgttttcactcactaccacaacacgagagcgagggcagcaaacatgctacattggctcagccttcgaaataaggcctgcctcacaaaaattaaacatcatcatcttgaactcttcgccctcaaaaagattccgcagatccccctccccaatacacgtcccggacgtcgatgacaacaaatctcgttggccaccccgatctagccgaagacgggatcgttccatccccatctgtcgacgcctcccacttcgcgacatctcgccaacattgtgcttcgac

SEQ ID NO: 19882 - DNA, 476 bp, Zea Mays
cctaaactacccctagatacatagatattatccaatcaacctgggacaaaatgagccaactcataacatgatgatctgatggccacactccctttacaaagttggtttgccttgacacactctccatgatggctctacatgtcgtcttcgattccctctagaatctcaatatcaggttttgaggccaaatccgtgaacttttgctagacaattttgaggctcaaccaccaaacttttgtaggtagcacactccatacgcgtcccccacgtcctggacatgtatcccgctagtcctcagacacattggcaacatgattcgcacgacatgtcctcgcacatgctgatgtacctaggtgttatccattgttgccagtcacccaacttcttcagtctctcagtaaagacctagtgctcatccttcaccgatcttaatccataaacacaaacccatatgacctttcaccttcaccattgac

SEQ ID NO: 19883 - DNA, 1855 bp, Zea Mays
caagtaagcaccgggtaggcaccgccgcgcctgaggacgtctagggcccggttgcggtttcattgttttggttatcgcgacttgtgttgcttatcgttgattgctgtctttcttcgtctgcatgcagcacatggaaatggaggggctacaacattcgctaccagcacgctgggacagcaggccctgcattggttctggttcatgggtttggggcaaacaggtgtgtgccatacactgataaacccgtgtttcagtgtttctgtaccatttctgtctccaaatctgctagcaactgcatttcttgatagcaaagttttccttagctaccggtgcactttccgttggactgctaaggtacacaaatgcatctttttcaaaaacaacaacaacaacaacaaccaggtatgcactatgcagaaatgtagaattggccagcgaaagtagttcgttaaggtctcggttggatgcatgtatccacctcaaaactgcatgtgttggagttgattagagtggaacttagtttaatttacacttcaattcacttcgacacgtgggttgaggtaatcacacggccatcaaaacaagccctaacttagtaggtacttgagaactagttcatttgataaaccagctgttgagctttaagagaatatctgtttacctattacatcgaacattttctgattattttgcttcaaagctactttgaacccatatgagactaaagaaacgctaggcccttactaaccacacatatgtctctcttaaatttattagctacctttcttgcagtgatcgacatattccttttttttcagtgaccattggcggaaaaatatgtctgttctagccatggcacacagggtatatgctatagatctaattggttatggctattctgataagcctaacccacgtgagatcgaagagaacttttatacttttgagacatggggagaacagctgaattcattttgtgctgaagttgtccagagtgaagttttcttcatatgcaattcaattggaggtatgccagatgcacacatgatttgacaactattgccaatgctacacagttatgctgttactcagaatagtgttcgactatttatttattattacaagggacctatatggctagttaaatatacaccctctttatattttcgatttcaaaaggttataaacaacatcaagtgattatattagaatcatatttaggacccaccagtcactatggtgaggtccagatctttttttgtttgtcagaacttctggcatgattctctttttattgcacctttactgtcattatctttagtcatatattacattattcatttgataatacatttgaggtactgatgtggcagacttagcatagcaacgctggttacttggtacaatctgttgaaagacacatttccaatattgaaatgctggatgccccagcttggtttttttattttatttgttactgaaatgagtaaaatcatgaatctgattaataaggctgatgtcgttattatttgatatgatttgagtatcttaaacctttgtgttgttcttactatgctgtaggagttgttggtctgcaggcagctgttatggaacctaaaacatgtaagggaattgttttattggatatttcactaaggatgcttcatatcaaaaagcagccatggtttggaaagcctttcatcaaatcttttcaaagtctcctaaggtaacttgtattttgtactcccatcacaattttttggtgctaggtagttgcttgttataatgcatttactggtttctaggaacactattgttgggaagctattttttaatgctgttgctacaccagaat

SEQ ID NO: 19884 - DNA, 759 bp, Zea Mays
atcgacttcagtttcagagttcagtgttattgctcgatctttggtgctatttatctctcgatccgttaagttttgatcaacaatccttatatcaaagttgtagagctatgattgataaacaacttatgttctcgggattgatgtgttgctacatggattcgggagaaaactcaagctcaagttgcggttttaggtgatgaacagtgctctctctatctatcagcttactctctgtctgctcaccggtcgccgccaacgccaccgtcatccaccgcgcgcgctcgcgcgcgaagcacgcaattgctttgtcttatacacgtccttggtggaggtggcaagctctggagtagctcgcgccacgtgaagatcaccagcgacgccatgacctccttatcggcgtttccatcactgtcgtcgtttcctcccttctccagccaaattggacgatcttggcatgtctctctttaaattgagcacaccactcgcttcacctctattttatgcaccacatagaccttttcttgcttctcctcctcaaccgtatccaccacacgccgatgtcttctccgcgggcggccaccggcgccgccgtaggtaggttcatcgtggacatgccaccatggtgctttgcttagtaattagtcactcgttctttgttacttatcttctctggttgctcaccaacctaccggtttgaactctattcttcagggctagccggaacaacgccctcgtcactggagaacgtcgctgcggcac

SEQ ID NO: 19885 - DNA, 776 bp, Zea Mays
aacctcagcccaacgggggagcgccgccgagacaaccccacggcggagctggtcgctgatgcccatcgtccgacgcccccgagcccgaatcccatgattacttgcccgcgcacaaccacccgaccccctgaattcgaagaccgacagcaggtaaccgattgacatgcctagcttcacatccatggcgagtcacgacgaccgaagatgggtgaacacaggtgtgcaattctcgccccaatgaggagtaatttcctcccccgcgtgattctacaccaccggaattagctaacgaccccaacgaaagcgaccataccagaggatttgtggtgatgaggacagtcctcgacgcggggcggagaagcggcgccaatgaacgctggtgagtgattccgccagtccctgaccacggccacggctctggtccgcgtgtaaggtgtcgtagatccctcagtgcgacggtatggagcccaggacggcgtacaagaccacgcgtaccttctcccttctccttttctctctctctctctctcgtcgtcggtgctcttactcgcacgggttggtttcagggtcaagcgcctgcgccaatggcggagtccacggaacttataagcttacacgcccccgtggatctccatgtgctggtgcaccatcccagggccacctgaccgcacgccccagctacgatccgccatcctcggtgttcgttggagaggatagtgctgccaacctaggtccaccagtcatccaacgagcgcgagcgcacaggtggttgacag

SEQ ID NO: 19886 - DNA, 497 bp, Zea Mays
gcgccggtcatgtggaaggccgcgaggcacaccttgtcgtcgtcctcggtccgctgcaggctgaagaacagctcgaagcggtggagccatatggcggggtcgtccgtgccgtcgtactccggtaaacgcagctcgagtactccggggaacgcggcctgcttcccagcctcgacggcatcttggaggcgccgttgatcgagcttgacggtgcagagctcgcgctcgaccgtcgtcatcttggtctcgagcgatgtcagcttgtcgacgacgtcggtgagcagcttctggacgtcgatgaggccggagtccgccattgtcggtcgacgagcaggaatcacgagggttcgtgtcgtgtgcggccgcagagaacgaaaccactggatttggtagggttttggggtatggcacgagcggtctaggcctttgcgtcacgctcacggtttacaaaaccgtttagtccacaaaaatcgctacccgtcggtaacggtttaccgtcg

SEQ ID NO: 19887 - DNA, 469 bp, Zea Mays
gaaggagccgagcagtggaaggcaagatggcctggagagagacagttgtagcatttatcttgaagcttcagtttgaagagacgggaggccttgtcatccaataactgtgaggatctccaaggatctgcaaagtttttacgccactagaactttggttttactacagaccaaccagcgtcatccagtcgcatcgaggcagactcgcgcccattgaattggagcagaccggacgacccagaatcgacgccgcccgccgcaggctgatggaaaagggcactgtttgcattcactgcggcagaggagttgaatttctgctacaagatcgacgggccgtccgctgaccatttcatcttctccgagcaaggaatccgctgtaaaggatctgccaataaagtctgagaagagcgaatcccatctccgattctagaatccgcaggcgacttagcagatctggagacatcgattccca

SEQ ID NO: 19888 - DNA, 277 bp, Zea Mays
cgcgattggtggccattaccgtggcaacctcaccggcgatcactggatgggctaacacgagtcacggcggtgtggttaaagtaccgaggcacgtggcgcaaggctgtgaggtgtctaactccagcgaggggagatccgaagcgaccatgagctaagcggacacggcggtcggaatgaacagtggccagagttcatccactggtgatatttcttactccctctgtgttatccaactgcaccgagcaagaatcactgtggtggcctaaatccacgcgcg

SEQ ID NO: 19889 - DNA, 469 bp, Zea Mays
cgggatgggttacgggttggaagtctgcggggtcgggacggaaacgggaagtactattttccgttcgaattgtcgggatctcgtattaggtcgggatatttccggatttaacccggatacaacccgaagtggtcatctgtcagccatctctcccgccaggcccaaagcggccaagcccaataggcctccacagaccacggctccactgaattgactcggcagtcggacgccgcacgacacggacacagtggacacacatctccagttttccttctccaacctccagcttgggcctcggacacgtaggagcaggacgccattgaccggtcgtcgtcctcgtccattgccagatttcaggtacaccacacgccagtacgcacatgcttacagcctgcatttgcgcagcaagcaacaaagccagcaagcaccccagcagaccagcacacctaggcacctagctggctagctc

SEQ ID NO: 19890 - DNA, 364 bp, Zea Mays
gccgtgccggtgctagccgtgcgcgtccctatatcttatatatcggatccttttgctcctcgactagtcccgacttctcgtgatgtttcgtacgtcgtgtgcttctgaacgtgtgttgatttccccgtgcatcactccctctctattagttgtgtgatgggtttaggactttagggtgcttggtggtctccctgctggctgctgcagttttgtcggtagtaccgtagtagatttgggccatcgaaggcgagattttgtgttcggggtaactgataaatgtaggcgaaggttgaaatggccgtgttatgctgccgagggatgctttgatgtgatcattttgctcaaggacaatgatgctgtggtg

SEQ ID NO: 19891 - DNA, 441 bp, Zea Mays
gtcaggatgcatgggaaggctgccatctgggtaaggagcgtggggagaggcgtgtgcctgtgctcctgaaatggtgcaggcggcgcagtggcacttgtgaatcctgtctgtccgccccaatctagtgcaaccgaatggataaggagatggtggaacttctgtaattttcagcaaaacaaagcaataggtgaaggtgttggctccctgaattggtgcgaaacccacccaaacaatgttttggccaccaccgaaggaaatgcatatcatttccactctgattccagcggcagtattcccattaggagtcatttcttacgattctgatgaaaaacggtactgaacggcccctaagtcccaatagaggaatattagaagtagtcaaaattacagcatatggcaatactaatatcatgtattcttaaaatgaacagaaggttttag

SEQ ID NO: 19892 - DNA, 591 bp, Zea Mays
cgctgctcgagttgttttgacactcaaccatagtcacacaataggtggtgtgatggctatgaagtcatgccatcacttcactatataatccaaattaacaaaacaactttaaccgaactcatcaactagcccattgaattctaaccccttgacatgatgaaatcaatatgacaaaccactaaagaaccataattaaatctctaccctccatgattcattaacttgaacaaatatcctagaagatgatattttctaagacaagacattcatgttaccattcaataggagttcacataaggaatactaatagctctcgtcgccaaagagttagaagcgctaaacattttctttcaataaatcacattccaatttaaatctcaccatacaatgtgactattttataagcatggccacaatcctcacaaacacacatacaagtctaccaacacattgttcactccatttattccacaacctatacttcaacacacaccattcattgcctatatatgcactaaaacatttctcacaacatccgaaactcaaaaccaatccctaccacacaaaattttgatgaagcaccacaattac

SEQ ID NO: 19893 - DNA, 416 bp, Zea Mays
cagattttagttttttaaaacaaaatgttttattttacttggaacaattcaaaataatgtgaatcatttagaaagtgtcatatggctaaagatggtcggtactgaccaaatcattcaacgtactacttggtattgaccggtctagctctaatgttgtcattatcgatatatcgacggacattggagccgaatagggtgatatcagtcactggcttgctcatgtcaccccacccatcaccggtctataaaagcatagttagaattagcctaagcaaaccaaaatgccatgcttgttttgcttggctaaggctagaaagctagccatgtgacaacctttcacacacatatccccctgaaccctatcacacctaaaacctaaaccctaatcttccccacatcatcgcctggctcaaagc

SEQ ID NO: 19894 - DNA, 735 bp, Zea Mays
aaagaacatgggtagtgtgtcgatcaagttaaccgataggtttcgtaaacacgcttgtaatgcttgtatgaacatgataaaatcgatgccttgtcgtcgtagtcttaggaaattttctgaaatgcgctagtgctccactgatgggttgaataaacttgagatgtattacaatagctgtgtcgtgccggtcatctaaaaatggcgaaaggtggtgtgtgatggtaattgggaaatagtcacgtcattagccaactcatgttcggtaggagttgattgtgttaagtgattgttatttatgttgtgtctcgaattgtgataataataggcaagccgacgtatatgctgtctggcgggcggtgtcgttgttctagctagccgactcttagatgactttagttaagcttgtagtcccggtaaattgcttgttgtattctaaatgcgtatggttacggtcgcggatgaaaagtattagtgctcatatgatgtctaatttaaaacgcaaatggttgggtgactatcggggagaatgcgtcgttgattggttgtagtagttttagtgcactaaatgacttgaatgaaaattggtaagttaacttgttggttctcatttgattaatttaactctaacaaatggtaaagcgttagagtaattcaagtctctcgaacgcggcgattcttgaattatataggagctggaatttattgattgctgttttggactgcacgcgctgtttt

SEQ ID NO: 19895 - DNA, 488 bp, Zea Mays
ctctaagatggcgcgaccgaaggggtatcagtggatatcgaccgcccgatctgaaccgacagccaagattatatcatcataaatcaaacgggtacgcactcacgccattggatcgagatcggatggcccaaatcataagccacgaaggggtaccctcctacacccccaaccgtccgatcagaatctgacacacaaggtttaagatatatgttgggatctagtccggaccatgcattggctgatcaacggccaaaactttgtattccaccccaaacagcagaccgacgaagtagggcctcgtggtggcgccctggccggagcacactggtgcgaaggccaaccggtcccccggtgaacaacccaccaccccaaacagcacaacacacagaggagaacgaggcgaacgcgacagtttagggcttaccgtgatcgatgttgtggtgaagtcggtccacgggcagggcggaattgtggcgcatacaggactc

SEQ ID NO: 19896 - DNA, 372 bp, Zea Mays
tgcaccaataaccgacaaacgaaaccaaacgacatatgagaggcacatgattgccatgcatgttacatgctacgacgggccatgtggcttagtttgttgattattaggactacacatatggacaaaacggactcagtactagagccgttattacgactgtacgatggccaccggttctgtacttttattgccgttgcaattcaaatcaaatatttcgcagcgcttcaacgtcctccaatactatagtagttgtggatgtcctcttgccatgatgatgacttgacggcccatgtgtggtttggacatattattagtgtactagatgcgtaagtttgaaccgaatgatactctaaagcatgttatagtcgagat

SEQ ID NO: 19897 - DNA, 1031 bp, Zea Mays
attttcccctttctttattcccttgccaaaaatgacatcaccatatcatcatgggtgacataagcaagctaattcctatcagcacctgcgtaacaagccgagccggatttgaggttgaatcgctcgtaactgccacgcgagacccacgttccagccgtatctccttcgtcgaaccggttgctaaataacactggcaccgaaacaaaccgcagaccgagtctaccgccgagattacctcctagtggttgtaacaaattctgttggagctctcggtgttgagcatatatacgagcccctgagcctcccccccccctcatctgcccgtcttggcaagtcctgctgcttgttctgaagacaccttatccgagcaacaaccacaccgcagagagagctccatgtcgtcgcctagcgttccacgcccgcatgtcattcggagattgtgatgcggtaggaaaaaaagggtggaaagcgccagcaagcagaacggcggaagtcatggcgaggtgccagtaccgtcccgtggtgggcctccgcaccgcagtccgcattccatcgcgaccagggagctcttgctacgaattctggtaagtcactaccatatatggttcgcctcgtcgtcctcatcgtgtagcaccattttatgtggggttttggcctttggtatggttggaggggggcctcgccggtgatgccccgtcgggtagggcgatgcggcatcagccgtggagtctggggaagaagatacaccccccaccgttgatctctctgcgaatgactaggattagatctaggtgtgagtgtgctgctgccgtcgatttggtagcgaacgggcaagatcatgccatcggatacctcttcggaatattaaatcaggatccttgatccatctttggacgatcgtgatcgactcggggttgctttagatctaggccataggtttgtgattgggcagtcctgcgctgtccacggattcataatgcactagatctaatctgaaccatcgggcgccgatccaacggctccgatcctag

SEQ ID NO: 19898 - DNA, 579 bp, Zea Mays
cacattagcaaaaggttcggccgaaggggtatccactatccatccatgtgagccactcgatccagcatctatggtctggattagattttacaattttcacggctggcgtgctgggtggccatcggatccaagattcaaggtccggagtcgatgaacccaagatctaatccccaccgtcaagcgcgagatctagggtcctccttcaacaagacatatctgccacagacataccgatcagcgttcgagatcaggctgaagcgaactagtatgaacttctaatcccagccgcccgcatcaagatcaacggtacaagtgctatcttccccatctaaccctggctgcggcggcgctctgttttgcgcggcgagatctcgccagcacgacgatgaaccaagcctaagtgcacgatatcccagatacgctagaggataaacgaagtagggaccatagcaaatgtggttgaccactccttacaggcgattgagcgacgcaggggtctggcgacggtgtccggcagctccacggtggttctagggcgccgacgacaattcaaggccctccacggcatcccacgctcac

SEQ ID NO: 19899 - DNA, 331 bp, Zea Mays
gcccaggccgctggcgcaactgaagacgtaatgactgcgtacttgcccatcgtcctcgggcaagatgcattgcaatggctacgacacctaccgcgacactgcatcgatgattggagcgacttcagtcggtgctttattgccaactttgaatccctctccgacaagccggtgtagccatgggacctcaaatccatcagacgccgggggggcgaaacaatttggtcgtacctcaagaggtttcagaccatgaggaatcgcatccccgaggtcgctgaggcagcagtgatcgaggacttctactgggggtctaatgactcggccttcatccgag

SEQ ID NO: 19900 - DNA, 876 bp, Zea Mays
ttcagttcatctcgccgtcggcgaccacgcgctcggattcacgcctgacgctacgattcgtgctcaacgaagtactgattgttgctcggggtagtaaatatcatcgtgtggatgaacttgagccactgttcactccggccaccgtgtccgcctagctcacggccgattcggatgaactcaccacagttagccgctcaacgatcgtgcgccacgtgccttggtgtcttaccacatcgcagtagctcatattacacatatctggtgatcgtcggtctgcccgccacggtaaaagccaccaatctcttgcgatagtgctcttttctttctccaaccgccaccgcgccatctcaaattcacgggccaccgctcggggatcctataaattgagcatgctgtcagttccgcaaggtagtcaagcacccaacccatcaactcgtgccttcaattgttcaccagagccccctaattgctcacttccccaaatcagttttccgccgccgtgaaaaggctctcaccgggcccagtgcgcttcaggtccgatcatgtcctcttctctcttgtttcagcacccttatgtgcccctgatgcttctcgacccgaccaattaggctagaaccccttagatcgccgggaacacctcgtgttatccgttgatcgtgcagtcgccgtgagcagagaggttgggtgctcgaaccatgcaattgatcgaggggaaacgtttgttagatgttgaattaggtatcggccaagttagagcatcggccattgtgtgtcctggccggtatagcttcgccggagctcggtctagctcgggccagattcagcccaaccctgttcatagtttctctttttctttttctttttctactaggatta

SEQ ID NO: 19901 - DNA, 538 bp, Zea Mays
tgaggaccgggtttccacaagtgctcgtgggacctccaaccaggggagcttcggcgccgccacatctgcatgcgttcccagcccatgctatctactcaggtagagatcagaagccaccaggaatagcccgtcacttgcctctagtgtgggggcgcccgcattgaatgcgagtaggatatgcatctctccacaccagtggcaggcgatgtgcacaatcctcaaagcacgggtcgcgccaatagctcacgcgttaccgaggcaagaccattgacttgttgcgccgtgcatggcttgccatcatcatgacctctactattcccactgcaagacatacaggtggaggggacgggacaacacagtccatgcatgcctctacacatgccaacgtaccagtctacgacgcagcctatgctagagccttcgcccacacgttaacacgacagggcgaaggtgagtctagccagagaatccacacggtgaccaagagaagatatttgtctgcctatcgcaagggaagactttggtccaccagctctat

SEQ ID NO: 19902 - DNA, 444 bp, Zea Mays
ctttcttctctttttcccccctttctggtgatgatgcatgcacacatgatgagattgctctgccgattgtcagtcctctctccctcagccgcaaccgcaaccccgccaagggacaacgcaaatccttcctcttatcagcttcagtcactactacacctacctgtaccacactgttcgtcctcctcggttcttttgctcctaatccttgccactacccgatctatcccttcacttccgccgcgcacctgcatgtgcctttgtgtttatgtctagattcatcgcaccggacccatcttgtgcgattggattcgattgcttccgtattcctcatcgctatttctgggtcaaactccttgttgcgtctatccaaatcctttcttgcatgtttgactatccctcccgtgccaaacccaaacaaaataataataataaaacccctttcgc

SEQ ID NO: 19903 - DNA, 775 bp, Zea Mays
agtcacatgagaagtccactgaatctaagaagcaaactccatgagcactatgaacaactaaattcatcactcccctacccttcctatctgtccatgcatctatcatgattgtacatcctgtttgctcccatgattccttgtggttcttgaaaccatccaataccttttgcttccttttctacaagaatggtccactcatctcataaggactaggccctctcaaaccattaccaaatttcccaatggactcaagcataagtgcaaagctaggaagggtgactgtgttgtgtgcaatactagcttcatagaaaaactgacatatgtactcacaagccttatcctttctctcttctcttttctgagttgactatgttgtttgaaccttgttgctaaggttaaattcctttatgcaacatttgaatagattcttcaatagtaggaggtttataaaaatttgtcaatagtgccaccacgtaccactgttgtacaactaaggttactagaactttttgttggttttttgcttcaccacaaggacttcattaccaagatcaatatcatcttgctcacaactttcatcttctgagctgtctaggttaatttcatctctctctttccttttctttttgctttatggtccttttcttctgtcttctttgtaagcaaagcaatcgtctcttctttcgcatcacttggaaccttcaaacactttgtaacattattccctttaataccagcaaggtggcacttaattcttgtaatcctagctttccat

SEQ ID NO: 19904 - DNA, 376 bp, Zea Mays
tggaagcgctcagaaagaaagtcttcgacaagaatgaaaagttcgcaggaaagtggatcagagagctgccgtatgttgtttggagcctgagaactcaacctagtcgagctctgcatggaaacacacctttctttatggtctatggttcggaagcagtgctacctgctgatctcaaatttggggcaccaaggttaatctttgaaaacatagcagaagctgaggctactaggctggaggatgtcaatgtactagaagaagaacgattgaatacggtgattcagtcagcctgatatcagcaaactctgaggcactatcatgacaaggccatacggcatcgatccttcgcagtgggagacctcgtcctccgccgaattct

SEQ ID NO: 19905 - DNA, 386 bp, Zea Mays
ggggggtaactgactgcttgccatgacctttacgacgtggagaatgcatggctgcatggcacgaccgaatgaaacagcgagctccggtgatatcaacttggccgaccgcgcgggcaagtgggtatgacggccggactagttagcgaccgagttcaccccaccactgatcttttcacccttttcgagtgttatccattccttactgagcatgaatctcccaggcgaaactcggatcccagcgcgagtttaacggcgacgggtgcactgcaccggcgatcttcttcagaccactgttcattctgaatctcccttcgaagtcgcctgacaacgcatgtttgagccacttttactcccggctctaggcagtaatccacctaccttccttt

SEQ ID NO: 19906 - DNA, 466 bp, Zea Mays
agcctgtagggcgaagacgtggtctccatcgatgaggtccttcgaagtgggctcgtccacgtcggggacagctgacgggactgtccgtggggacccatgttttatttcttgcggggtcatggcctccgaaccatatagaaggcggaaaggggtgaacccagtcgccctgcacttagtcgtgtttaatgcccagaccgcttcaggtaacaaatcggcccacttgccctttttatcgtcgaggagcatcttcttgacagttgtgaaaattttgccatttgcgcgttccacaactccgttggattgcgggtggtatgctgaggcgaaggcaagcttggtgccaatggagaagcagaaatccttgaagtcttggctgtcaaattgcttgctattgtcaactgtgagttcggacgggactccgaagcggcaaacaatgttttgccagaagaatttctgggcagtcttcgat

SEQ ID NO: 19907 - DNA, 645 bp, Zea Mays
ctgatgcatatttgacttggatacatttctgctcacagaagtcgaagaaatctgcgctggtgaagttcgatcccaggtctgtgatgacactgttgggtatcctgaatctgaagatgattttctggatgaactccactgccttggctgagctcagggttgcgatcggacagtactctatccactttataaatttatcgaaagccaccatcacatgggtgtaccctccctgagcttttttgaatggcccgatcatgtatagcccccagcatgcgaagggccaggtgaccggaatagtctatagtcgttgtgctagcaagtgctgctacttagccaggaattgacatgcttcacatctttagactaggtcggttgcatctttcttcgttgttggccaatagaagcctactctgaaggccttccacgcaagagtccttaatgttgcatgtactccacattgccccacatgaatttcttctagcaaatgcttcccgatacctaaatcgatgcatttcatgaagactactatggcccctctcttgtacagtacttctcctatgattgcgtagtgggctgactgccatgcaatacgctcgacagtgaccttattgtatggttcctcttcgttcttgatgtatctgataattt

SEQ ID NO: 19908 - DNA, 372 bp, Zea Mays
atcatctggtaccatgtcttcaagagtctgatcaaagttcgccagagataattcttgtagaccgatgagggcagataaagctggagaaggaacaccactgctttccccgctggctacgtagcgtcggctgtttttccgaattagagggatttcatcctccccttcctcatcttcatcaacaacgcagacagtacacccattggggtcagcgtcatccagttcacacccattggggttaacagcaggcaggttgcacccattgggatcagcttcagcaaatgcagacactggcacttcctcagcagcaggaacagaaggaccagcatcctgatccaaactagacactcgacgaagacgtctcttcttctgttt

SEQ ID NO: 19909 - DNA, 547 bp, Zea Mays
accccacgtgcagcgtcggtctttataggcctgagaacaccttgagaaaccaaaggccccatagtaaaaacatcgcatcccccaatggtcacatcccgcagcaatcacattacgaaaaccccctcgggtcacatcaacctgtgatcgaaggcagcgttcgaccatcccctgtgaaaagatttggaaccaggtcacttaattgaactgatccctcggggggctagtgttggagaggaggccgaacttgaccttgatatatctaacccgactacgactagacatttcttacacaggagcatcacacgaaggatacttcagactcgacatgcagtagtctctgcttgactattttccataggggagtgaaggcgtaggcccgcggcaaatgagaagggggctcgttgcagcctcacgtagaccctgaaggccttccctctaaacggcgaatgcctagtccaagtgaaggccaggacatgacttcgcagaatcaagggtgcatcacacgagctgaggccttgataggctatggaggagcctaggactccgc

SEQ ID NO: 19910 - DNA, 443 bp, Zea Mays
catggagtcgttcgagttattagacaaagccacgggtgacgctggagcgggggagcgatcatagacggaggagaactcctccgactactataagtccctaaagtcctacgaaggagggcttgggggcgcttgcgcttcccatcgactgggctacaccccttcttgcctctttttcctccggccatcactctttcagaaggagaagaagcaaggaagaagaaagcgattgaatgggaataggtggggagagcaaccaaggcgagtgagctatttaaaggggccagtaggtgactgttcacttcctacccgctcaccgaacagtcacaggaattcaatagcatttcaagcctccagcaaatgagtcaggcacctgctaccgtttctcataacacgacaccatatggaatcaaagtcaaccgctcagacggagtattacacctccc

SEQ ID NO: 19911 - DNA, 613 bp, Zea Mays
gccttcaggtttctgaggacggtaatgccttgatttcttttcgaaatccagcagaataatttattgagatacggctatctgaatttccccttgttgtccaattgccgtatcagggatgttgagtcaaaatcagaagtgcggtattgaatttgtagctcataaatgttcatgtgtatctgcattttagctttggttagttttgttgcaagggtaggagcatagtgattcatttcatgtgttttgtacttttgtttagaataaactgcatttatagtaatagtgttcagtcaagtcatctagttgatcctagtcaccatgggactgaccaggcgactagtcgctattagtcgtcgaagattggccctagtcgtcctatacatatcaagactaacatacaaatcaggcatgacggacggtagctctagggtggtggccggtgggtgcatgtagggttgcaagttgggctgaaaaacatgagtccaagtggcctaagcccatgtcctaagctgcccagcaattccattatgtttctggtcgatgaccagaaaattaattagcctaatcgagtcatagcccctaatcgagtccagaatactggctaggacgattaatc

SEQ ID NO: 19912 - DNA, 614 bp, Zea Mays
gctatctgcgctaggacccctccaacctcgcttagcgtgttcaacgcccgagtgaagtcagggtataggttctgggtgaggagcaggttctcccgccgaagcctagcatcttgttatgcttgctcttgctcgcgctcctgtgcttggcgacgatcgcagcggtgggagttgcggcattctcagtgcattattttgttaggggtttcccccatttccgaagcttcgtcccaagagacgggctaagctgggtcccgttctccagccttgtggtgttgtcaaacgtttcggcgcatgtttctccgtcatcgtgcgtcgcgctggggaggctcttctcccagcacagtgggtttgtcgtcagagatgggcgacaactccagtctcccctgaatgaagaggacgtctgggaagaaaggagtaggtgtagtggtgctctccctcccattctcctttgagggcggaggaatcggggtggccgtctgcaacgcttctctgcccggttcggagtgttcacctccttttgttgggtgatccgtgtccactccttagtggacgaggcggccaacaaagttcatcgagttggggaggccatggttgaccatccatctaccctctgg

SEQ ID NO: 19913 - DNA, 495 bp, Zea Mays
gccgacgaccagtaggaatttgaagactataagaagctggataaggaggcagagaggtggtagctctcacacttcaggatggatcatcaacagaatgtcgttcgggtgagggaagcagagctcgtttccctgacggcatcgctgcagctcccccaatgtgagtgaaatcgtgccatcccgcgacatccaatcacttaaataatattgtgatgacacattcaaactccaaagagactctttggataagtttgtcgtgcatacaaaaattcctatgtcttattttccatcgcataaaattaggcactgaaatagctgtgccaaacacatcagcaacaaatgagttttctcaaccctagccatcttatggtatgtcgatgaacttttacaccggacgactacaacctccaccaatttgggataaacccacgaacctgcgcacgaccggaccgtccggacctgagctcgaactgtttggcctagtttcgattggccccg

SEQ ID NO: 19914 - DNA, 280 bp, Zea Mays
gagagacgccgtaccattattacccaaccgggtgcagcggcatcgtatctatcggttgtgtttgtttgtgtgcgcgtgtcaagggtggtggtggtggtgatcaagacgatccaataattaatagccccgtcggagaggtagtgcgtgatgttgagtgagacggagaccattaatacccgcgtactcatccattgggtcgattgggagtttcgttctcagctggacgctatcgtggtgttgagtgagacggagaccattaataaagcaattgtaaccgccc

SEQ ID NO: 19915 - DNA, 616 bp, Zea Mays
aggagcggaggcgcgccagatagagcccggacatgcgtcaacaccagacccttgcctaggccatggcacttcctgccccgagaccttgttacgggtgattcggaccttacttggggttcccgagccatattcgggggtccgggttgtgcgcacaggggtcatgtgccttctttgaggaggtctgggcccgatgacgctgtctccaagaacaccacctcaactgtccatgagatatccttagggctgttctccgcgtggctagggatagctgcaaaggcatcgtgtcttcatactgtagtgaggggtacccctgatccagggtgccgacagtggcccctgggcccgcctcaggggagggtacgagcctgcaggtggggccaaagttttattggcggctgccatgctgcttcagctcgcccgctattgacccatgacttccgtatttgactgtttcactgggtcatgcgcaaggcgcctcgatactgccgcattagctttgaaaatttaacctccccgtcttctgcggctgtcccgaggaggcgcggaattggcgcgagcggcggtttgactcccctgcgccaagggactatcacccgcggtggatgactcatgggtt

SEQ ID NO: 19916 - DNA, 458 bp, Zea Mays
catagcgcgtttagccgctacgtggtaaagtgcccgaacacgcggtgcacggcagtgatcgaccaacagcggcgagctcttatcccgatcgtccgatgagcaagggggtacgacgaggttagccgcggtcggactcaagctgatccaggcgccaagatctttacccgcccacagttatccacaatccacagcgcacgaatctcgacgatcatcgtgaatcacagcgcgacgatcatcggcggtgaggtttacggaacctgatctgatcggtaccatgagagtcatgttcagaacgccagacatatgatgtttagggtagattatctctaaactttctttggcaacatcatcatccctctgcatcaaagttgtagttctatcaaccatctccatctttgccacagcattcctagtcgaattcccactggttttagcttaaatctgatctcaagttcggc

SEQ ID NO: 19917 - DNA, 639 bp, Zea Mays
ctcggctttgaccaactgcctcggcaacaactccccacgaatcctataggaagccactccgacaactgtactaacccctccctgtatgactgcatgccccgaggcaggcttgaccagggccttgggaggaaccttcgtctcgcccgagcctggcctcggcctacataacatcgaccaaatgatgccaccaactcctccgcgaaggctgcgaacaacaagatggctataggaccgacatcaagtctgctttacaccatacggggagaattaccaagcgcttttcgccacacttatcaccatgtaaacaactatgacttgaaaagcacctccatcagacaggctcgggtacgcatccaagccctagatcctggcctcggctctttgctcgatcaagatgcaaatacagggaccagacatcctcctcctggttcaagtcaatagatagtacgaaggccatactgtcgaccatatagactacagaggctcagactcgtctcctctcccatacacgacaaaccggggtgctcctaggaaccctccttgaggctataaaagggggagtccagggcttcattcggtgaggggaacacttcaccagtttccaccctccacagtgatattggcactcgcctcaatcac

SEQ ID NO: 19918 - DNA, 1424 bp, Zea Mays
ctggttaagacatggaaaacacgaatgtcccaatggcaactcgttcacagatgaagcgaagatcaatctcaacatgcttcgtgtgctggtgttagaccgggttgacggagagatagacaacactaatgttatcgcagtgacagtactcttggtcagcatgctgtgaagctcttgaagaagataatggagccacctcgcctcaaccatggcataggcgacggtgtagtactccacctcggcgatagagcgggagactacaagttgacgcttgaagggccatgagatgaggatatccccaaggaacgcaacatagcaggagatagacaggtggttgtcggacacccagccccgtccatgtaaacaaccaactcatgtgtcgacgcacagcgaaggaagcccataatcgacattaccatggacatactagaggatccgctagacagtgctcaggtgtggctcccgggatcatgcatgtgaagacagatctactggacaacatatgcaatatcgattctggtgaaggtgagggactaaagggcgtcagcgaggctctagtaggtagttgagtcgctgacaggggcgtcgtcaccggagacattggcctgtgtgtccactggagtcgcatagggctcacaggccagcatgctagagcactctagaatatccagggtatactgacactgctaaagaaacatgagggcaatgcttggcagcaatcccaaaaatatggtgatcatccgatgcaggaggctcgaagaggaggcagtgagcacaatgttatcaacgtagagaagaaggtaaaaagtgtcactgccacattggtagatgaacagaaaggtggagagcaaataagtggcaaacatgttgtaccaagctctggagggtctacttcagaccatagaaagacttgttaagcttgcagaccaggtaagggtgagtagagtcaacaaatctgataggctgactacaatagattgtcccaataagtgtcccatggaggaatgtattcctaacgtctagctgatagggtcaaggagagaactaaacagaaggtagcaggcttcaccaccgaactgaatgcctcatcatagtcaacccaagaatgttaagtgaagccctagagaacccagctagccttataccggtccagagaaccatccgtgtaccacttatgtgtccagacccacttgccagtcaccatattgccacctagatatggggcaccaagtcccaggtgtggttggcaagtagagcctaatactcttcctccgttgtatgacaccattgaggatcggcaagggcactacgaatggaagaccgcatgggggtgactggtgaaaaggatgtcctagagaggacaagacgatctatagggtgaagaaccccaatgacctatcgagtcaccattgggtgaatgtaacaag

SEQ ID NO: 19919 - DNA, 510 bp, Zea Mays
tagacatttgaaagttacctggcccggtaggctattagcatgtaccttccttcatcccatatgctatgggccaaactgcctacgtgaacaagatgcacacgaaagctacaagtcaggaatcccagagcatcgggttagcgcagatgagcattaacgattctggtcgtcgtttaacggttggctattatttcggctgcaaattaaaccttataccgcgtctgatgatgtccatgaaatagttgagtagagctgcctttacggcaatccgaagctatgttggatgcaactagcctttcagcacgtacatctgcagcatgtgtgcatgacctcccttctggctgcttttaagctttcgcgtatcgataggttttttttaaaaaaaatattaaaaaacataaattgatctgggttgcgagtccccatcaatttagttggcaacagaatgaaataagaaccaatctaaagagagcatagtcttatgtcatggagattgttgcattaggattttcc

SEQ ID NO: 19920 - DNA, 559 bp, Zea Mays
ctagctgttctttttattggtatatgttcgtcagttcaatacttactgctctatatcactaattgcagcggtgggaggcgtggatggttgaattggtgagcgtggcgtgcctgtccatcgcctgcaagctggatgaggtcaacatcccatcactccaccatctccagatggaagaggtgatgagccactcgttcctgccggcgacggtccgagacatggagctgacgctgctcaaggcgctccaatggcgcctcgcctgcgtcacgccctactctttcctccttccccttcttaatactcctcctcacacagcagcttggactagccgctgcactcgtctcctcatccgctccctcgcaggtatgtaaagtaatctgcagcttcagctagcattaattaattaattccatctaattgcaattaaattagtgcgtgcagagcccttgttcatccagtttgatgcctccgttatagcctcctctgctcttcggtgtgtggcgctgcaggatcatcgacaccatcatcacaacactactactactgattatggtagctgcat

SEQ ID NO: 19921 - DNA, 477 bp, Zea Mays
ccggggctggggccgtctgctcacactgctcgtcgctcgccgggcagccaggaagagagaggaaaaggaatagaagggcgcagggaggaagaaacgctggggaccgtcggatcggtggcctgtgttgaggatgagtggatgtcgatgcgtgctgggaggcgtggatccggtattggacggctccgattagaagtagaaaaactattcgggctcgtacgtctgggtcgtcgatcggggatcgaatggctgaggttaactcgcgatgtgggtggttttggtgcgcagatgccggatctgacggtcagggctgcgcgcggggttggcgtgcgccaaatctaatctgtgctcttagattttaatcgaacgacccgtgttctgtgataccccttcaccgtgccacaattgctaaagagcccctctgttatttattaaccaacccgccatccattggtgctgtgcgctgtgtcttagaattat

SEQ ID NO: 19922 - DNA, 845 bp, Zea Mays
aggtgccctcaccccataacggtggtctccgcctcgcccaagctcgcctcgggtcagggaaacaaactcagggcaagactaagccctaaaccctaaagtcaaccggggacaacatcattcaatacgcatacctactccacgaagggctgcaggtgtacaagagcgacaagaccggagtcctgtcaaagattcaccaactatgattacgcatgcgaccactgttcctgcacgccgtctgccgactttcgatgggacgtacaatacgaccggagcacaggcaagccctcgagcgcaaactccgcctcgcctgaagtaaaactcgaccttgggacaaactctggctcgcccgagcccggtctcgtctacccactccctacaaatcccacagaaggccactccttcaactgtggcacacgtctttgaatccagaacgggttcggttgtgacctcgggcggacttccgcctcgcccaagcccggctctgacttcgatatccgcaacgggaaggcgcctaatgtcatcagacactgcagagctaacacactacttaaggggctttttcctataattagtactgtgtcaaccactatggtatggacaaccccctcgccagggggctcggatgcgtgaccgagccctcggccctggcctcatctctcagcagaaatcgagcaaacacaagtcaacaacaagtacgaaaccatactttagactataccgtctacaggaccacggtgacacctcctcaaagtgtgcggccaactccagtactctaggcagccgctcctgaggctataaatagggtagcctacgacttcaggaggacagacgaacacttcatagtt

SEQ ID NO: 19923 - DNA, 565 bp, Zea Mays
tgctatttcaccatgtgactttatgaacttgtggtagtagcccgcaagtcctaggaacccgcgtagtgtttggaccgatcgtggtagcggccaatcgaccactgcttgaattttggcagcgtccatggccatgcctttcgtcgagatgaggtggccaaggaaggagaccgacgttgcgtcgaaggagcacttggatcttttgagcaccaaggagtggtccctgagcgcggtgaagatggccatcaggtgatgcagatggtcggaccaggtgctgctgtagacatggacatcgtcgaagaagaccaagatgaagcgccgaaggaatggatgaagtaccatgttcatgagcgcctggaatgttgtcggcgcgttggagaggccgaacggcattaccaggaactcatacaggccttcgtgtgttcagaacgtcgtcttgtggatgtcgtcggtggccatgcgcacttggtgatagccagagcggaggtcgagcttggtgaagaacttggctccgcaaagttcatcaagcagctcgtcgatgactggaatggggaaggggtccttgatg

SEQ ID NO: 19924 - DNA, 677 bp, Zea Mays
cagtaaccggccttgggccaaaagccaacagcaactagatcaccaacaacaataagtccacaaataacaagaattaggcacagttgggtgaaggcccccttgcactcaagaaaagcctcaacaaccagaaggaagggggaaggtaggtaaatgccgaggcagtgggagaggatttggctaagagcgaaaccatattgcgcttccacggtgaagacatcaggcattcaaccaatgaattccctatcacaaaagaggccaaggaaagaatggtgagatctatcccagaaagattgccactccctccaccaccacaaaacatgctgcccacacataaactcccccctttgcctcctaaagacgaatatggttaaccctagctgtcgatccaaggaataataaacatgatctatagaggatctaatgcagacttcgacaataaaaggtggcaaaaaggatactatcaaagggtgaaccatgtcacattcactagacttgttgtacaaaccaaatggttgcacatcccactaacattggatataagggacgtagatcatcgaagtgctccacacacagatgtcatggtaataaactgcaacatagctgactatgagctacataagccctcatgataatggaagccaggtcaacaacattttctagcatgccttcaactgcat

SEQ ID NO: 19925 - DNA, 432 bp, Zea Mays
gtggggttggagcgccgccggaggacggcggtggcgaccactggctggtcttggtcgagcgttgctccggtggcctcgccgtcgtgcggtgcttgctgtttgccgtgacccagcgcggaggtaggagacgcgccctgggccgttggatcgggcgtgttcggacaggattagaagtagtcgtaccctttcgcttggacgagtatcgatcgtcgatttgatatcgtgcgggtgagatgagataggactataataaaatcggggcctttggtctccgatcctgtggatctgggcaagttttaatctgggccgttgatggatcatcctgtggccctcactgcataccagttcgggttgatcggatttaatctgggacgtccgtttctaatctgacggcccatatcaatacataccccttcgccctagcactttagc

SEQ ID NO: 19926 - DNA, 449 bp, Zea Mays
gtttgattacgggtactgagttccttgccttgttcgatttcctgtgtcccgactagtctctcccgactgattctgcgtagaagtgtgttttctgtccgacttagttcatccgactgaacccgtccgacttagctcatctgacttatcctgtctgacttaggttgtttgacttagcattactcccttcgatctaaaaaatctatttccctcgtactggcacttgtggcaggtctgcagtggacacgtctatacacacccgttgtctgacagtttctggtaggcaaaccctaacattgttctttcaccgcaactctcccttatgaaattctcgtgccttggtgagtcttcgttcgatttcacgctctcatgtggtctcatggtgcccaggaagaagcaatggggcattgctgtcatcatcccctattgatcccaacaaccagctccccttc

SEQ ID NO: 19927 - DNA, 474 bp, Zea Mays
ccggacacagattaaaacttcttccatacgtgttgtactgcgggttgataagcaagaaacacagggtctcatatgtaaagattctcgaccgaaggggtagggtcaagcctcagacgtccgattgaatgctagcggcccagattagattgttatcttcacaaaccagtatgaaatgttacccctcagatcggagatcagcagccacgatttaaaacaccagcgatctaaccacgaccctccatcaaagatctacggttaggatttaaacacctcgctatcagatctatgccgcacgccaccgaatcgacggcccaacatccatccttcaacctatctcctgagacctaatctccaccgttctttttaggatcaaccgctgacgagctcctgccaccccgagctccgacccggacagcgccgccgagttcccatggcggtcgacgctggcgagataccccatcaacccaattcgtg

SEQ ID NO: 19928 - DNA, 481 bp, Zea Mays
catgcgccaaaagagctagcagcagcacctcttttttgagaggtcacctctgtatggtaagctcgcaccatgcctggccagggccggctgtgctatacacgtccgggcggcgactcctgtgtgggagcacccagacccaggtgaaagtgcggcgtgcgctgtaacgtgaaacctgcagctgctacagttttacttttacatcgtcaagtggtgacagacaggccgaaaaggtagggggagctcgtgcccctgaacaccagttgcggataagcttcaaaagctgtgcatccacgcgcgagaagatgaggcgaccgatcgatgtgcttccttcctatacgtggaaaccatgagatataggggcacagtgtacacgcacagcctttggtgtgtcgcagtcaggcagaggacagggcttagattgtcggctctatatctatcatctatatctatccttcagttttatctaaaagatttcattctc

SEQ ID NO: 19929 - DNA, 291 bp, Zea Mays
gaaccggagagtttcaattggaaatttggaattgaaactagaatactaaattactcatgctggagatggacaaatggaggatgaaccgaatcaaccgccagggaagatgagcagatgaggagagtccgccgacatggacagagaagccagtcaccagggaaggcagatgctacgttagggttaagggttttcaggggctgccgtttcatatgccctgtagttgggccaaaagtcgggagcccgtagcccaattagaaagtaaatggtcggctggtcgctggtcgtttgctc

SEQ ID NO: 19930 - DNA, 796 bp, Zea Mays
ggcgcacagctgaggtacgaggaagcaagtcaggtagcaacggacgcggtcggtggcatcaggaccgtggcgtcgttctgcgccgagagtaaggtgatggacgcctacgagaacaagtgcgagtcgccgaggaggcaagggatgaaggaaggcgtcgttggtggcttggggttcggcttctcgttcgtcgtcttctacctgacgtacgctctgtgcttctacgttggcgcaaggttcgtccaccaagggacagcaacgttcccagaagtgtttagggtgagaagacgaatcgtccttatcatcatatagtacagttcgtcagtcagtcagtacgtgcatgcagcatatttatccagaacagtggcttctcaggttttcttcgtgctggctttggccacaagtggggtctcgcagacgagtgcggctggggcagacagtgccaaggccaacgactcggccgtctccatctttgcaatccttgaccgtgaatccaagatcgactacagcagcgaggagggcgtgaccatcgcgagcgtgaggggcgacgtcgacttccagaaagtctgcttcaagtacccgttgagaccgaacgtccagatcttcaaggatttttcactgaggattccttccggaaaggttgctcctttttttttaataatttggacacatttcttccacctgaccgacgcagagcttgatctcaataatgccattatatatataatatattatcctcgctgcagactgtcgcgctggtcggagagagtggaagcggcaagtcgacggtgatcgccct

SEQ ID NO: 19931 - DNA, 532 bp, Zea Mays
gttcagagtagtcaggcatggcatatatgttataagctgccgattttcgctgtaagaaatattaccatataagctgccgtttttctctgggagtatagcaagcaaaagatcaatcttttgccctcttactagcatgttctgatagaaccgagtaagctcatcttcaacttgttcaggttgagcacggtatattggaagtgtcaagccatccattctctggaaccatagcgaaatggtaaagtgggagtcatgcaagaatattatttgacgataaggcaatcaaaggcacaacgaaaatgtagattaccactccactagtacgacaccatgtaaccagatcagagcaaaatttatcaacaacactatcattcaaaccacgacaaaagttaacgcaggcccagttgcccacccttgcaccatctactactagctgcagataaagaaaaaaaattagtaacatatatttaccatcacaaattccattattccattgcaaaggaatagactacctattgggctaatgacagaagag

SEQ ID NO: 19932 - DNA, 324 bp, Zea Mays
aaacgaactagtgaaagggtttggatgattgtcggccgcaggatcacacaccaacggtgtggattagatcgggcctccgaggtcccgtcattgcactacgaccgttggatcaagtatccacagtccacggttcgtgacaccctattctccccatagtcgttagatgaagaaactgtggatcggatttaacaacacccatagtcgactttcacccgtcagattccagatccatggtccacatctgatttcgcgaaaagtcatgccctggcctaatcacgaccgtccgttacttgatctacgatgccgaacccatcttcatcttac

SEQ ID NO: 19933 - DNA, 598 bp, Zea Mays
cccgagtggactacaggttctaattaggaaaacgcaggggctctttagtgaattggccatcgcgaaggggtatgctcaaatcctagccgtccgatcaaaaacaactggccccgattagatctggcgcatgccaaacctgcgagtaatccaaaccgtctgatcaaagatccgcgacccggataaaatcttaccatggtccctttgcgtccatccgatcaggatccagtggcgcagggacatctgaccgaaacactactggtgttacgatcctaaccgtcggtcgctcatcccacggccaaaagcccttcttcctctacctaccgagctgaccacggcggcgctgctcccccgcggtagagggcacgccggtgaaccccccactggtgattccacgcgcgcaactccgattatccaggtgttaagcgaaggaaatgaccgcgtgaatacggaggaagggttccttaccggggtcactcagtgacgagagccagccacagcaagaagcggacccgcaacggcggtgcgatatcgacgacgaattcccgtggccacaccctgggcttctcggtctgatacaccgtagcacgattcaccggcc

SEQ ID NO: 19934 - DNA, 466 bp, Zea Mays
aaggtatggctgatgccacactaagccataatggctcatccgtcgctgctgtccggcaaaccatcacattctatgacgcgggacgtcgagcaactcctgacttggggcactccggtcccatgtgacaaaatcccccattcccattcctatcgtgcaagccatcacacactccggacgttgggcccacattgcagactacgggcgcccacgtgacaaccacccttagttttgcacacaccggacccacgtctgctcgcgcaaaaagttgcctcaatttgacactggcaggagcatttggccacgattgctttctttgaagaaggaaggcttataagctggtagaagctatgttggctggccggtatggtcataaaaatgtgtaagccgtgacgacgacataggtcgcgtgggccgtgtttctttggtgcggcctaagtagctgccaggaggccgcacgcttcttacc

SEQ ID NO: 19935 - DNA, 897 bp, Zea Mays
cttgcactgtgttcgtttcgaacatgtgttacgtatccttggatttccagctaccctttcagcattctttccttccattgaacagttcaaccatttacaattcttccgctccctatatttcttcaacggaaatcctacctcgtatgcatattgactataaaaattatacgcctcgtccacgttactaaatgtcataccgactttaggtatcaatcttatatcaatattgtccggctgcgcacagaaatttaacatttacgattcaatagcgactaaatttaacgtaatatgggagaacttacgtggctttgaagaatatgaggtgtgtcttgttcatgcggcccaatatgtctcatagggatgtgcttctctgcgccgaccacttctgctgtttttgtgtgctcttcgatatgtccaggtgccctcaatgccgccggaggagtaacagagacaccctctgtgtatgaggcgattgcagacgctacaggatgcatgtccattgaaacagacgtacctgctgacttatgcacagatgttacaggcagaatgtcatcgccagcgccggtggtggacatcttctcgccgcccatcgccggtcggacctctcacttccgccaccgctaaccgccgccaatatttcagatggacgagcgaacgtggacgcggctgtaaagctatatatatatatatggatacggacggtgagatagtttgagtgttgccacctctctgttcgtgtgggctcgtcagctcgatgttggccggggacagacggacagtgaggcaaaacgtaggatctgacgacgggacttcacataaagcaggtctagctagtgcctacaatacgctgttacgccctacgtactcgtacccggcacagcacaggggactatagta

SEQ ID NO: 19936 - DNA, 441 bp, Zea Mays
aaaattaattgtcaaatccatgccataactcatccaaatcccgaagccatcatcaaggtggggatctttatatgggccatgaggagccaaggactggaaccaaatgcaagatgcttttgcaacattcatgagttgtcttatgagatgaaggctactggaaaggagcaatatcacaacaactttggttgttacagtttcatgcctcggtctgaagtgagctacccagttcccacattttggcagaggtgaccgggttcatggatgcaggaatggttttacgtgaaaaatgatccaagtgcaagggaggatgtgagagggattatccaacgccctatatggtctcgcttcggcataaggaggtcagccactgtccttgggaatgaaatacaaacatgccagacggctttcaatacagtgtgtacttacataggcacaagagat

SEQ ID NO: 19937 - DNA, 513 bp, Zea Mays
cggggggcaaagcagcccgacttccaccaacgcctctaggtccttgtcggtgacagaggaaatgggccatgggtcgcggggagggagaacgtttggcttctcggccattgaaactacaggagaaagcgagaacgaggcgaggagctctttgcacgaagaaggcagacgacatgtaaggtaggaaagcgaaaacatcaaggtaaaaatctgaagcatccctctcgggcgaatttataggaacggacggagtcgccgagacgtgggtcgtgccattccaagccaaaacgaaccaggcaatagttgtttcaaaccccacgcgcacgcgcgccgcaaacggtcagctggcaggccgagatgtcccatcgcattaaatgaccgtgccccctccgggtgaaagcgcagcgagagttgtttcgcattacacctcaaaaggtacgccatcctcgctctgcctccccttccttttttcatcccctcacagacaatacgaagaaggcatcttctacctcgagc

SEQ ID NO: 19938 - DNA, 545 bp, Zea Mays
acaaagcaatggagacccgaaagcctgagggtacccgcccaaagcatcctcgccaagttagccgcctgactgcgccttttgaggaaaagaagaagaagaagaggcggcttcggcgactgtcatgtttggaataggatgtcggtccttctgctccggtttgtgatgaagtaacagcagcggtccttcctgaggttgatcccaatggtggcgtccatgttgaagttgatcccaatgggtgtgaccgtgctgaagttgatcccaatgggtgtaaccgtgctgaagttgatcccaatgggtgtaaccgtactgaagttgaacccaatgggtgtaaccgtgcaccggctgttgtccgtatttttgatgaggacaaagaagagaaagaagaagttacgctgattcataagaatagccggcattacataggtagtgggggggatagtgatattccttctccagctctgtctgctcttgtcagccttcaagaactgtcaataacggattttgatcaggcccttgaggaggtcgtccctaaggatatgctatcg

SEQ ID NO: 19939 - DNA, 407 bp, Zea Mays
gcgggcatcgaggatctgatccaggcgccggaggcgatcggcggtagagtccagcaccgggagggcatcggagatcgacactggcagctccgacactgggatggggctcatccctagtggcactagtgtcgtgcttgcctcgtcggcccactcggcaatgcgctagaccccagcgcggtgttctgcttggagatcttcgagggcctttctggtggcctccattgcctggggacccagcgtcgcctgcaccgcattgaactggcggatctactcctctagcttcctctccttttcctctgcttcaagctcgtgctcagccagcaactcgcctcgccgggtgagcatttcttccctgaaggcgagatctgtctctcgcctggagagatccgtctcccgcctatccaagg

SEQ ID NO: 19940 - DNA, 499 bp, Zea Mays
ggtcgttcttctcccccaggcgtttgccacgacaagcagagctcaccgcacggcggcggtgccgccggagcaacacccgcacaccacccaatgcggctcctaacctaccgacggttgtatcgcaaggaggggaagagggcgaacatgaagagggcatcataccagtggtggtcacacgaagatgcgggttcacggcggtgctggcactctggcgacgaatccatgatgcaccagccggttccccttcgattgaaccctcccacatcttctatgcgaccaggccaccctccggtagccacgcaggagctcgagacaggttggtaatgagtatccgtggcggcggcggctggcttgttctccctccctccttgctctcggtgacatcgccagggttcaacgaggaagacagaggacaaggtcccatggtgctcgacttttatatccgcccaccaaccctacccaaccagcacggaatctgtccggaacgcccgagatccga

SEQ ID NO: 19941 - DNA, 383 bp, Zea Mays
ccggccagaaacaacaacacaactaccccagttcaacctaatggttgtttcaagtgtggcgaacttggccactatgccaacaactgcccaaggcgtaatcaacagacaccccaaaagaacaccaaccagaggactgaccagaacacatctcctcgtggatctgcaaagaacaagacttcacagaaccagagtagaggaagagtcaatcttgtgacagcggaatcggttcctgaggatgccgacatggcgtatggtatgtttcttattaactccatacctacatcagttttatttgattctggagcatctcactcctttgtaacaaagtcattcgtggaaaaacataatataccaaactatcccttgaagaagaaactattaat

SEQ ID NO: 19942 - DNA, 390 bp, Zea Mays
ggcggcgactgtgctcgcggctggaatcggaagcgcactcgactcgacacttccctaaaccagtgcttccattctgttctgctctttgcttctgtgccttggtggtgattcgttgagtccatgaaacctatttccccccacttttgctggagatttaggtgacggttctgcatttcgtccagattagttctcgttcccccagagctgcattttttatgagtatgctatggtatttttcttcctcctgagagactgagggtttgaggcgttgtcacctcgctagggagtgggggataatgccagaagttgttcgcggccgccgcatgtgtcgtctgccacagggggacctcgcatcgctagcacttgagtcctcgcgccacccgccatcaa

SEQ ID NO: 19943 - DNA, 596 bp, Zea Mays
gggagttgcggtaggagctttttgcatctttggcaaatttgcctctgccgatgggctcaggatttcttgcatttttactgtttcttccaccgttggctcttcgaccgtatcatccttagcttcagttggcccgactgtaggcaccttcgtcattacaatatactcttcagcgctctacacgatggaagcagcttgttttgcttcggcagttgaagaggtcccttcgccaaattcaggaactatggtcggctcaatatatcgcggccggtgggtcagaactttcattttcttgcctttcggcatagcagtggtggccaaagtgccttcgcagcgggtagtgatagtcagggtatatgaagccgattgcatcaaataccctattcaatcttttattcccccagcccccgaaggttgtggacaaggcatcatcttcggccttggaatatgtcccaagcagctcgtcactggtagcttcaatacatttcaaccagtcatcatttggctcgtcaaacttctctctagatctgaaggtatatttcaatcgaaccaggccaccttcactggagtcggcagtagtttccttcggcatatcccat

SEQ ID NO: 19944 - DNA, 1181 bp, Zea Mays
gcaccgccttaagtcattgccgactcaaaccgattactctgttagtagggcatagtggtcatcccaagttaagtaagcgtgagcatgtcgcaccgccttaagtcgttgccgacttaagtcaattgctccgttagtagggcatagtggtcaccctgagttaagtaagcgtgagcatgtcgcactgccttaagtcgttgccgacttaagtcgattgctccgttaacagggcacagtggtcaccctgagttaagtatgtgtgagcatgtcgcaccgtcttaagtcgttaccaacttaagtcgattgctccgttagcagggcatactggtcaccctaagttaagtatgcatgagcatgtcgcaccgccttaagtcgttgccgacttaagtcgattgctccgttagcagggcatagtggtcaccctgagttaagtatgtgtgagcatgtcgcaccgtcttaagtcgttgccgacttaagtcgattgctctgttagcagggcatagtggtcaccccgagttaagtatgcgtgtcaattgacagtgaacaatctgagcacctttgaaacctttttattgatgatatttttctcaatttacagaatacatcgtcgttccgagagcctctgtgatgtagttacgggtagaatttcctgagatgctctatgttccatgagttcccaatttctgttccgtccatctgagtaaggcgatatgatcccggccgagtgacttctgctactatgaatggtccttcccatagaggtgacaatttatgccgtccctcccccgttagaattcggcggaggacgagatctcccactgcgaaggatcgacgtcgtatggccttatcatgatagcacctcagagtttgctagtatcgcgctgattgaatcaccgtattcagtcgctcttcttcgagtacgtcaatgtcttctagcctagtggcttcagcttctgctatgtcatcaaagattaaccttggtgccccgaacttgagatcggcaggtagcactacctccgaaccgtaaaccataaataagggggtgtttccatgcagagctcggctgggttgacttctcaggctccagactacgtatggcagttctctgatccattttcctgcgaatttctcgttcttgtcaaagactttctttctgagtgcttctaatatcatcccgttagctc

SEQ ID NO: 19945 - DNA, 414 bp, Zea Mays
aagccggcggccgaaaataagagtcgaaacctcctcgagaaggtgacagcattggagaaggagaaggaggacctcggttgccaacttactgatgaaaaagagaacacatagaacgcccgcatggaggctcaggatgcccgcaggcatgctgctaacttgtagctagagctgaagaatatgcgtgggcaccgcgagaggatagagtcttccacccgtgctggggttgaacgggcgcacacgcttttcgtggatgcgtaccgtgaccttggcgagcaaactgccccttttgacaaatcgggggaggaggtggggacccgctttctagggtggctgcaagatgagctagagtcgctcccgtccattgtgacgggtctcatgtcctatgcgtctcttatcacttgcgaaggggctgcg

SEQ ID NO: 19946 - DNA, 506 bp, Zea Mays
gccatcgctgggctctggggaggggcatcgtgggagattatcggacttcatgtggtatgggcgcatcgtttgtaggcgattgggagcaccagggggattggaattcgtcgttggggcctcttcatccctgcagaactaccatgcgccagcgaggctgggcgacgggagctggaagatgaatggtggccctcgatcctgatttggacggatacagctgcgacacgcttaccttgtgccacaaccataagtcttgatccctcggtcccgtcatcatatcggttcgcggtctaatctggactcttgattcttcatcggacgtccgggtagtgtgcgggattcttcattgcgcccgaagtgcaatcgtggccgcatataggtgatcgggcgaccacggtgtgttggtaccccttctgtcgcaccgatttacaaaagagcccctcggctttcacagaatcaactcgtcgttcgtgccctgtgtaaattatttacattcgtgccctgaaaat

SEQ ID NO: 19947 - DNA, 821 bp, Zea Mays
ttgccctaggtcaccacatcaactttgtagctctatgaaaggggaacaactttgcttaagagtgtaagcatggttgttatgaagaaattggagaaaaatgtactcaaagttgggctgtcaggctatctgggactgaattctggtatgacagtgtaatgaagccatatttgagcttaaatttggtcatgatccagtcattatctggttatgattactataacaagattaaagctgaataatagagctacaacttctttaaagacagattgtcaagtcattacatgggaaagggagatttctgctctgcaaatctgggtgtcagtccaactgaatggagtttaccatggtacagtgcctgaacaagatcagaccgccagcgcatctcaccgccgacgatccccgccacgattcgtgtcgccgccgtcctgatttgtgtgcggtatggagtggataacgccgggggtggataactcgtacgtggcgtcattccccgagtccaaccggagtcctcaccggcggccaccgtgaccagtaaattttgctgcggtggcactcatgccatgatctccctcaatgtgtctcctaccgacgtggtcggcatgcgctcgtgatgctatacatggccgtgaggtgatcgccggaccgccgcgactataaatagccctgtgattcccggcgaggcacgaccatcacacacaccgtgggttgcatcgaagccaaattcgcgctgactctgccccctcctctcaaattgattgtgcgcagtaaaactagaacctcttgcggccgtgtagccccaagctccgtcctcaattccacct

SEQ ID NO: 19948 - DNA, 550 bp, Zea Mays
ccctagaaatcacagggcccaaatacttcaactcatgcttcacaaaggaacacttcttcaactttaagtaaaactgatgctccctcagcttagctaaaaccaacttgatatggtaaatacatgtttctaggttgggactatatatgagaatgtcatctagaaaaaacatcacaacttccttagaaaactctccaaaactgagttcatggcacattgaaaactggctggtgcattagtgagaccaaatggcatcaccctaaactgataatggccatggtgtgttttgaaagcagtcttgtattcatattcaacccccattctaatatggtggtagcctattgtcatgtctagacttatgaagaactgagctccagccaattcatccaaaatctcatccaccagaggcattggaaatatgttctttatagtcatctcattcaacttcctgtaatcaacacagaatggcatagaattgttctacaggatgtcatgtatgtaatggaattaggtttgtggttatttttcattatgtcatgtatgcaatggaatt

SEQ ID NO: 19949 - DNA, 1541 bp, Zea Mays
gggatcgatggggtccgaaggaggcgccgcagggttctcagtcgtggggaaagaatcggaacctcagctggcgattgaagactggatccggaaaatctgatgtcaaagaagatattcctgtctccactcccggtgatgccggtctgccaggtatcctcaaaacccccccgccccccattctaaaatctgagaatgatttggtgcgtagggttttttgccagaaatgtggtttagatggtcatcatgctagggagtgctttaagtctttgtggtgcgaaatctgtcgcaaagaaacccacaacactgctcggtgtgttcttcccaaacagaataagcccagtatgccgattgttggtatggtggcagatgggctagggttttactcctctcatttcgccaaacccttatccaacaaacctaaacgcagttttattggcttggttaaaatcgttgagggtttgatcaccgccgaggatctggagaaggatttcggttttcactttccttggggccgcacttggaaagctactaagtgccattctggttttctcatgcaattcccctctcaagagagattggatgaaatgattaatttccccgaattgaaaatgaaattgtctggagccaaaatctctgtctcttcttggagttctcaggctaagcctaaatctaaactgcattctgtgtggattgtggctgagaatgtgccagaagagttgcaaaattatcaggccatttgtgaattgggatccactattggggcagtggaagaagtggatattaactctttaaactctaaagaaattgtgaggtttaaagttcatgtgaagagtgttgctatgatccctcctatcattgaagttggtgtcaaaccttttttgtatgacattttcttcaaaattgacaacattactgatgaaggttggaatgatgactctgttaatctgggcaagagggcttcggttgatagacaagggtttggtgagatctctcttggcaaatatgctaaaaaggccaagagtggtgatgaggactctggcaaggatatcaagggaaaatctcccttaaaaatatcctcaagtcaggccaatgttgctggttccctgtctgaacaatccgaaagcatgaaaatggggaagggttctgaagaccctaaaggttaccttgatagtcagggaaatgaggatgaggaattcaatgatagtgagtatgatctgttggattctcaggagttggatgaattcatcaaggatgatgaatttattccttcccctgcccaagataaaaagaaaatgcatctgagtaatgttgaggaagctagcaagattgctggtggtaaaaaatgtggtcctatggaaggcgaagttactgaaggagtgagaaggtgcagcaggttggaatcgtctgaggaagtgaaaattgctgataaagctgctgcaagagctatggctaaagatgctttcatcaacaaaggtacgtcctacaatcctttctcggttttgaatactgataatgatgttctcatggatgtggctcacaaa

SEQ ID NO: 19950 - DNA, 535 bp, Zea Mays
cgcacatgaagattgcatgcaacagaacgtcaatcgtgcatacaacagaccctgaatatattacatggcatcaagtaaacaaacctattgcatcaattaaacagaatattcctaattaaggaatataatcaattaatcatgcatgaaacagaccctaccgaaaggaaacacataatacaaaaaaggaaacacattaagtcaggcaagggaatcagttaggcacgattttctgaatatattacacggcatcaagtattttacacgacatcaagtatattacacgacaagggaatcagtcatgtaaggggaaaaaagaaacaaaatatattacacacgatgtgcgttattgtgtccgccaagcaggtgttctcttctcctctcttctttgggccgcacaccagaataaatcctgccttctttccatccctggaaaacacgcccgctattcacgttccagctgtttaaaacaagcaatttttcaaacataaaattggatgcagtgtaacagagcagtagcaaaaggctggaactggaa

SEQ ID NO: 19951 - DNA, 609 bp, Zea Mays
atcatctagttgtccaagtgaaggtgatgtggtctcattttgctgatgcagtgactacatgggaggactatgatgtgctcaagacctggttctctactgcttttgattgggacaatcaaactccaggcgaggtgaagatgtgaagcctaggtaatgcatgtgcgttggggatctatgtgtggggattaatgagctgtcagtgagctgttagtaagctattagttaactgtcagaaggattagctgtcaatgagctgggataagggcatgttaatcggccttgtaagagagaatcactcctataaatacttatacttggtgattgtgaagagaacaaaaataatacaaccgaataccaaattcgaagttgacttacctataactaactcagctggtgaggtcctcggctcatcgcccgcagtgacctcactgttgctggaaatctcacgccggagtgaaatccccttcccacggccagggggtgatcacacagagctgatcggcagcatgcaacagcttggggtaacggcgacgcgcagcagcacgggggaacgtcgacatgcgaaggggcgaagctgcagccaacgtggcggtgcaggtgagcccaaac

SEQ ID NO: 19952 - DNA, 746 bp, Zea Mays
gggaacactatggcgatgatcacaaagatggaactcattgaaggtgaacttgggaggttcaccatgaagagttgtgaagagccaaataaaacgtacaacatgctcaagaccctggtgaacgaaatctgcaactatggaagcacaagatgaacaaatcatgacgtcatgcgcctaatgctaaggccatttaccgttcttgatcctaaccttatgaacttgatttgagagaaccccagatacaccaagatgatgccccgaggtaatccttggaaaatttgtgagtgggtatatgatggctaaggaggcgaggtacatcgacgacgtcacgaacgggcctcttcccccactacatcaagccgcaccccgtcaacctcaaagcgacaaccaacaaggaagctctcccgacaaggtggcacaaatttagctggctggtctcaatgaagatgagatggcgcttgtgataaagcgcttcaagaccgcattgaagggacgtaaggagtaccccaacaagaacaaatcaaggggaaagtgtgtgtgctttaaatgtggtaagtctggtcattttgttgcacaatgtcctgataatgatgaccaggcacaacaaaagagcgccaaagggaaggagaagaagttctacaagaagaagggtgaggcgcacatcggcgaagaatgggaatcaggctactcctcctctgactccgacaacgagggcctcactacctctgccttcaacaagtctaccctct

SEQ ID NO: 19953 - DNA, 533 bp, Zea Mays
gtgtgtttgagccatggtatttgagaaatttagggagaagggttggagccttgtgataagggtgtttttttggatatatgcaggtgggccaaatataccagaaatttgagtgcaaagatcgatcagatggtggaattgtgaggaatgttgtaaggtggagcatcgagaacttgctggaggtaaccattctatggccgttgtacctattgggggtgtccattttcctgatgcctgaagactctcatttctttcctttcatatctcccatattaattagaagggtgaggctcctgattgcttctcacggatgtcaatcgtgttggtgatcttgctccaccaaccgagtaccaaatcgcttgcttgccatttttctggtttcaagttcggttgggccatccaggagggcaggaggttgcaaggcaccagacccttttggtgtatctgcattcagtctcaagatgatgcccggttatatttagatgtctgtgtaccgagagggcacattgactatgcggccagctgtgctgcaccag

SEQ ID NO: 19954 - DNA, 479 bp, Zea Mays
ttcagctattgaagccaaaggacctactcttacgcagaggattgaagagctggctgcaatgccgaagactgacaaaattgaagaaccgagaatcgaagggacgaaaacattagaagttctaagcccttcggcagaagtggaggtaccgaagacacaaaaaggtctagcagcgacccccaagagaaaaaggatggctagtgtactagatgtgctggagacaataaaagcttcaagctctactccagggaaagttgccaaggcttcgaaagcgcagattgaaaccgagacaaagctgaccgaagccgaagctacaatgagccgggctgacgccgaagctgggccttcagagcccgccaaggagaaatcctcagaaattggagaaaaggcagcggaggaagaagctatagaacagattttgcctgaaaaagctgccgctcctactcccgaagcgccttccgaagtccttgattatattattc

SEQ ID NO: 19955 - DNA, 329 bp, Zea Mays
attttttggggttctagtacttgtaggaccgattgtttattgagtctgtgtatagtgggtctaatccggcttggtgtggtgtgaaaacactatataatgtagttttatcatgttgttgggtctgattgaatgttgggctacaacccaacttatcaatgtaatatttccatggaggcaatgctttgcgcctcactttttttaggatagtgtggctacttgctaacttgatcttagtataaaattggtttgtctctaaagagcagaggcaatgttgtaatgtctatgaaatctttagactggtagaacttgagtgaatttgtgagatgacg

SEQ ID NO: 19956 - DNA, 2825 bp, Zea Mays
tttccatcaccacgctcccacaggttacaattattttcttgaattttccattcgactatatcactttctaaatcccactggttatgtacatgagcaagatttttatacttaaataaatattgcttgctgtttccttggattgtaagagatgctaataacgaagctgtcccaattagacggcacactgagcttgcacagtcaggtacagttttggatttatgccttaagtcaaacagttttggagggcaacacaacgctcaaagctaacttttcatgattagttatgctgaatcacgagcgtccttcgatagaaaaatggggggaatcatagaaatttatacagaactgactgaaaagcttactgtcttcaagtattccatagcagcagcccagtcagattctaccaacaattcaccaagctccacaaatgcctgcaaaataatctcattaaaataggttatatgcaaacatgaaataatcgatcggtaaagttaatgtgtggcctcataacggagagtaagaatgcaactaggagtctaggactaaacacaaacaggaagtaatttgaatagacatcatactcatcatctgatattgaacagcttccacactttgttttattcattttttggttaatcactctgaaactatcgtccagtaacttcataatacatgacactgtagtaagtcccaaaaatgtagtactgtgacacataaattagtcaaaagaaaaaacagctaaacaacaaatgtccttttttttgcaatcatgaagcttggtatgggtgtcttatccttttctaaaacaaatatagcagacgtgagagaaactatgaagataaagaatgtttctcattatagattaataattaaggtaacaatagaaaatctgtataccaatcaaaactacacattagggcaaatgtagtgtgttcctttcatggaccaaatacagatcaaatcgacaacaaaaaactgactgtaagatgctagcattccaagttttcaatcaacttcatcctagatcagcatcttcattgttgcaaatcatcagcattcaaagatccagagatggaccaaaattcagtgttcaaaaatatatattttttgccatgttcatatggagtaatttatgttcagattgagcatttgaaaatttcatcagtacattcatcctggaaagcagttgtactatttatgtattgacatgttagaaacaaattagtggcagaattatattttgggaccatgttacagcacttcttttgacccgaatacatgaagccatgaaagtaatggttgaggggagggggaagcaagtacctgatgatcttttgggtcaatacgggtaacttccttgaaggtttctatagctttttcagtttccccagattttgcatgtatgtgaccaatagcctagaagaaacataaaaatcatttcacaaatacaacgctatgttgcaaatacatgaactgagaataagcgtttgattagatatatgtcttaccttcaaactttcacaattttcagggtgcacctccaaaactttctcaaagctacctaatgaacttttgaagtctccaaattttaactgaatttgaccaagtcctggttcagatcaaattgtgttataaatatcaacttaatatacagtggagtgctccaaatgaccaatcatgctaatctaggctgcatgcatcatgtgcaaacctaaggaagaagattgaaaagaaaattagaactattaattttggatgtcatatataggtagtttatgatcaagctggtgtgggaggctcaccacggacaaaaggttcgtgatttccatcaccacgctcccacaggttacaattattttcttgaattttccattcgattatatcactttctaaatcccactggttatgtacatgagcaagatttttatacttaaataaatattgcttgctgtttccttggattgtaagagatgctaataacgaagctgtcccaattagacggcacactgagcttgcacagtcaggtacatgatcccttgtcactgtaccagtttctgtgcttctctctcatgaaaacaactgttgggattatttgtttctgaagatcagtgcatttattagttctctcatgaaacacaacactatgatttaaatgctcacattttgattactgtgtaaacaatgggacatacaagatttttttaggtttttgtagctcattattatagtatgtgttattaatatgatgtagcaggcaacatagtatcctgcgattcctaattagttgatgcctaagggtttttgtagcttatgcaactaagaaaacttcttcaggctagaaaaaaactttgaagtgtgggacatggtgcttagaaagtgtggcaagcatcgaatttacattgatgtagtccatggtgtaggatttttagatggcaaacacatcataatttgtgtttacaattgtttattaggaggcacattgaccattgcttccttccaaaatttatatgttgcagtttacttccttaagaaactaactgaagcattatgaggagctgtagcaaatcgacaatccatctgctattgctaataatcatgctattttggcaatggcaaaatttatatgttgtagactacaacaaacaatgtctatgaagtcgttgacatctggattatattctattagtgctgatctggatcaattcttgtttattaggagacttcaaatgttttctctcccctataaaaacactttgtttcatttgcttataattaactgctgcactgtccatggattgctctctcattctacttcctatgatttt

SEQ ID NO: 19957 - DNA, 1279 bp, Zea Mays
cgtgctccaagttggactgaatcccccacagacttggagataaccgaagccagggttctgtttgctgaaattggcttgttaaaggagagaggtctgactgttgaagcggtagtcgcagattttgttttcaagaatatccagccactgaaggatagagcgtaccccgcttatttgtacagtggtgttactgattctacccgggttaccaacaagaagattcctgctgtggatttggtaagccggctggagatgatccttagaggcaaggtgtcgaatattggtgctcctgttgcatattctgcctggaatctgccaccttccaagacttttttcagttttgtgtccaatcctcctgctagcgacagtggcctggctcttagagtgcgaccctctcccgaagaagtcgaggctctggttgcttcacttggtgatctccccaacgatgaaaggcaagttcaatttgagatgcctataaacccgagtgatgcagagataagtgctatgctggacatgttggctgaggattcatctgactccgtcgctgctgaaaccatagctattgtaactgtcctcgagcctgaaaagaccttgactgctctaaaatctgatggtgctcgcccaaagcgccttcgcccggccagtcatccaactactcctgccgaggggaagaagaagaaaaagaggaggcttcggcgagtgtcatgtttgaatcaggatgccggcccttctgctcctgctgctgaggaagtgccagtggaactttttactggagctgatcccaatgggtgtgaccctgctgacgctgaccccaatgggtgtgaccttgatgatgctgatcccaatgggtgcaatccgcccagagctgaccccaatgggtgtgttgtttgtattgttgacgaggatgaggaagaagaggaggaaatccccttaatttggaaaaacagtcggcgctacctggtcagtggggggagtagtgatattccttctttagccttgtctgcactcgttggtctgcaagagttgtccatagcaaattttgatcagcctctcaaggatatggttcctgaagatctgctatccgagccaacagatggtggtatgatggacgtttgcactgacattctggatgtggggttagagttatcccgagcagcgtctcgagccccatcgaccttagagtgcggtcttcacagtcaagaagctggtctaggttgctccactcccatggaggtaactgagaatccttcagccttagaggtggctgttgcagagaacccgg

SEQ ID NO: 19958 - DNA, 635 bp, Zea Mays
ccgacgtgatgcgtgaagcaacattgactcctcgcacgcccgatgacacgaagaagagatgaggcgccgtgaagactacaaccagaaccatggctccttgcagcgagggacctaggacagggccaaatcaactgccgactcggtgatgcacacgtccgcgcgccggccgacatgcgaacgactctaggattagtgacaaccgtcaccgccacgtgacggcaccatgatggtgctcctagagcctgactaagggctcaagacgtgttcaaggatgtcggccttctcccccgactacgcgaggtctagtggtcgccaggcttcaaggtttccaatgttgataagtatgaggccaaactcgaccctaggggttgttggttatttactcgacggcagcctaggccgcaggggccatggaggacgtcatgatggcgtacctctcgatcgtgcaagggcaggacacacttcaatggattcgccacctccctcaccactacatcgaccactgcgccgacttctatgataaattcatctctaacttccaatcactctcagacaaaccttcacagccatgggaccttaagtctgtcaggcgcaagaacgatgagtccctccacttattcctcaagcgctttcaa

SEQ ID NO: 19959 - DNA, 304 bp, Zea Mays
cctcccctcgggcgcctataaaaggtcgccccggggcacctccttccccgcaccggcctcagccaccacctttctcccctcgccaagctcaattccgcgaagcgccgccgtcttcttcccctccggtgagttctccccccttctcccgccctctctgttggtccagcgaacaattgaatcagcctaccagcttcccctcactgccgcgaactcagcacaccactttttcgccccaatccctcgcccgaagctcaccgacggcgatccccgccgcggagctccgccacctccccgcggacagccc

SEQ ID NO: 19960 - DNA, 410 bp, Zea Mays
gtcgaaagggtattctcagatcctagccacccgattacatacctgcggcccagattagatctcgatttacatgaatcggtacacaatcctagccactggatctagatcatgcggcccacagctcgccacaactcgggttcaccggatccgcctagatcgcatccaacggtcccagttttactgtgtgaaacggtatgcgcagggcaatcgcgcccgcccgatagggatcggacggccaggagccgttcaccttccccgaactaatctaaggcgttaatctatgatcggacggcgcccaatcaacgtccagctcacacatctatccctccctcacggtcaacgccggcggacccgtgcttcctcccaacggtggcgccatggccggtgcacaccaagtaggtgatcccccg

SEQ ID NO: 19961 - DNA, 374 bp, Zea Mays
tagaggctccgaagtctcttttttggggtggaagtggagctttagaagctacaaggtggagtcctaactaagtcttggctcagcggcggggctccggcctcatggttcgcgtcagcgctcctcttcctcatgtttgtccttgcgggtgtgtcatctgaaggcatccaagattgtctggttgtcctctgaagtgtctgatagaactccctccaactcccttgcctagagggaaacccctcccttttataggtcgggagaggggtcggccagcgatggcttccatgggaaggagccgtaaggcaagggtaattccagcgttctatctagggtaaagccatgtgtactcatggggcccaggcttgtctatttcgtat

SEQ ID NO: 19962 - DNA, 563 bp, Zea Mays
gcgccctccacacacaccctccggagcccgaaaccattgatctaagctccggagcatggtacgaaataccgacagttgatgtgctaggtagcggacttgtgcattccgcgatgagatcatccgagctccggatggctaccaacgacagtaccgcgatctagactcccgggacaaccattcgctttgggggtctggatttcatcgtcaacaaaggagagatgacgagggcctcgcaagccctgtctcccttggcaaacgacttgcccaatgtagccataagtctcggcgacctccgactggacccacctcaggtgtaccatgggtcgcagggctcgccaccagtcgattgtaccgaggttgtgggagtattggaccgtgtctgggactcattcatgaatatcctcttgtaagggtcgaaagacggactcacgtccatgcctatctaggcaagttgcgaccctagtcaggaatgctttgcagcaaataccacgggagatcacttacccgtgtggggagcctaggcaagaactcgcccatcatcatggagtgcactatggtgtctg

SEQ ID NO: 19963 - DNA, 1478 bp, Zea Mays
cgggcgtgctctgagcgcgcccccgagtgtcagccctcgtcgaacacgtgtgggtttgcttctgccagggttcaacggccgatttgagcaccttagcatgcagatcttggcaaaacccccgtgtatggtctcttccctgcaccaaatcctacctttttgatgtgagttccaagcaaggatacgatcggggtagagagatataggggtcagaagtcggctctgtcagaactgtccacaccgagacaaaagccatgccaagtcatgtcaaacgacttagggttgggttcaaacttttccagggtgttctaggggtctttaggcgccactttgtcaattgggtcaaatggttttgaagtttgaaacagggtgaacatgtttgatctttggaagagggttggttttggacttagaaaaaaaatctgattttccatttatgctcttccctttggtgaactttttggggtttttttgaaacctttttggggtcacttccttactattttttgtagggtattaggtgtactacaaatgttataattggcccaagtcatgatcatggggttttcatagccctttggtcatactcacttctagggctcctattgcccaaaggggtttgaattagggtttgggcaattctccccaatatatgtgcatgataagccaaggcatgacttctaagatgagttgcacttacttaggatcttgatttccaagtttggtgtactttgctcaagttaaatcacatgtgatgatgggcttgacttgtgtagccttgagtgaaaaccctaagtaacacctggggtgttacaaagtctccgccgtagccacatccaacgcaacaaaataatccaagccttcatccgaggactcctccatccaaggaaacgaactcccagattcaccatcggactcaaaatactcagacatagaaccaaacaaattatcatcggcaagcactatggttgaggccgccacaaaatcagtatagtcagcagcggttgcttgcgcaggtccaaacgtcggaacctacacagcaaccgaggttcagtatcacacagacaacagtttacacttaaaatctccaaaccctattctgacacctatgaaggcctggccgccgccgcggggtcttcggcagctggttcgcccgtcgccttcgaagcgtccccacccgttagcacaggggctggcgtggggtcttcgccagctctagtcagcgtggtcggtgcgggggccgtcgaggggccctcgccggcattggatggcggcgccacctccacccccgatgtcacgggcagtgtgctgtcgagattaccaaggtcctcgacctcttcggcatgcgccatctgcagcaatagcacacattcagcaacaccacgcatactcacacatataaccacgcaaatgagcctttacctgatccattgcccggtcagacctctcctggacagtctctcagccatgcgggccccaca

SEQ ID NO: 19964 - DNA, 852 bp, Zea Mays
ccttacggagcttacggcggcttcaatttatagggagcggtcgcgagcacaacgaatttgagcggcggatcgtgatttgtaaaacagggtgagtcactggtggccgcacaacgtggcttttaccgtggcggcaccgccggcgatcaccggacatgcgaagcacggttagccgcgacgtggtaaagcgtctggacacgtggcggacgacggtgatggctcaacggcggtgagaatcttatctgagggatcggtgagcaagggggggaggcacgacagctagccggaatagtttactgaccggagcttatccatggcggcgatatttacgtgaccccgagcgttatccaagcactggtgagcacgaatcacctcaccggctggaatcgtggcgcgagggtcggcggcggcgaggggataaacctgagattcttcttcagtcactgtaccatggcgtcccatttcagttaacctgacagagcaacttggagcatgatttactctcaatttccaataacaactcctcccaagctttgcagcaaaattgtagagctataaaccagcaataatttgactacagggcttgaactcatttgagcactagatcaaggttgaattcatactcaaagttggctctgttacactgaacttctgaatttcagagtggaatcagcgtgacaaccagactttaggcttaattatctccaatattttcttaacaactatgcttacactcttaggcaaagttgttctccttagtttggtctacaattttgatgtggtgacctagggcaaactcttaataatttggaagatgtagagctccaaagttgagccaatatcactgaaaatcag

SEQ ID NO: 19965 - DNA, 487 bp, Zea Mays
gcgggtctttctgactgctgaatcaagaatcttcactggtttttcatggtattgaaggtctttctgaatctgcactgtctcttctttgaggtgactttctggtgcttgtaggcatttgcggagctgggatacgtggaacacattgtggatgtcggacatggattctggtagttccaggcggtatgctgcgggtcctaccctgccaatgatgggatagggacctacaaaacgtgggtctagcttccctttgacttggaacctcctgacaccacgcattggagaaaccttgaggtagacgaagtctccttcctcaaatcggagttccctccgcctgttgtctgcgtaactcttctgccgactttgagcttcaagcaaccttctgcggatcagtgcaactttctcttccgcctctttgacaaaggcaggtccttctagtgctttttcccccatgttggaccacatgagaggggtctggcattgtcgtcca

SEQ ID NO: 19966 - DNA, 942 bp, Zea Mays
ggtgacgaagattgcctctacgtcatcaacgagagggaggcgaaggacacaacaacagagttacatcaactaggattgtgtagctgcccaaaatcgatcgatgcaagactactccaacgtgtctatcctccattctactttatcgaaggtaccatatgaagaggaatctctttcttcaaattttggagagattgtgtgagcattcatcccatttcactcttaggaccaatgcactcaatggtaatggtttctccgccaccaaaaatataatgttgtcctcaatatgctcacctatggtagtattgctgactctattgatgagtatattaaaaaaagaaaagcttggtcttagagtgcctccaacattttcgtaggagtattatttaagattttggcaaggagtatagttgtcgtcccatggttgacgaccttagacgacttttagctaaggggaggagagaggttttcctagtatcatggggagcataaattgcatgcattagaagtggcggaattatcctgctcgatggaaaggacaatctacaagaagggataatggattcttgatcatcatgctcgaggcggttgatttgtatgacctatggatttgacatatttttggggtttagggtttagggttttgacctatggatttgacatgcttccgtgagcggggttgaacaatggtgaaccaatcgttgttgttcattgacgtgctcaaggaagaaacactaaatgtgagcttcaaggtgaatggacatgggtataaccaagggcactacctctctgatggcatctacccacggtagccggtgttcatgaatatcattgttgtcgcacagagtctgaaatagcgaatgtttgttgcatgacaggaaggcacgcagaagaacacagagagaaaatttggagttcttaaggctcgcttagattgtttcccgc

SEQ ID NO: 19967 - DNA, 562 bp, Zea Mays
gcgaaaagaggcaaagatagagtacatgagaaaacgtagagtgctacaggctaacactctgaatgttgcgtccatcgccatggaggacccaacatatacccctgaggttgtgcaccctacaacggaaccttcaacagttaccacctgcgactgggttatccctgaattcgttaggacacctttcctaccagctcaaacacagaccgaggatgtcggttcattcgatatgtctactaaagcaataagacgtaaacatcatgtgccgcgtggggaaagacaagctatcttagcccgtcgaaacaaacaatttctagcatccattgcaaggaacatgactactttgaatggggatactatcagtgacgccaacaacaatggtaattactatccaatcttaaatggatcttgcacgacgacgataccatatagtcagactaatcgtgtgtttccatcagcacaatgtagcgttccatgccaagccactaccttgccaacaaatggagttgaaggcatacctgaacaaggaaatgaggtggagcatacacaagagaaggcaagggtc

SEQ ID NO: 19968 - DNA, 599 bp, Zea Mays
cgcgagtgctatcgagggtactcccgaactccttctctaaagtgtccccaaattccttgagaaggtcatcaaggctggctaaggacatttcctcggtgtcggacgagtttcttatcctggtaggaggtagggctggaggggcttcttccttctgctcagtctgacatccttgccttttggtcttcttgcagatttttcttgcgggggcgagcttcttcagtttcttgtcgtaatccatcttcagagtgcggtaggcctcacgggtattggtttcctcgacttctgctatctcgaggctttcttgaagggacgccttttcccttgtaagttccctgactttttgctccaggctttcaacccgggagtttaggtgagtgcagtgggaggcaaggtcatcatattggttatcaagggtgtgaaggtatccagccatgtagacgatggtggggtcatcctcaatagggtctcctcctgacagggcctgaagtcttttcctccaggtaggtgtatttttgttgctgggtgggaagtagcgaagggggtttcaaagatcaccttgttgtagctctggcatagttgttggagggctttctgggcaa

SEQ ID NO: 19969 - DNA, 646 bp, Zea Mays
ctccataccaaaaatgagtactggaacaacgtccactgcagtttgactcagtggtatcgtccaaaccctctttgttgcaacgagcacaagaacaacaacaacttgatcacctcctctgttattggtagcacatttccggaggaggttattgtggtacacctgcactgcagtgccaggtctcggtatcttattatcgtcaattcgtcaggacaaaactaatctgagttctgcagctcaacatggaggaactggttttcaggattcagattttccgccagtgaaagtaggagttttgatcatacctcacgactctccagaggacatggagcctggagctgagacctatgctctagaggtgattgctgaaaaggagaagggaatggtggtacacaccaatgcatgcctgcaagacctagatgagaagttactacccaaggcgataaattacctgaatcagaatcctgaatcgaaggaataccaaatgtgtttcaagtctagacatggcacggcgcacctttacctggagaagacgagtgcacaaatgcaaaaaggacgtacaagtaaaagcaaaaccacaaagctgcaggctcggaagaaaagggtaattccattcgacagcgtagagatatggaagcaggcctcccgg

SEQ ID NO: 19970 - DNA, 655 bp, Zea Mays
gcgcgaagctctaagaatccacggatttgcgccccgcatccacatggtgcaacgtgaagtccaatcgtgccgggggggggggggggggggggtggcaacagcaactagtggaaatattatactgcggcacaccctgacggagaattctaaatgacgtcgtcactgtggtccgtcgatggagttgacccgtaaaccacgccacagcagtacagcacgagggtggtctcagccgccccggtaaactcgctgagtcgctgccaggtaggtgccgttcatggattatgcaagacatgacggtgagatgacgacgcagctagcatgactgtttgtgggccttaaattcgatttgtccatccggatttctgtaggcctattgctgaacaagaagattcaaggcccagatcaactttatctttatccccgacatgacaatttctaatcaccagactccgcctggtttgggccgggctggtcttcatgcctgagcgtgtttctgctagagaggcctgttgtcataattttaggcccgtaggagcctagcgttcatccatccatacgttttttttcttcttcttttgcgcgagggacatccatccgaccatccgtacttgtagttgtatatatgtacataaataaacttttgagaggataaaac

SEQ ID NO: 19971 - DNA, 507 bp, Zea Mays
caatggattttttattgcctctcacttaccagtacagttgtagtatctgttcatgtatgcacacactcacaccaaaacgcacaccaactctcccctatcgtacacaagtagaccatgattccactctcccccaggcccgcgcacgctcgccaacacccgtgttgcctcccgcaccctccgcacgacacgccctagccagcctctcgcttctcgcgtttgcgccgattggctctcgcaacgaactacctccgcccgcaaaccatgacctccacgccagtcgcaagtcttcacaccatctgcagcctccatgccatgtcagttgtcacgtcccacccgcccactccacaacatactccagcccacttctccacccgcaccaaaacgcacaccaactcacctttatcgtacacaagcagaccatgactccacccccaggcccgcgcacgctcgccaacacccgtgtcgtctcctgcaccctccgcacgacacgccccagccagcctcccg

SEQ ID NO: 19972 - DNA, 705 bp, Zea Mays
ctcagattagatcttccggttaccgaaccggtacacgctaacagccagtggatccgagatccatggctcagattcgtccaagtcaaactcgcacccaagcccacgaatctgattcctacggtcacgatttaatgctctaaatcggtataacacatctaatcgcaacctccaacgtagatctcacggccatgggccttcttcctctactctctcaatcccgaggtggcaccgcccaccagtccaccgtcgagctccggtgaggtagacaatcgacgttcaccgggcgctaagcaccaaattgaaccgaactataccatgcgaaagacaatacgaacactagcgatgggtttcttaccgaggaaacgcagtacaggggcccagccacgatgtcatgcgagcaggcagattggatgtagcgccggtgagaaattgacgcacgcctggggcttgtattcccccggtgagtcaacgggcggattccgtggtggctggcgaacccctctgctctctcgtccaaccacggcaatgatgtggtcaccaatcgattgcggtgggtttcccactttcgtggactcagcaatggcggtgtcggttggcgctggggaactagactcgcgcgatacggtagcaggggaaagaacgggtcatggggacacccatttatcccacggggttccggtttggagggagggggaagtcgcccac

SEQ ID NO: 19973 - DNA, 363 bp, Zea Mays
tgagaaggctgcagcagtagatatttttttcttcaacctgattggtacaaatgtgggcagagatagaatcattgatttagatgctcttgatattcccagtcacgatctctctgagttggatgcacctttctctgaaaaagaggtatgggacactattgtaagtctcccccctgataaggcacctggacctgatggttttactgggcgattctagtattctacagagtctgttggcacataatcaaacatgatttcatgaaagtggtgtcagcagtttggggcagaaaattcaacaactttgacaaactcaattcagcttacatcactctgatccctaaaaaggaggatgctgaccaggttaag

SEQ ID NO: 19974 - DNA, 429 bp, Zea Mays
aataacatgtggattttttggaatttcctctacaaatcttcagagttccgatgagacggttcagattgcagcttgtgctcaagctgcctcataaatcgagtggcatgagactgtaaggcatacaaattgaatttctcatcattttggattctataagctaccataattgccttattaaattaccagccgataaatcacccaaaactatgtgactaaactgtaagaacttgaaattgattagcccattaggatcactagcctagtggtatggacacactaattcccagattaattagtacatacctcaatggctcaattagcagcagatcattagggcagggatgtgcagtggagtgccatgtgcatcggtcttcacctgactgccatgccctctcgattggtagattaggggagcacattcattctgag

SEQ ID NO: 19975 - DNA, 304 bp, Zea Mays
gctaactgacacaaataatttcgcacttacgaaatctgtgattttttaatacatcactttgtgtgaagggttttagagtcgatattagctgctattttcatcatgatgcaattattactaaccgctacaaacaatctgataccaattgcctcaaaccttgatctagatggcactagcacctaacccaagcagcgcgacctcaccgatcggcagcagctgcaccgcaagggcagggataggagaaagtgactaaccctaacattgctattcgtcttgcttacccacaatggtagctggttgcacc

SEQ ID NO: 19976 - DNA, 591 bp, Zea Mays
aaccgattgccagggattcaacggcccagatcaattccggccgaaccggtacgtgcgccaatcgcgaccgttggtggttagatcagcggttcccggtgtcgtctccttcctctgcacgcccaggcacggcggtgtgtaccagggttgaccccacaccatcggcgagcatagacccaatgcccaagcgcccgattctctgctacgaaagggaatacgcgatgcagaggccatgaggtagaatatagtgagcttcgtaccgtgattcgtgtagcggttcaccacggccacggaggatgacggatcaacgatggaggagagctccgacgagcagttgggaaatccctccccactgtagcacgcgccagggacttcgagttttctccagtctcggccatggtcacagggggaaaagtgcccagctttaatagccagcagataacgcgttggcatcgggggtttgttgcaacaaaccgacttcacagtcgggcgagattggtctcacggcctcgcgcggagtccgttcaaagcatgcgcgagctgcggaggggaacgtcctgacgaaacagcctaagcgagcgagcccaaccatgg

SEQ ID NO: 19977 - DNA, 395 bp, Zea Mays
tatttagttgggcaatccatttgtttccactttcctctttatctgagaagttgtcagtgaagatgatcaattgttcagtgcggtgaagatttccgtatatcttttcttctgctaaaatactacagagtcagatctgatatgtgtgtgatttctacagatatctgagaacaggcgcagaggtgcgaggcgtgctcagccagagcagcaggcaccccaagaggatgcagctccgcagcagcatttgccaccgccacccccgatgaccattgagcagatgttcttgatgtagactcaggcagttcaggcaattggtcagacattagcagcgatgcagtaggttcagcagcagccaccaccacctcagcctccagtgcaggtccagatgccataagtgc

SEQ ID NO: 19978 - DNA, 472 bp, Zea Mays
tccgaagccaaaaacaactgagatagaggaagagactccttcaacaccttatgctactgacatagaagaaattctaaaggtaatgatcgaatccttacctatcaagctaagtccgctggggccgtatctaacgaagcttttatagaagaagaaggagccttcggcagccaagaagtctgctgggccaaaaaggcggaggattattactgtaattgaagctattgaagaaacgccaccgccggcctcagcgtcaaagataacaccagctgccgaagttgctacagctaccgaagctgctcccactgaagttataactgccgaaactgcgacagccgaagacacaaatctggagagcacattttctgatattgataaaatgctcttgaatatggccgcggaagaagctgctgcagctgctgaagaaaccctggcaacagtgcttggaaaagggaaggagatcgccgaagatact

SEQ ID NO: 19979 - DNA, 315 bp, Zea Mays
ctctccaacctcagagcacgtgggctccgaaggagaggttgatctagatcctggactggacttctctggattctgtgatcccggggtcacgcaacactttttgtctgcatgtgattactacctctttgatgactccaacgactacaactccgacgatgagggttacaacccgacttgacagtgcctccacgacgagcacgaggagcatggaggagaaaaccagcttggcatgcctaaggacggcaacaccccgacaccagcaccacacgccgaggaaccaagggaacagaatttggttcagacccctatggggag

SEQ ID NO: 19980 - DNA, 1079 bp, Zea Mays
tggaaagggcaagggaagaagaaaaaggtcacctcaagaggaaattccaagtcctctgagctcagcagcaagaccggcaccagagaattcgatcctttgggtttccacccaagggaccaagcttcattagaccagctggacccgctccgtcatgtttcagccagcagagtcagagctcctttcatgccccctcggttgcaagcaaccaatcgcctgcaaatgcctgttggcactgcggagaccccagtcacttcaagaacaactcggtggaaaccccaagaataccattccttctcactccaactcggtgaatggccccaagaatacctcagcacccgcccccaaggcgccctcctccatcagccagtagaacaagacccagtatcaaggaagggcacgagtaaaccacatcgatgctcaagaggctcagcaagctccgggagtagtgctcggtgagttccttattgaatttactcccgctactgtacttttttattcaggagcatcccattcctttatagccactagttttgtggaaaagcatggcatcccctctacccctctagagattcccttggtcacccgaaccccagggtcagacctcctatgctagctcaaatgctcccaagtcagaattcttttaagcggggtagtgttcttggcagacttaactgtcttgccatcccaagggattgatgtaatcttaggaatggattggttaaccaagcacaaaggcgtcataaattgcgcaaacaagacagtccttctcatagaccaccaagggaagtcagtctcttgtcaggctcagccacccgccaatgacccaatgatgtttaatctagcaacataaagcatatcagtggtagaagaattcatggatgtattcccaaaagagttgccaggaatgccgctagaaagagaagtggagttctacatagatctgatccctggtacgacacccatcgcaaagagaccataccgcatggctcctaccgagttagcagaattaaagctccaaatcgcagatcttcaacaaaaagggtacatccgtcccagctcatccccttggggagcaccag

SEQ ID NO: 19981 - DNA, 299 bp, Zea Mays
acggcggagcagtatttccccatggagtcattcgagcaatcccactctttgtttatctgacttatgaccaccagagaatccccatataccatcagtctcttgatgcccagtgacatggcaatgttcagtccatgaatcaaagcttcgtactctgctgcattgttggacactgggaataacaattgaagagcatatttgagttgttcacctccaggtgcaatgaaaaggatccctgcacctgctccctgcagcttcaacgagccatcgaaatacattcgtcatacttctgcaatttccgg

SEQ ID NO: 19982 - DNA, 522 bp, Zea Mays
ctcctagtgaagaggagtgagctgcctgcacgcctctccaccaaatttgagcctcaaccttcagcagctatgtgccaaagcgaagacgatcaccatacacaatctcaaagacattcatcttatcctccacataagtcagccaatctgctgcctcgaccggagtaccactgccatcaaaagtgtccaacttcatgcccatccactgcatcagagaaagaccactgacgggaaggggcacctcagccctgccacctggagcagcacccatagggacagcgcccccgggcactcctccacctccagcaccctgagcagcacccgcaggggcaacaggaatagcttgcctcagaatggccaactcctgctgcatgggcctacatcgcgactaacattgccgccggactcatagaatccccactaggaacttgcgggctgccacgagccctacgaggcggcataactgcagccataggagtaagtaaataagtaaataagattggcatagcacctcatcaaatattg

SEQ ID NO: 19983 - DNA, 489 bp, Zea Mays
cacgtagcacccttaggaacggggattggggcatctaagcgccggaacagcaatcgccggcaggctctccgtcgcgcgactctggtgcgccgccgccgcgatccactggggaaggaagaaggctcgtgggccgttcgatccttctcgggcggctgcgatggcgcccagcgtaccgtttcgggttgagtgttccgcgaccgttggatcgtcaacgcaggggcacgatcggatcaagcccatttaaaatcgtcaccgttggtagttgatctgatggaccagatggcgtaccggttcgatgtaatatggatctaatcgccgcccttcaattctaatcggacggtcgcgataggcccataccccttcagccacaccatttttcatatgagtccctcggtttaggttgaaataaacccgccgtccactcgggttgttcactgagtctgggaaagtttgtagtttagcccctggcttttagtttatttacgcgcg

SEQ ID NO: 19984 - DNA, 374 bp, Zea Mays
acaagagcgcagctgaggggggtagtttctctttataacttgtcatgcatgtgtgcagaccaatagtccgggttcatgggggcagaccccaccggattgtcgtacacgtatgcgttatctagtcacaagaaagggaaacagactcgaccccttagtcttgctctatggatagaacatacagagatacttgacatcggggtaaggtgctcctccagtcatatctagatggttccccttgggtcggagcactcctgttaccttgaagggtccttcccagctgggggagagttgcggagcccctcttggtatggtatctgccgtggggctaagccccgacccagggttcccatctgtatttgacttgggagcccctg

SEQ ID NO: 19985 - DNA, 471 bp, Zea Mays
tggttttcaccgaggaaggcaagcgccaaagggaagagaggaaagcagcaaggtgaggaagagggcgacctccgattaggtcattgggaaaccctagttttcccctttgagtcaccgcgctggaaagacgaggagaaggcgaagaagacggggaggaaatacctgaggggttcagacttttcactgcactgcatgggccacgtccatttgcctcgtctctcaccttcgtgtatggggtcgtcacccctgaagtccagccgcgccaacgaccatcgcaaggaacggcccattcctgtagcgtcttcctgggcttagagtttttcgctttttgaggatggggaaggattttcccggcaatgacatttgaggcatggggtggttgaggagggggacggccaggagaacgaaggggagaaagacgagccatctcgccaaccgcacgtgaatctaatggctgagcctcgaattttc

SEQ ID NO: 19986 - DNA, 938 bp, Zea Mays
gagagctgaacggactagtcaaagcagtctgcaattggcggccatatttgtgggggcgagcgttcacagtaaggactgatcacttcagtttgaagtacatattggaccagcgcttatccaccataccacaacacgcatgggtcatcaagctatttgggtatgacatagaggtggagtataggccagggaagatgaacggcgcggctgacgccttatcaagaagggatgaagaaccagcggtagcactgtccactccaactctggaagtttttgatacactccgggaagagacattgatagatccgtaagtccaggaactgaagacacaattggcggcaggaactgcaggagaagaatgggctgaaaaggatggattgttagtatgccggggcagagtcttcgttccaaataattcaagtgtgtgggatcagttactgatggttgcgcatgtggcaggtcatgtgggagtagagaatttgcatagatggaggagctcgttccacaacgcccatattaggaaacgggtacatgaatttgtttggggctgtacgattttccaaagaaataagtctaaacatcttcaccctgtcgacatgttacaaccattctctccatcggtacaggtcacggacgaactgtttctctaggagcggagaaatgttgcggatgcattcatggggaaggcttatgctaggaagaggcacgtggagggcatgatcacccttggtgccagcagcttggcgtccaccagcacaacaacaggtaagtcttagaagtgttagctgattaataacttgttgttagctaattaatagtcggttggttagctatataataggagggagttgttatctagataagggcaggataatacctcatgtttatctctgagcagataacagccgaccctgatctataaaaggaaagcagtaactagg

SEQ ID NO: 19987 - DNA, 303 bp, Zea Mays
ggctgcagtagttggagtctgcgtgtgtagacaggtgatgaagagcggacgggagggaccacgctgcaattggatgaaaggactgacggatcacggacgagcacgaggacgagaaagacatcagcttgtcatagcagcaacgaattgaagctggatgaggcaccaccgcgcgcccaactacccaaggaagaagagacgagcggatggataggcagagcgacgagacgatagactagcgtacgtctggtagcacgcagtgcggcgaatgcagtctgcacttgtcatgcctgcattgtattgtac

SEQ ID NO: 19988 - DNA, 343 bp, Zea Mays
ggaggagctccccgccacgacttctaggctttagcggcaatgagatcgaggatgggcagcagcggcgctcacccggatctcactcacgttgctttctcggttgttaacggctaatggggaacggcggcgctagggtttggggaggcacggcggcacgatgctttatacccgggagagctcggagtcgttgtaccggccaacggagccgctgccgagattcctgcgcgcgattcacggcgaggctgttcgccagggaaggagacggcctccacggttgctggcgcgtggaccccgcagaacagtgagggaaggtgaacgcgaccgcgcgtgtgggactgaccgg

SEQ ID NO: 19989 - DNA, 370 bp, Zea Mays
cgacgatgtatttacatcgataaattggttacacttatcccgaatccaaacatttgtctcagattcacggtaactactgtagtagatgagcaaatatgagcatcaaaggaaacacatgagagtgtgctggcaacaaagataatacttttgtacgacaatcattgtaactgcgatagtagatgaataaagccaatgaggcaaagacagcctgcagatatgatccatggaacacaggtattgataatactgccaagatagcagagatagtatgcccgaggtaactgtaatcccatattttcatgtaccattttacctagaccgcattgttccattcagatgctgtccactgttaggtatgggacatgccagc

SEQ ID NO: 19990 - DNA, 1005 bp, Zea Mays
gggaagggagagagcaatggaatagtctgggatgacgcgctagggagagcccaccggcgtataacgtatgttcctggtccgccacatttataggatgggaatcacaccttaaaatttagagtaggaaggggtagaggaggtctcgaaacatccaaaactgcaggcacacacaacttctaagattcgaacctcaacccatcaaaatcaaaagagagcgttagatgagttttgataactagttgggataagaaaattacttgttgaaaaaagcacgaatgatatgtgttaagggtacgactggaaattagcctccgccttggtatgtgaaattacttcttgttaaaagactctaggaattgaaggcatgtccgcgcttcatggaggctttgcccatcaacagatcgacgcgtggatggctgcgcggacgtgaatattttctagactacatctgatttctcctcagtcctcacccccgtgcttcacgcctaataccacatctccaaagcctgttggctgtgtccattcgtgccaggccagggacaggcacatactgtgtgaggcactgaggcatggacacgtcttgagtgatggctaaggccatgatgtggggtccgcctatgctcccaccacactcacgtctcatctccactccatcctctgtactcctcttcctcttcccttatctctactctctccttactccagccgcccacgcgtctcctccactcccgtagtggtgaggtttctctccctccattcctttcgcctgctctcctcgcctcatgtcggctcgccctcgctggtgccattcatcggcgccatccatcctacctccgcgtgggtcaccattgtctgtcggctcacctgctcaacctcatcagtgcagtcacaccactgtcctcgcttcttgccttcgtgcgcgtcccctcgctcgcttggacgatcccgagtcgactccactccactccgctattcgctcgcgccgactcctcatcctctcctggc

SEQ ID NO: 19991 - DNA, 533 bp, Zea Mays
gaaggtcacgggccagtcaaccgtgggaataggcgtggcaatcggcatgaccataggcgggccggcattaatcgcgctagcaagcgcgcaggagtagaggaccaaccgctaatcaagctttggccccacctgcaggctcgcaccctcccctgaggcaggcccaggggccactgtcggtaccctgaatcaggggtaccctcttctacagtatgaaggcgctgtacatacacaacgcctccaggtcacacggagaacggcactcgaccccaccacatgggcaggactaagggcaccgcgtggcaaggaaagataatacatcctaggtgccttattgggtacagaccttcgcagaaggacaccggacccctgtgcgtacgaatctgaagctcccaagaagacatgtctggcccctcgggagggccccaggtccctccgggtaaggtccgggccttaccaaggtcccaaggcggagaggaccccggcgcgagcaagggtctagtgcagacacgtgtctaggctttgccctatgctcc

SEQ ID NO: 19992 - DNA, 383 bp, Zea Mays
tagccataagtgaacccccttgtgaaaatgtatcagccactatattctccttgcctttatcgtacaccattatgaacgataatccccttaatctgttcatggagttcctttgaatgtttggctgtgactgaactgccatgccactgtttcctaaactaaaagcattgagccaccattgtgtcagttcagtcatcccatatcgaacactgcctttgctctgaatgtcatagtgatcacaaacatcgtacagtaatgttgctggggacatgcttccaatgccaacaaatgatgtagtaaaatctgagactcggtgtagaaattccgtacttgagttggagaggattcttacaccatcgcacttagaaatcagttttgggggttca

SEQ ID NO: 19993 - DNA, 904 bp, Zea Mays
cctttcagagtcaaattgagcactgagagaggaattcaataaattgacatcatctaaggaagcagaaactcgagccaggtccatccgaccatgagaatacttctcctcaagctcagagtaccatcggaccatatctagcaagaaatagttgaagaaagatactcagtaaaaagcagattaatcaagtagccaaagaggaaacagaggcactaaccatcatttgtcatctccaaatcagatacccgccgctgaagtagcatcggattccaatgcgtcagagacagagccctttctgggacagaggcaccctgtgatctcagctgaccagccatctcgtcaaccaaagcctgatattgaaaacgaatgagtgcaaagacagtatttcgctcggagtatagccagaacgggaaaagccaaattacctgaagattggagaagaacgaatgaagccccaaatcatgagaagccagttggtgactcgacgaaggaatatcaaccgaggcaatctgaagagcataattggggatcaactcaacatcatcagcaggaatcaaaactccagcgtcaggtgtgccggtctctaaggtgacttcctgatttgaagcacgtgctgctgccatacaattagaatgtggaggagaagaaccgatgtggacatccatggaggtatgagaaggggagcccgctcggacaccctcgggggctgggtcgcagcctgcattgcccaccggagccggatcaccaccgacagcaccctcgggggctgggttgtagctcgcgctgcccacctgagccggatcattactggcaacaccctcgagggctgggtaaccgctggcgccatccttgaggaccgggttctcagcagcagccacctctaaggctgaaggattctcagccacct

SEQ ID NO: 19994 - DNA, 448 bp, Zea Mays
tgtttatcgcgttgtcctgaggtagtaacttgatgtgaaggaggggtttaatcatttgcctgagcagttgacttgggtccaaccggtgccgtgttacgtgaaacgacgagagttgtatgactcattttcaggtgtcttgaattgcttattgaattcttgcaactgttcggtgtcacacccggcgatacacccaatgggtgtgcccaaggggtgtctgccctgcatagagtgtttatcgcgttgtcctgaagtagtaacttgatgtgacggaggggtttaatcatttgcttgaacagttgacttgggtccaaccggtgccgtgttacgtgaaacgacgagagttgtctgactcattttcaggcggcttgaattgcttattgaattcttgcgactgttcggtgtcacacccggatccaaaacccgggcgtgaaataatcatcaagtgtgc

SEQ ID NO: 19995 - DNA, 413 bp, Zea Mays
cagtctccttcggcatctcccagttatccacaagtggccataccctgtaggctatgtgctcttggatcaggtctcttgtaccaatgaaagcacaaacattgttgaaagccttttgacatgcttcgacatcattttcaatcgccacggtcggccttcgaaggccgaagcgagaccagatggggcgttggataatcccatttatgtcctccctttcaatctgattattcttaacataaaaccattcctccatccaggacccgagccaccttttccgaaatgttggaaccgggtagcttgcattagaacgagcaatgaatccataacaaccgaagttgttgtgatactgctcttttccagtagcctttgtctcgtacaacagttcgtgcatattgcataaacacttcacgctcggt

SEQ ID NO: 19996 - DNA, 546 bp, Zea Mays
cgcacacgagtcaagagaagagcacaagaaataataaagcggagttacagctcaaacacgtgctcaaatctctatctagcaaagcagcagcttggtcacaaggtcttggtgttgtaggatgttcaaagaatgcttgggtaactgctccatgcgcctaggggggtccttttatatccttaagggccaagagagccatttgttctttatttggaaggccctagttgccttctgttcgcgggaacactagacagcgaacagtgcgtgatttccttcctttcctggcgaagccgaccattggctccatgatgcaccagacagtccggtgcgacctagtgaccgttggctcggcacacgtgacagtcgctgatcgcgcagccgaccgttgtctaggcgcgcagctggcacaccggatagcccggtgaattatagccgtggtgcctggacgaattccccagagtggcttgttcaccggctcggtcgacatgggcaccaaacactatccggtgcacacgggacagtctagtgctccccagactggtgcaagtt

SEQ ID NO: 19997 - DNA, 628 bp, Zea Mays
ttggagatgagagtgggtgctttggcttggggataacctgacggagctcacagaggcatcaatttatagagatcaaccgtgagcacgacgaatttgagcggcggatggctatcggtaagaaacaagatgagtcaccggcatggtgattcgtggccttcaccgtggcggcctccccggcgatcatcggatatgcataatactggtgattgcgacgtggtaattgctgaggcacgtggcgttcggtcgacgggcatccaactccggtgatgataatctcggtcgaccgcgcggcaagtgggcattacggccggaccagctagcggccgaaatttatcccaccactgatcttttcaccccgccccagtgttatccactcctcatcgagcacgaatctcccaggcgaaacccgaatcccggcgcgagctcaccggcgacgggtgcactacacctacgatcttcttcagaccactattcattctgaatctcccttcgaagttgcctgacaacccatgtttgagccacaattactccctgctctaggcagtaacacacctaccttcctttgacaaagttgtactccaatatatggtctccaatattgtcacagtgacccaagtcttaactccac

SEQ ID NO: 19998 - DNA, 479 bp, Zea Mays
catggctttaacgtgatcacatccggccttctccaagatggctaaaattccccgcgcaccagaaaacgcgcaaacatccccacgatcactcaaaatttcttcgaaggcttcgtcttctccacttatccattcaacgacgccctcggggtcgcctcgtatgaagttttcttcagtagagtaggcacccactttggcgaaggtagttttcaatttcttcacacaatccaaggatttctcgaagcacatttccttggattcgcgaagttcttcaacatttttctctagcttatttttccagtactcgctgatttctcgattatcctgtgcgagcgcacagttctctttagcttcggccagctgtctccgaaggtcttcaattttggttttctgggcttcggcctgagctttataattagcttcgtcttcctttactttgtttaccaatgaaatcaaaattttatctttctctagaccttcgt

SEQ ID NO: 19999 - DNA, 499 bp, Zea Mays
gcgaggttgttcctatgggtcacaagatgcccaaagacatgtaccagtccaagaaattacttgaaggtctcagtatggagtatgaaaagattgttgttttctaggaacatggcagagagcagaaatgcttaaaatatggcaagtcgaggtacgtggatcttgtaaatgaagatggggagaaggtggtgacaaaggttgcacataaatagcttcaatacatgcctctcactcctagagtgaaacatttgtttctctcgaggaagactactatgcacatgaggtggcacaaagatcatacagacatacaagatgggttaatggtgcacccatcggatggtgatgcattgaaggctcttgacaactttggtctagagtttgccagcgatgcaagaaacgttgatatcggcttggcaactgatggtttcatgcctttcaatatgaccactgtgtcatattcatgttggcctgtcattgccataccgtacaaccttccacccgc

SEQ ID NO: 20000 - DNA, 701 bp, Zea Mays
aagcgggcgagagagggaggaggagctctcaagtctcttatgcggaggaggtgaggtaagggctacagagctagagtcccaactaagtgttggctcggcggcagggctccaatctccaggttttcatcgatgcttcattcctcctttcatcggtcggtccatttgtctagtggtttacctcctccttttataggccaagccaccaaggtgggggtcagccatcgttggcttcctcgaggagtcaccgggtgatggtaaaaccgagcgctttacccatgtgaagtcgtgctcgttcgtgagcgtctgggtcgcctggtcatctcgtatactttatggtggatggtgcgggcagcgtggggcctaggcgccattatttgagctgcgccaacccctggccttcatagcctgggtctccgcacaacttgtatcattgtgccctgcaggtggtctacgcaatcatgcctagccttgatagatcatgaatgcaccgcaggccgaggggcacgtgggccataaatgcaccacaatcctaggggattgtaggtcatgagtgcgctgcagtccgaggggttcataagtaatgagtacgctgcagcccaaggggcttgtaggtcatgagtgggaggtggactgatgcctctaccacggctcggcgccaagcatagttaatgcggccagtcacttacaatgggtcagtatcg

SEQ ID NO: 20001 - DNA, 439 bp, Zea Mays
agagggccactgtgaacgcatgtgggagaactcgtgccaccgccgccatcccttgcctccaccgccgttcagaggatgcggtgcagtcgaggacgtccgaccgtgcgaatggatcaggcggggaggataattggtgtgcatgagacatcgggatggccggacttcttcgtcgtcgcaccaacactaccgcaatgccactttgtgtagtcatcgggattatatactgagcaattctcgataagtgagcttcctccaaatccgccttgttcccctctatgtatagtactgtttttatcaggattagacctcgggttggctagatggctcatcgctggcgatggtccaccggggtgtcgcgtgctccgccgtcctagtgaccgtgggcgtgagtgatgaacacatgacgttgatccagccatgggcggatcggattagatga

SEQ ID NO: 20002 - DNA, 437 bp, Zea Mays
gggaatatggttaagatagatatggatgagatagactacatgatgtaggtcaaaagtttgtttgatgttaggtggggataggcagatgttacaagtatggtttgcagttgttgtgctggtaaatgttgctgttttgataagtattggtaagcttcacatctctggactaactcggctgcgccactttttgccgttggcaagtaaaaaccggacctgaagaccttcctaaccagagtcctggatgctgcgtgtatcccgcattgcccagcgtggatttcatctaacagttgtttcccagtggctgaaagaatgcatttcatgaggactcctgtcgcgccccttctatacaatgtttccccaatgagagtatagtgagatgactgccttgcgatgcgttctgctgcatttttgtcatccggctcctcttcattctttat

SEQ ID NO: 20003 - DNA, 372 bp, Zea Mays
atttactcatgtggctgcagctatgccgcctcgaagggctcgtggcagcctgcaagatcatagtggggattcaatgagtccggcggcaatgttagccgcgatgcaggtcatgcagcaggagttggccattctgaggcaagccattcccgttgctcctactggtgctgctcaggccacgagtgctcagggtgtcggtattggaggtgttcctaggggcgctgtccctacgggtgctgctccaattggtggggctaaggtgccccttcctatcagtggtctatctctgatgcagtggatgggcatgaagttggacacttttcatggcagtggtactccagttgaggcggcttggctgacttatgtggaagataa

SEQ ID NO: 20004 - DNA, 430 bp, Zea Mays
atgagtgctgcttcggtctaagaggcggtagacaaaggtgtaaaaaggcaaatgcatgtctattttatgtccaaagttctcggtccatctaaaagaaattatacagagatggaaaaagttttgtgtgtcatcttgatggctttgagaaagcttcaacactattttcaatatcacaacgttattgtgccatcgattcatctcaaccactcaaggatatcataacaaacagagaggcttcgggccaaattgaaaatgggcagcagagctcaatgagtttgtcatcgactttgttcatagatcatccatccaatcccaagcattagtggatttcattgccaattggattcttggcccacgggatgaagctacctcgttatacgatgttatcgggacagttttctgtgatggatcatggagatccttcggagcc

SEQ ID NO: 20005 - DNA, 560 bp, Zea Mays
tcaagctggtaccctataggaaccctaagatctaaatccaacggtcatagttttaaaggggggaaatcacccagtatccatccgatcgggaatctacggctaacgcaaattccgaccgaagcgttatacatgatctaatcacaatcgtatgttccaagatccacggttcagatttaatcgaccgagatctaatcgtggccacacgatcccatatcgaaggccctagtttgtcttccccaacccgcaaaccgcacgacggcggaacgcatcgccatggcggcgaggcaaaccagcgacacattcccggtactatagttcccatccacctgacaaactccctaaatcgcagcagaatgatatggaaaacagtagggagggattctcaccggagacctatgtagcgacaatagcgtgcggcggagagcggatccacggcgattgcgccgcgtcggtgagaaattcatcgataccggtgcacaatccaactagtcccggccgcgagcacctccccactagtccagcgaaactcctagggcttgcaacgtggcaatggcgacggc

SEQ ID NO: 20006 - DNA, 383 bp, Zea Mays
cacaggcagcaggggtagagatgattggctgggactgggaataccttgctttatgataaggtgacaggctcatccttgggatgatttgaaccttacctaatcaatgacagcttaacttaccaagcatcccttattcaaagagtaaacaaatagtttggcccctccaacaacccctgttgctgctttagaatgtatatgcaaggcattagcctgataggctggtacccgcatgtaacaagcatctacaatacatactgtcggaggggtgaatcctccgaccgggtggcgggttgcacccgccctagtcctcggatgagtaggcttaggtgtttgcctggccttctagatggacacaagaacacaagggtttagagtggttcagg

SEQ ID NO: 20007 - DNA, 483 bp, Zea Mays
gctgaaacaagagggcagggagcacgaacggacctggagtacgctgaccacggtgagcaaacacacggggcaaggactggtgcaatggatgcgtaattatcctacgaagctgcgggtgcactcaatttatacaaggcttgagcggtggccagtgaatttgagttgggcgcggtggcgatcggagaaagaatgagtcactggtgcggtgattcgtggccttcaccgtggcggcctcaccggcgacgaaccagtagcagagagtggcttacggtgactcactacgacatggtaaaacgttgaggcacgcagcctggccagataacggtgacttcggtgatgccagcgcgactaaccatggcgggacacggcgactggtccggccagcgaccggattcaccccgcgctggatattctcaccacacccgacgttatccatacttctcatggcacgaatctttcaagcaagcgagaattgcaacgacg

SEQ ID NO: 20008 - DNA, 502 bp, Zea Mays
ccgggcgccaattaccagagaaggtagggtctactgcacaaatgtttccaagactcagcttcctactctctggacggcgggttaatttgtaaacatcatggggtctctttagcaaataggccacggcaaaggggtatcgatcactttcagccgccagattagaatcctgcggctacgataggtcatatcgatgccatcgacccgcgcgagccatggccatctgattgaggatcaatgtctttgagtttaagacgctgcaagccaatctggtacgcgcgatcctgatccaagggtgaagatcaattcgttgaaccggtatctgctatctaatcccagacgttcgcgaacagatcgacggtggcagctccttcttctctcccttaatcaacccgacgatggcggagtagccgccccggtggcgcgccccctggcaacacgaccgaccggcccctgatcccgaatccgacgaccgcgacatgaaaacgaaagcggaagcgagcag

SEQ ID NO: 20009 - DNA, 426 bp, Zea Mays
ccggttcaatgtaacgcggccggtgggtaagaaccttcacctttttgcccttcggcacaggctcaactagggtggttgaagcagcagttttcctctttttcccttggccccgtagcgggtagcggtaatcggggtatacgaagccgatggcatcaaaaactttgttcagtcttttctttccccaacctccaaagactgcggacaaagcattatcttccgccttggaatatgctccaagcagttcatcacttgtagcttcgatacacttcagccagtcgtcgtttggctcatcaaacttctccctgaatctgaaggtatacttcagctggaccagaccactttcgctagagtcggtggtggtctccttcggtatttcccagctgtctacaagcggtcatactctgaaggctatatgttcttgaatta

SEQ ID NO: 20010 - DNA, 437 bp, Zea Mays
ctcaaagacgtggctcccatgcactactaccttgctgggtcggcacaccactcacaaatatcacctttgtccagctttgtaggtagcagaccaaagagatatgtcttccacttggggatatgctcaaatggctcaaaactgatattttcaacagggagctggagagaagtctgctcttatgagcagattctagtggatccagaattgatattttcagtagagagtggggcccctagagcctaagatatgcactacctttttatccccatccataccaccaagtgcaaccacgtggccattcttcttcagttatttaacaaaccttgaaaccacaacattagtcttgctgcccattccacagctccaggtgcagtccctgctaactcccaaattcacaatgcaacagacccagctcactcaacaaaagtgattcccta

SEQ ID NO: 20011 - DNA, 468 bp, Zea Mays
aatccacggtcccggtttaatacagccacgatcggctcatactcacccgatcagatatctacggcctagaatcaatcacgcgaagggttatcgctggcatctaatccgagccgtccaacgagatccaatggtgcccgatacttcctcgctttagacagtcgtgcacggcggcgccgccctcgcactatggcggttccattgccggagtagcgcccaatagacgttctagcgcccctgacccaatccaaagtgtgctacatgaagcgcatgccaatacgaacagcaggggagggtcattaccgtctttggccgcgagttgaagccggtccatggtgcgggcagaaacaacggcgcagttgatgctccggcgagcaattgatggctgcgcggtcgtcgattccacccataaactccacggatggtttcgcgctagctcggtgcaggccccggacccgatcccaaccttgg

SEQ ID NO: 20012 - DNA, 738 bp, Zea Mays
cccgaggtgctaccgaactctttctctaaggtatccccaaattccttgagaagatcatcaaggctcgctagggatatatcctcgatgtcggaccaatcgtctattctagggggaggtggggctggaggggtcttcttcttcttcttctctgtttggcatcctcggttggtggtcttcttctggattttcttcttgggagtgagcttccttagcttcttgtcatagtccatctttaaggttcgataggcctcacgggtgttggcctcctcgccttctgctatgtcgagactctcctggagagatgccttctcttgcttaagctctttgacctgctgctctaggctttccactcgggagtttaggtgggtgcagtgggaggagagctcatcgtagtggttgtcgagggtgtggaggtatccggccatgtagacgatggtggggtcatcttctgtggggtctcctcctgacagagcctggagtcttttcctccaggtgggggtatttttgttgctgggtggaaaatatcgaaggggggtctcagagatctctcggctgtagttttggcacagttgtttaagggcttttcgggcaacaccctggcaagtgtctgggaagcggtgcccgatgaaggtaatttggaagggagggtggtttgggtagttccggctttctcccaggtagactgccatagagcacttctctattccattttcgcggtattccttacagacatattcg

SEQ ID NO: 20013 - DNA, 276 bp, Zea Mays
tttagaacggaaatcaactaaaccaatgtcctaggtgcataccagtaacttcattagtccttacctctgagaagcgagaaggagattagcaagtgaacaacttacacaaatcagagggtaaggagatcatcacagcatacatgaataaggactacgatcatgaaacgaacaaagcatattattgcctattcataaaaaatagctaagcctacggacaactataatctactaaataaaaaatcttttgtttgttgtttcccacacaacacataaaac

SEQ ID NO: 20014 - DNA, 658 bp, Zea Mays
ctgcagttcatgacccgtctaatgagcataaagtcaaagtttggttgctcagccaaatgttataaggcgattttggacttgtttagtgatgtccttcctgtcgatcataaggtgcctaaagacatttaccggtcaaagaagctgctaaaggctttgggaatgccatatgagaagatcgatatatgcccgtccaactgcatgatatattggcgcgatcgtgcgaaactagagaaatgcttgaaatgtggcctgtcgaggtacatagaggtggtaaacgaagaaggggagaaggtgacaacaaagagggcacataagcagcttcgctggatgcgtctcactccaagactgaaacgtctgttcttggctagtagaattgcgagccgcatgaggtggcgcaagaatcgtaagcccccgaaggatggggtaatgcagcatccgtgtgatagcgacgcatggaaggccctggacagcttcgatccagaatttgctagtgaagagaggaatgttcgtattgggctggcgacatatggtttcacgcctttcagtatgaccgcagcgtcttactcatgttggcctgtctttgccataccatacaaccttccacctgatgattgcatgaaagatgagtttatgttcttaactctcatcatacctggga

SEQ ID NO: 20015 - DNA, 551 bp, Zea Mays
ttctcatcgagcctgttccagacctcatgtccttttcgtgggatcgttaaaacgtcacacctcacaaacgtcgtgttgctcatgtctacccccgtcttcccctgacatctacccctcggcgctaccatcgtctacccccatcaaacctacctcgcctcgctccaccatgcaaccactgcctccatgtcgacgcgcgcttctcgccgctgcactgcatatcccactagttcgagtcttgtgacaacttcgtctcgccaaaccatcgtccacaatacgcgctcgtgtgacacaagcgcaggcgcctcgtttcgtcttgctttgtcacataatgtcccgcacgtcgtgcatgcaatatccttgtcgcacccctcctctatgcatacgcacatgtccttctggtttcccgattgccaacctcctccactttccctagatctagatcatacagacagagcaggtgccccttaggttatcgatcgtcataccaaggtgagtgtccttcttctctcttcgtcccccacacgatgccctcctcctccactaatccccta

SEQ ID NO: 20016 - DNA, 790 bp, Zea Mays
cctcatcatccgggaccgagggactctcgacgtctagcggggcgtggggatcttggcggacattgagttggacgggggtacgatcggcttcacagggggcgctcgtccgcaagaactcaccggcgccaagtccctggtggtgcgtggcgcaaccgttggcgcggcggaccgactcggcgctgggatctgctcggtttacaagttcaccaagggtgagttctcctacctactgttagttgtcatgtaggcttcgagtagtgacgaccggaatgtagtctcgggctcggtgggcgagctttgccaagctcgctgccgtgattatggcgctctgccacgggtgttcggcctggggtagacgagagagggtgaagggaagaagatacgccgtggtcgtggccttcccccgaaagcagttctccatggccgggagcgtggcgcgcacgcttgggctcgccgtcgggtgtgcacgcgccgccgtcctagctgcggtaaggaagaagatgggcgccggcgcgccgctgtccctggggaaacgcaccaactcgggtctgtataagggtagaagacggccctgggtccttggatcgtgatcctgcgcctgggatccgacctcgggtattttgtattcgtgaccgttgatcgcttacccaatggacagatcggaccggggttgtggcgtatgcgtggccttggattgggatccaacggctccgagtgatgcggccgtatgtaccgtggtgatttaatcctggccgcccagatcaaatcgtgcggctacgatacaacgata

SEQ ID NO: 20017 - DNA, 370 bp, Zea Mays
tgggccagcaggcagcgattatagcgtccatcgcgtgggcaacaccatctaccggataaaccaaaaatgagccgtcgctctcctgcttgcgttccccagcctatatataaaggctagctagccacccacacgacattgccaggcactctcgctgagacgctgacccagcgtcatccagagttcttcaatagatcgagacgatggtgtgttctgtcctgacgccgtcgtctactcctccgagcgtatgctgccgtgcgacggagctgtccgcgtcggcgcggccgtatcagccgggtcgcgtcatcttggtgaagtggtcaccgccgcctcgtggatggttcaagttgaactttgacggatctgtttatca

SEQ ID NO: 20018 - DNA, 316 bp, Zea Mays
tggacgcataacaaggaggcggagcaggggggtgccttcaatttaaagacctcggccgagcttatcacgaattttggattgggattgagttcaccgcggccggatatttttacggtggcctgctcaccgtggcgcgcgagagggaaatggttcagggatggtaaccggttgcttgccacgacctttacgatgtggaggatgaatcgctacatgtcacggccagggaaatggagaactccggtgatgccaacgcgaccaaccgcggcgaggtaagggggaggcacgatggccggaccagccagcgactgggtttacc

SEQ ID NO: 20019 - DNA, 570 bp, Zea Mays
ggaggatggaatatgaagttaggcgtaccattggtcgggagatggtgttggctatgtggatgcccaaaaccatgcccccgatgactgttgtcgaagaagtgcccatgtgggtgtcgtcgttgtaggcgatagttggtgattgctctagaatcagctgatacgggtcgagaatcctagcagcggaatcgaactacagcagcgacgcctaggtagctagagcagcccacttggagacctcgtcgcggagtagattgatggaggtgcatatctcatcgatcgaagcctcgactaagggccaccatgactcgaaggctgcggaagccgatgccacggccccgaggtgcgttgcagtaacaacttcgatgtcatcgatgcgctcggtcgtcgcggagacctaggcatcaagatccgcgtggatcgacgttggactcgtgacggtgagactgacctccagatgttgtagggacgtggagttccgtcgggtgtggacaagcgcgcgtcctatgcagataggcgatcacagatgtctcggagaagcttggactattcctcggtcgtcgtcttcaagtt

SEQ ID NO: 20020 - DNA, 1889 bp, Zea Mays
gggcgcatagggcacaaggcaggcccattgaagccaacttcagcagctagggacgacgcagcgtcgcctgggagcctgcctagtcgccgtggtgtcgtctaaggtgaccaggtgtccgcctaactaggtttaggcaacgcgactgggcatggcgtccattgccggccgcatggatgcctaggcaatgccgtgataactatgccgctctctttgcttagaaaaaggctcagcaattttttacaagaactctgaactctaatggctaagctaatgacatgagccttcagagggatacaagctatcccttggtccccataaattagaactgcatacaagaggcaacaagccaacagagaattccttcagaagtacaaaactaacaaattacccaagcctgatgcgctgatggttccagatgtatgcacagtgacacttcttgccctattgaaatgaattacagttccttgtacgagaccccagacatcaatatcttcaacacgacagacctaaataggagaaagataccataagctgcatcttatgagagaatctatctgggagctgcatgcgagtgttcaaaaattgagtgtacctgaagggtaaatgacaatgaagaatttagattgcaatcttctggtggatgaattatttccacagggcagctatcagcttcacaattcagctttggggccctaatagatgcgcaagagcttattaatgagcaaaaagatttccaacataaaaaatagggaaaaagaatgtctctatgtgatagctgaaggtaaaagtatttacacatcatcgctacttctgtttacaagtgggccccgtaaaacagaaccaggtccaacctacaaaatgaatatttatcactattctttctttaactggtcacagaagcgaaaaagaacataatatctcatgtgaccacatattgaacattcaacccgggtagttgtaaatttgaattgtgtgtacaggaaaaacccatcagcagtatagtatgacacagcagacaccagacagcaaacaagacaacacacaaaagtatgacagtcattacagcagtataactattgcttagatacacttaaaataagtggggacatatgactgaaaccattacgattagcattgctataaaaattacctgtactggcaatcaaaaaaaatgaccagtactgcatctttggtttgactagagcagtgcagcactgtagagttcaaaatgtgaattgctatgcgatacgctaagattgcagcaataaacaaatacatcagaaaggtgatggctaaaaaagacactgatgctgaaaagcatatatatcatacttgtatgctgtagaacagcgaaagaataaggtgttgcgcctcaattgtgtctccgtccccagacaaatttaggagaccttggccccgaactccaagattagcattagagtgtatcacagatgattcctgaaaacatatgagcaatagttatacatactgagcacaagcagcaaaataggaagagcggtaattaacattggaccaactagaaaccttcagaactatcaggttgctagcatccaacaaagatgttgcaactatcgaatctccaccgccatcaatttccattctggagttccacataaggagcatctttacagacattctcaaagcaccgaacacctagaaaaaatcaagttaaatgtacttgtaaagcagatacaatgtagatgaataattgaatatcacaagaaaccaacagggaaaataccttgattgttgagtcactcataagaagctcctcagccatcagttcaaactccgagtatggataacgagtgagaccaaaagttagaatagcaccagaaagaaggctaagttgcccttcgacctgaaaa

SEQ ID NO: 20021 - DNA, 464 bp, Zea Mays
cgggcggttccgccacaggcagcagcatcaatgtcacctttctagaacacaccaggccctcaggatcccgatactgacctcattaagtcgaatacccctttcttcggcatcgaacttactggagagtacccgctagggcatctctacatgccggtgaccttcggcgctccagacaactaccgaaccgagttcctatgtttcgaggtagctcgattggagtgtggatataacaccatcattgggaggccgggactggtcaagttcatggccgtcccacactacccttacatgatagtcaagatgccaagacctcaaggcatcatccctgcccgggctgacttctaaggagtggcagaatgctatcgggggccatacagacgaccctcaccgctagaccctcagtagcaccacgacaaccaacaacgaacgccgacacgtcaccaaggatgacctcacaatcccaa

SEQ ID NO: 20022 - DNA, 535 bp, Zea Mays
cttgattagaggatggagtgcgagattcgtcgccatagaaggaagcctccgcgggccggattcgtcgccatagaaggaagcctccgcgggtgggaagcggcgctgcagctgcggggctggccaacgaaggaagccgcgggattcaaggatggagcgcagagggaggcggatggaacgcggtctacgaagggaggcggtctacggcagaaccgagaaatgtggacgcctacgataataacataatgagtagtagagattttatttttggttctttaggtgttacgcgagagcgctgatccgatcacgatccgataaggatttgcacccttattagatctcaatctgatctgttagtgagttcttatcgttttcgcggaggcgaccctacataaggcgcctcacagccatcgctagaaacatcctgaacacaagttaggttttgcctctgctatctgctgcgttgccattgtagtcttcttcatcccaacgctgatgtgcatctgcgattggagagtaggtccccgttacctttgag

SEQ ID NO: 20023 - DNA, 521 bp, Zea Mays
aggagcggccgctgtcggaggtggtcgaccccacgctgctcggcgaggtgcacgccaagaagcaggtcctggccgtcttccacgtcgcgctcgggtgcacggagcccgaccccgagatgcgcccgcgcatgcgcgccgtcgccgagagcctcgaccggatcggctgacttccagcgcgacggcgtccggccggccgccggttactgatcatcaactacgtaggtgcaatccaacgcataaaagagactcgcagtcctgttcatgtagattagcgcagttaagcattgtggatttcagagacggtaaacgcaggtaaaaacaatcatcatccgctccatctgtgaatgacgaaggtgaatcactcgacgtagcaggctataggctagcagccgtgctaatattttgtggcaccccttgatccattccaaagcgaactctgttgggagttttctatcgttttgccactgcctacaactgtgcggcgctttgcccaaaagcttgcgatgcgttccttggggacc

SEQ ID NO: 20024 - DNA, 666 bp, Zea Mays
cggtggagaaggagacgactcatgcatgggtagagtagtaatggaaggacaaaagagatagggtggaaaagaagtggtgtagggccaagtgccaaatgcatagtgaccatggtgtcgagagtgactcaattgatgaggatgaagataatgacaatgcgagtgtgggctctgagctttgggccattcctgatgcctccctcgatgcctcaacaactgactctgtctcgacttttcctggcgaggtgccgagtgcctttcccatcgttgagaagactaagttcccaacactccctgccctttttctagaccaattgcctcggtagcacttgcccctctgcccatcgtgccctcatccgaccggccaccgagggtagcttgtgggggaaattcttctgcctctggtgtgtcggatatctcggctaacacaccattggggccacccacactctcctccaaggtgggtggcaggactgatgcttcgtttgggtgccacgggggtgaggcgccttttggggggcaaaggttcgtcagggcacgactaatcaggcgaggaccttatgggtccccatcgtctggctccttttttgccatagctctcgatctttcccctttcttttttgtcctacatcacctctcatcctgtttgaaagtcgcctagaggggggg

SEQ ID NO: 20025 - DNA, 763 bp, Zea Mays
cagatttaaaacccgaaggggtatgcaacgggtctaatcacaaccacaggtggttgatccgacggcccacgcgtattcttgcccacacagccgaggtgaagcggcggcgcgccaggatccgtggcggaggaactccggcgagatccacgcccggcgctaccatgctccgaaacgaaatgggcatgtgccacacgattcccggatgatgacgaagcaggtagtggatttcttaccgggaatgaaggggccgatagggctgtccacacgagcagtacgatgcacggcggcgcagcgggtccggcgaggaattaggcggcgcatgatccaattccagtggtgggaaggttacccgtaccattgcgatgccacagcgaatccctaagccaactgtcgcggctagagcttgacataatccgtagttcgcccctggcggactcaattctccccactgcgcacgccgagcccggagatgcagacggcgaagaagagcttgaactagggctcggcggcggcgaaatcccccacggacaaggcggaccgatccaatccggtagagggtcctaaacgatggcgaagatgccccctcccggcgacggccaccacgcatctcccctgcttcgcacaatacgcgcggcaaggatacagcctgcgccgattttggcttatccatagagggacgacgttgctcaagctttatactcctccctccgctattgacgtccgagctcgaccccaacaaccccgaagcgacggcggcggcttt

SEQ ID NO: 20026 - DNA, 345 bp, Zea Mays
gtgagcaggcccggtgacttcgcgacactgagacagaagaacagggatggcatgtacacggcactggagcaattcgaggtccgtttcttgaacaattttacggttttaatttccatccacgatcttagctcacttcacaatgcgatcgcagaacgatgtttacatggtgttccagaaagcgataacgatgaacagccaggacaccgtgcctttcagagaggttaatttcgtcgctcgcctacctcttgttagcaggcaagatgcgaggagccaaaggctagagacaaggtcttcttgatttctgcagggcatggcgctgctggatcaagccaagctggtgttcat

SEQ ID NO: 20027 - DNA, 873 bp, Zea Mays
aacctaaggacactaaaacggaagatgagagagtatgaacagacctggaacaagctagccacggcgaggactctttcacggtggcggaaaccgatttggggaaaaagagcaattcgtgggctctggtgagtaattgagggcacaagcggttggattggatgctggattacctaacggagtcgagggtgtgctcaatttatagtgtgcttgagcggtggctagtgaatttgatggagacgcgcggtggctggagaggaggaggggcactagcgcaaacgattagtggctttctccgtggcggactcaccggcgacgagccagtgatatagagcggcttacaacgacgtggtgaagcttcaaggcacgtggcatccgatcaacgggcggccaactccggtgaacttatctgagccggccacaaagcaaaaggggtacgacggctagcctccggtgttatcctgtggtgaagatcttttacctagaagcgttatctggtcaccggtgagcacgaatcacaacgacagtgtgaatccgggcgcacggctcaccggcggcgaggttctctgaacctgaccctatccattcacggtaccattggaaacgtccaacatagcgcctgacagagcaacttgcaatgcctagatctcgaatttttgtgccagaacataccaatccatctgcagcaaacttgtagccctttatttcaactataattctgctatagaaactaccctcaatcgagcaatgaatctaactctaaatcgagctctaagttcatcctactttactgctggtgaggattcagacttagggttgcctgacagcccgactttggatctaattatctcaaaatttctcatgacaccaaggctt

SEQ ID NO: 20028 - DNA, 432 bp, Zea Mays
ccaaggcccttgctcaacactttcacctgtgacctattatcacatgtggtttagtttgggaatgaagcaccaaatttagaagcaatgtcttaatcaagtgttgaacatactagaaggagtatcttagccttttcatgcacctccaatttggaaaaatgctcaaaaccctagaaacccccttttgagccactagagctccaagattggattggtgagaaagctaggtaaactaccaattcatgacttaaaccttttaccaaagttgaagcatatttaaatacctacaagaaatagtaagggaattattccaaaaaggtcccacaaaaaccccaaattaagcactcaagtggaaagcactcaagagcaacctatttttctctaagtcaaaattcagccctcttctaaagatcagatgtgttcacttagttgaag

SEQ ID NO: 20029 - DNA, 800 bp, Zea Mays
cttgtagagatggccgttgactatagcgaactctctgcttctgtgttttaaccttttggcttcactatgattggatgggtggtagtgtccctgaaggtatacggtgattggagcctgccgatcttcggccattataatatcgactatcggttgtccatcggtgtcttgcgttatttgcagacccttggggtttcttacggctggtgtgccgactatgtgatagaatacatcggaaggcaagggttcacccttcgctgctgctttagctaatgtgtctgcttcttcattcttgttgcgctcaatatgttgtagtgtgaagcctttgaattgtttttcgaggcttcgaatagcagcaagatactgaattaatacaagctctttggcagagtaatctttttcaatctggccggtcatgaccttggaatcagtttttataatgcaggtggtcacgacaagggctcgtagtttgtgaagtcctaggatgactgcttcatattcggcaatgttgtttgtgcacttatttgactcgagtgcaaagctgagacgtgcggcgtatctttatttgattccggcaggtgatgtaatgattgacgcagtgtcgatgcctgcgtgacaccatgctccatcatagtggatggtccagactgtttctgtgtgacactgttgtggttctgaaggccctgtccagtctacgatgaaatcagctaggacctgtgatttgattgttgtcctgggctcgaaggtgatgttgtaccctaagagttccactgcccattttgctattctagcggatgcctccg

SEQ ID NO: 20030 - DNA, 807 bp, Zea Mays
tgaaaatggtcatgcacgtgggtatgacatgcttgcacaattcgaggataccgatgatgaagagagggaggagaaccttaccatgggtgtgcccgatgatgtagaagatgaggatagactaattgttgattgggatagagaaaatccaagtctagaagaaggcaatacttttccaaccatgagagattgcaggaatgcactcacaacctattgcatcaaaggggaatacgactttatcattgacaagagttcacccaagagatacactgtgcattgttggtttgagcgatgtaagtggaggatgcatgcctccactatgaggaatagcactattgttcaagttaaggtcaacccttttctgcacacatgcccaagtgcggaaagaaaagtgacgcagagggcagccaagagcaggtggtgctgtgatgcagtgttacagtgggtgatagaaaatccttctattggtccagccgcacttattaagaagattcatgagaagcataacattcaagtgccttacatgagggtcttctatgggaaacaaatggctcttgataaaatctatggtccatggaaggaaagttttcaactattgtactcatttaaatccgaagtggagaaggcttgtcctggaagtgttgtgcagattgacaagcacaaagtagtgtacaatatgaaaggtaaaactatggagaaggaatgctttcggagagtatttgtttcattcaaggcttgttggaagggttttttggttggttgtaggccatacttggcggtggatgcaactgttttgaccggcaaattcac

SEQ ID NO: 20031 - DNA, 1028 bp, Zea Mays
ctggaatatgtccccagcagctcgtcactggtagcttcaatacatttcaaccagtcatcatctggctcatcaaacttctccataaatctgaaggtatacttcaatcggactaggccaccttcactagtttcggcagcagtatccttcggcatttcccagttctccacaagtggccataccctaaaggctatgtgctcttgaattaaatcgctcgtgccaatgatggcgcacacagtactaaagtccttctgacatgcttcaacatcgctatcaatatccaccttcggccttcggaggccgaagagagaccagatggggcactggacaatttccttgatgtcttctcttttaattaaatcatttttaacgtaaaaccactcctccatccaggccctgggccatctttttcggaatgttggcaccgggtggcttgcattagaaagggcaatgaacccgtaacaaccaaagttgttgtggtattgttctttgccgatagccttcgtctcatataaaagctcatgcatgttgcagaagcacttcgcgctcggctccagcccctagctacttacagcccagacaaatatccccattctgattatagctttgggggtaatctgatggagaaagatttggaatatctttaatacctcgaccacaaatttactaagcgggaaccgaaggcctgccttcaagaagctttggtatataagaacttcgttttcctctggagcaggggcagtaccgtctcctccaattctgacaatagacatgtcacaaaaatatctccccctcatggcgtcaatatgactttgcttgatagtcgattttctgaagatagtatggcttggctgccacgaccgatcctcagaatcttcatccccactctctatgtcataactatcactgtcatcagaatctttagacaaaccctccatgatttccttagtaattttctcagtattcgttttggccatcgactcataaaacccagcgatgaaaggatccgcaaccttcttctcttcatacag

SEQ ID NO: 20032 - DNA, 540 bp, Zea Mays
tacaggggccacggtgtaaatcttcccaagacacataaccctctcgcgatggaccgcgggttggtttctatataaagcaggggctcatatgcaaatgtacgggatcgaaggggtaccagtgaaccctggccgtcggatcagaactaagggcacagattagatccagcgcccgccaatcccacgagttaattcaggtcgtccgatccaagatccatggcacaagagacgaccgcgcgtctgacttaatcctatccacccgatcagctctgaacgccccatattaaatgaactaaaacagtattcgctgctctgatcctgcccgctggtgcttgatccaacgaaccggagcctttcttctcccccagtgctgaccaaggcagcgcagcccaccgcgcggcggcgagactgccggattgtgcatcccaccaacccgagcaccattctccgattagctaagccctcacccaatcgatggctccttgaacctaattccccaaccagttgcatccgccatcaagcacaggcccctgcccatggcgg

SEQ ID NO: 20033 - DNA, 337 bp, Zea Mays
gaaaaagagaaagagaccttacctaggctgcagaactcatttcggcccacctaaggaaacacactgcgcggcccagttgtttgctaccacgcgcgcgtccaccctgacgggcggggcccactgctcaaccatacacctccgcgctgtgccttctccgctgccgctgcccactgggacccttatgttaggtgccttcttccctatccgtgcgtggcgctcgcaacagactgcgccaatcacgcggtcgccaaccaaacccagctaggattgttgaagcggtcactccttgggccataagaaccgtgcgccaagatctaatttcacattcccccgccat

SEQ ID NO: 20034 - DNA, 499 bp, Zea Mays
ctaaagggagctttgactctgctgactgtagcatgacggagtgggtccagctggtctattgaagcttggtcccctggatggaagcccaaaggatcgagctctctagtgacggtcttgctgctgagctcggagaacctgaaatttcctcttgaggtgccctttttcttcctcttttgccctttccacttggatggctttgttggagaggtgagagaagttgaggaaatattggctggcgaggatggtcttaagctcgggtcttagccctttcagaaaacgggccatcttcctggactcggtgctgacatcgtcaggcacgtaacgggccaactctgtgaacttgtgaacgtactcactgacggtccttccaccttgtgttagttcccggaactcatcttccttgagttgaactatcccctggggtacatggtgctcacagaaggctgtttcgaattctgcctaggtagcatccctgacggcctcgctgaaggtatcccac

SEQ ID NO: 20035 - DNA, 760 bp, Zea Mays
gcgagagcgggttgccgccggtgtgggtgtcggcaggccgtccgctatgcgcccggatcttcccggtgtgtacggctttgggcgtgattggacttctcgtcgatgtggccgggtcatcgctagggcctcggtaagctttgttcttcctctctttggtattactgaagctagcaagttgccattaccagtcagtagaggcagggtagggcgtgagcgtgagatcttgacaccacgggtgggttccttgcggtggtctgcgccgctgtagatgcatctggcgaggaagataggggttgaagaaggcgccgtagtcggtgcgtgtggccgggggaagaagaaataaaggaaaccgttaattggtagatgaacgacccagatcagtagacgtattctctctgctagaaatgatcctggccgctaagtattgatcgggcggatgcgtgtggggcgctggtgtttaaaagatggaccgttgagattagatctaagggtagatggtggaatcggacttcataaaatataggctgtagatccttggtccgatggttcctatcacttactggtttgtcccgggggccatctaatctggaccccagatttcaaatcgggtggctcagatcgcctgataccccttcagctatccgttttgcataagaacccctggaatatctgcgaatcaacccgcagtccactcgtttgggctctgagtcctggaatattttgcgcagagccccttatgctttttagttatcgaggcccg

SEQ ID NO: 20036 - DNA, 444 bp, Zea Mays
ggatgatgtctaggtcgcttgatgcgaaagcaagggccaagattagatctccgcataatgtattagtaccgttagatttgaatccgacgtaccggtttgcgggagatggggatcggatatggtccgtgcgatcttgatccggtgtatgtggatcaatttcagctacttaaaacctgggccgtagatcttagatccatgggctagcagcgcttatggattcagatctaatcggatctattgatttagaatctaacgacccagattgggcaatacctcttcgctagggcagtttagcataagagcccctcggttagttcagaatgaacccgcggtccacagggactgttcacagagtcttagaaacttttgcgccattgcccctatcttctacagaatttgatgcctagcccagagatttataaaattcagtaaaagtgattagaa

SEQ ID NO: 20037 - DNA, 519 bp, Zea Mays
attcgtgtccaccgtcgtggcaatctccccggcgacgatgggacagcaatagggagtcacggcgacgcggtggaaaggctcggacacgcggcacaaggccggacggcggctgtcgccggcgttcctatccaattccgccgcggtgacgcttgtacggtggccggaatattttactggccgaagttatccacggcgaggatatttacgcgactccgagtgctatccggttaccagtgagtgcgaatctcaacggcggcgacgatcccggcgcaaagtcatcggcggcgaggggcgcggttgatatgatccatttcaggtcactgtaccatggcaactactcattcagtgcacctgacagccaagttctagggcagttttcctcccaaattcctatggcaacatctccgagtatctgcataaaagttgtagtgctacataccagctacaaatcgactatagtgactgagctcatttgataactagatcatggttgaattcaaccccaaagatggctctgtt

SEQ ID NO: 20038 - DNA, 662 bp, Zea Mays
ataaatttgcatggccaccgactcaagacgtcggcaagcattccttattagctccgctgcatcctcacttctttgaagctgcgccgagagtctgagtcagtgagtgtctctgaatagaacctatagataagtcatccatggggatttatcaaaaactaaatcattcctacttataatctaaataacccaacacattgctgagacatgtaataacaagatgctcaatttttaagtccacccgcaacaaccaactcctaaagatatgtctaacagatctaggagtcaccaaaccaaaacaaatagatagcaaacgccatatattatgagcaaagtggcattcgataaataaatgttgaatgatttcgtcagcatcacagaaaacacatgttttattaccctgtcagttatgttttgctaaattgtcttttgtcagcaccactactttcagcaaaaaccacttaaaatttttattcttaagcggcaattttagtttccaaaggtgcttatgatgagatatattcccattatttattagagacctatacatggattgaactgtaaactttctagaagagttcaaactccatataaaaatatccttttctgcattcaactggacatgaataagccgcgccactagattatgccacaagctaagattg

SEQ ID NO: 20039 - DNA, 672 bp, Zea Mays
cccctgacgaaccaccctctgccgatccctagaatctgagaaaattgccaagtactgctccgggtgatgcttcaagacctgcagcctctccttgtgaatgcctaactagtcccagagagccgcctccacatggggcggagaggtatcatggctattgccattaagctgacacaccactgcccgccccactagagagtcgcgactaagcttgatgtcgtcggatgctgaaactgcacaggtctccagatctggacgcgccctcgtgtccctagggtaagccatgggcggcgaccaccccgtaagcgcacgaaggtaggaggtggggttgagtttgcttgactgccgtgggtggggaggtactggccttggctgaaaggagcatgaagaattgtgaggagaggatggccttttaagcttggggtagagacgagctcgatgcccaactccaaagcagcgccaacatcttgttcgattggtgcacaccgccactctatggtcttgggcaaaacaattaagacacctcccatctgcatgcctgatgaatttccttcttctctcctccctgtcggccgattggagctggcatgaatactaatttgatgtcctttgcctacgccactagtagggagggcggactacctcccagccatgagttaaatcctcccgagcctg

SEQ ID NO: 20040 - DNA, 918 bp, Zea Mays
acattggtggtggcgcctctcccagaaactggtacaacattggatattcagagacctgtcagtgttcgcccgagacgcccttgccgagccaatcaacttgattctcctgctgatgagcagaaaaagaaaaagagacgtcttcggcgagtatctagtttggatcgggatgttggtccttcggttcctgctgctgaggaagtacctgtgcctgaatttactgacgctgaccctaatgggtgtgatccgtttgttgctgaccccaatgggtgtgctccatctgctgctgatcccaatgggggtgttgtctgtgttgctgatgaaaacgacggggaggaagaagatgaggtccctttgactcggaagaacagtcgacaatatgtcgccagtggggaaagtagtggagttccttctcctgctctgtctgccctcattggtctataagaactgtccctggcgaactttgatcagactcttgaagatatggttccagaggatttgttatcagagccagcggatgatggtgcgacggatgtttgtgttgatgtgcccgacgccgggttggggtcatcccgggcagcgtcccgcgcctcatcgaccttggagcgtggtcttgagggtcaggaaactgacttggatcgtcttgttcccatggaagtaactgagggaccctcagccttagaggcggctgttgcagagaacttggtcctcaaggatggtgttggcacttacccagcccccgagggtgttgccggggatgattcggctcgggtggcaagcgcaagccactgcccagcccccgagggtactgctggagatgatccgactcaagtgggtagcgcaaactatggcccagcccccgagggtgtccgagcggggtctccctcttgtacttccatggatgttcacgcaggatctcct

SEQ ID NO: 20041 - DNA, 860 bp, Zea Mays
gccgcaggacgtaacccttagcctgatcaaaagtttttgagtcaaaactattttcttaaaaaaaatcttgctctcatcccttcatttcaaaaatgctttccccctttccttctctcacaagtcagatggaggtccgttgccaaaccagcttttgccagaatgaagatagtttccccaagttgctgagagcatgcacagtccgcctcggaatcaggagccagccagagtatgatggtcgtgaattcatcgagcatggcacagagaagtgtgtcgtgactgtatacattggatccagtctgcaccatgtggaatggagtgtcactgctactgggcacagattcaaagacacctgctaagtcatcgctcacaaggcattgagggccctatgtcagatctacgaagaagaagtggccgacaccccgctcagattctttccgccctttcagagagaccgtcccgcttggatggccaggatgtgtgcattggaagggcagcaactgcttgaggatgacccctcagtcgtgtacctcactgcatacctgctcaaccttgatgcacaatatgatttcttggctcgacaccaccgtcagatgattgcccgagcagaagatgcagagaagcacaaccgtcagctccatgtggatctcaccacagctgaagcccgtgtagctgccttggaaagtcgtgaagtcattgctgttgaagccctgaagcaagccaaggatgagcacgtccagaagttgatggaggcctacttggtaacccataaccaacgtagagccctgcggatccaagagcccgcttcatccaacccagttcaatctgtcagagatgaagatccccagattcttgaaggtcac

SEQ ID NO: 20042 - DNA, 464 bp, Zea Mays
ccgccatcgaatacttcaccaagtggatcgaggcaagggcagtatccacaataacgtcgaagactgcccagaagttcttctggcaaaacattgtttgccgattcggagtcccgttcgagatcacagtcgacaacggcaaacagtttgacagccaggacttcagggacttccgcctctccatccgcaccaagcttgccttcgccttggtgtaccacgcgcaatccaacggcgtcgtcgagcgcgccaacggcaagattttcatcgctatcaagaaaagacttctcgacgacaagacgggtaaatgggccgaccaactacctgaagtagtctgggccctaaacatgaccgaatgccgggcaactggattcacaccttttcatccgttatatggatcggagaccatgacgctgcaggaaataaagcatgggtcgtcccgaacaaacacatcagcaatccccaacgtc

SEQ ID NO: 20043 - DNA, 1572 bp, Zea Mays
ctggcgaacataggcctccttcaagtcagcattgaggaaggcggacttgacatctgggtggtggacgcgacagccctcctgggctatcgacacaaggacacggactccatctgcgcgacatgtgtgaatgcatcgtcgaagtcggatccttcccgctgaacgaacccgcacaccaccaaatgtagccttgtgcttgatcaccgtcttggcctcatccttcttgagcttgaagaccgacttaagggtgatgtcacagtggctagcacaaaggtcagccagctcccacattcagttccgctcgacgacgtccatctccagttgcatagtggtacgccataccacgtctccctctgcctcagtgaaggaatagggctttgcatcatcgtgcgccagtgtaaccccacatcgaagtcgtgttgcgccagtccagaggcggactactcgtcgaggatgttgtccattgtgcggtagaggctcgtcgtcgtggtaggtgccaacgtgatcctcatcgttggattgtgaagtagcaaactccaacgtgtgttgttcatcgtgtacccaagttgtcgatgccatatctcgtaggtgtgggcgccaatgcaaaagattgaggtgtggtggaatcgctggagctagtggtgaactaggtgttggggtaggagagctcagtgaagaatagctgctagcttcccccactccctcaaagtggacaaagtcactcatcgtccaagtcaagtcgttgtccaccatcttgcaccatgcctagcctcgcccttcattgaacaagacgtcgcattatgcaaacaatgttgcctagctatggctctttcatctcccgcccttccgtctcccgtccccatcccttctcggcgccaactcctctaccagccccacgccggcgtccacctcggacctgacggccaaccctttgtcttccattcctctggtgtcgggtcaccttgctccttgccgcccagtttcccaggtgggacggtccaaatcccagagatggtctgaatcaagccttgcctcctcggccggtggtgcccgccccaccgctcctacaaagaggcgctcctctccggttcgaagcaagcctctccgctttatccttcagcacaagccccatcttcagcccctacaaggattgtgcttgcttctttgcctgaggtgcttagtcggtcggttgttcgtccgagacaggacgatggcggctggtaggaagtcgtgaggcggaggaagtttcgtcgttctccacttcctcgtcgaggctcccaggtggacctccggggcaagtgctacaattgtttctcctcccatctcgttgttgcctgtcgttgccccccccccctaggtgcttctcttgcctcgggcttgggcaccgcgctttccattgcccctcttcccttgaggcttcgcaagtgaattgggtgccggtttggcaccgccttgagcagaaggaggccctcccttccgtgtggaggcgtctgtctgggcagtaggatctggcgccgacggctggcgatgctcgccaaccggtgctgcagtgtttgtcaaggcagcagtctgtgc

SEQ ID NO: 20044 - DNA, 677 bp, Zea Mays
tggtatcagagcgaataggctgcagatcctagcaagtgaagtaataataaattgacacactgcacatgtaggatgggatttctggcttgctattgatatgttctgttattgtaagtgctagtttggcattatctgaagagatgttatgcaaatcttatttacttattattctcatccctatggctgcagctatgccgcctcgtagggctcgaggtagtccgcaagctcctagtggggactcgatgagtccggcggcaatgttagccgcaatgcaggccatgcagcaggagttggcccttctgaggcaagccattcctgtcgcccctgcgggtgctgctcagggtgctggaggtggagaagtgcccgggggcgctgtccctgcgggtgctgttccaggtggcggggccgaggtgcctctttcagtcagtggtctttctctgatgcagtggatgggcgtgaagttagattcttttgatggcagtggtactccggtcgaggcgacagattggttgactaatgtggaggataagatgaatgtctttgagatttcttatggagatcgggttcggtttggcactcagctgctgaagggagaggctctgatttggtggagaggcgtgcaggcagcgcactcctcctcaccaggagtcctatcttgggatgttttcgtcaggcaa

SEQ ID NO: 20045 - DNA, 477 bp, Zea Mays
tttgcggaccctgttcacgtctaccagcgatgtggccgggctgctgccctagctccctctcgcacggagccgcaggtgtatcacctcgttgccctttgttgggaccccgggcatgtccaccgtcacgcatcgggccgctggtgtcctctggcctgccgatcgactagtcctcttggcgtccaactcttctacgctctccctcgagccatcatatgcttgtggtgcgctcgtcgaacccaactggcgccacaccatggaggattacgaggccctgctggcgaaccgtacctgggacctggtgccacgccccttgatgccaatgtggtcaccgggaaatggatcttcaagcacaagatgaaggcgaacggccctctggatcgatacaaggctcgttgggtcctatggggtttcacccaacgtcccgaggtggactatgacgagactttcagccccgtggtgaagcctggcaccatccgg

SEQ ID NO: 20046 - DNA, 770 bp, Zea Mays
gtgaagttgggtatgttttgagatttgattcggccaggatccagtcattgcttgactatggttgctatagaaagattgtagctgaatcatagggctacaactttgatacagagagatggtcgagtcactacatgaatttgggaacaaatctccctgcaaactgctttttcaggctgactgaataagaatccgatggtacagtaaacaaaaatcttctgttcagccccctcaccgctagtggcctttgcgtccggatttgcgccggtcgctgtgatgcgtgctcggcgtcgtcggataacgctgttggagtgcgaaatatcacccagtggatgaacttcggccactgttcactccggccgccatttctgcttagccccgatctttccggatttaccctcgccgaagttagacacctcacggccttgtgccacgtgcctcggcactttaaccacactgccgtgactcatattagcctatccagtgatcgccggtgaggttgccacggtaatggccaccaatcgcgtgcactagtacattttcttctctccgaccgccaccgcgccatctccaattcacgtgccaccgcccccggagcctataaattgagtgtgtcgtcggctccgtaaggtagtcaagcaacccatacaccaactcgtgcctcgaattatccaccagagaacttcaatttgggatttcccccaaatcaaccaagaacaccgtgcggtgtgagctaaccgtggccagcctgcttcaggttgattcataaccca

SEQ ID NO: 20047 - DNA, 407 bp, Zea Mays
cacggtatcaacaaactctgaggcgctaccatgacaaagtcgtacgacatcgatcctttgcagtgggagacctcgtcctccgccgaattctaacgggggagggatggcacaaactgtcaccactatgggaaggaccattcatagtagcagaagtcactcggcctggatcatatcgtctcactcaaatggacagcacggaaattgggaactcatggaacatagaacacctcaggaagttttacccctagctatatctcaaaagctattgggatgacaatgtattctgtaaattgggaaatatatcatcaataaaaagacttcaaaggcactcaaattgttcgctgtcaatctgcatacttacttaactcggggtgaccactatgccctactaacggagcaatcggctt

SEQ ID NO: 20048 - DNA, 524 bp, Zea Mays
accaaagaaggagcgacaagaacattgggaatgcgaaaagagccgggagggccgacggtgcccactgatgtgacgggaagacacgagccattcgccaccatgatggacgaagggagagaggaagaaggagggcgaacagaggtgagtataccagggtcgggagtggtgtggtaggtagcaccattctccgcgatcgactcgggacccatcggtggagtcagagtgggagtctggaaggcagccagggcagctgcgtcccaaccaaccagcacggacggtggagcagccggcggcatgggccacgacgaagcggtaggcgaggtccacggcgacggagaggcgaaggcaaaccccgactgcgcaccagcgaacatggtcgccgggggacgagcctcagaactgggcccctggaacggccacatggagatgtgtcctgaccacgggtggtggaaagtgggccaaggcgcaccctgctcgggtcccggcgtcggtgcattgccacgggcaccaccgccgcaaccacc

SEQ ID NO: 20049 - DNA, 448 bp, Zea Mays
aacaaccgagtgataacgggccacgccggccgctttggaaacaatggccggatgaagtctggtaacgtcagtgtttttagaaataaccgctgagttaaaatgggcagcgtcggccgttttggaaataacggccgagtgatgatgtggcatgcccgcgttttagaaataacggccgggtgatgacatggcgtgcccgcgttttagaaataacagccgggcgatgacatggcatgccaacgttttggaagtggcgcctggcccgggaaaaccccatatgtactgcactgtcgcatgcctccgcgtttcgtgccctagtttttgcttttctacatccaggccttctctgctctcctgcaatattgctttcgctccgctcgctagcaaggttgagatggcgcccaagcagaaagcttcgagttcgtccgtcgcaatcattccccccatcgat

SEQ ID NO: 20050 - DNA, 490 bp, Zea Mays
cccgcatccatgtcggctctcctataaggaagcgctggtgttctcacagccctctgtttctcatttcgtgggagtgctggtggcggctaggagactgtccagagtcgtcgtggccgccgcttggcttgccgccctctccggccagtgcccagacccgttccggttgatctgaggggcagatgtttcaactgcttctctgctgagcactgggcggcgaggtgttcgaaccgtgttcagtgcttcttctgcaattttaatctggaatgtgagagggctgaatgatcgtgtgaagagagattctcttaaatctttggtggttgacattagaccttcgattatttgcctacaggaaaccaaactttgttctatttcagattttggtattctctcaattttggggtctagtttcagtaattttgtttatagcccagcgattggtaccagaggtggggtgttaatatcatggcgtgatggagtttttacatcgttg

SEQ ID NO: 20051 - DNA, 963 bp, Zea Mays
atccgtgctcgcatgtggtggggaggaaccaagcaccgaatgtgcccgatcagcaaccaagtctgcagatataccatcggtgatctccacggccgaggacacctccaatatctcatagtctccaactgtctgatcactctaaatggcttcaccttcttccctaggttgtacatcagaccttgggcctagacgttcaagaatagatcgtctgcccttatgcacatcgtcctccgcagagtcccttctaccatcacggtcccctggtggcgaacgtgaacggaaacgccatctccgccgtgcagaaccatccataactgctgggacctggatgggacctaggacaacatgttgtcccaccaacactttaataggaacatgataggcaagagatagcctaccaacgcctggtccatttcccagcgattcagtaatccaaaggtctctagactgagggaatgaggtcgggtcataacaccaaccataacaacgaaagacatccaaattcttgagttgtaaagtctcatcatgtacgtccagaacccaggcaaaagggttcaaaatgtgttggacagtggtgagttcccaggcatgaattggaatgccacatagctcgaattccacagggataggcaaacttgcacctgaagacccaaagaacatggaccatcttttacaatacagggagaaggcgcctgcacgaatagtgttccatctcactgtcaactggtcagataactgaagggtggaaagcatgagcaggaaatgtccatgagccaatttcctcagaattagcgaatcagaattgacttcaagttttagagcgaccgcatctgcgatatcagcatctgacacaagcacatcactgaccacaaagatagacactgcgttcttcaaatcctcttctgctttttccatcaaattgtcccaaccgatcacacatgggtgctgatgatgcactatttc

SEQ ID NO: 20052 - DNA, 940 bp, Zea Mays
gcccccctgagttctatttctttacagactgacgtcccagacggcgagcggcgccgcccagagctccgacgagctagtgtactggccgattctctcaatgactggcgttctacgttggcagagaccaaattcaagacctaaggaccttttcccctcactcaatttcacgaacggctacctaatttgctctggccatggtgacagtgcggataatcaaaggaacaacgtgttcccggtgatccatggcggtctagttcaatcagaggggtcgaggagcttgaggaagacttaaggacgcaagaacaaacgaccagagagcttgaactaacctggagcaagctggccatggtgaggatgctttcacggcggcggaaaccgaattggggagagtgagaaattggagagttctaggggacgattcgaggcaagcgtgggtgcattggctttgtgataacatggctcaacagacctgaccatcaatttataggatcgctaagtggtggccggggatttgggcgaagacgcgcgacggccggagaaaataggagttactggtgcgcgcgattagtgtcctattaccatggcaagctctccggcgatcaccagatatgctcaacacgactaactacgacgtgggtagatgctcgagcacgtggcgcatggtcggtaaacggctaacgccggcgaggaccaatttggccagctgtaatccgagcgggtgcggtgaactccccatcgatccaatccaaacttatccgtcgccaggatctttcacacgagagcgttatccggtacaggtgagcatgaatcatggcgacggcgcaaatcctgacgcaatggtcgtcggcggcgagggactgagcgggcggcctaatccagttactgtaccatcagcatgtggttcagaacacctgacagagcaatttgcagggggttttgc

SEQ ID NO: 20053 - DNA, 628 bp, Zea Mays
agagcaaggttccctccatggatgggggatcgagatccaagacatcagtgtccactcatcgatgcacgtagacgaatacacgctcccccactccgtcttagatattggcactggcctcaatcatctctagggacttggggacttcccctctcccgctatgcttgtaaccccctactacaggcaccatggtgcgaataatataagcctcatcctctttgctggaagtagggccttgagcagcccgaaccagaataatcacttgagtcctctcgcacaccatctagagtcggccacgcttcacatttactggttggttaaggacccgtggtccaaatatcaatagttggcgcaccaggtaggtgattgtcacgtgaaacactcccagttctctccagcactctagatggcaggttcccaccacccgcttaggcttggtacgacgattaggttcgagagtcttgagttcatgtctttgggcatcgagtatgatatggtactcctcccacctgtccccctcgagcgcccaagctctcgtcgccactattctcgtcgcaggaggcaaagacggagcaaccgcgatcgtgccccacaaggcactccgtgcgttggagatgccgccgagaatgat

SEQ ID NO: 20054 - DNA, 736 bp, Zea Mays
cgtcaatcaacgacctagatcggatctggccaatcgttacgcccgatcaaatctcccccgcccggccgggatccaacggttgatgggcgtcttccccgcccgaccacgtagcttggcggcgcccaaagccagtgtggcggcggccatcaccgggcacaggaagactggccgtcccggcacaaagctttatcctgatgggctctactcgaagaggaaggatgggtgaacgacatgggtgggttcttaccggccatagagcattcatagactcggaccacgacacgaagcggctccgcggcgacgacgtacattggcgacgaattccgaactgaacgatgaccctcgagccctcccagattccaatatgcgatccatgagcctcggcggacctccacgacccaacaaagaggccggagcaatggtggggattcaattcaacagcggcggcggaggtgtgctaaccacgattcggagctacctcaaatggaggggagaaggggtgccaggcacaacgcaatgaacgaggaaggcattgcggcccccgcatttatactctggagtgcggcatggatcccggcggcaatcacgtgattcatgggagctattgcgcggcgacggagttcagcgtgcccaacagaaaagcggataaaggagggagaaaaggttcctgacgtccgggccccaccaggcagaggcacaaggcaaccgggctaggttagcgtggagatgacatctc

SEQ ID NO: 20055 - DNA, 503 bp, Zea Mays
agggtccgcgcgtccatccatgggccatctttggttcccgtgcgccaactctcgctccatctctccgcggtggcagtggcggcaatgcgccagctctcgtcggtggcggtagcagctcccctcacgcctctcgccagtagcatcatggcttgcgcttgcttggccctggcggctgcaccacacgccggtaggaagctggatccaatagccgtatccaccaagccagttgccgaaaagcgcactcctcgacgataatgctagggccgacggagatggagactggcttggaggcttgccgcggtcaagggtcgacgtcatgctcctattgaatctggaggcccggtcatcctcgcgctcaagcctcaaggtaattttcaagcggttgttttcattggcatttgagttcgattattattatcgtaaccaccagcctccagttttctcttatcaagacagaaatccgtggtttttttggtattatgttttgtgactctggatctgaa

SEQ ID NO: 20056 - DNA, 484 bp, Zea Mays
tgtgtcaccactcgccagagcttattgaaatgactttgaaatttagttaccaaaaaaagaacaaggtaaatttagttaacaaataaaaaagagaacaagctcagagtagcgagtgtcatctccacaaagttcagaagatggcaccggacctaccagtgctcatgcatttcatcacagcttgttatacccttgttagttaatcttgatggcacggtttatatgctcagatagggcttgctgtctgtacggtgtggtactagtcttgctagcgaatgtggcggagtaatactgtgtgtcaccactcaccaccgtgttttatacttattcatcacaacttgttatacccttgttaattaatcttgatggcacgatttatatgctcagatagggcttgttgtctagacggtgtggtactagtcttgctagtgaatgtggcgaagtgatactgtgtctgtgtgtcaccactcgccagagcttattgaaa

SEQ ID NO: 20057 - DNA, 593 bp, Zea Mays
ctcaattgaatgggtctgtgagctaccggggacacgagggaggctagaacaccaattaaggaagcttgaactgacctgcagaaggctggccacgacgagctcactcacggcggcgcggagaactgaattggggggaaaaggaaattcgggcgctgtggtggctaatcggaggcaagggtgggtgctctggcttcgtgacaacctaacggagctcactggggcattgatttatagtgtccattagcagtggcgtccaatttgaaggaagtgtgctggcggccggagagaggggaaatgtactgacgcgggtgatcgtggttgtcaccgtggcaaggcctccgacgatggacgggcttgctacaagggttcactgcgacgtgttaaacctcccaggcacgtggtgcacgatcggtaagcggccaacgccggcgaagatcattccggtcggccgtagaccaagtgggtgcggtgaactcaacagtgaccgagtccgagccaattcgggcgctaagatcttttactcccctcagttatccactttgcgctgggcacgaatcgtggcggccggcacgaatccaggcgtgaggtcaccg

SEQ ID NO: 20058 - DNA, 578 bp, Zea Mays
cctaaattatcacaccataaccttgctgcaggtggcgttggaacttttagttccttaagaagtgattgcacctagataacttctgctgttgcattggctagagctttatattcagcttatgtacttgaccttgacacagtggcttgtttttttgcactccatgatacaagattactgccaacgaaaattgcaaatcctcctgttgatcttctatcatcaatgtctcctgcacagtctacgtcagagaaggcactcacaagcatagatcggcacttgtttatgctcatgccaatatcacacgtgagttttacatatctaagaatccttttgactgcagaccagtgagctgtagtaggacaatgtagaaactgacagactctgttaattgcaaaagaaatatctggccgagttaaggtcaagtactgtaatgccccaactacacttctatatcgtgtagcatcttcaggtccaagaggttcaccttccttaatgcttaatttttcagcaaccgatagaggtgtagccatgggtttgcattgagtcatgccaacccgtttaagaatatctgaagcatattt

SEQ ID NO: 20059 - DNA, 372 bp, Zea Mays
cgatttagtttcccttttttgtaactaggtaacgcatacatgtatgacaaaccggtgaggtatgtccccataaacccggcctattggtctgcacacatgcatgacaagttataaagaaaaactaccccctcagttgtgcccctatgatagttctatcttgctgctccatggtcctaccttgcagtttttcagataatactttttatctaacccacccgtacggttcccatctgcactgacatgacgacatccgaattgagcaaccaagcttacagtttagggcccccgatacgaaagttgggaggtccgacagcctgggagccggctccagagaacgggaccccgttccatggggtggtccggagcctgtgt

SEQ ID NO: 20060 - DNA, 1187 bp, Zea Mays
gcggatttaaggaaaagtcctcggggttttcactaactgggatccggtctctttactgttacccagggtcactgacaacttacggaaaggtccttccactttcttttcttccccacgagtatccctggccacggcgtgcacgcggatcacccctagcataactcgtactggtcatggctggtattggctgctacggctagcgaccggaaaggcattaccaactaacagagacctcggaacacacatcaatttgacacaaacgtactgagaacggcctgtccacgtgcacggcggaaaccgtgaccacgggcacgcgttcccgctcaaccggggctggattgagtaatcggatgccatggtgagcttcacaagcgaacggagttgcagaaacaacattcaatttgggcagagccttaccagggtgatctggccacggaacacggagttttgtgcttgccggagccagaaaagggggaaactagggtcgcagcggctcggggcgaaattgggagatgggatcggggctataggaccgtaagagactgtgctttcaccgtgcgcaatcaatttgggcgaaggtggagagggcagtgcgaatttgacttcgatttggttcactggtgtgcgtgatgaccgagccttgccgtgatccagggggctatttatagccgcggatgtccggcgatcacctcgtggcccgaataccatcacaaacgcatgccaagcacgtagagaagtgatacagtgagaaagaatcacggtgcagaggacaccgcggcgaaaagggctgacgcgatggccgccggtgaatcactccggccgagctcgggagatggcgccacgtatgagtcaccctttccccggcgttatccatcctataccgtgcacgaatccggacggcgatcaacgacggcgagctgagctggcgttctgatccatccgaacactgtaccatggcacatcttcgtcagtcgcctgaaccgacccccttccatcgactagctctcatgattcttgtgaataaccgggcaaaattccttaataaggtttgttcttgattcaacagtcttcaatccttacacaggacatttgggtcaaaaccgaggggattcgaagatatggcgcatcaaacttgacctcacctcactggaaccttgttttaaccttaggttcagtttcagttttct

SEQ ID NO: 20061 - DNA, 853 bp, Zea Mays
gaagaatttgaatgccagcttctgatgagcacgaactgccagggacgactgcacatatggctggagcttgaggaacacccagtcgccaactgcaaactcccgttcagaacgacctttgtcggcctgcttcttcattctgagtttagcccgttccaaatgttgtcggatcagttcggacatcaattgcctctcatgcaaccacgacgccaaatcagtggactgaatattgtccttctctgagatgccaaactaacgtggctggcacccatacagagcttcgtaaggtgaaagaccagtagctgaatgtggggaggagttaaaccaaaactgagcaacagataaccacttactccactgctttgggcacgcatgaacaaaacaacgcagaaatgtctccacacattgattaactctttcggtttgaccgtctgactgcggatggtaggcggagctcatacacaacttcacatcagccaaacgaaacaactcttgccagagatgactgagaaatacactgtcacgatcagaaataatcgactgtggaaggccatgatgcttatagatctgatcatgaaatagacgagctactgacagtgcagtgaatgggtgtttcaatggcaagaaatttgcatatttggtaaagacatctacgaccaccagaatacatgtataagtttgagatttgggcaacgccacgatgaaatccatataaattatctgccacaaagatgttggaactggcaatggttgtaacagtcctggcaaccgtgaacagtcagatttggcttgctggcaaatgacacattgacggacaaaatcttggactgcctgcttcaaccctttccatgcaaac

SEQ ID NO: 20062 - DNA, 919 bp, Zea Mays
gacctcgtactcgtccgaaccacccggacagagtcacggggcaagctggagccgaaatgggagggtccattcatcgtcaagtcgaaggcgtctcctagcgcatacaggctaacaacgccatccggcgaagacctagagcattcctggaatattgacaatctccgcaaattttttgtttaaaccctcagggcctacgtgcccttgtaatccaccaaatagtattattatggcccacactcttttcctcccggggggtgaggtttttaacgaggcggagccatgtaatatacctgcaaaaatcccccgcaaaaactaagatgcaacacatcgaaaaagaccgcatcgacggtcttcgccattcgaccactccgaagtcagtgcgagaggcagcgcagactaccctcgcgtgcgacactccgcgcaaaagtcgcctaagcgtgcagccggaatagcacaacaagtgcgttaatcgaagtcttttattaaaaagacactccgcgcaaaaatcgcctaagtgtgtagccggaatagcgctaattgaagtctcattaaaaagacactccgcatagagtcgcccacgagcgcagccggaccaacacaggtgtacgaatacggccaacaggccgcatcaccatacaaattacaattacatacacacggcgagggcatcacatattacatcggctcaaccttcgggatgatacccatctccatgtaattaaacagcattatcctcaattcctcaccctcaaaaagcttccgaagatccccaacgcctatgcccgccccaatcggcgaggacaacaattctcgtttaccatcccggtctactcggagacggccacgctccatccccatatgacggtgcctgccacttcgtgaaaattcacccacactatgttttcccaccaccctttgc

SEQ ID NO: 20063 - DNA, 674 bp, Zea Mays
gattatgaccgacagtgaaaagatcttaccgcagatgaggtcgtgtgctggctgtcgtacccacttgctctgcggccgaccgaaatgatcctcgtcggtgttggccgcttgccgctcgtgcgccacgtaatctgtggtgttaccacatcgtagtagaccaccgtaggtagcctatccatcctgcgatagtgccctggtgaatgccacgatagataactccggtgactcctcccctttctcattgccctcccttcctcgcctaaattcgtcgtattcgcaaccgctctctataaattgagcgctcagcatgttccgttaggttgttacgcgcatagtgcaccagccctcgcctccgattagccatcttagctcgcgaatttcaaatttcccccaaatcggtcggaacgccgccgtgagacatctcatcgtggttagccctctacaggttagttcaagcttctctgcttgatgttctagcctcccttaagtctcctgttgctcgtagacccatttgattgagctagacctcagtgaatcaccaagaacacctcagattatctccggttcacaccgtcgtagtgagcagatgaattctgggccagatttgtgcaattaatggagggcttagggtcgccaggggtaggaataggtgtcaaccaagttagggcgtcagt

SEQ ID NO: 20064 - DNA, 500 bp, Zea Mays
cgccaaccctagaaggacctgcccccggtcgaaccgcacggcactgagcctagggccgtgcatggcggagcctgataatggaggacggacgtgttgaaagggaaccactcgagtggatcccgccccatccctggactgacctgccataaatgactggctgcattaaccacgcctagcaccaagccacaacatgggcaccggtctgcttcctactcatgacctatggaccacttgggccgcattgctctcatgacctacgagcccccggactgcgacgtactaatggctctcacaccctcggactgcaacgcacttatgtcctatcggactaggcctaagtgacacaacaggctacatcgagccccaggctatggaagccaaaggtcagcatagccggaatgatggcgcctgggaccattgtcgcacctgcatcatccactacgataaatacgtgacagctaggcaaccccgggtcccgtgattatgcatggactcacccg

SEQ ID NO: 20065 - DNA, 469 bp, Zea Mays
cagtagtgggaggtttgttcactgattgacacgctgatgcttgataacatcctctatttatacagagaggtgtactttgtctccgaagcatccagagagatatatctaataataaccatatgtataagatagtattggaaatctttcaatttcttaacttactaatctgctaaggggcaaacaacatatgccatgtgctatagcaatcttgggactttgatgcaaatgctctagccttttctgttggcgacattaggtggtggagtggcagcgatgaagcttgacagaacaacaagttcctttcctttctgaccctgcctccctagagcctatacaaacaagtcagattgagaaattgagaggtagattaggataggattcttgcctggcttattcttttatcctggcttccttttatggaggagcttgcaattgagtgatactactttgcagcaacagcttctgtggc

SEQ ID NO: 20066 - DNA, 869 bp, Zea Mays
tgctttcctgtgtcctagttcaccatagtttggacacttgatctttccccgaatgcttgtcttaccattgtcagtgttaactttcttttttccactgcctccctcaaggcatcctttcatcctatttttcctctgtcgacccacagctcgttttccaattggagcaccaacttcttttgcgaaagggacttctggccaaaatgatttgtcaccgataggtggaaccacccttgagtatgctgtggtgaaatgagatacagagtagtactcatcgacaaaatcctccattctgacatccctaaattcttgagctgttgtcaagcataaagcatggttacatggtttgcccgtgtgctgccactctttgcaagagcattcccgcaaatgagcattgacaatgtgctttgaatgcacatcattgttatcccttacctcagcaatgtagttgtcagctttacgaactgataaatgacttaaacctctagttctgtcgtgtaggatatgcaggaccgaaggtaaaatccttccttgcaacctttgtgcaatcctcctccgcctgtgaaacatcaccataatttcctcctttatcctttcagccaaatcacatacaggcagatccttccaatccttaatccaattgttgaaaacctcagcaatgttgttagtcacatagtcgcacttgatgtccgtattgaagccacttttgtaccaaaggtagtcatgatgctcacttagccaactactgacccgtgggatttcttggatgctactaaaatagtggtcgaagacttctctcctataagctctagctgctggatacatgtactcagacccaccaaacaactttatgtagttttgtatgagatacc

SEQ ID NO: 20067 - DNA, 485 bp, Zea Mays
ctcttcctgaaggcgccaccccaagacttcatggggagagaaaccatttcttctctaggttcttaggttggctacgggtcaaggagcaggcgggggaagtaatccatgggatcggcaaggagcgcaagcgaagaggaggaaagaacggaggaatgcaacaaggtttcaagggaaaggaaagggacaatgcatatgtgtgagattgtggtaagcgaaactaaacatagtcgacttccccctctttcttataacttgagaagtatgggacccaggcaacaaggtgggcccacgcatcatcgctctaaaaggatccaccgtttggagggacgatcttcggaaaccagtggattattgtgcattttgcaggaaacagacatatcaggcagagcaccaaagagagcatgagatgggaagcgataatgggcaggatgtttcctgcctatgcatgccacgcgcgcacgatgcaacaacaaggctatttcgcg

SEQ ID NO: 20068 - DNA, 745 bp, Zea Mays
gcgggatgcacggagctccatcaacgcttcgtgcgaccgacgacacgagaacgagataaggcgctgggaggagtatgaccgggaccacggctcgaagccatgccacccgagttgagtcggccgcagcctcaactagtggcctgatctagggacggtcgagacaacacatcaccgactcccctccctgggaccgacaccatgaacgccgatagaaagacacatgtggagtatccacgcttactccgcgtctccgggccatccagtggccccctaacttcaaagtctccaacgtcgacaagtacaagcctaagcaagacccggggggctggtaagccatctacacgaccgccgcccaggccgccggggcaacagaagacgtgatgacaacatatttgcccattgtccttgggcaagatgcactgcagtggccacgacatctgccacgacactgcatcaatgattggagtgacttcagtaggcgtgtcattgccaacttccagtccctctctgacaagccggcgcagccatgggacctcaaatccatcaggcgccagggcgatgaaacacttaggtcatacctcaagaggtttcagaccatgagaaattgcattcccgaagtcactgaggcagcagtgattgaggatttctaccggggatctaatgactcggccttcatccgagccatactgcagaaagcgccgaccacttccgaacaactgtttcaagaggcaaacctctacatcac

SEQ ID NO: 20069 - DNA, 661 bp, Zea Mays
gtgcccggtgaccgcgagaaggaaggtctgcagtagatcccgttgatggcgggagatcattgaaggtctggtgcacctatagagagtagatttttggcagttctttcaatggatcttttgggtggtttggtgctataaatactccctaaccaactatcgggtatcgtaattaggggtacctggattacgtcccaaacgtgattaaccccgaggttgccgtcaggcacattccccaaggacaataaggtataaaccacgactcgcccgaggcaccactcggcagtcacacaaaactccgcctcgctcgagcctgccatcggacaagagatgtacttggggaaatcctcgtcccgtccgaggtccccactccaaggaaccatcgttttcgcctcgcgtgagcccatctcgtgcaagcaagacaaccctaagccaggcctcagccagaggccacaagggacatgagcattcaatgtgcatacctaccccatgtgacgtcactggaacgacaggatcacgatctcattagctttcaccaactacgatgacgcatgactaggtacatcagctactattcccccacgccgcctgccaactcctgatgggacgcacatacgacaaagcatgggttggccctcaggaggaaactatgcctcacccgaag

SEQ ID NO: 20070 - DNA, 505 bp, Zea Mays
atcggagacgagagctggtgttctggcttcgtaacaacctaacggagcaggctggggcatcaatttatagggtccatgaatggtggctccgaatttgaggagagaagcttgtggccgaggagaggggatgagtcaatgtggcgatctaccgtggaattcactggacaaaggcgtacgactatcactggttaacctccatggctcaaagtgacttggtaaaatatcataaggcgtggcacgaccgagggaacggcgacagccatgatgacgaccacgcagccccatcaccaacaagtgggtacggcgtcagggcggtcacagtgccccaacttcattccttgccaaagatctttcaccccaagtcgttatccagacgccaaggggtgcgaatcacagcgccggtgtgaatcctggcgcaagggtcaccgacggcgagattcagtgcacctgagaatttcttcaatactgtaccatgggagctccatttagggcgcctgacagagca

SEQ ID NO: 20071 - DNA, 1278 bp, Zea Mays
cctctgtcctggtgggaagcatgcttggcgtctcggctgcacagggcaatggcggccctgccagctccaggcgcaaacggtggaggaagaagaagcatttggagcgtgaagatgagccgactttggagattgtggctccacctccacctcctcccgtgcagacagttgatgcaactgcttgtgtgattgattggtctgttcagatgtccattgcggaagataatctcaagacggctgcggttatcacagtggtttgttccagggacatcagcgctaatgagatcatgtcggtcttggctccgcggctggaaatggaggagggaggattggttctccggcagttatcccagtccagcttcttggctgtccttcccagccgtgtgcaactcgacacgctggtggatagcttccctatcatcagagaagaaaatttcatgctctcctcaaggcgttggacgaggtttgggggtgctggtggtaattccttgaagcaccttgtggaacttgagctcagaggtctgccggtgcatgcgtgggagacttcggtggtgcaacaattgatcaacccccatgcgtgcatttcccaggttctgcccggcacggtggaagtccggagtctggaggcctttcgatgccttgcctggtgcagcgaccctgaacgtattccagctactaaagacctctggatcactgaaccagaccaggcttcggctgctgaagggaagaaggccctggtgtacccggtgcaaattcgttgggttcctactgatttgagcctcttgactggtgatccaccactgctgattggaggtgacgaccaggacaaatctgatacccccccttcacggagaagatgtagtgacaaccctccacgtgctcaacatgatgcaatcaatgacgttcctggcaacaagacccacactcaacggcggccggttcatgaccgattgggacccttgaggcgctcagattcccccagggaattgagccatcctcgggttcagattgatcttgaggcccgcagcagccagccttgtgttctgtctgatacagtggcggacagctgcgtagggaatcctccgactcctgtgccggacggggttcaatgtttggcgggggatgtgctgctgcggagcgaggagggctgcgaagatgctgaagtaattcccatgaccccgatggccgtttccagcccctgtccttcctctggagggagacgcagactgatgctgaagactgctacaaagcaagcaaagttcaggaacccgcccattgcgt

SEQ ID NO: 20072 - DNA, 381 bp, Zea Mays
tcgttttcgtggttgtacaagtcatctcctgcccaccttttatcaaactactgcttcaagggctggtcacacgtcgataacaagatgcttatatatttgggaaagccatagcagaacaagacaatataaggcatgcatctacatatttgggaaagcacgaaaatgtcatttgaccaaaattctgtccggaccacaataaagcgatgtaattgaacagaatatactcgtgttctggtaggataatgtacaccgaatattagagtccgacaatagaaaggttatctttgcccctagaagtgttatgcaattttgtcaaggcttgttacttctttcttcctaaccatcctaggcctaacgcatcacctttggcaattagccaac

SEQ ID NO: 20073 - DNA, 543 bp, Zea Mays
gtcggaatccatgcggattttggcggcaccgaagctgccgatcacgagagcttatattccagcttggcaagacagcgatgcatcgtctatcgcagcattggtctaccagagcgtagacgtcgctcaagcagagtcaacagtctgactccggcgaccgacaagcccgccatcgcgccagcctggaagttggacccaagaaccattctggcattctatcccggccttgactcgcagagggagctgcagtgcagtgcaggtgcagcgcaaccagaaagcaactcagctgcgcggcagtgcaggggtacacccatggcaacgtgacatgcctgccaatgataccgcggagaagactccaaaaagactgagacagtgagacgcctttacgatagagaaaagatatacatgcccctccctctttcttcgcctagagacagccaagtcactcacgctcctctccactccgtccactactttcacctgatcgccaccactacctccacctggaacctggaagagagagagacaatggcgtgtaggccgcca

SEQ ID NO: 20074 - DNA, 749 bp, Zea Mays
gcagtgcaagacggactgcgccagcaagtaccacggcggcgtcggcgtctgcctcaaccccaaaggatgttactgcgagtactgcctggatcgcccctccgcccacgcggcctcgccactccgtccgcgtcatgattgaaactgatgaagccgcgcgagctagcagcgtcgaacatgtatcaattcagctgtttcttagaataaacaaaagcaaacaataaggaagaggtagatgtccgtgacgcagggcagcgtatcttatgcacatgcctacggctgtgcacatatgcacatctcccatcctgtccctccaaccacgatccaatggtcaccgctactttaacacttaaccccccgcactctgtcatgtgatgtggattgtttcttgcaaaaaccccccgctctccttcttccccaaacggcaaacagaccagacttattggcttctcgtagaaggaccacgaagccaccattggagtcgacgccgacatcgttccagtctgcagctgccctcgccgaacgccgttctcgtcgccgctagagcctacacctgtcgccgccacctgctcatcgccgggcccgaggacactgcaacatggcgccgccgccaccggcatgccctaaccgtggtggcttgatggagcttcttaacgccatggacgcgcggcgggtagacgaccctactagcagcgtggacgccatggaccctgctccctttcaactcaccgctcttgttgaagtcggtgcat

SEQ ID NO: 20075 - DNA, 354 bp, Zea Mays
gagtttttgaaatctgttactaagagcttgttgagccaaatagtaatagtgtgcatgagcattagagattgatttggttgctctacttctgattcggggctgtacaatttctggcactgttaaaaaagagctgacttatatgtcactggtggttgccatctcaaatccttcttcgttctttcgtgctatgtttcttgacctgtctaatggtcattagaacatagaatcagtaggatgagttgcaccaacacacaccaaattcaaaaactaaaacaatgttcatagctgagctaatctctggatttcgccaaatctatgtcaaaacttcagaattctggtagttctggccttgtg

SEQ ID NO: 20076 - DNA, 690 bp, Zea Mays
caacgccactgtagaccttcgtctttctcctctggcaacggccgtgcccgaaatccccgctgaccacacgatttcagctggtcgagcgcaacaaaacccgatccgaccctgtgatgaccataaaaaagggcaccgagtccttgcctcctttcctctctcgtcgtatactagtcactgccgccgaagccacagaaagagagactgctcgcgccgccgcagctaatactcacggttgacgccatctaaccgtcgacgcgaggactgcgaagatcacataggcatgccgtttgggataggagccatccgagaccaaatcgtgggctgttcgttgtcgaattcctcaccggagatcaaaacaggggcggaactacccccttcccatgggcagtgcacgtcgcgccaccgtcgccggtaagaacccccttgacgaattcgcattacccttctcttcaatcccatgttgctagaggaatccgggagggtctgggtgccaattcgccttgtcgtcggtgaggcgccgccactactaggatgcgcggctacgctctgccatcagagggagaagatgacccctcgaccgtccattcaagattggacggtagagattagagcatgggtaacgtttgggttgaattgatcagtggtcgtctgttctgcgatcgacgaccccgattagatcgcgagcgcatt

SEQ ID NO: 20077 - DNA, 358 bp, Zea Mays
ttgaagcctggaatatcggattggcgtgaaatttggcgaatatgttactggaggtgttgtgaaggtgcctgaaaagtttgggttcaattggagcatttttggctggtttaggcatttcaccgaacacgtggagggcgaagttttagggtttcggagaaatggccatttgaggtgtgaaaaccctcctgaaggagctaagaacctgcaggaatgctcaaggcacacagaggaacacattgcacaacaaggattcactggaattcacaggatttgaatttgagcacaaagggtggaaatggtctcactgagttgaacagagggaagagagaggagaagacaaggctgctcaccgagcgag

SEQ ID NO: 20078 - DNA, 874 bp, Zea Mays
gacaaccagtctctcacccaaagacggccagcaggccacattacaatacaagttgcagttacatacactcagcgagggcaccacatactacattggctcaaccttcgggatgatgcccgcctccctataattgaacaacattattttcaattcctcaccctcaaaaagattacgcagatccccctcaccaatgctcgtcccaatcggcgaagacaatagctctcgtttaccaaaccgatccactcaaagacggtctcgctccatccccatccgacggcgcctaccactttgcgaaacctcgcccacgctatgcttcgacaccacccttcgtcgccggcacttggtcctcgcactaggaagatcagccaccttgccaacctccacccgcggcgaggactccaccgcagccacatctaacacagcaaaataatccaagtcttcatctgaagactcttcggtccaggaaaacggactcccaaactcaccatcagacgaaaaagacccagatccagaaccagataaattgtcattggcaggcactacggttgcggccgccacaaaattagtatcgtcagcagcggttgcttgcgcaggcccatacgtcgaaacctgtgcagcaaccgagtttcagtatcacaaaaacaaaatcttacacctgatagccctagctcctaccccgccacctgcgaagggccggccgacgctgcagggtctttggcagctggttcgcccgccaccaccgaagtgtcctcaccagtcggcgcagcggccggcacagggtcctcgccagcacaggtcagcgcggaggtcaccatggggccttcactaacatcggacggcggcgccagctccccctcaaccccctccttctcac

SEQ ID NO: 20079 - DNA, 339 bp, Zea Mays
cttaaacagattagtggtacttggacccttctagccaggtgttaacttaacttagcacattaaatcaacacaatcatgagctaacccaacccatagagtcatgatgaatggtataatctatctatccccacctaacatcaaacaaacttttaacctacatcatgtagactatctcatcttgacaaaatgctatcctacctttggatattcaccttatacgactagttaccccaatctagacataaaacaaatattaagccctgctaaagaatcttcagatcgtaaccagctactggcctattcattctgcttaccaaatacttttcattgcaaaactat

SEQ ID NO: 20080 - DNA, 689 bp, Zea Mays
gcaggaaaagcacaacaagtgcgtgaatcaaactcttttatttaaaagacgctccgcgcaaaagtcacctaagggtgcagccagaatagtacaacaagtgcgttaatcgaagtctctcattaagaagacattccgcacaaaagtcgcccaggggtgcagccggatcagcacaagcatatgaatacgaccaacaggccacatcatacaaattacagttacatacactcggcgagggcatcatatattacattggctcaaccttcaggatgatacccatctccctgtaattgaacaacattatcctcaattcctcaccctcaaaaagatttcgcaaatccccttcacctatgctcgccccaatcggcgaggatagcaattctcgtttaccaatccggtctactcgaagacggccacgctccatccccatacgacggcgcctaccacttcgcgaaaattcacccacactatgtttcgacaccaccctttgctgcctatacccagcactcgcactagggaaatccccggcaccctccacacatggcgaagactccgctgtagccacatctaacgctacaaaataatccaagccttcattcgaggactcctccgtccaggaaaacaaactcccagattcaccatcagactcaaaacactaagacacagagccaaataaattatcatcggcaggc

SEQ ID NO: 20081 - DNA, 438 bp, Zea Mays
atcccaaaccgaaatattatgccttgtatgaattccactgccttggctaaggtcaaagaggcaatgggcttgtactctatctattttgtgaatttgtcaatggcaaccagcacgtgagtatagcctccctgagctttcttgaaaggtccgatcatgtccagcccccagcatgcaaatgaccatgttacaggaatggtctacagctgctgtgcaggtaaatgttgttgctttgataagaattggcaagcttcacatatctggactaactcggcagcatcactcttcgttgttggccaatagaaaccagatctgaaagccttcctgaccagagttctggatgatgcatgtactccgcactgcccggcatggatttcatctaacagttgcttcccaatagctgagtgaatgcatttcatgaggactcccgttgcacctctt

SEQ ID NO: 20082 - DNA, 333 bp, Zea Mays
caggtcgtcgaacacggcggccagcaggcgcgcccgcctggccaccgctgcgaagaccggccgcaggaacggcgccggcgcctcggccgccgacaggtcccgcgccaggcggtgcagggagcgcaggacctccccgtcgggcgccgacgaggagtagggggatgacggccacgcgtcgctcatcattggtgctgctgtatgtgccttgagtatgtaacgatggaatccgattctgattacaatctcaatccgattctgattacaatctcaatccgaagagaaggcggtgaagaaacacggatggatggacaagtgagacgagttggagatggg

SEQ ID NO: 20083 - DNA, 418 bp, Zea Mays
cttttctcttgcattttcttgtatttgctgcagccgggtcctacttctcattaactggtgctctttcgtctttcctcatccttgttctcgcacacacgatggacggaagacgctgctgccgccgcttctttggagttaggaaacgccgccgcaaccgtccatttcttcgatgtctcgtctccacactctagtgcgccaccagagcacacattgcccatctctctttgcctctctctatcacaccacaccattactcgcgatcgtttcttccccacacagttaaaccgccattaatggttttcatgcaccttcaatccggcgcccctccgtgtccctccacctccttggcaattcgtctcgccgccgcgatgtggaggaccccatgccaccttctctcctttctctatctcaattaaat

SEQ ID NO: 20084 - DNA, 408 bp, Zea Mays
atcctagccgctggcgatcgatccaacggcaaggcgcttatcttcttcctcagtccgagctgggcgacgctttgccccatccgcggcggcgccctgaccgagccccggaccaccgacgccccgatgaccactggtgcacggaacccaattacggtgacggcccgagcactgaccgatccacattcgtataccaaagaaacgaaaacagtgataactcaggaaaagcactcaccgacgacaagcctgctatggcgccgaccacaacataccgtcttcgcggcgtggcggtgtcatagccggtaattaggactccctgtacaaccctaaatagcggcacatgcacgacattgatcacgacgacggcttatctctctctccccgaggtgcagactcctcgtttctcctcgc

SEQ ID NO: 20085 - DNA, 331 bp, Zea Mays
atacttcagactcttgtgatcggtgaagatgtggcatttgttcccaattaggtagtgcctccatatttttagggcatgcactatggctgccaattccaaatcgtgggtgggataattctgctcatgcgtcttgagtaagcgtgatgcataggcaataactttctcattttgcatcaggacacaccctaagccttgccttgaagcatcacagaagatgacgaagtcctggtgtatatctggtagtgtcaaaacggacgcggtcgtgagcttttcctttatgatctggaaactttcctcacactttggggtccacacaaacttattgtctttc

SEQ ID NO: 20086 - DNA, 879 bp, Zea Mays
cggtgtagttgttcctgatgacattgttgctgatgtcaaggctgcgcctgatgcctcgagtcgcccttcctcctcgattgcccctacgaaagacattgccaaatagatatgttttgtcatagcgacatgtttagaagatactgaatgcattcgtgaattatatgtgtgcatgatcagtgtgctcagatactcggtggatagggtactagaatgtgttcttggtgctgaaaactataacattttgtttctgttgttagaattcaacagtcgtcatgaacgattgcagaagtaagtgcggcgtgctggttttggagtcttttcctaatttatgccaattgatcagctggtaaggcatagaggtcgccctatgacgagtagttgtgagcatgctacaccgtcttaagtcattgccgacttaggccgattgctccgttagtagggtatagtggtcaccctaagtcgagtaagcgcgagcatgttgcaccgtcttaagtcattgccgacttaagccgattgctccgttagtagggtatagtggtcaccctaagtcgagtaagcgtgagcatgttgcaccgtcttaagtcattgccgacttaagtcgattgctccgttagtagggtatagtggtcaccctaagtcgagtaagcgtgagcatgttgcaccatcttaagtcattgccgacttaagctgattgctccgttagtagggtatagtggtcaccctgagtcgagtaagcggaagcatgttgcaccgtcttaagtcattgctgacttaagccgattgctccattagtagggtatagtggtcaccctaagtcgagtaacgcgagcatgttgcatcgtcttaagtcattaccgacttaagccggttgctccgtta

SEQ ID NO: 20087 - DNA, 594 bp, Zea Mays
ggacactgtgtctacgagcttgtgttcccacacaaccatagcggaatcgagcaaacgggcaccaccgtaagcttcgcaagcatgcaaaggcatgaaaacaacacgtggtttggacagcgagttaccagaacaagctggccacgggcgggctgttctccacggtgcggcggaccgatttggggaaaaatggcgccgcggcgtccacgagtggaattgagggcggggcttggggctatacggccataaagaaccactgattcaccgagttcaaccaatttgagggaaggaggaggagacagtgtgaattttagtttttactcaagctaacttaagaactgcgagcaccccgccgtggctccctgctctatatatataggcacagcggtccggcgaccatttcatgaccacggacagcatcgcgagtgcatgccgaccacgtcggtaggaggcacagtgagggagatcacggcatgagtgacagcgcggcgagagttaactgagtcacggtggccgccggtgaagactccggctgggcttgggagatggcgccacatacgggttatccctccccggcattatccaccccacaccgcg

SEQ ID NO: 20088 - DNA, 410 bp, Zea Mays
cttgcctggatggtcgaagttgagccactgatctgtccgggtgaaggtgatcgggtgctcagaccatcggtacggggcggggggaccggtggccgccaccagtatctgacgatcattgagcttttgttgtctcttgctttcttgcgacccatgtccaccgaagatgacgttgacttctctgtcaacacgcgggaaggctccacctcctccctcctcctgttgccggggttgtcgaggttctccatgtcctcctcgtggagggggaggaggtagaggatggaagggtcggccgttccccacggaatgcttgaagtctctacagttccgtagggtgtggtgcatgtccttgtggtacgggcactgggcgtcgaggatgtcgtccagcgtgcgttcgcctccgcgaggtcctc

SEQ ID NO: 20089 - DNA, 432 bp, Zea Mays
ggaaggggttctatagatgaagttggaggagttcatacatctgaagcaagggggagttccgtaatgcagtatctcagcaagtttaatcacctctcccaatatgccatcgatcaagtggacactgatttaaaaaagaaaaattgcttcatgagagggttgaatgaccgactccaacgcaaaatggctacgtgcctggatctcacctatagtagggctataagcacaacactgtcagttgaagccaagaattcgggccaaggaaaaatcaagggatatgagggtgaaggatcatctcaggggtctgaaaagcggaaaaggttggtaattcatcccttcaacccaaatcattcttctcctcatccaccctcagatccctttaggcaactcgtgttcatccgtcccactcctgcccccgccctgaacaatcagtct

SEQ ID NO: 20090 - DNA, 976 bp, Zea Mays
ctcagggatgtggataactccgcggcgttaaaagatcttcaccgcccgtgcgctggcgatcactccggtgacctccgtggctctctcttcttccttgcggccgtatggattacctcgccgtgaccgccgcttcccggcatcacgccgcgtggctcaaccctttcaccgtgtcgccgtgacctcctttggactccccgtggctcaccggaattactgccacgctatgagacacgtactccgcgcgccaagcttcttccccgcctccggccgccagctcgccgtagacaaattggaagccaccgctctcggagtctttaaattgagcccaccgttagctccgcaacttcatcgcgtaccccatcgtccagtatcgtccccattcttgccaccgtgagctccaattcctagttttccccaaaaccgttgaaaaacaccgcgaagaacacctcgccgtggccagccttccacaggtctgctcatgtcctctttgttcctgttctagcttctctgtacgccggtgatgctcgacaacccacacaattgcgctaggagaccaccaaccgccgggaacacggcgatctagccgcacggcttccggtcaccgtggccagaacacaccacttgataattagtgcaattaaattaggggaaacactcttcgggtagtgaatttggtttacgccaaagctaagcaccggtcgtagtccagctcggccgatctacgcgctcgccggagtgctccccgcgctgccgtcgtcgtggacctgggtctgcaaagaaatagatcatggagggcttatctgcaagttgtcagcgacacagtagaatagtgatctaacctgtctgcaaatagataaaaccgcgtggtcctttctgcaaagctgccagggcgcgcgcgcgcgggcgctttctccctctgtgctgggcttctgggctgaaagcagcccagtactattcatcaatttgtctttttctt

SEQ ID NO: 20091 - DNA, 464 bp, Zea Mays
aagatcagggcaattgaggaaatgaggcctccggccaggatcaaggacgtccagaagcttacggggtccctggccgcccttagccgcttcatctcatggctggctgagagggcgctacccttcttcaaactcttatggaagtctgacccattctcttggaccgaggaggcagagcgagccttccaagagttgaaacaacaccttgtgtccctaccaatactggtagctctagagccaggggagccgttgtacttgtacattgcagcggctacagaggcggtgagcatggtgctggtcgtcaaaaggacggagcaacattcccaggggagtcaggaggttcccctaggagaaggtggtggtccgaccaacacggaccttgagggcccggggccaaccgtaggggttcggaccatacagaagtcggtctactacgtcagcgaggtcctccatgaggcgaaggctag

SEQ ID NO: 20092 - DNA, 504 bp, Zea Mays
aaaaaagggatgagagttacctgggctcggaatcctcctttcggccaacctgaagaagccactcgcacggcccactagccaaacggacgtgccgacaggtggggtcccctggatcggccgcttgcgcgcgttgctctcccgtttctcgctgcgcgtgggcccccttggtcagccgcttaaccatcttcctcttccttcgccgtgcaaatcgcgcgtgctcggtcatggcgggcgccgtggattccgttgtaggcacgctgaccaatctcgggtggccataagaagggcgtggccaggcccttaccctcccctccacttcgaacacccgcaaccaagcaaacctccattaccgccgtgtgaaccgtgaggaccgagaaccgccgccgagatagccgtcgctgggggagtctccgctctcggtgtcggctcgtagggtatcgtctccgcctggggaagccatctgtgccaagtaattgtgtggtgaggcggcggtgcggcgccaat

SEQ ID NO: 20093 - DNA, 924 bp, Zea Mays
atgggcttatctagaccaattcggcccactaccaccatttcccctccgcgtgacccatcaggctgggatcagcgccgacatgtggacccgggggatcagccttccgtgcatcgcgcggctcactgcctgggcgcgcctggtgacttacgtgtggggccaccgtgtaagacccatcacccacctccgttcatcgcgcagattccgcgtaacacggaccgggcgccgtgagcttcgtgaatctctcaacagaaacctggttcgcccgagatttccgtcatggctcgtccgaatctctcgcggccgcgtacttaccctccccacgcgctcgtatctctgcatggctcgccgctcatcctggaacccgtcgtgatctggtcaatgggatgtacccttgatccgaaacccgtgccgagatctcgggttgcgtttgccgcccccatggccttgcccaggtgcatataagtaggccatgttcctccttgcccgactaacggccgttagcccagccaccgacaccaccgggagccgcccgcgtcgacctggtcgacgactacggctcggagcccacattgtggccatagatgatctacgaagctcatggagcgtatctgttgccgtttcgggtggaatcgtgtgcggggcgatgcggaatttctcgccagagatcacacggcgccgccgaaccgcactctgtcgtggccagcgccgctcggtcatcgatgtctggtgaggactccctccctgtgtttgccaggtcctttattacatattgcgcactgtggattgggatctagggcgtgtttgtgtagtttcgccgtgctctggtgagctctgcggtgggggaagcagggcgccgtcgggtgccgtgaccggagaagggggggcaggccgttcggtcgtctgatcttaacggacgactggatt

SEQ ID NO: 20094 - DNA, 611 bp, Zea Mays
ctgggactctaccccgcgcgcgctgactggtcgactgacggccaggtggggccgggcagacgcggttgcccttcaactgacccgtccaacaatggcggacgttcgccgtcgaatccggggaggtcgttgcccaccttggccacctcgcatctatacggactccccagaaccctggccgacctgttcatcccatttttggagactcggcctcgccgaatagagcgctgccgcagcctaccgtcggctacgttgtcgttggggtcttagggaagagtattggagcttcgccgcgtcaccaggaagacgtccctggaagtatctggcggaattgatcctcagggcggccccaattcctcgccacacttcaaccccgccgtggacccgcattgctgcgtgggcagagaagtcaccgccccaattcgaggtaaaaccactcctatcgtgttcgcctatgcctcctctacgcgtagggttatttgggaggggtgttggacaccggtggtcctcgctgcggggctcgccggcgcatttccacagggcgcaggggcggcaccgccatcgctcgtgaccagacgaagaagacgagcgtgggccattcagatttaatccta

SEQ ID NO: 20095 - DNA, 407 bp, Zea Mays
gtaagatttcccaaataaatcaccacaatagcatacattgcccacaactggatgattgtggttggggattttatctgtatgcttttagaacatctcggcattagggggaggaatgcccatatagtgtaatgcctcaatattctattaaacacacataagccaaactgaacctgtcgttcgatgtgtactcctatgtatatggagtttgctagaaatcgttgaggattaaccatattggtttgaatgcttctacctgatgtagatgtggatatacccgggattaatatcatatccacatttgacttattggcatttgatctattctgcggggacgcctgcggatatgatccatcgaccttagtcaaaacatatgttctgattgcagattcacgtggtctgtgataact

SEQ ID NO: 20096 - DNA, 287 bp, Zea Mays
aagaaattcaatatgaaagaatcatggttatttgattctttcagatcatgagatgtgctattgtatcttgcaagagcatccggccggatattgctttgcaaagatttgctagctagcagcacatgagatcgagttatgatctccaggtgtactcatgctctccttatgtttggattattgatcttggatatctatagaagatccccaggtacaagatcaatgacatacttctggtaagttggacctactgtttgataaatgtcaatcaacagagattaatggtcact

SEQ ID NO: 20097 - DNA, 319 bp, Zea Mays
tggagcaatcacaccgaggaggaagctacatgggaaacagaggattatctaaataggaactaccctgagtttctacctagaggtgttggtacataaccatacccccatcacacctcactttctgtatcaagataccatcatacctccctattcataagaaagatggaccatgtagataagtgttgttaggcttccttctgaaattgcaaggaggatgacattcaaagagccaattggcaaaaaaactcagtagttgtactatccctgtctaggcagtagagttacgcacctccttacccattgtagtctcactcgaatc

SEQ ID NO: 20098 - DNA, 904 bp, Zea Mays
cgcggctataaatagcccatgctccgcggcgaggtatgagcatcacgcacaccgtaggttgaaccgaagcagaaattcgtgctgcctctgccccctcctcccaaattggttgtgcgcggcaaaactagaaccccttatagccgtatagccccaaagccccgccctcaattccactcgtgaacgccgcggcgccattttcccctaaatcggtccaccgccccgtgaagaacagcccgtccgtggccgaaccgctctggtaaggctctgcctaaattgagtgtcgtttctgcaactccataagcttgtgttgctcaccgtgacgcccgactactcaatccggccccggatgagcgggaacgtttgcccatgatcacggtttccgacgtgcacatggacaagccgttctcagggtgttcgtgccaaattgttgggtgttccgaggtccctgttagtcgttaatgccttcccgatcgctagccgtagtattcaacacccgccatgaccagtacgggttgcaccagggttgatctgtgtgcacgccatggccaggggtactcgtggggaagaaaagaaagtagagggacctgtccgtaagttgtcagtgaccctgggcaacagtaaagaaaccagattccagttagtgcaaaccctgaggttttttccgcaaatacgcctgagcgcgcgggcgcgcgtgggcgccccccctgttcgctgtgctgatgggccgactagactgaaaccagcccgtcactgttccagtcttttccttttctttttcagcagaattttagaaatccatggaaaattgcagaaaaatcctaaaattgtgaaactaattttcctagactccttattttccctagtatttaataaaaatagtttcatgatttttagtttaaacagg

SEQ ID NO: 20099 - DNA, 727 bp, Zea Mays
gaaggatcactgtcgcacagccttgtcgtgatagcgccttagagtttgctggtaccgtgctgattggattaccgcattcagccgttcttcttcaagtgtatcaatgtcctccagcctggtggcctcgacttctgctatgttttcgaagatcaatcttggcgccccgaacttgagatcagcgggtagcactgcttccgacccatagaccatgaagaaaggagtgtttccatgcagagctcggctaggttgggttcttaggctccaaacgacatagggcaactcccttatccactttcctgcgaatttttcattcttatcgaagacctttttcctgagtgcctctagtatcatcccgttagcttgctcgacctgcccgttggctcttggatgtgctacagatgcatacttgatctgaatgcttttttgctcgcagaagtcgaagaactccgaacttgtgaagttggatcctaggtcagttatgatgttgtttggtatcccgaatctgaatattatgtcttgtatgaattccacggccttagcagaggttaaagaagcaatgggcttgaactctatccatttagtgaatttgtcgattgctaccaatagatgagtgtatcctccttgagctttcttgaaaggtccaatcatatccagtccccagcatgcgaaaggccaagttactggtatggtctgtagttgctgtgctggcagatgttgttgttttgat

SEQ ID NO: 20100 - DNA, 730 bp, Zea Mays
acgatggtggggcggatttcaccggtggtggtctggaagaggccgaccatggcgaagtggtggagttcccgcgacggtgaggtcacgggtgaggccttggggtgtgatagggggtgggatgtggtgttctatgttcgtggtgatgtggtgaagttagtgagctagcttaatttgacccttggctactagagaggggagggggagagctcaccagagtgaagggagatggcgacgctagctcgattgagctcaggggagagggagggagagtggccgaggccggtgcgaggagaaagggagctcgatgaggcctttttataggcgcctgagggaggggagcggctggagcgggctggcgccggtgatgtgcacaacggcggcggtaatggcgcacagcgccggggacgggatggttcggggaggtgtcatgtgagggtgcaagcacagtaggcaggggatgaaacggtgcctaacttcactgggcagaagtaatggtggggcgggggaaggacggtgaccggcggtgatcgcagtgatgccgtgcgcgggtgaggaagaaggggctgacagctaggacccacttggcagaggaagagcgggcgtgacgaagcgagagagagcgtggctggcgagtagggtcgagtggtcagtgaaagagagagagagcgtgagcaggggatggcgcgcgtggtgatggacccgaatttgggccgatagagtggggggctcg

SEQ ID NO: 20101 - DNA, 736 bp, Zea Mays
aaggaggcttagagatttgcatgaacgattgaatgaacacaaggattagagtggtttgagccgccggagcgtaatatccaacatcaattgtgtgctgtattgctttgagagtcgagagtctaagcctctcttcccctgctacagtgcaagcccacccttttatggtccaaggggcacgttacaagggagttgagccccgacaggtggacccaagagtagttacaaagtaggacgtgaggcgtcagataagcctggcgacactagatcttcttgagtgtgtatctcctcttggtcgtcgtggtggtccatggagtaggttgtggtgtagtctgatatgctgccatgtgtagggcactaggttgtggacgatgttgtctcgtcttctgcacctgtctcttcatgcttcggtaaggcacaaggaacaatgaaagtcataatgaagggcacctagacgacacattgagtcaatattattgccttggtaatgtgcggataatagtagaaatcgcatgttgcaaccctggcgtgcttcgcgcatttaatgcgggggatacgctacatgttgctggcataggtaagtatgcatcccatatgcacctaatgttggcaggccctatgttagatgcttacgtcaggcaccgtccgacggcttacatcaggtacatctggccacactttggcaccagacctctgtctggacaatgggtaggcccaggaataagtggtgacacatcat

SEQ ID NO: 20102 - DNA, 581 bp, Zea Mays
tcattggcatagtggttaagccccggttttatccgcaggcggaaggagacgcgagtgagatccagatccaaccggcaacgattcattgggcgggggagtgcgtacctggacaaagagctcgatctcgctgccaatgcggacgagatccaggttggcgtcgaagcggaagacgtggatgcggctgccggagctaccgacgtcgaagatgacggcgtacctgtctgccccggccggcccggacctccggtcatgacaagaggaatgttacttgacaacattagactaatctcaaacaacttacccatccaatctctcatctcatcttgtattttaaacttcactctacaaatgcagtcttacgccctcgcttccagtttccaaacagagcagatgaactggttgcatctgcaatgcccagtcttgctgcctgccaatgccaatcaacgtcagtaacccgacgattgttctaaccatcaccagctatgagaaaggaaccgttgacgtggttggcaggcacgagactgccagagctagggctctacatggagtagacagtactgcacagaggaagtgccgacagt

SEQ ID NO: 20103 - DNA, 914 bp, Zea Mays
ctcgtcgtgagccttggatgatgtgaaagtaaactggtaaagtgaaaatgagaaccgtgttctttattcaaacaggtctagaagagatgtggtatgatttcctcgtatcaggtgcaacagagatatggtatgatacgcagttggacgaagttgaataagatcagcagcgtgtacaacggcatgaccctaacagaatgtaggtaaattgtattcatgaagtaaaggtcttgcgataagtttgatccttttaataagagattcagctaaaccattttgagtatgtacataaggcacagaatgttcaatgtgtattccttgggccatacaataatcattgaatgctctagaagagaatccagccgcattatctaggcggattttctggatttgatgttaaggataatgtgctttcaatcgaatgacttgtgtcatgattttagcaaaagcatggttacgtgtagacagaaggcacacgtgtgaccatcgtgtagatgcgtcaattaataccatgaagtatctgaacggtccagataatggttgtatgggtccacaaatgtcaccttgaattcgttcaaggaacttgagtggttcatcatgaatcttagaggagatggtcttaagattagctttcccgttgcacatgatgtacataaaaaacatatggtttagggaatttagcagactttaaatcatgaccgatgcaattacctgtgattttctgcatcatccctattccagggtgaccaagacgtgcatgccaggtcttgaatgaatcaacattctgaaaaatcactttgtacgtaacatgaggtactcgttttatgtatgtgtggtacaatccggatggaagtgaaggtattctttccagaatgctagcgccatattcagaaggtttggaaatgaggagaaattcc

SEQ ID NO: 20104 - DNA, 374 bp, Zea Mays
aaagaaaagagaaaaagaaatttaacttcttttcagaaaattggggtatcaaactctacccaccttaaaaagaattcgtcctcgaattcgaccacttccaagcaaagcatccaaggtaccccatatagcaccaccattcaaaacatgggtccattattggtcttaattaacactagaacctctgcctcggactaattgtctaaggaaactacacaacctgatatcaagcatgaaacaacatgcagtgaagctcaaagcaagtcatagatgcaatcaacactacgatttcacaccatcgaatttggatgcagctatacatcaacatcaatgtcttaaaacaacactcttttatgaaggggtaatatgcactaagc

SEQ ID NO: 20105 - DNA, 557 bp, Zea Mays
ccccagccattaagtgaaccggtatgcgatgaggtccataggatccacgttgaacgtacaagattttaacaaagccgattgactctcacacgttaaatttaaatcgagcggctcacaacgtttcatcgaaacggtacgttaaattggattccagtcgtaagatcaccgatccatggtcgaaagccccttacccttccttctaatcttacccgtacacggcctgatcaatggcccaacgcactcgagatccgtttcgtccaccgaccgcccaattatgatcctgcgtcttggaagtcgtcttctatccccagctacaggggcacagtggcattccccactacggcggcataatcgtcggtgaacctaaatctcgcccctggcgatctatcaaggtattgaacgagcaagaggaggtgacggcaaacgccagaaggtgtcttaccgaaagtttgaagcggcgatgagagctgaccacgacgcatggtgatcccgctgccgaggacgaacaacgacgagattctagcggcacaacacgaaatccacccaggcaaggctac

SEQ ID NO: 20106 - DNA, 486 bp, Zea Mays
ctcccactctctttcgctgataggtctgccccaattagggatttcctgttcctcccgccacaccgcatagcagcgtcgccttgtcgcgcctccatatgcttgcttgcttacttgcccgcccactagctcgaattcactttgcagtggagcactactgccgccacggttgttacctccaccaagtgtcgatgtcgttttctctgccccacaggacataaatccggtgagctattctcactccctagcgtcgcctctgctccccctctcggcctatataagcgcctcacgccagagcaatctcctgcatgcctttattccccctatcaagctcccatgcgccctatccacgcatgtcgagcatcgccgccgccatctgccatgaacagagcaactctgggcaccccactactgtcaagctcctccatgagctcgtcatcgtccccaccagcaatcccccacctacctacatcgatctcatgccgccgc

SEQ ID NO: 20107 - DNA, 344 bp, Zea Mays
ctggtatcggacatgccagggttcaacgaagacgacaatgtggcatgtgctgcccaagcaccgtcgttggagtcaatcgccacgattctcgctgaagtacaacgccaacttgggggcttcactgagtatatgatgtccatcttttcccatgtcgccgcggtgaagaacgcacaatgaacctctaccgccacaactcctcctggatttccgtatgacatgccaggttatggtggccttcccccgagcactagagggaccgacggaccgtagcctctttcaactgccaccgactgaatcaccgcatccgcggatgcagccaccgcacataccctccggtccaagca

SEQ ID NO: 20108 - DNA, 602 bp, Zea Mays
acagagctcgtgacgtgcgcgcgagggtgccgtcaccttttaactgaccggtgggccccggtcaccagcgtcccagccgcgtccaggcaccagaccagaaccactgccatgtgggacccaggagtcagattcgtccctatcctctaacggtttccgcgcggagctaccgctccgtgacctgcgctggtgggagttgttgtggatcctcgtgattcttgagctcagactcgccccgcttctatataacctggccgctccagctcccttatccatctcgtcgagtacccagtcaccaattgaatcgtaggcggaggggagagaaaagggactaccgccgtgggctgatttcccatccacgctagcgccagggcttcaattgtggtcgggtagcctcgctagagcgcatggaagacacgacgaccatcaattcgagaaatacggtgtcaatgctggggcgattcctcgtcagacttgaaaatccaccgcctggccgcttccctccgacgactgcgtaccctggcacgccaaacctaggtaagaagcatactattgtgcccgccttcgtcttccccgcgcgtagctcaacaagaagcatagttggc

SEQ ID NO: 20109 - DNA, 555 bp, Zea Mays
cccgaaccagctccacgatctctatgttctgccagctagaggtgtcatggatggagataaatgcggaggtccgagcacgcacagatgagggagatggcatcagcgtgattcaatctgtgaagaggagggataataacgaggtggagctccgacaaggtgtagattgccgatgcccactccgacgaggtggagattgtcgacgcccacgccatcgaggtggagctgcgccgcgacacctatgccgatgagaatgtcgatgtcggcgataacgagggtgggattgcttcggaacgccgaccacctctcctatcctgctcctctcatctcccctcatcctctaccttgatggatatggtacatctcgaaggtaagctgtactactctcctatcctactactgtactctgaattttaattataactctatggcacgtatcgacttggatatcagcattatgtccccatccgtacgcatatctccctaacaaatgtcaaaaaattcaaaaaacagtttccatgacctacaacagcaataagagaatctaaaatagtcgtg

SEQ ID NO: 20110 - DNA, 856 bp, Zea Mays
attggtacgaggcaagctagggagagggaaacgggcgggaatctcagccaccgcgtaggggagaagaagaggatgatggccgacaggtaggagaggagggtgagaagaggacgactggctgccgcacggggaggagaacgggtacgactcgttagggtttaacacatactatgttgtatattgttacagaagtggggccatgcggtggaggaacgggagacggtggatgagcggacaaagaagaggtggagaatcgcaagctcaccctggtgaagtgaaggggcgaggggaggagcagtcggcggcagaagaggcgacgcagcagctcctcgcgttggtggcggtgactcaagaggagcatggagtgggcatcgatggttgacagacgaggatatctaatttcagtgggacagggacacaaatcacgggccgggggcacgacgcacccaggtggacgcccacactctactcttatagagtagtagagattttggggctcagacaaactgtaggttgaacgctggtgtggtcgttgccctaaggcgggcgtggcatcctcactagccgagtcggaggcagaagaggaagtcgtgtccgtggatcacgggatggacggtcgggatataacctgggtaccagttcgttagggtcgagggaaaccatagatcgtagatcgtggggctgtgtgagattcgcgcttcattaaatccggttcatcgaatctgatccaatggttgaaatctagggataccccttcgttgtgcacactttctaaaagagaccctaaaattttagattaccaacccacacacccgagcctttataaaataattgcacctgggcccagaatcttgca

SEQ ID NO: 20111 - DNA, 309 bp, Zea Mays
tcgtgctcgtctttgccaaacctctccaacagtaactgacaaaaccccaaccacgatgaagctggatactgctcaccaaaagatgatagccaacgagcagcggctcccacaaaatgcatggtagccacacgaagccagactgcaggctccaccgagtacatatcaaaataatcctggctacgccgaatccatagcttggggtgtgaaccatcaaaggtagggaaattgagcttaggtaatcggcctctaactgcacctccccacccattcccctggtcgtcctcagcacgtgacaacggcaacaccagt

SEQ ID NO: 20112 - DNA, 692 bp, Zea Mays
cgcacgtggcttcactggggtagaacgctaggttttaccatcgcccgatgactcctttatgaggaagccaccactggtcgccccctccttggcctacaaaaagaggaggtcggtccccatatgaaagtgatgcgaagacggatacccaagcgcaaagacgatggaccgacaggaggaaggaggacgcaccgatgatgacagagaggccagagccccaccgccaagccaagacttagttagaactccagtatgtagtgcttagctccacctcctccacaacaagatacttggtagaatctccattgtctcccgtccgcttgtaacccctactaagagcattaatcatcataggtgttggtagtgcattccaccgaagactggatgtagggacgttctgcccgaactagtataaatcttgcgcccactgtgtacaccgtccattgcccagaacacacacacaaagttacttgtcgaagctaggttcgaaacaccgacacttcggcattattttcagctttataacatcatcgtatcttcatcatagcctttgaaagatatcataaaaaatagagaagctactgagtaaattagataatgggccactgaactcaatgaatttgtcattgatttcgtccatagatcatctatccaatctcaagtattagcagatttcattgttgactggactcctg

SEQ ID NO: 20113 - DNA, 573 bp, Zea Mays
aaattataggaactgaaatgggctaaaaatgagttaaaataaatgttatatgaattttacaagttctggaattgttttcatattaaaaattcatttcttaaattaattttcctgatttattctctgtttggactgcacgcacaagaacagataaatgtaggggtctctgtgcaagaattactagactcagcgcacagtcactgtgaaccgcgggttggttagctaatttatcaggggctcttatgctattctgtcatggcgaaagggtatcgtgatctcagggtcgtccgatcaacaatgaagggtagtgattagatccatctacgcatccaacatgtacgcaactagggccattagattcgggtctacgattcacatcgttccacaccgaatcactataccagattcaatcaccgccgcccgaaacctatccaacggatgatacccatcgacacccaaccccagacagccgacggcggcacggacagggccacggtggcgccacaccggcgaagcacccccaacgaggcccccatgccctatgttggggtgaaggcgaagacgccacccttc

SEQ ID NO: 20114 - DNA, 297 bp, Zea Mays
tcctttttcgattttgtgtccaatcctcctgctggtgatagtggtttgggtcttagagtgcgaccctctctcgaagaagttgaggttctggttgcttcacttagtgatcttcccaacgatgacaagcaagttcactttgagatgcctatgagtccaggtgatgtagagataagtgctatgctggacatgttggctgaggattcatctgactcggtccctgttgaaacaatggctgttgcgactatcccagagcctgaaaaaactgtgaacactaaaaagcttgatggtactcgcccg

SEQ ID NO: 20115 - DNA, 1171 bp, Zea Mays
gtgtagtagtcagacccgtcaaaggtcagcagacactcgtttcatcatggaatgcggggcccctactctcctgttcgccatccttctgggggttagaccctttttcggacgatgcctctttgcttaagaacttcctaagaaaacgacaatccttgtaggcatgtcgaactaggtaccaatatttcgggtatggggcttcgagtagatctttgaaatgattgatggtctcctcaataggatgcttacttcccttctggcccattatggctactagtaattcgtcgtgcccccacatgtccttctttctcttatcaggctattcgtcgaagcccccgttggactctttgtcgagtttggccttctgcttatgatggtcaaagatcgccccaccacatcttccctggacgcgtggctagttgctatgtcgaagagctccttcgtagttcgcatactcatttgccccaacttatgcactagagtatctgttatggtccctgagatgaaagcgctcataacgtcgacgtcgatgaggttagtaaactcgttgcattgccatgagaaactaaaccataaaccctaaaaccctaaaccctaaacttgtttctaccagcagttcttgttgtcccacgggttgctcaggattacgtatgtgccctagaaatttccgacgaagatttccttgaggtcgatccaatttcggatacacccgtgcctagtccaccaagtacaggaggatgttccgaattatgaaattgttgtggtctacccctcctcctcttggcatgccagccggtagtctcctagctagatgtttgggttcgattctcccgagtagttcacttggtgggtgccctgtaatgctgtggcaacaatgcctagaggatgtggaggataaaggctcaaggctctggctatggggggctcaaacttcagtcctcatcggggttaaagtggtctccatggcactggttgtatcgatggccattgcctgatctttcccatccttcctcgccatgccccaggccgggtactcttcacgtgctcctgcccgaccttaggcactcgtgcggtggggcccatgttgtgccttccttgagttcggacgattgtcccaatgaggtgttgtttcccattggcgcagacgtggtacactcattagcccccggctccg

SEQ ID NO: 20116 - DNA, 791 bp, Zea Mays
atgaaatgctgcgctctggtatggaacctgatgatttcacgtacggcagtgttcttaaggcttgtgcaggtctacaatctttggaatatgggttggtggttcatggcaaagctatcaagtctggacttggtttagatgcttttgtttcaagcactgttgttgacatgtactgcaaatgcggcgcgataacagaggctcagaaactccatgatagaattggggggcaagaacttgtttcgtggaactccatcatatcaggtttttcactcaccaaacagagtgaagaggcacagagattcttctcagagatgctagacatgggtgtaaaacctgaccattttacttacgccaccgttcttgacacttgtgctaatctggctaccattgagttggggaaacagatccatggtcagattatcaaacaggaaatgcttggagacgaatatatctccagcactcttgtagacatgtatgccaagtgtgggaacatgccagactcgctgctaatgttcgagaaggcgcggaaactggatttcgtatcatggaacgccatgatatgtggctacgcgctccacggccagggacttgaagccctggagatgtttgagaggatgcagagagcaaatgtggtgccgaaccacgcgactttcgtcgcagttctgcgggcatgcagccatgtcggcctgctggacgatggatgccagtatttccatctgatgacaagccgctacaaactggttcctcaactggaacactttgcttgcatggtggatatactgggacgctcaaag

SEQ ID NO: 20117 - DNA, 324 bp, Zea Mays
cgcggaaggaaaacagaatacctcgacattcccctcaaggatagcattaaagggtggcgccttgagtggtttattgtggaaaaccacgacaagtcactcccccctcggtcggggagacagccagatgtgcgcactccgagttgggttgagtctcctactgccttggaggtaacagaagctagggttctgcttactgaaatctgtctgctgaaggagagaggtttaaccgccgaagctgtggttgctgactttgtttttaagaatatccagcccttgaaggacagagcatacccaacttatttgtacagtggtgttactgactcg

SEQ ID NO: 20118 - DNA, 471 bp, Zea Mays
cggcaaaacccttcagtgttggcactcttcccttggcttcggagagcccatatgtacacactaagtctaactatggtattgggggtgagttgatgaaggtaaatctcaaacttcttcaaaacctcaccaatcatcacgtatagggggaaccgaagtcctgctctgaagaaacttttaaagactacgacttcgtcatcttttggttctggaatcacctcttccctagcaaaccgaactagttcgtcatcattctctccaaaatatcctagttttttcattaaaaccagatcttctgctttaactgtggatttcccgaactcaatatggctgggtttgctcggacctaaaatgctatcatcatcttagttttcactatcagcttcggcggtggttggttcagcttctacatcaacaacatcttctgttggaactggttctttttcttcttgtacaatcaacccagaacgcttc

SEQ ID NO: 20119 - DNA, 780 bp, Zea Mays
atccgcctgggatataaaccaagaacccgctggccgcctcatactcatcaattggagagagcaccgtgagcgccataccggatccgatccctgtgaagagacagaaggacggcggactcgtgcgggcggtcggagtacttcaaccgggaagcagcggaccccagggagcgtgcgcgagcttgcaatcgggcgtgggcgtcgccgtagtcccacaaattcctcgccgtcgctcctacgccgccgcgggtccgctcctcgtcgtgggcagacctggcgacggccggaatcacggtaaaagcacatctcccatgtttgttaccttctcaatttcattttgcactcgagatgcggggcgattgtgtaccatggagcgctgtgggcactccggccatggtggcccgccgcggcactctgtgtcgtcaccagagctcagtcggaggtaggggataggctctgcgccattgatctccatagtgacggcccggattagattggagatatctcttcacgtgtgtgatcctagccgtagatataggatcggtcggatcaaaacgaatcaggcttcattaaatctccaccgtagataggaaatcggatggctcctggcgctttccggttcggcgcggcactgatttaatctgtagcatccattgacgatcgtgcggtcgatatggcttcatacctcttcggcttgtagttttgtataagagaccttatgaaattagaaaatgaacccgccatccaccgcggggtaagtctgtgtcatgggtttctttcgcg

SEQ ID NO: 20120 - DNA, 673 bp, Zea Mays
gttttgatttatttcaaacatatttgtaactatgatcaatactataagatcaatggcaccatctacacttaaccaaacataggtcggttgcagccctacatcacgtccctacagagtttccgtaagtacacatttcacttgtcgcatatgtatatgcgtggacaaaaagaatctaaactcacttttaatgtagtttcgtgttatttgatgacgttgagagcgatgacttaccaaaatttaagagtatcatagccagaatcgttgttaagttccctagacgtcatgacagccaacattttattctacaagacatcactgtaagtcactgggtcaaacattcaaacaaaaataagtgacgtcaacgtatttctcttactcatacgacgtgcattctgaaatgactaggggtcaaaaattgaagcaatttcataacgcgataatgtccaaagatttgacaccttactccaacaaggatctacatatacattatatggagtggcgttctgtgtaagctggggggcgtatctatttccgaattttggacataggctagaattgaccttggcaactcggactattgtggacccattccacttgccaattcagtccccgccgtatccaaaacatcttatgccatttcatgaggtcctccaacaacctcataagaggttta

SEQ ID NO: 20121 - DNA, 477 bp, Zea Mays
gaaatatcttctatgtgaccaagaggctgaaactatggaccacctctttgtgacatgtgtctttgcaaaagaattctagtatcttttgctaagacagtttgggttgcactctctcgcaccacagatagctgcttctagctgcttccaccttcctaggctggtcggaaaaggcagtagaagcagtaagcggtcttatcaaaaagggtcttaactcccttatcattttgggtgcttgggcgatttagaatcaccggaatagatgtgtttttgatggttggaattcaaatataactctaatccttagctgggcaaaagaggagatgcatcagtaggaaatagcggggcaaaaggcatttctgacaaggcagcccccttagctgagtcctagggacttccctagcagtgtgtggttttttttgtttttctagatggattccttcctgtatgcatgtttctggcccccgtaaggggtctttt

SEQ ID NO: 20122 - DNA, 411 bp, Zea Mays
acttgtgtgagctaaagtgtggagttgtgttgtgaattgtgatcctaagctttggagctagattcccattgagattgtgtaaagtgactaagagccttcaagtgcgtggagagccttgaactcaataagaaaagagaaatagaactcaggtttgatctctgcgatcacttgagtgtggaaagggttgagagagacttggtcgttagtggactcctcaacagaggcataggttctttctaaaactgaactctggtaacaaatcatcgtgtgtttattgatttgtgtttgtcatttcacttccccactcctctctgagctcttattgttttcatattatttctaagtctaaattatgcaatcttctttgcaacgatagcaagtattgaactcactaattcccagtctaaccat

SEQ ID NO: 20123 - DNA, 345 bp, Zea Mays
gcagaattcgaaatagccttccgtgagcaccatgtaccccaggggatagttcaactcaaggaggatgaattccgggagctaactcaaggcgggagaacagtcagtgagtatgtgcacaagttcacagagtttgcccgttacgcgcctgacgatgtcagcaccgagtctaggaagatggcccattttctgaaaggactaagacccaagcttaagaccatccttgccagccaagacttcctcaacttctctcacctctccaacaaagccatccaagtggaaagggcaaaagaggaagaaaaagggcacctcaagaggaaattccaagttctccgagctcaacagcaa

SEQ ID NO: 20124 - DNA, 509 bp, Zea Mays
ccagcacctgggcccaaaaacaccctggtcggcccatttatcctttctccgcgctagcccactccaacccttcagccactcgtcccacgacgcgcttgagttctctggccaacgcgcgggtcctaccgtctggtctacttacgcgcttgtcgttggcttgatctagacactgccatgtgggccctctctgtcggatctatcctcttccctctccgtctcctttcaacagaatgcgaagtcgcgtaggtatatcggagtcacaccgtgatcttcggggaatcgttgggattcttggccataggggcataaatagcagcgttgcatacccttctcggcctccaagccaatacgcgggcctcatggcggatcgagggatcatggggaagaaacctggcgcagtgaagaatggcgggctggcacggtcggtccctgtcctggctactggtttgccaccgaggcctccaaacttcctagggatgttcgtcggtgccctatgaagctttgcgtgg

SEQ ID NO: 20125 - DNA, 339 bp, Zea Mays
aacgcgcggataacgactcttggtgaaaagatctcgtcgtggatgaagtcagagcattgtggccgctctgtcgcctcatccacttgcgcgcgcgacgtggccgcgcgaccgtcgcggtgatgatcgccgttaactcgagtttgccacgctattgccttgttaccacgtcgccgttgatcgcaataggtagcctacctgtcctctgagtcgacacgccaatgaatgccacggtaactcgcgtcagtgaacttcccctctctccggccgccagcgcatcttctcaaaattgggcgccaccgctgatggactctataaattgatgccttagtgagctctgct

SEQ ID NO: 20126 - DNA, 587 bp, Zea Mays
tttacagagtttcacttctgaggtgcgggtcttccggactgctgaatcaaggatctttactggcttctcacggtactgaagatctttctgaatctgtattgcctattcttcgacgtgactttctggtgcttgcaggcatttgcagagctgggacacgtgaaacccattgtggatgtcggacatggattctggtaattcaagacggtatgctgtgggtcccactctgccaatgatgggataggggccgacgaatcgcggtgctagctttcctttcacttggaaccttctgacaccacgcatagaggagaccttgaggtagacgaagtctccttcctcaaatctgagttctctctgtctgttgtccgcataactcttttgccgactctgagcttcaagtaatcttctgcggatcagggcaactttctcctcagtctatttgacaaaggcaggtccttccagcgccttttcccctacgttggaccacatgagaggggtctggcattttcgtccatacaatgcttcgaacggtgacatcttgatgttggcctgatggctgttgttatacgagaactctgcgtaaggcaaac

SEQ ID NO: 20127 - DNA, 525 bp, Zea Mays
tgatcgtggagaggtggtgaagttcatgagctaacttaattgaaccttaggctactagagaggggagagggaactcaccggagtggagggagaacgcggcggcgctggctcgattgagctcgggggaggggtgagggatggccgaggctggtgtgaggagctgaggggctcggggcggtccttttataggcgaccgaggagggggaggaggaggtggcatgcaccggcgaggcgcgcttgcgatggcgatgatggcgcaaagtggtggcgacgggatggctcggtcacagggcccggggacgcaaggcgccaattcggctggtgggcgagtaatggcgaggagatgtggcggaaggtggtcggcggcgatcgtgtcgatggccgatcacgggcgagagagaaggggctggcaagcggggccgggttatcagcggaagagcgggtgcgagggagaaagagagggtgtggcaggcgggtgggaccgggcggtcagcgggggagggaagagagcggcgcgcgggcggg

SEQ ID NO: 20128 - DNA, 699 bp, Zea Mays
gtcgttagtctcccgctgacgccttgccagttcatgtacatcagcagaaatgttccagcacatagagaaaaatgccgcaatcccatggaccaagcgggcacccatccctcggccacgacctcgaccacgaccacgaccacgtggcatgggagatccgcagccaggagagggacgtgaggcggcggcagcatgagaggaggatgggtattgaggaggctggggaggtggctcattagaggaggcagggcctccagaccctgagggagcccgcttcgtacgagcagctgggttggaggaatcaacctagtagggtacgtagcgggagtgtttgacaggtttttcgaagtgagtctgggtgaccacttcgatcatcttcatgataaagggtgcatgaagacaccctttgagaggagaccagaaagcacggatgatctcttcccagatcatgtcaaacacattaatgcgggcgagactgttgggagcaaggaggaggaggaagacccaactctccccaaggacgttcatttgattcccgcccttcgggagaacggtcatcctggacaaagagttaaggtacctgtagtacctatgcatgttagcggtcgttcagaactcccgatcattagagacatgaataaattcagtctcttcccgcatgggcagcctaatgttatgcactcgcatgttgctgccctgaat

SEQ ID NO: 20129 - DNA, 789 bp, Zea Mays
gcaggtcaaaggttgtcgaaggaggttgtgaacgtggccaagaccaaacgccgatgcagaagccacgtcgggaataaaaataaagcaacagactaccgctgctctgcgggagagacgtcgacgttgtaggggtttctgaaacttgaaagcaaagggagatcgtggaggaggaaaagcggcacggagacggagaacgggtctcaacgttcttgggccagtaaggacacagcagtcagattaaagctttttttagtaaggcaatcattaggaggtctgatgcttgacaatggtggagctgcggtgcatgtcttgtcggcccgtgcgagagagaaaactgaaggcgtcttctttcatgtcgctggaggttctgaatgatggatggatggatacctctgcaatagaagagatttagcacaaattacgaaacaaatatgagacggagcaaacgtggacagaaaacgaaaaaaaaaggagagagatggattgatgtcggagatggtgtgtctttgtaccaaagtgccttcattttatatacatggcgaagatatgtctacgtatgacaacttcatccattgtccatcagatgactacactcctgctgaatggacaaccagcgcacaagatcaaagcattgtcgcgaaccgcaacagggaggccttccactctctcgtctcgtatataacattgggcattaccaaggcgaatagcgggagcctgctgctgccgctcgccgcgcgcccagaaccaagtgtcgatgttgtcctctgcatccggctgggctgaccccag

SEQ ID NO: 20130 - DNA, 559 bp, Zea Mays
aaaatttaaaactttcggaacaaagtctaccacatgtcgagtttgcatacaacagagctgtacactcgactacaaaattttgtccatttgaaattgtataaggcttcaaacccactgctcccatagatcttttgtcattgcctgtgcaggaacgggtcaactttgacgctagcaagtgagccgagttaatcaagaaccttcatgaaaaagctcgagcaaatattgagaaaatgaccaagaaatatgaaaagtgtgccaacaagggtcgaagaaagatgttgttcgaaccaggagacatggtttgggtacatctacgcaaagaaagatttcctgaataacgtaaaagcaaattacaaccatgagctgatggtccattcaaagtgcttcgcaagatcaacgacaatgcttatgaaattgatctgccagacacttatggtgtgagttccagttttaatgtggctgacctctctcatttctttggattggaagagttgaggacgactctttttcaaggggggaggatgatgtgaccataccagcatcgtcaactttgccgaac

SEQ ID NO: 20131 - DNA, 644 bp, Zea Mays
ccttcctaccagtttcacttagggctatgtcatggcgtgtggggagcactagggccatagatccatagttggccgacgagggcgccgccgtgagactcgctgccatcaatcggtgttgactgggggggatgacgcactgtgaccgtcgaatgtaattggtgcggtcgggattagatgttgaaaccccttgctgttggacgttgtgccaccgcccgatctccatcgagcggcttagatttgatgtggcggcaacgattagatcaggtgaataccagccgtcgatccatgatccaaaggactttatcgcgtatcgcttcgccactatgggcgatttaatctgggcgcctcgtttcagatccaacggccagaatacccccgtacccctttggctagcgcaatttgcaaaagagaccccacagttttaggaaaccaacccgcagtccatgtagcagtaatctgtgtcttggggaaaactctggtttagcccctgatctttctgaaaatagacgcccagtccagaacttatttaaaataaatacatgaattagtaaatgcattttaatacaaaaacaattgctagaacttgcaaaattcatagaaaattcatttttagtccaaattgatccattccaatttctataatt

SEQ ID NO: 20132 - DNA, 453 bp, Zea Mays
ccgatctatagtttcaaaaaaaaagcactgatctatgagattttgtttctccaggaacgcaatgttcggccacggatattgatggaacagagtgtctcacctgcggcacaagaggaggttcactagagagctaggtcaggctttaacaacggctggtagtggaacctagatgatatcgctcgtagtaactccagacgctgccatggaaaactcgcaagtcatccggcatgatcctgtagctgtaacctcaaatggcctgtggtctgtggaagtgtggagtggcaccttcagatgcagcctgtagtttagggatgaaaaaggcggatgcagtatggccaggatcaactgctaagcgaaaagattatatccagccgtagccttatcatagggaagataaactgcttaagctcggctgtaactggagcaggttaatcatggttgacggtacggtgg

SEQ ID NO: 20133 - DNA, 334 bp, Zea Mays
gcggagatgaggaggcgcgctattgcatgtggcggttcgctctacaggcacgcgcggtggaccggtggttcacttttttcgcacctaaagttcagcgcacaatccgtatgacttgtggacccgggcccccgtgtcatagactgggttaccttggtgcgcgtcgggtgagattttctgcggcgattgaggggcgcgcggaagggtttccttgaaaaagggttcacctcagcgtgcaacagttacccttttgcattctcttccaatcgactgcgcccttttgccttcgagctctctgcgcccctttgcattcgcgctctcctgctctacacccgcg

SEQ ID NO: 20134 - DNA, 463 bp, Zea Mays
tctcaatcatttctagccactcttggcagggctccttgaactgcttctcaaacttaaagcgataaggcaatcgcacaagctcaagtgtcttcttcgttccctttagcttcggcatgctaaattcacttaacattggagacgtcctgttagccaagtattcttgaactagatctctagtactaatttgttcagccaccaccctgaattctaatacagacagttggcatgctgaccctggcttcatgttgcacaaaggcatggtcattccgaagcttaaggacagcgggctcatcaccatcgtcatcagtttccctcttttcttctcatcggccttaatataaaaccactcactcttctagccggttggccacttggtgcaatagctgaggaccggagccttcgtatccttgcgatacacgaagttataacaaccaaaattttcatgtagcccgtcttctctggc

SEQ ID NO: 20135 - DNA, 720 bp, Zea Mays
ctattccatttctttctccatttgacttgaaatttttggaggactttcctatgacttagacacatataattagagtataactcaattgactatgtcatagaatcttacctctttctcatcatctcctcaacttctctgtttgttctcaaacagtgccccgaatggcactttctctacaaaccaagttagagagcaaaccaaagtgccaaatgcatagtaaaaggtgtatgcaatatattcaaatactcaaaccttgcatacttaaccttttttcactatttttccctttttggcctgtttgagctcggggttggactccaaatcctcaagtcgacataacttggtaatatttgccatctttgagcttcaacaccctgcaatggttacaaagaacttttccaaacataagaatgactcaaactataagtcaaagtgtgcttagctcttttgggctcttctaggttctgactttgatacttctccaccttattgtgaccatgttctactgtttgagctaggatcttgagccctatgacatgaaccataaaccataggatatacctcaatggttccaagtcacgttcttatattgtggtcttcaatgcaccatgcttcttgacaacttcaccaaccttgacctcttggaagagcctcttcttctctatggctttaggttcctcggccttcttaaccttctcccttactcttggtacctcaaag

SEQ ID NO: 20136 - DNA, 323 bp, Zea Mays
catcgccgtcacgatcgtcgtcgtggccgtccccgagggcctgccactggccgtgacgctcagcctggcgttcgcaatgaagaagatgatgaacgacaaggcgctcgtgcggcacctcgcggcctgcgagaccatgggctccgccaccaccatctgcagcgacaagaccggcacgctgaccaccaaccacatgaccgtcgtgaaggcctgcatctgcggcaaggtgaaggacgtgaacagctccgcggagaccaagacgctgccctccgacctgccggcgtccgtcgtggcgatgctcctgcagtccatcttcaacaacaccg

SEQ ID NO: 20137 - DNA, 624 bp, Zea Mays
ggggtacggctctcgggaaatcgctgggttgcgtgccggagccgctcctcctccgccgtggccgccattgccaaggactcccgctctggcctcgcctattacgggtgagtagctacccatacagttcgcgatgtcattaccttcgtgtagctctactcggggtaggggatgggtcgtcgtggcaccgaatagctgagctccggcggtctcgccgccgttagagcgggcgccgccgcccaagtccggcggtcgggggcgcggataacagcggggacacaggggccgtggatccgcttgtgaacggctcggattagatcatgccataccgtttcgccatgattcgttcgggtccgttgatctggttcgggcggtagatcgacgaccgacgatgtatctggatctcatagaaacctagccgtcgatctcagatcctgcgatcctggttgtgtaccgatttacagcagcgctgggttaatctggttcgcccgcgtctaatccaacgacccgcagtgcacggtaccccttcaccgagccattcttgcataagaggccctgtagaatcaagaaaccaacccgccgtccatgcggctgtagctctgagtctaggaaatttttatatcccag

SEQ ID NO: 20138 - DNA, 1342 bp, Zea Mays
tgaagatagtgagtaccctaaccatgtgtataaactctcactacaacacatatagccttctatgacgaataccttgtgacaatagatcaaaatgtcataagcctctcctacttatgacgtttcgtaggggatgattgactttagtgatgaaaagtaaaaatttgtcattaagaccaatgcaaaatcgtcataaatatgaaaggtgtcacatttgtgacgaacactctttcaatcttatgacaattaggtagtgtcactatttcatgacaatgttggtcgtcataattctcatgtgaatttcctaaaaaagcaaaaatatagacgccactacaaataatgaaataaatcaaaatgattatgaaataagtttgaatatgaaatcatgtttaaataaaaattgattaagcttgaatttcccacatgtattgttctataaatatattactacagacttagatctaatatattcatgagtaatttgttatataaaaatagctaaaatgataatcaaactataaaataggaacaatttaaaattaaaaatttggagaaaacaccaagcaaacaatgcaaaaatgacaaaaacaattttgaaaataaattttttgcagaaaacatgaacccacatagaaaatagaaacaactttaaaataaaaaatttagagaaaacaccaacccacataaactaaaaacataaacattttttagaataaaacctttggagaaaaccctggacgtagactaaaaaatagagagttaaaactaaaaaagtaactattaaaaagaaatgaagaattgaacctaggacctgctacttattaaatcacatggctaccagtgcgccacaaacaagagtgtgattaatactttgatacagtacatattattacgtattattgacttttgtgtggtctcagctccacgtatccatccagcgccctgtacctcaacaacaaattctttcacgccgccgcaattgaatcaagaggcagcagcctccctctctcgtgacatcgccggtggtaccaatttgggcgccattgagggtgactacgccacctcgcctgtgccctcgcactcgcaggtaattgcggtggtgccaatttgggcggcagtgcagctggtgacgcctccctcgtagctccacccacaggttactgtcttgctcagatctgccctcattatagaagcaacatcgacttgcgtgcccacgacacaagctcgtgtcagtgctactgccaccatccctccacagcacagccacgctgcctgcctcatgtgtcactactgcgtcctatcctgccacaccggatagaacttctacaaggtaccacattattga

SEQ ID NO: 20139 - DNA, 640 bp, Zea Mays
ctgatgcaactttattaatcagagctgatgacctttagccaatgttcttgttgttctgatgcatctttactaatctgagctgtacacaatctgagcttatgtccattgccaatgatgtactagtttttttacttttgattgtattcttgacattgggatagtagtggtgagctcaccactgctgtgcaggggtgcccacaccagaatatatgcaggcgtccaaacaaacccattgatgcatctgttttgaatttacatatacaaactagcaaccaatcaccatctccatttggccagattccctggaaacaacaaccaaacaagtccctcttgcatgcttggatcctgactccagccagcctggttgcctaatgcgagccaggttggttggagaaggaaaccaatcaggcccctaacgactcagcaagagctctcaccactgaccaagtgaccattcctacccttcttttttataagatattacgatctaaagtatatcattcattgtggctattgcactaattggttaagaaaaactacatttcaaacaacagataatgagaactttgggtatcacaaattcacgtttcagatcaaggggacatccacagatgacggatggaagaacaacgattctgat

SEQ ID NO: 20140 - DNA, 831 bp, Zea Mays
tttggatctgaacaggtcaagctgagcagccagagggagataggtaggcagacatcacgcctgaggatagagagcgtcgtcgcatggcttaacaacagtcgatgaggggcaagaagccaagaactagctaacaggctcaagagggagatagataggcagacatacatcaacgctttagattgtgctgacgaggatagagatttagaggatttaattgccgatcgggcactcgatctctactgtaactgtagtaatataatatagtattaattatgtagctccgtgtagagatattgctctcccaaataccattagtccattattctggctactcgtccgatgatcctgagacgcacacctggactccaagtcagtctccgcacccccatcgaagcgagtcaaaaaggcaccatgctttcggttcatgcgaaggcactgcacgcacgcagtggatcggatccacggcatgccctggttagttaatcctctgttctaatcacgcttactgggagcacacgtgtccacggacacaggggtacggagacggagagacggagggtagtgagtggcagcagggagttggcatttgctccggatcagccacttgttaggtagccggccgtctcctgtggccgaccacgcctttcgcgctgcctagtgcctgctatcaaaacccaatcatatcagacaggggtggaacgactgaatattcctatttaaccttgtctagtgcactgctgccccccattttcatcgcccgctagcgtgttgctgttgcccgtgtcggttatgtgcggagtccgctatatgtgcgtgagaatagtaaatttt

SEQ ID NO: 20141 - DNA, 854 bp, Zea Mays
aacagtggtgtgcgcgctccgacgagcttgcaccgtccgcaacaccaaaccattcatgccctaagtcggtctacacctaattccacccctagcgatcgtaatccatccctcaattgaactaggccagccgggagttcttctgcccacgacggcgatgagacccgagggaaacccgaggtgttcccgatgactaggcgcggtatagctttattggcggggtcaatgagcataataaacacacgagagtgccgaaacacaaaccagaagggtgagagcggacctagagatggctgaccacgacggggtgactcacggcggcacggagagtggatatgggggaaattccaaattaggacgctatggtgtacgatcggaggcgagggctggtgctctggcttcttaacaacctagcagagttaacggtgcaatcaatttatagccttcgggagcggtgcctccaaatttgaggaaggaagctggcggccgaagagagggggtgagtcaccggcgagcgctatcgtggcattcacagtgcaaggacttatggctgtcactagctatccctcaaggcttgcgatgatgtggtgaaacgaccgagagcgtggcgtaaccgagagaaacggcggcacgacaacgatggtcgcgtggccatgtcgcggcgcaagtgggtacagcgaactgagcggtaacagggtccgagctcatcccaacaccaagatcttttacctcgagtcattattcatgcatcactgggcacgaatcacagcgccagcgtggatcgcagctcgggttcaccggcggcggggttcagtgaatctgcgatcttctctaggttactgtatagtgggaatttc

SEQ ID NO: 20142 - DNA, 801 bp, Zea Mays
taagtgtgctatgatttggctaatatgttcgtgtgtgcttttcccaccttcaccagaaaacttagagaagtctggtattctagttccctgtggatatggcacggtgtcgaatcggtggctataaggcttccgatacgattgccctgtacctgacaaactaacaccgagtttgtccctgaacatcccggctacctcgtctctgatcctctccgccatatctggcgaccatccattgagtatgtgggtggaaacctcaggttgcctgacatcactctgtcgactttcctcccagggatgtttgaggtgtgcgctaggtgtcctattaatgtcaccaactcctgccctatacctctcaggctctcttgtggccgaacagtattcagccctatgtccatgaggtggtatggcatgattataatgtgttactggtggggcaccataatgttgctgcgatgaatgcggaaactgtgcgtattgcgcagctctcggctctgcgtatgcatatccggacggtccggcgtaagaggccagatggtccgcgacctggccaaatggtccgaaggtatatccggattgtccagccgtatatggtgctacatgggtagtctcgtacccagaccgtctgtcgtagagaactggacggtccgcgatcgggccgaatggtccagggctgtacccggacggatcggtcatatatggtgcgacttgagtagtctgcgcgtggactcgtgtagagtcggatggtccagcgtaatacgtcggcaggttcatgccatatccggacggtccggagtaagatgg

SEQ ID NO: 20143 - DNA, 480 bp, Zea Mays
gaacatgtgggagtcctcggatccgaaatggagggctggtgatgtcgatggtaccatgcgggtgtgggcggagatgtaggcgaagagcaggccttccgtcacccagcttggactcaggtaggagaaagaaggctagccattagatcttcaattggacgctctagataatgtttcacccggatccgtccctggtcgtctgatctggatcgggcgcttgacaatagatctaagagttttaaatctcgggtgttggtttagaatcggaggactgtctgttggataccggtttgtttttagttacgcttaaatctaggcccttggtgcgcgatccagcggccaatcttcacccgtaccccttcgttaaggacgttttacatatgagacctcggatttcgttcaaaataacccgccatccgcgcggggagaatatgagtcttgtgacatttgcaatctagcccctaggcttctgtctattccgcg

SEQ ID NO: 20144 - DNA, 271 bp, Zea Mays
gtaagttgcggcgctgtgtccaccccactgcggccggtcaaaacttttgcgtccgaactgatctctagaatctagatacggttgcaacttcatcgtccgactacggagaggcatatctagaatcggcttgtaaagtgcacgtacgaggcctgggggtggttctactcgctagaaaataataggaaccacttctagttttgtactagtagtacgtactagctagtgatgcatgttgaatctgcgtgttgcaggctgagggtgagcatccccg

SEQ ID NO: 20145 - DNA, 571 bp, Zea Mays
cggggctcggggcgacttctggggctgggctgcctcgtagccgatgccgttgtgggttccctcggtctcccattagcgcggggcccctcgtggtgggcatgtggctgttgtcttccctcctccttttactttcccttttcttttgccttttctttcgtagaaggatggagaaacaaccgttcttgggttctgcatttggtatttgggaatagcaaaatagcgcaattatttttttaaggtaaatgcaagctgcgctggtgtgctaaagtattcagttcgtgccaaaactggatgatctttggaaccagctggtaatcgttgaatgaatcgatcacccaaaccggttgcctttgttcctctgttctttagcttggtcggcagttgctccattgtttgtgtggttgccggttgcgtgctgttattgccagttttccatggaggcaatgcaggtgttaacattgcaccaacccgaacatatgtggaattatcgaccactaattcatgatcctcgctgtataaaacaagcctagactttgatgttcccttcctaaagaatgtaatcatgtccgag

SEQ ID NO: 20146 - DNA, 471 bp, Zea Mays
tgatgtgtcgtcctcctcttccccatgtaatcctgcctctacgagagcgataagctcactcaatctagatgtgtcgtcgtcctcctccatcagctccaccgtcgccatttttcctaaacatatcttgcatgtgcctcatctgccatatagtttacgccacatccaatctctgcaaatataatgagaaaaataagttagcaaagtcaggataaataaattgtactaacaaaattatagtatcatttttctcactcacttcccttgagacgatcagcaagattatccaacatctgtttctcggctctagccgcctcccattcccttgcatcctgtgctctcttctcatctgccgccttcaacctcctctgctctgcacgcttcgggctgtcaaaaaaggcagattttgcgtacctacgcatgtcgcatatgcgattgttaatgtacgaatcgacgagttgagatccacaacgc

SEQ ID NO: 20147 - DNA, 498 bp, Zea Mays
gttcaaaggtgaaactcatactcaaattcaaagtggattcaaaataattatgaataaaagaaaaaagaaaatgaaacataaaagaaaaagagaagaacttaccgggcctcagtgtttcattccggctcaccaggagatggcttcttttcgcgcgcatcgacccaaccccgcatttccaccgcgtggcccagtgtcctcgcgtgccactgacacttaccaccgggggccacaggtcagctcacctggcgcgcgtgtttcttttcggtgtgacactggcagcttggggccatcgggtcggacctcgctagctactcgcgcaacaactatggcgataattgtgggtggaacgccgcacgtcgccaggtctcaacgactcactgtgaaacctgctgggatctatcggtcgggtccttgggatatttattcaacgtggtgcccttcctggcgcaccttgaaccatcagctgctccgtcccgcttgtcgtcaccaccgacggtg

SEQ ID NO: 20148 - DNA, 1012 bp, Zea Mays
atgcgtaatcaacaactacaagaaataacatatattggtgagaccacaaactattcctgttgtaacttataggaagctacgcatccaagtcacgtgcaaacatttagtttggcagttcaatacacacgtgagaagagaaaatggcgagtttgaagccattcaatgcaataatataattgaacaaacctccggctcctatagtgtggtgaagaagattggcaacacaaccatggagagaagagatgaacctgacaaactgttttatagtggctgttttcttatttactttaggggtccaatgatacagaactaagctgagaaatattgtgcttctgttttggagagttcgtgaacagaggtcgtggactacctgagaaaatgaggacaacaaatacccaatttccataataagatttaatgtatttgacactgcatatattcgtttgagccggtattgtagatgttgaatttggcatataagacattgaagtgcaaattcacaggtggcagcttagaacagatcctggaaaattccacagtcgggcagcacgacctagggctaacctcgacgcaaacaagccattcagtcacgccgctgtcggacctcatggacagggggcgctggtggtgctttctacgccgcgctgtcgtgcaggctgccatggctatcgctggacagcggtgcagtggttaatgccaggggcaagctccggccataaccattgcaggcagctttggttgttgtcgattctcaaattgatcaacatacctttgaagcactattagattagcatatgcaacatcacatgtgattgtttttttaacaccgccaggagcaatggcatacaccacacgctcaagtacaaatgagactgcctaagaaatctcaggacaagtctaccgggcacacatgcacgcacactactcacactgtcacacacccgcatggttccctcagggggaaatccctggtgaggcacatgagttcattccagccaggaatcgaacccgg

SEQ ID NO: 20149 - DNA, 385 bp, Zea Mays
gagctaaacaggcccgtatatggcccagtgcaactgggccgacggaaccaggccaccaatatcagtaggcctccaattatgaattctccatatacacgtggtccatgtatgctggtccaggatatacttggcctccaaatttgtgcattacgattggaattctaggctttgtttcttccttccgtagttccgccaatctcgctagctgaaatgacgccgatctgggagtgcgccgccaccacaaacgctccatcgccagtcatcacgccatcgatgccgagctactatggggccgtgatctcgccgttgccgacgctttgaccgtttgccgcacctggacgttgcaaggtcgacgcaacaagccaatcgagactgcaggtatgtg

SEQ ID NO: 20150 - DNA, 305 bp, Zea Mays
ggcagccggatggcggcggcgggcgggctatggcagcgggagctaaagctgggcggcgagctgaagctggtggtcgacccacacaggggcgggggcgcggacgctggggcaggcgtgccaccggtaccgagacgagctggagtgatacatgaactacacgatgggaggggagtgcccctccgacgaggcgtcggcgcagcggctgatgctcaaggggtgtcttcggcgtcgccgccaggaatcagatcgccatgaatcccatcaacactgtcttcggtaagtacagcagcattaatctttcgcgg

SEQ ID NO: 20151 - DNA, 443 bp, Zea Mays
gttcaatgatcccacgaaccttgggtcatctaggtgataacaatcactaagagtaataagtgtagaaccaacccaatccatttaactatagcaacaactgtatgtgatgcactaggagctctccaacctcacacccaaatgatgttctataagatgcaagagagtggagtatatgtccctagtcccaagaggtgttctcaagtgcaagaagtgaagggatgctagacaagactagacaagaggtctatttatagccctaacttaaaatccaattgttacctcttggtggatagaaatcaagggcactaggcatatctggtgcaacattggatctgaatcctacacatgtgcaccagacatgttcggtgcttttccattggttataatacctacggctataaagtagttgttaccctttttaggtgtcgggtgcatgtcgggtt

SEQ ID NO: 20152 - DNA, 652 bp, Zea Mays
attcaaaattgaagctctctgatgatcgattgagggcacggtttgggtggcttggtgcttgactaccctacggagctcacggtggcctcaatttatagtaggcaagagtggtggacattgaatcggacgacgacgcgtggcggtccgaggagtgggaggtcactggcgcaaggaattcgtggcatctaccgtggcagccctcaccggcgatgatcagacggccaaagtgagtcacgacgatgcggtgaatgtgcccaggtatgtggcgcaaggccgtgaagcagctatcaccggcaagctcatccgaagcgaccgtgacaaactcggtacggtggccggagtaaactattggtcgaaagatatccacggtgacgatatttactcaatcctaagcgttatccaaccgatccaagcacgaatcaagacggcgaaggcacgaatctgcgcgcggcttgtcggcggcgaggttctctgaacctgatcccccccgttcactgtaccatggtgattaccatgcagtcagtctgtcagagcaaaatcagagccacttttctcctcatttcatgtgacaaccccatcatcccactgcttcaaagttatagcccaattaaccaactgcaatcttgctatggggtcatgcccaaacttgcgc

SEQ ID NO: 20153 - DNA, 382 bp, Zea Mays
cagctgcccagcaccgtgcccagccgccgcggcgcctcgcccaccactctctctctccctctcccccctattcccccacgacgtcgtgactacctccactacgatccttcccctgcttatggagatgacagttccaagcatactccaacatctctctccctacacgcacaactagccatggccgcgcggccactgcaacccgtgcgagcacaccctgcgatgcacgagtgttgctctgcacaaccgctcgacggtcgtcccccagagcttccccatgatgcgcgtcgtgaagcccctcgacgaagaccctaggaacacctgcaggggtcggccatcgtgcacaggtgagaacccactcctctctctccctcgtcccgccggc

SEQ ID NO: 20154 - DNA, 690 bp, Zea Mays
tcagttgagggtaagtgcggagggaccctctacttatgtgcccgactggatctcaaaagctaatagcgagcctcaccaactcatttgttgcgcacgaaaaaaaggacaagacaatgtccgacccgggagaagcccccagggctcaggggctactattgggatatgatccctggtttcaggggaccatcggtaagtgagcacacctagaaaaagccactagcaactggggcccatcaatcagctagaggagacatgtagcgtctaccctagaggaacccaccagcgcacgagcaccgcggcaccaagcctggggttgggcatggtggagtcaaacaatgtgcaagcgtaccaaaggtaaaccagtcgagtggatccctcgcctagcccgagacagagccgtcataagtgtcgtccgcattaatagagcctggcaccgagccatagcggaggtgttggtctccctcccattcataccccgagcccctcgaaccacagagcactcgtgacctacaaaccctttggaatgcgatgcatttatgtcccacgcaccccagcctacggtgcactcatgacctaccaggatcgggcctcagtgcgtagacctctggaagggtgcaacatgacaagccacatctagccctaggatatgaaggccaggggtcggcatagcttaaatgatggcacttcggg

SEQ ID NO: 20155 - DNA, 304 bp, Zea Mays
ggtgggccctttccgtcagtgttgaccgtccgtttacagatttccctctcgctgccccatggatcccactcatcagctccctcagccgtccctaacctcttgcccacgccccccgccatggacgcgcccacgaccacgcgttctccggccatgttctcacgcccgcgcccctttagaagcctgcacaccgatcaccaactttcccctcatccatttgcgcctccagtcgagctctcttgccccctccctcgccctacacacgtaaccagcccgtccgccgccgcttaccgaagttcaccgcccg

SEQ ID NO: 20156 - DNA, 616 bp, Zea Mays
gggatctacttaccatgatacaagcagtgaggtgccccgcccacggcaatgcgcggcccgccacggtcatcgtggcaccggtgagaaattgatcgccccgtgcttgacgcctggctctggttcgcccgttcacatcatccatggatcccggtgaacctcccagagcataccccgagggatcgacgagggcacatgcgagagacggtgtttgcggtggcgaggagatggagaccgagcggtcgaccaccaggcggattgcacgaggaagaacagaaggctgagtgggagagaaggcaggaggaagcccagcacacagctttatagccccacgtgggtcagttccagttgcaagcaatggactccgagttcctaggaggtgataccgcgagtttgttgcctgaggagatcacgaggaggaagacgcaacgcccgacaactggggcccacccgctagcatgatcccgcgccaacagtttagagacgcgcccacaagaccagtcggccgcccgggagcaacacgcgtgcagacactggcaaaaggtacaagtagaaacagatcttcggatgaatcaagatccaccatctgaaataaaagtctcccttacctaactttctt

SEQ ID NO: 20157 - DNA, 419 bp, Zea Mays
cagcaaactatttgggtatgacatggaggtggagtataagccagggaagatgaatggtgtggctgacgccttatcaagaagggatgatgaaccaacagcaacagtgaatctgctgtccaccccaactctggaagtctttgatacactcaagaaggaagcattgacagatctgcaagtctaggaactaaagacatagttggcgtcaggaactgcaggagaagggtgggctaaaagagatcgattgttggtatgccggggcagagtcttcgttccagataattcaagtgtgtggggtcagttgctgatagctgctcatgcagcaggtcatgagggagtagagaagaccttgcatagatggaggagctcattccacaatacccatattaggagacgggtacaggaatttgttcggggctgtg

SEQ ID NO: 20158 - DNA, 371 bp, Zea Mays
aacttattagtgccatgttttcatgtcagcattccgtacgtgtttgatggaagtatggacaagttggcgggagtaaaagtaatgatgtgtgattaggtataagggaatgcgcgggagtacaccttctctgttctaccttccatgcctagtctagttaagataacgttttctccatatataagtatattgctcctttaaaaacattgtttcccaataacctataattctagcaaatatgcttgacgcccatcgtttccactgagaactgtgtgtggttgtgttgagttaggtgaactgacttgtgcagattgagaattatgttgacatgaacacagtagtcctcgtttgataccatgtattgtctataaatc

SEQ ID NO: 20159 - DNA, 950 bp, Zea Mays
cgcgcgcctgcgatgttcattttgtgcagaggaccacagctgtttaaataaccggttaagaacccttggccagtattcactatctctgataatcacagttaggtccctgtacttctgtttcttcgcaacgacaggtccccgatggtgatcgccggtgagcacgccttccagcaaacccgtaccggccgaattacttaatgaccaagcccctagctcgcccaacacctaatcccacacttggcgacactaatccctcaactaattgcactaatccgggtcagaatctctctgtccacgacgacggcaaaaatcagagacaatccgaggtgttcatgatgatttgatgcggtctagctcaatcaaatgagtctacgagtaacaggagacttaagggatgctagaacatccaccagagaagcatgaaccaacctaaggagggttggccacggaagagctatccacggcggcgcggagaactgaattgggggaagaaaggaattggggcgctacggtggctaatcggaggcgagggctggtgctctggcttcgtaacaacctagtggagctcaccggggcatcaaattatagagtgcgatcacgaatacgacgaatttaggcggggaagggtgggtagtgaggaaaggggaggagtcaccggagttatctatcgtggcattcatcggggctctgtcacaggcgatggatagactacctacggcggtccactgcgacgtggtaacaccactaactacgtggcgcatgggtggcaagcggccaacgctggcgaggatcatcacggccagttgtagagcaagtgggtatggtgaaccatccagtgaccacgtccgagcttatcctggcgcctagatcttttactcccctcggttatccacctacgccgagcacgaatcgcggcgacagatgcgaatccaagcgtggggatcaccggc

SEQ ID NO: 20160 - DNA, 526 bp, Zea Mays
tttcaggttcacgtcttcatcatgtattcttatagctgaaaaaccttcaaaacaaccttcttcctcatccacttcatctgtcatagcctcaagtatgtcgctacccacaacctcttcttcatgatcatcaaccccatcgacgcctacaatctcgcctgcaccattagtttcattgattgattctggagccaattcttgagaaaggataccgccagcactagtagcatcaacattttcagcatcctgctccttcttagggtcttcctcaagcacactgaccacactagcaggaataaactcatcactgtttcctccatttataaccattgcggttgcctcactcggtgggtcaggcctgctggcctcatcttcaacgtcaccctccttcttagctgattcttttaaggcttcttcaccttgagcaagctgctgcagtaatccttcatgcgtgtgagttttagcttgcatctccccatcccatgccactgtaagacccatttcactggaaattgagtatgtacttact

SEQ ID NO: 20161 - DNA, 286 bp, Zea Mays
gttaactttcaaggtcaacaagtctacgaaacaccaactaagaatattgtgacgacaaagctattgttcgaccgactcagaccacactacccagagagcacatgcaagctaatgaagacttaaattggattaactacatgctgacttatgcaactatgtgtgttgatgcaccagctgccataatgcctagttatggcaaacccgatcccttagctgaaccaacactacacgatcaagagtacttggaggagagccaaagtcttcaccaaacctagtcacgagatcc

SEQ ID NO: 20162 - DNA, 792 bp, Zea Mays
tagcagggtttcagcctttgggtcctcatcggtgcgacgtccttcctcccgtcgatccgtcgtctttgcgtctgggtgtccgtctaggcattcatgcatgtgtgttctctgttcgtctggggacaacctgtcgttttataaaccaaggagggggtcggccaatgttttaccccggtgaagccacatgcattcgtgagcccctgggtcgcttggttgtcttgtattgtttatagcggatgacgtggacagcgttgggcctgagcgccataattcaagctacatcaaccctggccttcgtagcttggggctcggcaaggcttgtcatgttgcgccctacaagcagtctacgtactcaggcctagtcccgataggccatgagtgtgcagtaggccaggatgagcaagccataaatgcgccatagtccgaggggttcgtaggttatgagtgcgctgcagtcgagggtctcgtaggccttgagtgggagacggaccagcgcctctattgtggctcggtgtcagacatagttaatgcggtgggtcacttatggtgggtcggtcatgggacaggcgagggatccactcgagtggcttgcttcagttcatctggcccctgtctagttctgccatgctcgacctcgggttcggtgccgcagggttcgtccgaggaggggtgcttccagggctttcttttcctttctcctccaactgaacgacggaccctagttaccagatgctttttccccagcgcgctcgctgaccaatgggcccagggaccggggatctaatcctcgac

SEQ ID NO: 20163 - DNA, 532 bp, Zea Mays
gtgagatgcaaagtgttcttccccagactgatccgggggaggagcacttccagaaggatcctggggcggagggtgagaggatgattgacccggatccccttggtagggaggcagggcaaactgctcgcgatcatcaaagtatgcttcttcttcttcttcgtcgtctgctgacataaagggcaccccgtaggcctgctggtgccactcattgatctccgggggaggcggatggagaggcacgtcaggcgagcgaggggcaaagggcatacccatagtggaagcttgatgacgaagattgtcgtcagtctcccgctgacgccttgccagctcatgcacatcagcagaaatattccggcacatagagaaaaatgccacaatcccatgggccaagcgggcacccatccctcggccacgacctcgaccacgaccacgaccacgtggcgtgggagatccacggccaggggagggacgcgaggcaccggcagcagcagcaggaccagcagaaggaccagcagaggtatgtgcacgggag

SEQ ID NO: 20164 - DNA, 322 bp, Zea Mays
tgtccgcggggacccatgtttcatttcctgcggggtcatggcctccgatccgtatagcaggcgaaagggagtgaatccggtcacccgacactcggtcgtgttcagtgcccagactgcttcaggtagcaggtcggcccatttacccttcttgtcgtcgaggagcattttcttgattgctgtgaaaatcttgtcgttggcgcgctctacaacgccgttagattgtgggtggtacactgaggcgaaggcaagcttggtgccaatggagaagcagaagtccctgaagtcttggctgtcgaattgtttgccattgtcaactgtgagc

SEQ ID NO: 20165 - DNA, 554 bp, Zea Mays
tgtggttggaattgcatcactcaactatctcacaatctctctcacggaggctcttcttgcagacggacacgcgagaacagaactgcacaagctaacaaggattttttggtccacgcctgccatggcctcacgcggttttctattcattgtataaactcaaagatacatgcaaagggataagggccagccaagtcactcggccagcactcatccatgatgctaaactcacgccactactaatgatcatgcacacaccaataaagacttaaaccggctgattggatggacggacgagcagcgcctggctctagcgagcgtggcccaccagaacctgaacgccggagcgtatgcacacatacagtaaagggatatattttttacctatgctgcatttgcgggtgtaggctcagtctgactctatacagttaatcaaacagcggctgctttttagtcaatgcacgcgctcagtccggacgaatatgtgcagcataccaatcacaaggaaagagactaatggctgcatgcagctactactctcctgatcatgtctatct

SEQ ID NO: 20166 - DNA, 1141 bp, Zea Mays
ccaactcgcccatgtgacagctcccgaccccgtcgcaaacaactaaccaaagaaattctactgtcttacaggtgaatattttccacaaattccaaattcccaaagcgcatcacccgaatgaggaaaaagaacaaaaagaataacctccacttctcctctttgcaaaccgggtataacactctacctcccttaaaaagaattcgacctcgaattctgacgcttctatcggaacgacaaaagggaaaaaattaatgaatcaacaacacttacccacaacaaaaaattctggatatttctgccgcatcagctcctcaagttcccacgtagcctcacgctcagactaattagtccataagaccttgacatacttaattgatctcttcctcaaaacacgctccgaggattccaagatacgcaccggacgacactccaaggtcagatcctgctgcaccacaattggttccatctcaatctaatggtctggatcccgcaagaacttcctcagcatagagacatgaaaaactgggtgtacccctgccatggaatccggcaatcgcaagcgataagccaagctgcccacccgggccaagatagtgaacggtccaatatatctcgggctaagctttccggagaaaccgaaccgaacaactcctttagtgggtgataccctaagaaggacttggtcacccactgcaaattccaaatcccgcctcctcacatcagcataactcttctgacggctctgagcggccaaaatattctgacgaatttctcgaaccttttctgaagtctgctgtacccaatcaggaccaaccagggatctctctcccaaggtctcccagcacagaggggagacacatcgcctgccatacaaagcctcaaatggtgccatcttgatgctaggctggtagctgttgttataagcaaactctgccaatgcaagatgatcttcccaggtacccttccaagacagaacacaagcgcgcaacaaatcttccaaggtttggatcgttcgctctgactgaccatcagtctgaggatgaaaagcgacactaagagaaagcttggtgcccaatgcactgtgaagactctcccagaatttggatacaaatttggagtctcgatcagaaacaatggactt

SEQ ID NO: 20167 - DNA, 497 bp, Zea Mays
actcggtctatcactggcatgccctccaccatattcttggaaccaagatcacgcaaggttctgaaattcagatgaccataccttccatgccacagacgccttgtcttctttcattgccaccagacaaacaggagtggccagctgcatcttcaacagatagagacggttcttgaccctaggtgctctagctagtagacaccgatcaacatcatacaaattgcagaaatcactctctatcacaattttatagcctccctcctcaagttgaccaaggctaactatgttactttttaacttgggtatgaaataaactaatgtgagtaccttgtgacctttattcctggtctagagcagcaccgatcccatgcctttgatctcgaccaaggaaccatcaccaaaacaaactgtgcctcccactgaagtgtccagcgacttgagcactgcacgacacccagtcatgtgattgcttgcacctatgtcgagcacccatgtttcat

SEQ ID NO: 20168 - DNA, 335 bp, Zea Mays
cgcagtggctggcgcggggtctccgccagctctagttggtgcaggggtcgccgaggggccctcgcctgcatcggatggcggcgccagctccaccctcaacgcctcgggcagcgtgctgtctagatcaccaaggtcctcaacctctttgtcatgcgccatctacagcaatagcacattcattcagcaaaccacacacacccacacatttaatcacacaaatgcacctttacctgatctatcacctggtcggacctctcccggacagtctctcggccgtgagggccccacatcctatcaaaaagcgccccagccgaccgcttcagcactgggtcctt

SEQ ID NO: 20169 - DNA, 476 bp, Zea Mays
ctgtcggctccgctgcagccgctagaccttttgcaccgacgcgcgggccccaaccgtcatccggacttcgcacgtgccaaatccacccgctggcgctggtttgtggggcccatccgctagatccctcttcaagctcgtgcgaatcggtccgggttgaccgccgaaatcttcgccgcctgaccaggacatgctcgacttaggctcttggggtcagattccttccacgcggatatcgtggggccccctcgaccgaacgccatcacggactttgtgcccgctgctataaaactgagaactacctactcccggaccgtgcggctgcgatggttggggaatcagttgaatcccgcgacatccactcgacgccagctgggtgtgtcgtcatctcgccgtgctacttttccatggcgcctaggtccgacaaccctgctgctccatccagccatctcctccctcacggctccctgcaggccacc

SEQ ID NO: 20170 - DNA, 456 bp, Zea Mays
cggaatttcagtcacatgaagagggggactacgataggatggaagagatgcttgacgatgtacgccatgagattctaaccatcgattcggagaaccccggtcaacccaccgattatgaggatccagctacacctgaggttcagaagttttttgagctccttaaagctgccgaagagccgttgcatgagcacacgaaagtgaccgtccttgtatttgtgactagacttatgtctattaagtctaagtttgcattctcaaacaactgctacaaggagcttttgaacttgatcagtgatgtacttctggagaatcacaagatgccaaaggacatgtatcagttcaaaaagttgctctctgggctcggtatggactacgaaaaaatcgatgtctgtgacaataactgcatgcttttctggaaggagaccgcgagtgagaagaagtgtactgtatgtggtg

SEQ ID NO: 20171 - DNA, 877 bp, Zea Mays
acaatggcctagaattatgaatgtgtgcagtattagccttactggtcatcagcctacgaacatccgcatttgagaccaccacatgcctttcttcaaattcttggtttgacccctcatcaaatattttatcaaaaaatgcatggtctgcagcaaccgtatggatctcatgccagatgagagctgaataagacgtttccctagatactttgagaccaccacaaacagacagcactaatgcattgttatgcacctgcttgcactgcatctggtcatccatctcttcaactagctgctctcgtaagccatgtgaattactgaagccatcacactcacagaaaactggcacatcatgcacatggatgagatttagaacatggacaacaatctgatttctatctagaatcaactcattgctatctaaatactcttcccccccccccggagttgccgagattgcatgcatttgctcaaagtagtcacttcctcatcccagataaccacgtcacatagctcagcattcgtgtctgtctcgccaaccatacactctccttgagctactagtttcaataaacagttatgtaactgaagaccttgcggtaactcatcatcccacagaatagggctagaaattgcatcaaacactctatgggcttcactcatggatgtcatgggtaccttgaacaatgcctggtcatgctgctgcaatagcacatgtggatcagaaccatgctgcaattccatagcaagctctagaaacaatggcgcattactggaaggaataagcacgacattggcatcaagctctgcagtatgctttgtcttctcgtaatgcacatactctgcaccacatgctagctgttgtcataagccatcatgc

SEQ ID NO: 20172 - DNA, 722 bp, Zea Mays
cggggaagggccgccgtgggagcttgcagatggaggatagggatccgtcgccaatggtttgtgccctcgtcatactcgattaatggtcggggcgcttccatttcctcgccggaattagagcttaaccgtggaattgcatggcgccgtttgggccgcactttctgcgccgccgccgtcagtgagacctccttcccttgcttcaccttgatcttcgcttagcttagcaaagataaacttcgtagtcgcgtgccgggctctcggattaatgtgctctggccatgctttcattgcgctggctctaggagagaagagcaaggtaggcgagaaagagagagaattgggggtggaacatgggctattggatttaagatgtaaggctaggatgcaatcgggcgtaactatggattggtgagctggttatttacttggtggagaagacgatccgtgtgccgtccgatccttatcatgtggatgcgattggcgaggaaggagtggttgctgtgtctgtagatcaaataatggacggacaagattgagttgttgtgtacccctttcgcccatttagatctggccgtagatcccagaatcaatggtcctaatagcgtaccggttcaatagggcttagatctaatccaaaccactcgctttagatcggacggccagaattgatgcatacccccttcgcggatgcaatttgctaaagagtccctggccaatgttaa

SEQ ID NO: 20173 - DNA, 475 bp, Zea Mays
gtcgaaccatgtggcaccgagcccagggtcaagtgtggcggagcctgacaagaaaggatgggcgtgtcagaagggaaccactcaaatggatcatgcgttcggccttggactgattcgtcataaatgaccggttgcattaaccacgcctcacaccgagccacagcgtgggcgccggtccgtttcctacccatcacctatggacccctcgggcaacattgcgctcatgacctacgagcccccggactgcgacgcattaatggcatgtcgtccctcggcctgcggcacacttatgtcctattgaactaggcctgtgtgtgcagacctctcgtatggcactaaacaacgggctacggcgagcccaagcgaagcctggggttggcgtagccggaatgatggcacctgggaccatcatcgcccccacgtcatccaccacgataaatacacgacagctaggcaaccccgggtccacaagtac

SEQ ID NO: 20174 - DNA, 671 bp, Zea Mays
acatcgaggtaaacagtacaccatcctctccgcttttcgatgggcatcgcgttggggggcgcggattaagctttggggccttgcggtgtggattgacgggcggtccggcggtgggctgccgtgcttggggcaccgccgccgtctggttgttcggtgagggagagaagacgaaccgtgagccgttagattagagtcgatggtccggattagatgccgcataccggttcgattagataggatttggacagttggatctggcgcgtgcggatcagattagatcgggatgccgatttgatcgcgtccacccatgaccgtcgattggcgatccgatggtggggaatcggatctgaacttcattaaaccttggccgttgatcttgaatcgtgcggatcctgctccgtaccggttcgggggaagcgcagatgtaatctgggccgccggtttctaatcgggcggctgtgggcttctaataccctttcggcctgacacattttcttatgagtccctacagtttgttgatatcaacccgcaatccaccctgtatagtgctttgtgtctcggtttcttttacgattgagcccctgcactttctggaatttgaggcccactccagagaattataaaaccaggaaaattatttagaaaatagtttttagtacatatttaattgc

SEQ ID NO: 20175 - DNA, 517 bp, Zea Mays
gcgaaagatgaacagcggcgctgcgaggaaggaggatggagatcgttgttcgctgggtaaaagaaacaaacgcacctatatttcctttttcctagcgtttgctcatacgcggaaggcggtctgaactctaggagcatctggaaggacggtctggactctcgactctaggggcatctggagaaggacgatgtgtgttgttcttttgccgttgcaatgaaatccaacggttgagagctggcaaaatgacgtggacaccctagtttctcgtctttgcgtcacactctattatatagaatagcacaggagctcccttacaaagtgttcagttgacgcacgcggatgcaaccagagttgcccgatcagccactaacgacccagattggatcttattcatactgagtcggtacacgaccgaggccgtaggacccaagatcgatgactcacattaacctatacgaatcataagctccaccagatcctggccgctcatcccatgctccacggcacacactccttc

SEQ ID NO: 20176 - DNA, 666 bp, Zea Mays
atatgcagatacagttgcatctatagggaagacaaccaaacacatggtgagtgaatgagcgagcaggaggaggtggtgggtggtggaggctggactggactggaggggggaaacagccagccgcacagcagctcgagctcggctgctccagtacgtccacagtaattgtgctgggtcctccagccccaaaacccttcctcctcttccctcccaaaggctcaattattccggcgggccccgaccacagcggtcgacgcggtgctcacgcgcgcaccacgtgacagatcacagagtggtttcttcttcttcctatcctagttagcgaataaaatccagtagtaaacctcccttggtcgacagccgtcagcccgggccctgggatgtgatgtgtgtggaggacgcgacgcacagctttcgaatatcttatttctgggatgggccttttctcccccacgcgagtaggacccagccacttcgggggatgcgctgcatggaggtggaggtcagtcagagcatctctgcaggacggggggccgagcccgattgccagttgccatgcagtcgcaaccgtaccgtccgtgtacagccgctacgctacaccgttaacctgtccgcagctgttagcttcaaattttttctcataaaataaacgctactatgtatcca

SEQ ID NO: 20177 - DNA, 282 bp, Zea Mays
tcagttttttgcagccaagcccaacatatttttagagcccaacccagctcagtgatgctgaaaatacccagtccaccaagctcgcgaggtctgcacactcttccccaggccactgcacaatgtccacccatgacatttttacgaccacgccaaaggaaccctcttctaattttatcaatgttcttcatcgttgcagaaggcaggtccacaaccatggcactgtaaatcagcatccctgtcaaaatagattgcaccaaaacacttcttcctgctttagtcaac

SEQ ID NO: 20178 - DNA, 445 bp, Zea Mays
gcaaaatagccggccagaggctcgccggcggcaagggaaagcgaggggacgtggaccacggcatctccaacatccgccatgctcggtgtcggctccagcccggccagaaacagctcgagcagacgcgaccacggagctgcgagcacaacaatggtggttcgggagggaccggttggtaggggaggagaggagggctgagagggggcgagtgcggtcgtgggagtgctgagaagagcatggtgtggctataaagccgcgggcatcaccaccattggaggataggggcggtggccactgtcacagactgacgacttgctgttcacgctgcctccctgcagcacactgtcgagcacgcattggatggctgtttttggcgttttctgcttggattcggacccggatcgctgcacaagatttgttccttgatgtatactctacaaatcgt

SEQ ID NO: 20179 - DNA, 481 bp, Zea Mays
cgcctgactgtctcgtattctttatggtggattgcgtaggcagcatggggcccaagtgccaccattagggctgtgtcgacccctccttcgtagcctggggctcagtgcggttcatcgtgttacaccctgccagcggcctgtgtacttaggcctagtctcaataggtcatgaatgcaccactggccgagggatgcgtaggccatgaatgtgctgcagtctaaggggctagtaggtcatgagtgctttatgggtcgagcggttcataggtcatgattgggaggcagaccggcgcgcggcttagtgcctggcatagataatgcgacgagtcatttatgacgggtttgtctgaggctaggtgtaggatcaactcgagtggttacccttcggcacaccctccccctattaggttctgccatgcccgaccctgagctcggtgtcatggggttcatccagaggtgggttattctagggtagatgttac

SEQ ID NO: 20180 - DNA, 577 bp, Zea Mays
gcgcggctggcagctagggcggccgttgccgatccctcgctctagctcgccggtcgctgctgcctctatagtttctgcagggacgcggttgatgccaactgctcaataattctcttgctcctttccaatcaactggccggcggcaccaagcaagctaataaggctagctagccaagacccgtgtggcggtggcgcacaggaagcacacagcttgttgggtgcatgcaggtgttggcaacttggcaggcaccaaggagattgaagaaggctagggcagaagaaggacgtacaacgatcttttgaagggtcaggttcgctcgatctgcttggagggtagctagctagtagcaagcaatccagcaagcttgttcttgcttttgtgggggacaaaaaaggaggtaggccgggtggaggggaagcaggatgtgagatatggggctgcggaaagggagttatcttttcttagcaccaagcaagcaccaggagagacgagagaatacacacggaacacggttacggtgaggagaaacgaaaggagggagagagatggggtaacttgagttggcttccaagagag

SEQ ID NO: 20181 - DNA, 897 bp, Zea Mays
cggaactgcaccaatttcaaaaagagcttaccgaatggatgtcaaagatttaattgaactgaagaaacaaatagaagaattactagaaaaaggttttattcgcccagttcgtctccatggggagtcccagtactatttgtgaacaagaaagatggttcaaggagaatgtgtgtggactatagaagcttgaacgaagtaacgattaagaacaaatacccgttacctcagattgaagatccgtttgatcagatgagaggaggtaaagtattctcaaaaatagatctaagatcaggctatcatcggttgaagatttggactgaatacctaaaacgaccttcactacaagatatggactatatgagtttttggttatgtcatttggattaaccaatgcaccagcttactttatgaacctgatgaataaagtattcatggaatatctcgaccagtttgttgtggtattcatcaacgacatactggtatactctcaggaagaagcacatgaaaatcatctgagattagttctacagaaacttcgagacaatcagttgtatgtgaaattttcaaagtgtgatttttggctaaggaagtcgctttcctaggtcatattatcaccaatggaggaatcaaggtagaccccggtaaaataagttaaatactaaattggaaacaacccacatatgtgtccaagatcaggagttttcttggattagcaggatactacagaagatttatcgaaggcttctccaaaatagtgaaaccccttacttcactgttggagaaaagtaaagaatttaagtgggatgaagcatgccagaaatgttttgaggaattaaaggaaaggctaaccactgcaccagtgttaattatgcctaatattcacaaaggatttgacgt

SEQ ID NO: 20182 - DNA, 684 bp, Zea Mays
caaaatcgaagtcttttccaaaagactcgccgtacaaaagtcgcctacgggcgcggtcagatcaacgaaggcgcgcagccttatcatacaaattatggtcacatatacacagcgagggcatcgtatattacattggctcaaccttcgggatgatacccatctccctgtagttgaacagcattatcctcagttcctcacactcaaaaagatttcgcagctcccccttatccacactcaccccaatcggcgaggacaacaattctcgcttaccagtcccatccacacgaagacgcccactctccatctcaccacgttgacgcccaccacttcgcgacaacccactcaccctccgtttcgccaccgcccttcgccacctatacccagtactcgcgcccgggggctcctcggaaccctcagtgcgcggcgagggctccgctgcagccacatccaacgccgcgaaataatccaagtcctcatccgaagactcctccgaccatgcaatcgaactcccagaatcattagactcaaaacacttagacacagagccaaacgaatcatcatcagcagccacggtcgaagccaccacaaaaatagcattgttagtagcggcgtgcgcaggcccaaaccccagaacttgcgcagcaaccgaggtttagtatcacacagacaaaatttacaaactcc

SEQ ID NO: 20183 - DNA, 379 bp, Zea Mays
catgggtatacgtaggtacaaccacatattatgtaggataaaagatgggtaggttagggtaagaatagcctaggataagaaggtttatgatgggaaagacttccgtgttgagtggtaatgcatctaaagattgagtttgacttctctcctgccttgacgaggttgatcttttccttttccagtcttggtctcattaattcgaggttagtgtattttatcggagttggggaacatggtgaagatagatatggatgagataggctacatgatgtaggtcaaagtttgttaggtggggatagacagatcatgcaatccatcaagattctatgggttgggtcagatctcatgcatttgactgagttggtctaaggtactgagt

SEQ ID NO: 20184 - DNA, 960 bp, Zea Mays
caaccattatattcactgtcaacaagttagggaacaaaccaacacgttccatctcatcccgtatcacataggcctcctcaacccttccagccatgcaaagcataccaatgatgatgttatatgtagaggaatttggctctgcatcctttttcattgcctcaaacaagatcagtgcttgatcaacttcacacttcttcccaaggcaagtgagaatcgaattaaatgacacaacagatggaatacaacccctatcctttaactgatcaagaagcttataggcattctcaaactggcctgctgacccataacccatgatcattgtattatacgcatacgcacaaggcacagctctttctgtctccatctgaccaaacagctcctcagcctcacttagcttccctgccttgcacaacacccaaatcatgctcgtgtacgatacatcatctggcttgaacccttgcgacttcaactcatggaagaacttccaggccatgtccacattcccagccttcccgaaacaatcaatacacacattgtacagcacaatgtcaggctcgaggcagttccccttcacctcgtccactagtgccagggctccctcaacgcgcccctcacgggccaaagcccgcaccagcgtcgtgaacagcggcacgcccacctcgtacccgacttcctgcatctgccgcagcagttccagcgcgcgttcaggccgcctggcctccgccattgcgccgatcagcacggtgtacgccgagaacgctgggcggaacttgagccgcctcattgtcccaatcatgcgctcggcgtcgtcaaggcggtgggtgcgcactagtgccgcgacaaggtcggcgcaggtggggttgggaacgccgtacccaaggacgctcatttcctcgagaacttcttccatggctgcgaggtcgtggaagaggaacgggaggacggcgttgtatgcgtcgg

SEQ ID NO: 20185 - DNA, 950 bp, Zea Mays
agcatctctggtggtacgatactgcacagcacgtcgagtgctagcctatccttcggctcgctgacatcatcacctggatcgatggtccgcaagatgcattgagcctgcagcttgatcttcatgagaagcgctcagttgttgtagtttgtcttggtcagcatgtggtacgtggcgggtccaaccgacgagaccttctccacgatcctttccaccactcgctcgacgttgccaccgttccggcgtcgacgcggtggcgatcgccattgtcgacggtggggcggagtcagggaacactctcccattggagccgacatggtggatctctctttggctctggtaccacttgttggacttcaactggcgttcacctgagctggagaagaatcactcgctcacccctcagacactcactcacacacacaagcgcactggacttgattcaggcacaagtgtatttggtactactaaaaccacagtcttttctgatgcatatgtgtctccatttatcaactacaaattacatgcatgcaaatcaacgttagtaatccatcgtgcgtctcccgggccgtgcgttctgcgcgtccatccccacgcggcacgaactcgcgatccgttcgtggaacaaggcgagtgagcgagtctcactgcctcctatactacacgacaccctgaaatataggagtcatgagatgcaggcttatggctacatgcaattaactgtttgactcgagatgcatgtgattgactaactaactctagctgaaatgtaggatcaaggttcaactaacacagtagcacccttgggttttgggttatcttcggtcatacccttctgggctggataaccctcatgtgtaacctcagggaccagagtgtcctcacgaatcagaccgctctcaaaggtcgaagatgcatgggaaactgtcgggttatttcttgccaagcaagaa

SEQ ID NO: 20186 - DNA, 925 bp, Zea Mays
gttcggcggaggtgctggaggtggtttcggtggcggtggagggctcggtggtggcatcagccatggtggcgggtttggagcgggtggtggattgggtggaggaggagggtttggaggaggccttggtagtgggtttggtgttggatcaggcatcggtggtggcggtggatcagggggaggccttggaataggacatggaggaggctttggtggtggaggcggaggtggaggcggagggggagggggactcgacggtggccatggtggtggtttcggtagcggaggtggagttggaagtggtgtttacggcagtggaggagggtttggaggcggcggcggaggaggccttggtagtgggcatggtggaggctttggctctggactgggtgtaggaagtggtagtacacatgaaggtcttgatggtgttggaggcatcgggggtggcggaggacttggtgccgggtatggtggaggttttagcgcaggagcgggtataggaggtggcattggaaaaggtcttggaggtggaggtgggtatggcggcggcttcagagctagtgctagtttcgaaggcagtgttggtggaggcggcggtcattgatagggcagacaaacaagcatggtgttttgtcttgttgtgtttcatgacgtacgtggatcgattgcatgcttgcatgtaatctccagggttcatctctaatttgtctattagtccgtgtttgatatgagatttgttcgtttagagtgatgatattattcaacgtacgtgaactaataagtagtatctgctgattcagggatctcaggtgtgtataagccttaaactgtgctctgcattttgaatctgtagcgaaggaataaaacagtgagatgtgattcactcaccaaactagttcttgaccgcttacaaattgctacacgtgac

SEQ ID NO: 20187 - DNA, 403 bp, Zea Mays
ctgcctaggctcacgcgagccacacgccgcaggtgctagcaaccaatcatgtagagtatgtctgtgtacgtacgtgtgctgcaggatctagttgatcgtgcttctacacatatgccgtcatataaggtatactatgtggtttgtgtatggtctatgtgaacaagaatatgcaagtatgtttgggtggaagctaggaggtttatcttttagctatctgaaagtagtctgggtggatagacgaaacctaaaaattataaactttgaacacgaactttactagacgttagcgttaaagcgaataatgaaattggagtgtagaagaaaggtcttcttgcaaagagttgctcaatctaatacaaattactttaggagcaagctcgaaacaatcacaagcaagagaact

SEQ ID NO: 20188 - DNA, 334 bp, Zea Mays
atcagctatcatgttgggccaatagaacccagatcttcgcaataaccacttcatcttcggagtcgattgatggttaccataaattccttcatgtacttcggccatggctaatatagcatcacttaggtccaagcacttaagcaggatgtcatcagccgttcggcagtacagttcatcgcttattaaaacatacttgaaagtcgtacgccgaacgttcctatctgtcctaacactaggatttcataggtaatcaattatgggtgtcctccaatcagttccatcagctttgttatcagccgattttaccaggaggacttctgtcggtgtttgggac

SEQ ID NO: 20189 - DNA, 579 bp, Zea Mays
gaaggacccgcccccggataaatccgaggcactgagacgagggccgggcgaggtgaagccgcaagggggtcgagcggatcaggggaagccattcaagtggattccacgcctgacctttggggtcctaggcctatagcccaatcatgacatatcgagcttaggcctaaacgcgctgactgcctacaggacccacaatacgacacaccacgacgagacctaggctgaggcagccaggggtcaacatggcacagggacgccaatgatggtgccgggactcttcgccgcccacgccacccgccataaatagcacgatcagagacacccagatgaccgaggcgtatacggacaaacgcaaccttaccaaggtagaacgctcaattttaccacggcacagtagctccttctgaaggaagctaccggtagccaacccccaccttggcctataaaaggaggaggtcggccacgaaatgaaaaggaggacactcgacggaagacccacacacactcgatgagaccagaagacccgaaggctagagccaaggcgcgagccgccgcgacgtctaaggcttagcttagaac

SEQ ID NO: 20190 - DNA, 831 bp, Zea Mays
gaggagaagaacgcgagcaggaggacggtggctgtcgcggtggtgggtgtgcccgcgagtggggtggctgtctcgggggaggggaaggcgcgggcgtgcagagcgcgagctcggtggcgagaatggtggcgctcggaggcatgaatggcggggcttccctcaagcacggagatctcgcactcactttgcctcgacacagagatacctcaagcacggagatctcacacggataggtctaaaggatggtgggctcgtaccttctacaggagcacctggtcgaaggagcactggagcagcgattggggttggacgagaggccgatggcgctggagacggatcttggcgtaggtgatcttctgatctccttggccttgatgacggcgccatcgccgggcttcttgaggggggtgggaggttgtctcggcgagcgcagatctaggggtggcgttgggcaagggcatggccttgactggtgtggtcatgcgaatgtcctccttccactcataatggagtgaggacgatggtgggacacagcgtgtgggtgataccaccgatggaaggggattgcgggctcgggggcgaggatggccgggtgcggcctttgaagctcaacgaggtgggcacggctttcatcattcgagcgcggacgtgggggcgaggattgtggtgcacatccgcgaggttggcgaggatgacgggatgcggggaggagtatggaaggggtgggctaggatggaagggaggcgggggaggaggatggcggtcgggtttgccggcagggatcacggtcggagggcgagggaagggggccacggaggcaggggctggcgg

SEQ ID NO: 20191 - DNA, 916 bp, Zea Mays
agacgatgttccgccacctcggcgcggcaggggaaccggggaagcagatgttgacgaagaatttttgtaatttttctatgccatccccctcctcccctattgtgtgttcttcgcaaggttcaaggaagcgctaagcgctgagcgcgcgctagggtggtgaaaaagcttaagcgcgattaattgtgcttaagcgtttttgttaaaaagagaaaaaagacctgatattgggccaccctgcagcagcccttaaccccctcctcctctcttcatgagtctgcagcccactaagcccacctgccaggaggctcaactcaaaaaccctctcccgtgactgctgcctccttccacgccccgcgctgccgcctgtgctctctggctccctctcccgaagcctctcctcccccgtgtcatacgctctccagctccctctcccgaagcctctcctccctcgcgcaatcttcacctctctaccgcgaagtcgctccacctctctctcaccaatctgctgcctgcagccatcgccgctctgttcgctctctctctacctctctcttgaagtctctcctcttctctctcatcgatttgctgcctgctggattgacgctggaggtgttcctcctcttcctcttcctcctcttctcccttaaacatgccggatgggcacgattaagcaggaccagcgcttaattgtccgcttagtaggtaagcgatgcgttgaccctctactcagtgcttaaccgcgcctaatcgcacgcctaatcgcactttcttgaaccttggttcttcgctagcttcgcggcatggatttctcgttgcttttgtgtcgatcgacctccttggctgaagcaaaacgtcgagctcggatttatcggtgttttcttgtcgatcgggtctccatagttgaagcaaaaaaatc

SEQ ID NO: 20192 - DNA, 362 bp, Zea Mays
aactgctccgtgagggcctatacattgatccaaatagtctatctccacccaaatcaaaccccaacagtaccaatgtcacaagaactcaaagtttctccacaaatccacaagagaaagggaagggacaaaccaagaacacaaacttcagaatttcagcaagtattgaaaactgagattgagaagtgacaaaaacctgtgggccataccggcgatacttcctcagattaaacttcaagaacacaaatacagtcgtagtacaaaatcattgtggatccttggctaaaactagagacgtctagagatgggaaatatgagtgctaaagccctaagccaaaacaaatggcagccaagtgatgctaaac

SEQ ID NO: 20193 - DNA, 587 bp, Zea Mays
ttagttgtggatttatatgatgtttggtggtgttatcctaatcaggaagtcgtattcattcatagctcgattagggtggggtacttgatatttattttgaaaaaaggtcgtggttcaactctccattgaatgctcaccaccaaagtacaagtgacatcaccgtttcactaggctgtccaaattttttggtcatattcatatcgcgtgtgaggtgcatggttggtaacagcgttgtagagaattatatatgcattattgttcaaagacttgggtggtgcatttttaagcatcttagctcggaatttttaggtttgggcagtcagtgagaagctccattgcggaaacctgtttttgggagtttaaaatagctcttcactggaaatttatgcagtacctaacttgactgagtctgggaactaggcaactataccactgccttagagatctgtacagcagcaccaacaaagccttttagtcccaagtaagttgcggtaggctgccttagagatctgtaaccatgacaatattgtcattgttattccttaagtgatctgaaagcggcttctgtatttctgttagttgatgtg

SEQ ID NO: 20194 - DNA, 808 bp, Zea Mays
caccaagggcacataagggtactgaaacaagagagcagaggacatgaacgaacctgtagcacgctgaccacggcgaggtcacttcgcgcggtgctctggaccgattttggggaaatctcaaattggcgagctctggtggaagatttgaggcacgagttggtgtattggttgcttaactaccttgcgaaactgatgacatgctcaatttataggatccccgagcggtcgcccgtgaatttgagatggcgcggtggcggtcaaagagagaggagagcattgtcgcaagagattggtggctttcactgtggcgagctcaccggcggtcaccggacatgtgtaatacgagctactgcaacgtggtaagacaccaaggcacgtggcgcatggccgataggtggctaactccggtgagttcattcgaatcggccgtgagtcaggcggacacggcggccggagtgaaatagtggctcaagttcatccacaaggcgatatttactaccccgagcaactatcagtactccattgagcacgaatcacatcgccgacatcaatcgcggcgtaagatcaccggcggcgatatttagtggattggggatatttccagtgcactgtaccatgggaatttctgtttgaagcgcctgacaaagcaaaagaaagcgccgagatctttaatttttatgtgagcacttgctaatgttcatgtaacaaatttgtagctccataaaccagctacaaatctgctatagggacctggctgattttctcattcccttgagcaagaattgagtcccaagtcgatcaaatctca

SEQ ID NO: 20195 - DNA, 1210 bp, Zea Mays
cggcggggagccgagctccggcgagcgcatactggtggaattactcaatgaccggtgctcttcttcggtctaaacctaattccagccttaatgagtgtttcccctcaactaatttcatcaatggggatttaacacggtctgtccacagtgacagcgggtaagacggacagtcaaccacgttcccggcgatctaatatagcttagcccaatcgagttggtcggggagtatcaggggcacacaataacgctaaaacgggagggcagagggtatgagcggacctgagacgcgctggccacagtgaggtcaaaccgagcggtgttcttgagtgatttgggggaaatgagtgattcgcggtctctggtggacaattgaagacaagcgtgggtgctatggatgggtgattacccgacggagctcgcagtgcgctcaatttataacgggcttaggcggtggccggggatttggatgaagacgtgcggcggccggagaattaggaggtcactagcgtagttgattcgtggagtataccttggcggactcaccggcgatgatgagacggctaacgtgagtcacggcggtgcggtgaatgtgccaaggaacgtggcgcaaggccatgaagcggctgtctccggtgaactcatccgaatcatccatggtctgctcgggtacggtggccggagtaaaataatggccggagtttttccacggcgtgataattactgacccccggcactatccaactgatctgagagcgaatcacggcggcgatagcacgaatccgcgtgcggctcgtcgacggcgagggggctgaaattgggattatgtctgttactgtaccatgggaagcatttgacagagcgcctgacagaccactttgcagggcttagatcttaggtttttacataataacatgttgaactgccagtagcaaagttgttgtccgatgatcccgctataatttttttataacaatcatagccaaataatgactagatcatgatcgaatccaagctcaaagattgctcaatcacactgtcagtctgaattcagacataaggcagtctgacagcccatctttgagtccaattttctcaaaacttttcatagtaccaggacttgatctctatagcaaaattgttcccctttcatagctctacaaacttgatgtggtgacctagggcaaaaactttataatttggaagatatagg

SEQ ID NO: 20196 - DNA, 819 bp, Zea Mays
ttcaaccatggagtatgtgaaggaggctccacgtgtgatgccagttatagaggcatagagccattggttagttcctgggctctggtggatgaatgaataagagcacaacagctgcaggtaggctgaactgaggaacatgttagttctagaattctgatctcaagctactgaactactagaatggaaagtgtggtgtagaattctgcaataccatcatcatatcctggctatcggttggtaggaggctggcaacggacctctacatagcgagtactccagtgtggtcttgtattgattctgtctatagatcaaactctattttctggaaaggcctggcacccttttttctacagcaacaccttagaagactctttgtcgtgctcgggagaaagacaagatgctctgtcattggcatttctacaattatatctgcatgaggggatataggaaacactttgctcatctaccatctctgttattatgcttgtgatgtactgcctatactatgctaacatgacattcccaagctatcatccttcccttgttccctctgacatgcgacaacccatcccatggtcaattctgtgcttgcttgattatttgagataaaataaatttggctgaaaacattactgagatacaaaggaggatgttctagaatcaagagggagggtggtgggtgatacgctattattgttttctttacttcactaatatcgtacacatgtgtgtgtggttgattggcaaactagctctagaaatgtttatgaggaaaaaagctagaaaagcacaaaataaagatcactgtttacacctgtt

SEQ ID NO: 20197 - DNA, 512 bp, Zea Mays
ataacagccactcgatcgaaaactgacggtccagattagatttaaccccgccaacacaccagagccgcccgattaaatcctacggttccaatcgtaaatgcccagatctaatgacgcacacccgatcctgatcgaacaactcacgctctggttgcccctagatccaatccggtgcgcacaacacggatccaacggcccagatcaacttatgccatgatctaatcctatccgcttatccccgatcggacggacagtatccagtcaccctcacccggttgtattagacggcgccgccgcccgatgtccacggtggtgaccccgccggagccacgccgtccggtcgattctaggctcccacaacgccattcgaaggtcctacacacaattcggaagatggcgaaatatactagggactcaccgtaggtagagatggcgaccagagagtggtccacggcaccaggcggacccacggcggagcaggtgctccgttgagcaattcgggtgcctcggca

SEQ ID NO: 20198 - DNA, 462 bp, Zea Mays
tatcacttcaagttgtttccagcctgcattagagcttttggtttgctcagcttcccaaaatgcaagggcatgtgttgagcaccatatgtggcactgggcacgaccggaaggtccggccctaaggccgacgtagtctggcatgcgaacggttcacccttagatatggacagtccgcaattatattagatcaggcagattaactcctatcttcacgcgaatttatccctctaaactcgtgggagttgtgggcggtcgcctaagaatgggtccagaccttccccttaaagatttgatggggtacaaccgattgaaacaccaacaatcgaatcaaatcaatatatcttccattccattactcttgccctaggagtagacagtaatttagccttcttcacctcaatcttcacctctcttcgactctacatcgtctggaggcgtcttgtgtggtctgttgatcccaag

SEQ ID NO: 20199 - DNA, 531 bp, Zea Mays
ctggggtgtgggggtggggcataattagggacacccgaattactccttaacaaacgcatttagagaaataagaattaaactttcgagaggtaacagtcgagccacctataagaaaccgagacatccccgagggtctctcacctcgagcagggctccgcctcgctcgaagtcaacaccactcactccgtctcgcccaatgtcgcctcagcccagttcgtctcgcccgagccggcctcaagcagataaaacaaggacactcgaaaataggcagggacatgtgcatttaatgcgtgtgccaacccgcgttgtggcagcggaacacagtggtagacaagatagcaatcacgtctaagtgcagcgatatgattacgtctgtgccaaactgtgcgcgcacgccacctgacgtcctccgatgggacgcctaatacgacaagccgagcgaacgagtcttcgagcacaacctctccgcctcgcccgacccaagtttaagccctcaaacaaattcttcgtctcgcccgagcttggcctcgg

SEQ ID NO: 20200 - DNA, 387 bp, Zea Mays
ccaggtcccaacctagaaagggaagcaaggcagaaatccaaatcaaatgtctcaaagtccacgacgactgagacaagacgtaacaccctaggctgtggctattcacccgaacgacgggttgaaggcataccgggtgcccgctatcgacatgatcgcaccaccccaaatacgcccccaggcgtgctctcacgaccctgaggagacagatgaccctattcataaaatacctcagcaccatagcttctacagtggcctgaataccgggtagtacacaccaaatacatcataccctgatgtacatctacgcacgccaacaagtgacacgggctcatgatggcaggcaaggccgcacaacacccacctgctccgtgcagctgacctatggga

SEQ ID NO: 20201 - DNA, 995 bp, Zea Mays
ctggcattttcttccatacagtgcttcgaaaggtgacattttgatgctggcctgatagctgttgttgtatgagaactcggcgtatggtaaactagactcccaatctctgttgaaggctaaaacgcaggctttgagtaaatcttcaaggaccttgttgactctttccgtttgaccatctgactgggggtgataagcagtgctgaaatccagcttggtgcccaatgcttgctgaaggcccttccaaaattttgaagtgaactgcgttcctctatctgatactatcttccgtggaatgccatgcagcctgactatctccttaaggtataatcgggcgagggctgctcctccaaaagtggtctttactggaatgaaatgggccaccttggtgagacggtcgatgattacccatatggagtcatttcctctttgtgatctgggcagtctggtgacgaaatccatgcctatttcttcccacttccattcgggtattgggaggggttgaagcaggcctgcaggcttctgatgttcggtctttgttcgctggcaggtgtcacatcgggccacatactgtgctatctcccttttcatccctttctaccaatacctggtcttaaggtctaagtacatcttggtggtccctgggtggatagagtaagctgagttgtgggcttcatcgagcagggtttctcgtgtttctcccactggcacgcacaggcgatccttgaaccagagggctccttgattatctgtcctgaggtccgggagttgctcctttcgtgctctttccataagcttggttgtttctgtgtccaggcgttgggccttgcatatgaggtcttctagatttggcttgacttccaggctaccgttgtctcccagacatgcatttagccgagctgattctttcttccaatcttccaaaaagtttgctcctttaaccccgaaaggttttctgctgagggcgtctgctaccacgttggcctttccggggtggt

SEQ ID NO: 20202 - DNA, 877 bp, Zea Mays
gcccacgcgctgcagccgcgacggcaaggaaggcgccgcggggagggcgcggcgcaccggcgaaggctgcggcgggcggcgcgaggagtggtagtggtggtggtggtgctgttgctgctgctccggcacgagcttggaaatctcccgcttgagctccgcctggccttcctccagctcccgtaacttccgcagcagctcctccgccgccatcaccggcagcagagcgcccggttgctgtgtgtcaaatggcaagcatcaggggagggggagttgttgcttccggcgcgcgcgaggtcggcggcgaaaatggcgcctttggaggcttccgcgacccagctaactgcctgcctgcaccttctatcggtttctcgaggattcctcgtctggcccaagaagcataaagcggctgcttttgttggtttcccggcgatccggggagcgaacttggctcaatcccgccttctggaagcttctgtgagctgccacacctcaggacggaattcagaaatggggtgaaccgtgaacccagcccaacaggagttcttcttgctcccctgctgctgctgaccgcgtggtctgttcttccgcggccttgttgcttggagaggcagcagtgacgaggattgggagagggagttggagttggaattggaactggatggtggtgccaggggatgatctctgtcgacccaagtgagggcatcgcatcgcacaaaagtctttgtcttgctttatttattaatcatcaatccaggatcgtgtggtgtggacgcatgtgtactgtttgtctggactctggacgcttgtttgcttcttggtgtgcgcagaaaagtttacattttccatttaactactagcggttgacgacggccacaag

SEQ ID NO: 20203 - DNA, 710 bp, Zea Mays
cgcaaccatttctgtaaagcacaggggctctggtgcaaaacttcgtaagacacagagacatcacgtgtggactgcgggttgatatgacaaaaagacaggggttcttaggaaacattactaggccgaaagggtatgagtttgtttcagtcgtccgatcgggcacggacggcccagattagaacgcgcatcacacgaaccggtatctatttccacccgtgggattagagatctacggtggagattttacgagggctaatccagtatcgtccgtccgatctaaacggacggtgatgaactcccagaccaaagcgtcaagcaccgacccaatcttggtcgttcgttggccaatcaacgatccgaactctatctcctacctttagcagactgggcacgacagcgcccacacccaccgcggcggcgcgttcagtcgctggtggcgccatggccacggtcacggtgagcagcgctccggtgagtccagcaggcgatttcaagaacggatgagatcgaagcgctgctcacagtttagacaacgacgaaacacccaggggcacccttaccttgactggcgcgctcacaagcttttgaccagagcaggaagcggccaagcagcggattcctgacaccgacgaggaattaaggaggatttggttcgtctccagttcccgcgactccgcgtcttccacccacggccgagggggagcggcggc

SEQ ID NO: 20204 - DNA, 463 bp, Zea Mays
tgcctcgccatcagcgccaccaaatcctcggtcgacaccacgccatcagcgccaccaaatcctcgtagggcggaggggagttcacaggggcaagacagaggggacctaacgcgagcgggccgccgctggagggaagaagcacgggcgcaggtggagctcggagggggccggaggaaagcctggagtccagagaggtcgccacctagatatctcaaccgctgccgcctggagcttctctcaccgtaaggctttcttaccccgcgtccctactccatcatgtaaccttgccgacactcaaagcgccgaagcaacgcctcaaaccctaaggcggaaaccccaaccgacgaactcactttacctccccccaccatccccttccatcagcgcccgaggggatcaccacaccagtcaaggccatgcccttgcccaacaccacccctagatgcgcgctcgctgagacaac

SEQ ID NO: 20205 - DNA, 740 bp, Zea Mays
gcggggttggggagcatgaggggcacacaagaacactgaaacgaaagggcagagggtatgagcggacctgagacgagctagccacgacgaggcctctttcacggtggcggaaagcaggtttgggggaagtgggaaattggtgagctctagtgatcaattgagggcacgacttggtggcttggtgcttgactaccctacggagctcatggcgtgctcaacttatagagttcgtgagcggtgttgcttaatttcgacgaattgcgctggcggtcgagaggggaatgagtcacggcggtgatctaccgtggcaaccgcagagcgactgaactacggcggtcattggatggtcacttcggctcatactgacgcgataaacctcctaaggcgttggcgtccacccggtgaatggtgaacacgccagtgattgccgctcggccatgtcgtcggtgtgcactgatgaaccatcaagcacatagtacattccagcccatccgcgatgagatctttcaccccgtgatcgttatccatgtttaattcagtgtgaatcacggcgatagcacaaatctgcacgcgtggtcgccgacggcgaggtctctgagctggcgatccaatccggttactgtaccatcgcgaagcttcatcagtcagtctgacagaccatgtttggggcgaatttcttcccaattttgtacggtaaataggtcaatgctctgcaacaaagttatagcctaataaacctg

SEQ ID NO: 20206 - DNA, 444 bp, Zea Mays
gtcggttgtgtggttgctctcgctcctacgccgtcaccgatagtctttcgctcatagatttctaaaacaatcctttctaaatccgccaaaatccgataaaccaccaaaaatatgatccctaacctcgtaaggttgcttaccttttcctttcctaacctcaccaactatggagaatgattagcggagagacgagtggaaagagaacagtctaacgctgctcccaatgaagaaaataaaatggaaaagaaatacttgtctagttctcgttggaattagccacaccttgcttagagtctatttcaactccttcatccgtatggtcagatctgtcaatgtgacaggtagagccttccactatattgatgatggttacaacgatgccatgactgtctacagtgttcttgacagcactccgacagagtaacaacgcttaagatcttgctc

SEQ ID NO: 20207 - DNA, 540 bp, Zea Mays
aatggttctgttgtgtcttgtcagcatcaactattaagagcatcctggacaatacaaggctgtgaattcgtgtctgatatgatatttctgcccctaccgtgttatgacatggtactaggcatggattggttggcatcttttagtcctatgcgagtggattgggaacagaaatggttggctattcccttccaaggatctactatggtgctacatggtcagtcatccggaattcctagctgcactgtggtggaactctgtgtgttgaatactgctacggcaccaatgactcagtcagttttgcatccccaaattcacgacattctcattcagttcgctacagtttttgaagatccaacagagctgcctcctagtagggaatgtgatcacacaattcccctcataccgggtgcacaaccaatttcagtcaaaccatatcggtatccccccaaactcaaagacgaaattgagaagcaagtcgaggagatgctgcatcaaggggtgattcaaaagagtactagtgcttttgcctcgccagtatta

SEQ ID NO: 20208 - DNA, 470 bp, Zea Mays
tcaaaaagctgtccatcttcttggcttcggtgttgacgtcatccggcgcgtagcgggccaattcggtgaatttgtgcacgtattcactgacagatcttccatcttgagttagctcccggaattcatcttccttgagctgaacgatcccttggggcacatggtgctctcggaaagcagtttcaaactctgtccaggtagcatctctgatggcagcgttgaaggtatcccaccaagctaaggccattccggaaagttgatgagcagccagttgaacacgctgattctccgggcatccgatggcttctaacttccttttaatcgtgcgcagccaatcatcagcatcgaggggattgctagatccagcgaatgtgggaggcttgaggctcagaaaatctcccactattcgggcgttgattctccagacttctagtgaggacctcagtgagtcgggtttggttggctagaacttg

SEQ ID NO: 20209 - DNA, 703 bp, Zea Mays
ttctgatgttcggcctttgttcgctgacaggtgtcacatcgggccacatactgtgctatttcccttttcatccctttccaccaatatctggtcttaaggtctaagtacattttggtggtccctgggtggatagagtaagctgagttatgggcttcatcgagcagggtttctcgtgtttctcccactggcacgcacaggcgatccttgaaccagagggctccttgcttatctgtcctgaggtccggaagttgctcctttcgtgctctttccataagcttggtggttgttgcgtccaggcgttgggccttgcatatgagatcttctagatttggcttgacttccaggccactgttgtctcccagacatgcatttagctgagctgattctttcttccaatcttccagaaggtttgctcccttaatcccgaagggttttcggctgagggcgtctgctactacgttggcctttccggggtggtagtggatttcgaggtcataatctttgatcaattcaagccaccttctttgacggaggttgaggtccggttgcgtgaagatgtactttagactcttgtgatcagtgaagatgtggcatttgttcccaatcagataatgcctccaaatttttagggcgtgcactatggctgccaattccagatcgtgggtaggatagttctgttcgtgcggcttgagtaatcgggatg

SEQ ID NO: 20210 - DNA, 276 bp, Zea Mays
cgggcgggcgagcactgacaagcgggacagggagtgtcagtgatagagggggagagtgcgctgaccgagcgggtccagcgccagaggggaaacagacgactacaggggtccgagggggtccgaatcgttcgatcaagatcggatggagggggtccgaaggggggttctagcggcctgaggggggtccgaacgggaatgatgagcagctgcgaatggcactgacaggtgggtcaaggcgccaggtgcgcgtgcgcgaagcggtacccgcggtccgag

SEQ ID NO: 20211 - DNA, 552 bp, Zea Mays
ggacggaggagtcttcagatgaggatttggattatttcgcggcattggatgtggctgcggcggagacttctccgcgtgtgatggatgctgttcccggtccgagtgctgggcgtaggcggcgaagggcggtggcgaagcgtagggtgagtgaggttgagggtggtcatcttcgtgtggacagggctggcaagcaggaattgttggcctcgccggctggggtgagcgtaggtgagggggagttgcgaaatctttttgagggtgaagaactaaggataatgttgtttaactatagggagatgggtatcatcccgaaggttgaaccaatgtaatgtttggtgccctcgctgcacgtatgtaactataatttgtatgatgagtctgtgtgccatcgctgatccagccgtgcccgtgggggacttgtgcatttgatctagcgcgtttattatgccggtccggctgcgcctgtaatcggtctttgcgcggatagtttttcgacgaagtttttcgcacggatgtgcctgcgattttgcgcgcttgttgtgctagtccggc

SEQ ID NO: 20212 - DNA, 780 bp, Zea Mays
gtctttgcagctgcagcacagcgcgcgcggcagcatggtagtgcttgttgcatgcgtaaacttttgcaaaccctagctatagctatgctgccatccagaaaggtgcaagtcaaaccgcaggcgatccaccacgctcacacttcgtgtatctgcccccctgtccctgtccccaaacttggggcctctcttcaatacgagttgcatgtccgtgcatgcgttcgatcctcatctctcgctcggtctctcccatccatctacatacactgcagtcactggcatgcatgcatgcacgagacgacgatcacagagtagcggcccgctcctcctgcctgcctgcctgctgctgctctggttgctgtagttgcgtgagtttgtagcaaatagatgtgatgtgatgcaccagctagcatgtactgctactgcctagccagtgtagctacatgagaggggctgacgagaggccggcaggccgcagcatccccctccgactccgatcctggtggcctgatgtgtgaccatgcaggtagtaccggccggccggcctttacacggggccctgcaacgcctgttccaaccctgaagagtcacgagtcacagcagcttgcagctagcagcaaaaacgcttctttgcttcccgaccatccatcgctttgcagaattgcaggtcgtccgtttttctttcgcacaagaacacattaccatctcagctcacacctctgacctctcgttacagtagaccgatcaggcccggaacacacctttgaataaaatcctttttta

SEQ ID NO: 20213 - DNA, 615 bp, Zea Mays
tgcgagtaataaatcagtatgcacgtcagattcccttagtgtggaagatagcaatttgggcttgcctggtaatggtagcgatgatgagacagataaaataaatgtcgatgttttagacctccttattaaggatgtagcggaagtggattttgatgatgtagacctagacacaaaaatttgtgagcttagggcctctacacggaaatcaaaaaagcactccaaaaaacctggaggtaacaaatcaaaaacaaaaaaaaaggtatctcaatgaaaggcattttctggaatagcagaggtctatcagacttggctaaatatcgttacatctcggatgccgtgcgagactccaatctcgatttctgtgcgataatggagacaggaaagcaggacatgtcaaaatcaaatctggcacgtctgtccggtagtgtggagttcgtttggcattacctccctccgaaaggtagatctggaggcatccttttgggtgtaagatcaaaggtgtttgatgtttcccttattcatgaaggagaatttcatattaagtttcatatatgcaatagagcagataaatttaaatggtccctgatggctgtgtatggcccagctcaagatgaa

SEQ ID NO: 20214 - DNA, 554 bp, Zea Mays
cgcgatggtacagtagactgaacaagatcatgggttcagtaaatctatcgttgtcagagatctccgcaccgtgattcacgctggccaccgcgattcatgcctgtgtgaagtggacaaccatggcgggtgaaaagatctagggtgaggagaaagtgggtctgagatggatcatcgtcttgcccacttgccacgcggtcagtgaaatatcaccacctatgttcgttgtgatcgcagtgagagacacgtagtcgcctgtatcaccgtactgtcgtgttcgtggcaagcaaccagttaccatccctaaaccattcccctctcgcgtgccacggtgagcaggccaccgtaggaatatccaggccacggtgaactcgatcccaatccaaaattcgtgataagctcagccgggatctataaattggaggcaccccctgctccccctccttgttacatgtccaacccacccccagctagcctctctcgtgcaccgtagcccctggtcaccggatttcccccaaattagtcatctgtgccgccgtgagacaccgtgtcgtggc

SEQ ID NO: 20215 - DNA, 776 bp, Zea Mays
tgcgtgtatattacatggctccgcctcgttaaaaacctcacccctcgggaggaaaagagtgcgggccggaataaaactgtttggtgaattacaagggcgtgttagccctgaggattcaaacaaaaaatttacggagattatcaatattccaggaatgctctgagtcttcgctggatggcgttgttatcctgtacgtgctgggggacgccttcatcttgacaatgaagggaccctcccactttggctccagcttgccccgtgactctgtccgagttgtccggacgagtacgaggtccccttcgttgaattctcttgggacgactgtgtggtcgcgccatgcttttgtttgagcttggtatttgttgagggcctgcagggcaaagacacggtctccgtcgatgaggtccttggaagttggttcgtctacgtcggggacggctgaagtgcttgtccgtggtgacccatgttttatttcctgtggggtcatggcctccgatccatatagcaggcggaaaggagtgaacccagtcgcccggcactcggtcatgttcagcgcccagactgcttcaggtagcaggtcggcccatttacccttcttgtcgtcgagaagcattttcttgatggccgtgaaaattttgccgttggcgcgctccacgacgccgttggattgtgggtgatatactgaggcgaaggcaagcttggtgccaatggagaagcagatgtctttgaagtcctggctgtcaaattgtttgtcgttgtcaactgtgagctcggac

SEQ ID NO: 20216 - DNA, 464 bp, Zea Mays
aagatgtcactgttcgagactctatttttggaccagactagaggaaggcaattctttggacctaaacttattcaagaggcagaagaacaagtccgtataattcgggagaatttgagggtatctcagaccaggtaaaagagctacgctgataatagaagaccactagagtttgaggaaggtgatcatgtgtacttcaaggtgtcaccacttcatggaatgaggagatttaaagtcaagggcaaattgtcccctcgctatattggacattctgagtttttttggcaagttggagagatggcctatcaactcgagctacctgataatctatgggatgcgcataatgtatttcatgtgtctcaacttaagaagtgtctctgtgtccctgaggaatagttaccaatggaagagctcagtgttcagggtgatttgacttacacggagtatcccatcaagattcttgatac

SEQ ID NO: 20217 - DNA, 1051 bp, Zea Mays
ctgacatgaattctggcaattcaaggcggtatgctgcaggtcctattatgccaatgataggataggggccaacgaactgcggagctagctttcctttcacttgaaaccttttgactccacgcatcggggagaccttgaggtagatgaagtctccttcctcaaatctgagttctctccgcctattgtctgcataactcttctgccgactctgagcttcaagtaatcttttgcggatcagggcaaccttctcttctgcctctttaacgaaggcaagtccttgtagtgtcttttcccctacgttggaccacattagaggggtctggcacttccgtccatataatgcttcgaacggtgacatcttgatacgggcctggtagttgttgttatacgagaactctccatatggtaaactggactcccaatttatgtcaaacgtcaacacacaggctcttaataaatcctcgaggaccttgttgaccctttctgtctgaccatctaactaggggtgataggcggtgctgaagtctagcttggtgcccatagcttgctgaaggctcatccaaaattttgaggtgaactgtgtccccctgtctgacactatcttccgtggaataccatggagtctgactatttctttaagatatattcgggcaagggtggctcctccgaaggtagttttcactaggatgaaatgggctaccttggtaagacggtcgattatcacctagatagagtcgttccctttttgggtctggggcagtacagttacaaaatccatgactatttcttcccacttccattcgggtattggaaggggttgcagtagacctgcaggcttctgatgctcggccttagttcgttggcaaatgtcgcaccgggccacatattgtgctatttctttcttcattcctctccaccagtatctggtcttgaggtctaagtacatcttggtggtccctgggtggatagagtaggctgagttgtgagctttgtcaagcaaaacttctcgtgcctcttcttttggtacacacagacagtttttgaaccaaag

SEQ ID NO: 20218 - DNA, 376 bp, Zea Mays
attaggcactaggtgtaagcctaattccctttcactatggcacacgccatacttgttctagcccatggccttggctcatgctggccaaagcattcatcttctccgcttcgctgccagttgcagtttgcgcgtgaggctaagcagccatatcagcagcttctgtgtgagttccccgttgtctcgcttctccgtaggccaccgctcgcccgctccaccctctgcaggaccgccactcacgtttgcgcccgctgcttgactctacgttgcgtgcctatgcctccgggactgcagggggaggagaaagatgtcgttggcagctaaaaagtatagggcacgacaacacagttatctactagcttatctttcccttccccgg

SEQ ID NO: 20219 - DNA, 577 bp, Zea Mays
ggaggatgcctgaggtagtagacgccttcttcccattgactgcaaggggatgaaagaaggaaagagaggcagagggaagagaacataccttttgaggcatgatgtgaaatggcgctcattgcattttctctttaaggggacacggtcatttaatgcgatgggatgccctgacctgtcagccgaccattcgcggcgagcatgcgcgcgggattcgaaacaactgctaactggtccattgcggtccgcacctcggtgacttaagatgggtgcttcgaactttaccttgccgcttttgcttttctgctttacacactatcttcctcctccacgcaaagagctccttgcctctttttcatctccattaacggtttcaatggccgagaagctaagcgtcctccctccccgtgacccatggcctatttcctccgctcccgctcccacggcccgtagcccgagtggtatgcgccgggcgatgagcaagagccagctccgcccacgggctatgtggtgagcttcacctcgttccatgagcgagggttcagagtgccaacgagtcgcttcatgtggacactcccgc

SEQ ID NO: 20220 - DNA, 766 bp, Zea Mays
ctttgttttggactcttttcagatgcggatatatgttggcgggttcagggtgtgggttttccagctggggtccgagatttcagttcccggggggtcgcccgaaaggtgatacaccatacagaacctgtgctcaccgcgacctgaccacgtcaattagggatcgagcggcggtctccaactccggcccacaattcgtcgcacaccgaccacccttctcgctcagctatgctccgagaacgtgcagctacgaagatcgcactcccccacttttcgtggactaagtgccgatgaacagcaccacctcaatctcaatttatttcctttgttccttaggcattaatttgtacgagagatttcttgttctgtgacagtttagagagaattgacttcctgatctaatgttgtttgggccattctgaagcgatgggaaatgctagatgtgaaggctcaatcagggatcttgttccctacctataacctgaaacacaacatgcaatgaacaaactttatttctgaaaacaattaagttacaacatgcaacgcggggccggatccatccgccagtttccaatcggacggtcacgatccaatgccacgaaacggtattccgccaccgatcccagccgttggctacgcatccaacgaccctgattcaataggcagcacttaacctaatctcagccgtgcgctaggaaatcgacggcgcccgccaactcactcccagctcgaccccgggcggtggcgcacacgcccggtgcggcggtgg

SEQ ID NO: 20221 - DNA, 1334 bp, Zea Mays
gagccatcccttgttcttgaatttggctgcgttgaaacactgcatctagattgctctcggcatgcttttctgttttcattcattcgccttagatagtcaatttcccagcctgagccttgtgatgctccatgacagccaaaatcctgtttcagaaaagaaagtgaaggtactggagtctgcattatttcctgtcttggttcatgatatctgacaccctgatcatttctgccagagcttgtggcgaaatccccatgcacatgacctgcccatgtctgatttatactacatggaacgtcccagctaccagggtcattattgatctccaatgcggatgggaatgttggatgactggaagttgtacagactgatggtaagctggcgggaaaggaacttctgattggctgtttagctcccaattcggattgcttagagaaattgcatgtgtccaccatactgctagtcctttcattgtatgttctgaaatttggagtcaactcattaatgaagtcatcatctattatattgatcccagttacagcatccacatcatactttcttggctgacaagagacaccttcactacccatattcaaccgttgatcaatcataaagacttcggggaggtcagacattgtatcctctatgtgaaagaatttccttaacttaggtggtgagaatatcttgtcattttctacacagtcaccatgcaattgagtacatggattagggaaagcaggattactaactgcaacggaaaagtcttgtgcggcacgccttttctttttcctcggagactgcagcaaagtactactgatatctgaatcaacagaagagcattcagtcattacagactttgattcacctagttcaccgaatttgcacaaagcactgaagagagaaatgctctgcggtggcaaatgatacttttcaacagcctgagtacgttgctcatgtgaccatctgaggaaatccataagactgccagaagaaagtatcatgtgtgcagacagaggactaactgaagggaatgctgtgagaaatgactcaaccagactttccgattcagttatttgtggacaaagagcctgatttatcctaacagcattcctgatgcaattgagaatgatttgatctgttgatttgggcatttctgagaagaatagctgcaaattcatgtccaggttaacagctgaagcatatagagaatcagatgcctccattacagcagaaagcaagtgattttcaccctcgaagacctgcaaaagtggaatagatgattcattgtgctgcaatataccaaaaacgagcacatatattagtaagaaaaacaagag

SEQ ID NO: 20222 - DNA, 286 bp, Zea Mays
gccctcgccacaccaccctcttgcatgctcactcgctccgcctcactcctgcacgcgcccccgagactcccccagcagttccgcccccagcatgcatgtggcccacaaccttgcccgacccctgccctcgcctaacccctccccgcgtcgtcacccgatacagataaacttccaaactcgactatggtgtaggcgcggcacaatgagactttccatggaaggcgagattcatgtccatggtatgtgcgtcccattccatatttggcagccttggcatgcacctcac

SEQ ID NO: 20223 - DNA, 383 bp, Zea Mays
ggtgaggtgcggcaccactgcggagttggattccggcgagcccaatccaccataccaccaccgcgccacagaaaaccccgcccaggtcccagcgtcctgcagtccttctcgaccagctaattctcgagcaccggcgtgtagcaagcccgactgtggtagtccttactctcctccacgaccacacacggttcccggcgacgagcatgcggtggcactcaagcacagcccaaagggtgttgtttgatgcagcctagagtgcgcaaagcccaggatttatatcctacggagagggtagagtccgcacggaaggggagagagcgatcgatccaatcctggcggcgaaatcttaggaagacgctagtggagtttgttgagatcccatg

SEQ ID NO: 20224 - DNA, 572 bp, Zea Mays
gaattggtgaaggaagtattgcctgctgcagtaacatgaagtaaagaacgatcaccaacgataatggaagaaggaacgggataccgcgaagagttggatgtgtaagaaaatgaggatcagaggtaatgtgagaggtagcacctgagtcgaagtactagttggtagactgaggctgctggagagtcatggtgctgaacgtcgaggccagcgtctgttggtcgtaggaagtccaggcgtcagagtgtagaaaccgagtggtgcagaaacaccgagggagggtggtggcaccccctgaagatgagcactatagtaggccgcaggaagggaaccctgtggctgggccattaacgcctgttgctgctgtgccaatagtgcatgctggtgttctggcgctgtcggctaaagtggaaatggcggacgaggccctggtacgatgagctagagattgtattgcgtgggccacggacaggtggaactgcctacagccggcttggagctgccgcctttgcggtcatccctgttgccacgcttaccgtcttgaccgcggctgccacgtccacccttgttggctg

SEQ ID NO: 20225 - DNA, 600 bp, Zea Mays
cgaaggcgacagtcatcaattgattttctttcttggtgtaattaccaattatttcattgcacatggtctcaatcatctccagccattcgttgcaaggtttcttgaattgtttctcaaacttaaaacgataggggagctgtacaagctcatgtttcttccccccttctttcttcttcggcattccccaaccgctggaagttggaaatgtcttgtttgccaaatattattgtactagatccctagtactaatttcggcagcaacgaccctaaactcaactgcggctacctggcatggagagccaagttgcatatggcacaagggcctggtcatcccgaagcttagtttcataggcttcatgaccatagtcatcagcttctcccttctcttcttgtctactttcacataaaaccattcattcgttcacccgattggccatttggtgcgatagccaatcactgaagcctttgtatctttcctataagcaaagttgtagcagccgaagttcttatgaataccatctgccctggccttcatctgataatgcagttcatgtacccggcaaaaagcttcggcattagcatccataccctagcttcgca

SEQ ID NO: 20226 - DNA, 715 bp, Zea Mays
agaaattgaaaatagaaaaaaagaaaaagaaaagagaagagcaatcctgcgcttgggccagatcacctcccacccagcccaaggtattccgtagcccacatctcttcttttcttttatttaatcctcttgccgcacatgaggtcagcatgacacaagtgtgacatcaagcaagcaacacatgcagtcgtatttccatgcacacgtccacttctacgtagtcgccgacatgtggacgatagaatcacgtacgaagctctgcacgggtaactggtttataggatctgatgtcaaccgcgtcttcctccctgtaacaaacccatgcatgccgtaaccacctctccgtaacagccggcccaggtggcttcctcctatagctattctcccgccgaggaccgctccagccgaataaagaatagtttcctgcgtgggtgacgtcggctgggcgtcataggtgacctcatccgtatacctttcaccgtcactgacggctgggccaccatgcattggtgttcgcttgcttcctggtcttgggcgttgatcggaacggcttgccgtaatcccggcactagcgccctgctcgccctataaactcgattgaccccaggggtttgccgtctctgttaaccagaagagaaaaaaaaccaacgagtatacgctgacgatgtattcgcgcagtcgagagagaagaaaggaagagcagagagagaacgggag

SEQ ID NO: 20227 - DNA, 701 bp, Zea Mays
gcgggacaccagcactatcggcgaaccttcaactaccggtgtcgaccgaagacgcgggggtcagggttcatggtttgcttcttctatcgtctgagttgttgtcgaccctccccttttatagaccaaggagggggtcggttacaagtggcttctcgtggaaggagttaccgtgtcggggcagaacgaagcattttacctctggtagaaacatgtccatcggtattcgctttggtcgtctgagctctctggctagactctttaagtctggttgcgtgtgggcgatgagggactcacgcgtcatcattacctttcctgtgtcgcgtcgacccctagccttcgtagcctaagcctcgacacggctcatcgtgttacgggtcttgtagatcgccaggggactcaggcttagggttgataagccataagtgtgtcgtagccctacggactcgtaggttatgagtggggttctagcctgagttcgcaggtcatgagtggaaggaggctcgactccccgtcgtggcttggcgctagacatatttaatgtggtcagtcatttatgatgggatagtcctgggccagatgcagaattcactcgagtggcttcctcttggtttgcccgaccccccatttctggctccacctcgctcgaccccgggctcggtgcctcagggttactcggaggcaggtccttccggggcagactc

SEQ ID NO: 20228 - DNA, 614 bp, Zea Mays
cggcgggggaggttcttccgatggtgtggattgcgaacgtgatgaacggggagcgcaggggattggttctgaacggcgatttctcgccatatctatgccactgcgcggatccgttcatgccgtagtccggcttcgccacaaccccgctgcaggtaagaaccttctcagcatctcctatgaccaatctgcatcgtgaaacaatgttgagatgatgggattgtgccttacaactccggtgccatggctccggtgggcgcaccaccgtggtggcactgtgcgccgctgcgcagatggcctagggtggaagaagggtgagggtcattggatcctcgatgaagggtggtgttgtggcgatagttatgaccgttggatcaggatcgcgcgatcgtgattagctgtaggacgacgttttggccgtagttcatcctggccgtggatcagtcagtggacgtatccggtggcatctcagtgtgggcggtccctaggtcgttggatgaagatctgacgaaccacaaaacatactggtttatataataagctgatctaatatgagccctcaaatgtcgatccaacagttgaaatctattcgtaccccttcggctattagaacttgc

SEQ ID NO: 20229 - DNA, 441 bp, Zea Mays
cgacaagcgctaggagaagaggcctcgtgaagaggtccatgccgctggaccacccgtctctcgtgcccgaggtgcaccccgcggaggcgagcggacactggacgacatcctcgatgcccagtgcccatatcacaaggatatgcgccacaccttgcggaactgcagagacttcaagcattccgtcgggaatggccgatccttccaacctctaccacctcccccaccgcgaggagggcccggtgaacctcgacgacctcagcagtaggaagagggaggaggtggagcattcccgcacgtcgacggagaggtcaacgtcatcttcagaggacacgggtcacaagaaaacaaaaggcaacataagctcaataaccgatagatactggtggcaaccaccagtgcccccgccccctatcggtggtcagaacacccgatcacctttac

SEQ ID NO: 20230 - DNA, 405 bp, Zea Mays
attagtatgaaaagtcggtaatttgcatcaggcttagttcttacttcggaaacaaaatgacttgtgagatctatttttttcaaaaggtgctggcagtgcatatactttttgttcgtcaacctccactaaaaggaagggaggcatatgtgaacaccaaaaatgtcctagcgaacggtccggctctgaggccgaacggtccacggtctggactatccgccatgcatagcgacatggaccgtgcgtgcgtgcgcagaattagttagggttctagatttgttgcgggattttttagctaaacctacgggattaactcgagaaccggcttgtaacaggtctaaaccttcccctttatataaatgaagggccgttgaacccccacaatcgatccaatcaactatgcttatc

SEQ ID NO: 20231 - DNA, 470 bp, Zea Mays
gccgtggtaggatagctgaggagggtgaacggttggttgttgttgatctggaatgtgcggccaagatcagaacgtgcatacctctttgacgaaattaaatcttggccgttggggcgaatccgagggatgagtatggctgatggcgtgaacatactacaaccgtggatctctgatcctgcagccatcattagatacgattcacccaattgatacgatctaatctgggcccctgaactgggatcggatggctaggatcgttagataccctttcggccgcccatcttatataaaagcccctggatttattaagtataaacccgcggtcctcccctgggtggttctgagtcttggtgtcttttgcgcagaaccccctgggtttctattaaatagtggccgcagtccaagtaactcagaaatctattaaatttaatacagaaattctttttaatgcaaaataatgtctcaaactt

SEQ ID NO: 20232 - DNA, 375 bp, Zea Mays
gagataacaaatttaatctttgctcacgtatcatgcaggccgttcaaagaatgtgtgggaatcgccaccaggctgtctcatgttctctttcacatcacagatgcaggatgcacggaagttgccccttatgcaatatgttgtctgcctttcgataactgaagctatcaaggagctgtgccgtgccaaggttaggttatagttcagtgttgtcatgtttgctgcttattgattgcattttgagtcccctgtttcctttatgctaactacctcagttgccatttcattctgcctttgtgataaaactcagggactaccagaacttgatgtgagaataaaatggcctaatgatctctatctgaaaggattaaaagttgg

SEQ ID NO: 20233 - DNA, 456 bp, Zea Mays
actcagctaatggtgctgccaaatgggaaagccccttggcaccagcaatctcccattttgccctttcctcatccacggctctaagactcatagtaacactagggctgcagccatcaaagacacatttgtttctatgttttcacaagatccaagctcccagaatgataagggaatcaagtccttttttggtgagtccattaacaatattccccaccaattcccaccagcccagatatgagccaacatccagttgaggagccaaagaatgcagaccaaatttcctaagcaacaaataccagaattccctggataatgaacaggtaacaaggagatgatcaatagtttcatcctcttgatcacatacggggcacttctcaggatgagtcagccctcttttagcaagcctatctgctgtccagactcttttttgagctaccagccaaatgaagaagcgac

SEQ ID NO: 20234 - DNA, 680 bp, Zea Mays
gcaggggaggtggaagatagaatacctgcgtccgggttggtgtggttggaggcgccagaatccgccacccagttagagaccgaggtgggtggggccaacgtcatcatggagaaggagctggtgagggactgagtgtcccacccattagtccagggcccccacatgggctgggtcggagaccccgagagcggtagaagaccttgttgaggctggggaggagccgagggtgccaccagaggtgcagcggcaaagaagacctgctgagaggcggtggggcgaggggtcgaggcacccgcagacggcccgagccacatgtgaatggtgccaatccacgggttgtagaaggatgaccattgataaccacctgaaaagccaccacggctgcccgacagtccaccgccactgcgttcgcccttgtgatcgtggccgcgagcccccccaaagccagaagcctgtcgcagagctccagagggcggtggggctggagtgctgtgaagaggaacctcccggagtcggagggggtagcccgaggtgcgccgtagagcgccgtggcgggagcggtggttgcagtggtggagaggcgaagctcctcgagaagcaagtcgttcttggcctccgcaaaggtgggaaacggcttcatgcgggtgaggatgggcgccacgcgatcgaagcgaggactc

SEQ ID NO: 20235 - DNA, 569 bp, Zea Mays
ctccctcctccctcctccctcctcccgctcttgatgatcagtttcttgagcggaaccagatcgcctagcttagtacctaccggtgttgttacactgatttgccgtaccaaatcagtcgagactctgctagatcttctgttacactgatttgaaccctacgaacatgactgggtacgtcaccttctgcaagcataatttaatatgcccggggttttctattcagttttttaaatcagcctgtcattgatatttcgtcggcgcatcgcggcatcggtggtaagctggaggcttgcgaccgcagcttcggtgtggagtgctcgaggtcaatgcacagctttcttcaagtgttgggccgagcatcataatgcatacactatagcttagtgttgagctcatgaaagaaaagtattcatcattgctgtgtgggagcatttgtctaaagttttttcgtgtgcgtggtttgaaatcgtgtacagggagaggaggggggccaggtcggcagggccacgtggtccgctctgattggcccgtgtagtttgactttagttatttaggttgcgagatctatg

SEQ ID NO: 20236 - DNA, 581 bp, Zea Mays
agtgtagtttgggattgccatgaactttgcgtaacatggtcgctcaagaatggtgtgataggtcccctaaaacccgaccactttgaaggtgagggtcccggtcctgatgttggccagcgtcccgaatgtaccgggaggtcgatccgcccgagcggggttgcccaccttcctggtatgaccccacgaaagggcccctgtcggtcaaaggtggtcccggtttaagcccatggcatcgagtgtagaagagtaaaggatgttgagcctgctcccaccactcattactaccttcttcagtcataccgaccccatgatgggactgacaatgagcgggtatcactcaggttaggggatatgatctaggtgagtggcgcaatcgtaggtgatggtgtggtcagaccagtcgaggaaaaccagagacgtttgtcaggcccagaatattttgcgttgttccgacttctgatgtcttcttggcgcgtagtaatctgaccctctgaagatcagcaggcatccggtctcattcgggaaggcgactcctcccttctctcgcttgtcacccttcctaggtttcaccccttttcgag

SEQ ID NO: 20237 - DNA, 392 bp, Zea Mays
caaggagatgggtgcgcgtatgatgcagctactgaacgccaacgtctcggaattaggccttgccgagctgctggagttcctcgagtgtctggaggcagtggatggtgtcgtcaacaacgagacagcaaacaagacgacgacgacgcttgatcttgaagccaccaccaccaccagcggcggcagcagccaaactcgtcaagggttagtgccacagccacctatggagacggtggtagcaccggcaccggcagcggcagacctgcagtaccagctgcttggtggtgagcacagcggtgccgccgatcctatggcgttcgcagctcctactactagttggagcagtgaattcgtcgttgatggattcgaagtcgacgaccccatgcatggtggtg

SEQ ID NO: 20238 - DNA, 554 bp, Zea Mays
tttgatctcaaccacaaccacaatggtctgaattcccatttgatacaagtaatttctgtatacacttctcacatatcagccactatgcctcacaattaacatataaacttgtgtaatctaactaattaacatatattctctgaagattacagcaggaacacccttttgcttggacgaactgccttgtgtggttccaaaatataaattaggggcacatcggatgagggggatgttgttctagggatgagggaagatcattgcagctaccacttctaacaattctgggccactgcattacaattctggacatgctgcctttttgaattggcacgaatgcatctagtcggtgcctctaggattattatcattggtaggaggagcagttcaaccagcgccctactacatgatttactacatgattctggatgcaaaggaaagaccgtcggagatatctgaacaaaagaatcaggaagggggaggaaaacgagctcacctggaagggacgtgatgggggatgcccgcccttgctctgtttgacctaaaaattatagagg

SEQ ID NO: 20239 - DNA, 408 bp, Zea Mays
ggtaacccgagtggtgtctcgcgcatcgtcgactttggagggcagccttcaatgccgagacgctggtctgagtcgctcaactcccatggaggcgatggaggagccctcagccttagaggtggttactgcagaagacccaggcctcgagggtggtgctggtagttacctagccccgagggtattgccggtagtgatccggctctggtgggtagcgcaaactgcaacctagcccccgagggtgttcaggtgggctctccctcccacacctccatggacatccatgttgggtcgtccccaccttggtccgatggggcgacggcggtacatgcttccacagtttttaacggacaagtcgccttggaggtcggcgagctagattcaaggagcctgatgtctgctagcagggct

SEQ ID NO: 20240 - DNA, 879 bp, Zea Mays
taagcttccaggtttctatccttcttgtgtcgccctttcggcgactaacaccatgcttattgcttctgcagctgccacaatgtacaagtacaacggttcccctagctccggagcaaccaggatcggcagcgaagctatgtgctgcttcaattcttgaaaggcttgttccgcctcttcggtccaggcaaatgggcgtgatttccgtaggagcttgaagaagggcagtgccccctcagctaacctcgaaatgaagcggctaagggctgccagtgaccccgtaagcttctggatgtccttaatacgggtgggaggcctcattacctcaatagccttgattttctccgggttagcttcaatgccccggtacgaaaccaggaacccccagcaacttccctgcggagacaccgaagatgcatttctccgggtttagcttggtgcgggttgcccgcagcttgccgaaaaccagggtcaggtcttccactatagtcgacccctccctagtcttgaccacgatgtcattgacgtagatctccaccttgtcccggatcaggtccccgaaggtcttactcatcgcccgaacaaatgttggcaaggcgtttctcagaccatagggcattacaacataatagtatattccatccactgtcacaaaagcggtatgcctcctatcctccttagacatccggatctgatggaaactagagtaggcgtccaagaaggacaaaaggtcgcaccccgaggtagagtctatgatctgatctatacgcgacagagaatacgggtccttgggacatgccttattcaggctggtgtagtcgatgcacatccgaagcttcccgtttgcctttggcacgatgactgggttggccagccacacgg

SEQ ID NO: 20241 - DNA, 397 bp, Zea Mays
ctgtccaagagagccaattgaacatgcaaagctgtaaccatggcatgaaatgtagctgttgcctgttgctattgctacctaattcttacttaaccaacatacttcccacttccagttgtgctattgctacctaattcttacttaaccaacatacttcccacttccagttgtgctattgctacctaattcttacttaaccaacatactttccacctccagttgtgctattgctacccatattcactacaatgtttgactacttatccaaaggacaagtatcaaatgaaacttcaaagttctaacagaacatcaaagctggcactctttattattagggaacataacaacagagaatgtcccggactagtggtgcataggttggcatccatacaatcag

SEQ ID NO: 20242 - DNA, 574 bp, Zea Mays
gaacaagatcaggttcagtgtatctcactgctggtgaattggcaccacgatcctcgctcgcggtatgattcgtgtgcctggtgtgcggataacggtcgccagtgaaaagatcttgcgcagggatgaagtcggggcactgtggccgccctgtcgccgtacccacttgcgctacgacgtggccagacgatcatcaccgtggagatcgccattcaccatgattgtgccacgctgtagtcgattcaccacgtcgtcgcaagatgtatggactcggtagtgaccgtcgtagatagttagcctgtgagtgccacgttagcggcctccggtgactcctcccccttctcaccgtgagcgcttccccgtccaaattcaccctcctcgcagtcatcctctataaattgatgcatcgacatgttccatctacttgttacgaacccagagcaccagccctcgcctccgatcatccaccgtagcgaccaattttgttcccccccccccccaaatccactctccgcgccaccgtaagtcacctcgtcgtggtcagccgtttactggtccgctctcaccctcgttatcc

SEQ ID NO: 20243 - DNA, 301 bp, Zea Mays
ccttaggcggctcctgcgatagacttcggatttttgcgcgtttgtgcttggtccggctgcaccttttaggcgacttctgcgcggatagtcttcgcgatggacttcggatttttgcgcacttgttgtgctaagtccggctgcacccttaggcgacttctgcgcggattggtcgcacgcgagggtggctagcgcttagcctcgcggtgacttcgaattggtcgaatgccgaagaccgttgttgcggtcttttttcgacatgcttttgcgggggatttttctcacatatattacatggctccgc

SEQ ID NO: 20244 - DNA, 685 bp, Zea Mays
ccggcgagctagaccggccggagaagaccaagaccggtgctcagcttcggactaaaccaaatccatgacctaaagagtatttcccctaacttaattgcactaatgaccaactaatgagctctagccacgatgaccgagagcatggcggacggatgaaggtgttcccggcgatctaaggctactccgtgcaaattgagggttcagtaagcatcacagagctgtgagattgctcaaacgaggaagcagaggacaggggctgacctgtggagggctgaccacagtgaacttagtttcacggtgttcttcgactgatttgggggaaatcccaaattcgagctcactggtggacgattgctagcgattctcggtggctgggtgggtgatgatgttgcgaagctagcgggggcttcaatttatagggctcaacggcggtgaccgggaatttgggcgctgacgcgcggcggtcggaagtgaagaagaacacgggtgcagtgaatacgtgttcaacgtcgtggcagtaactccggtggtcgacgggaagcttagagggagccacggcgatgcggtggcgaggttgggacacgcggcgggcaacggcgaaggtttgacaacggtgagaaccttatccacgggcggtgagcaagggggaagggattacggctagccggagtggcgtccaacccac

SEQ ID NO: 20245 - DNA, 398 bp, Zea Mays
gattcagagccgtccgatccgattcggatggcccggattaaatcgtggttttaaccgaacgtgatgtggttcgtcagatctccatccaacgacccacattataatctgaaccggtgtatgcgattgaccacccgatccaataccaagggtctagatttaaagtaacggaggggatccctgtcgtccgttccaaatcaacgatccatatccagttcgatcccgatcttatcacgaccctcaattctcgatccaaaggccagggcatccccacacgtccccctttgatcacacccgttcaaacctaatcaaacgaccaaaagtttgtctcctacccgatggtgagctacggcgagcagagctctgcacgcggcggcggtgctgccggagtacgccccaac

SEQ ID NO: 20246 - DNA, 373 bp, Zea Mays
gtataccttaacatccacaggaattgcatctgaaagtgcttgtaccctcaggtacaagggatgcaaagcaaacacagacagggagctgtaattcacacatgaggggcactgctactgtttagataacgtccttactgatttcaagaaaaaccaccattacgagcaggaaacctttggtattgaatattagtcatacctgtacggataagaatcccaccacatcccatgaactgaagtatcgttgattggaaggagctgaacaagatggaagcccgaattgactgcccagtcaacaagaagtttaagatctagaaattctccaacgccaaggtcctcatctgatctgattgaaaacatgggtacagcaacacct

SEQ ID NO: 20247 - DNA, 306 bp, Zea Mays
gacatcgtggcgcatctgctacaccgagctttccacgctctccaccgagaggtcatttcaaattcaaccgacgaatattcatcccctcacgtagccctggcgacgacggtccagctggtaaaactctgctcggtcggtcacacgcaacgcaacgtccatccatctcctcctcctctcatggcaatggtctatctctgcacggcgctggcattggcgcattgctgcaccatcgatgcagagcgtacggcaaccgcacatggttaggcatgcagcgcgtgctgccgcggatgtggagcgagccccacg

SEQ ID NO: 20248 - DNA, 784 bp, Zea Mays
acaaaagtccaggggctagcttgaaagattccccagactcagtggacatcgcataggatggcgggtttaatctcaataaagttaggggctcttttgtaagatagctgtagcaaaggggtatgattaaacatcagccacccgatcaaaagacgagggcccagattagatcgcacatcaccgcgaaccggtacggcacgggatcccttggattataaatgaacgatcaagattttatgaggcttgatctgctctgaaccgcacgatcaagatctaaaggcacaaatcagacagcgcgaagggttacgtcgtgacctaatctcagccgtggacacaccgatcaacggcccatgtcgaacacctacccatcggcacgagcctggcggcgctgcccgccttccacggcagaccgtggctggcggaagcccggtttgcacctcagtgcaccaattaccaaattgacaggcactatactatgctaaagttgcaacgaacaaataggagatcttaccgtgagcaaacaacgacacaggaagcccgaccgcgacgctatgcagcgcagcagcgaagtctcacaacgatgagcaatcgctggtgctccgtgatccaatcgggtatggcgagactatgagcaactcctagggaacgagtcgaatcccccacaacgaaggtcgagaccccaccgagagcgtatgcccggttcgacggtggtggatctcgttcctctacatcgatgacgctagggcttggttgggtgaacagggcgctacaacgcggtataaataac

SEQ ID NO: 20249 - DNA, 869 bp, Zea Mays
aacctttctatggaatgctatagttagtcatctaagagcaagagagaaaattgttttaacagtggcttcatctggggttgcctcgcttttgcttccaggaggatgcactgcacattcacgttttaaaattccatgtgaactacacgaaaccatcacctgcaacattaaacgaggaacaatgctagccgagttaatcaaatcaacttcattgattatttgggatgaagctttaatgactcatagatttgcttttgaggctttggacaaaactttccgtgaccttctagctccacattttgaacaagctaaaaaaacaccttttggtggaaaggtagtagttcttggaggtgatgcacgacaaatattgcctgttatagaaggtggcacacgctcccaaattattgatgcaactgtctctaactcttatttatggggttctgttactgttataagtctgactcaaaacatgaggctcctctcaagtagcacatctattgaaacaaaaaaggaaattgctgaattcagtaaatggttgcttgatattggtgaaggaaatgtaccagcaacaaaaagaaatgctgaaactgaaagttcctggatacagttgcccaaagatattttattacttcctcaaactggtaatatagaatgtattgtcgactcaacatatccagatttgcagcaaagatatacagatattgaatatcttaaggaaagagctatactaagcactacaaatgaaactgttgatgctctaaatgaatttattgtctcttctattcctggaaatacacatgaatatttcagttgtgataaaattggaaagaccccatacagccatgaatcctatgacctattatatcccattg

SEQ ID NO: 20250 - DNA, 517 bp, Zea Mays
agagtgtggctgaccttgctccaaatctgatcctagtagtcccaaagggagtaattaagaggcgtacattgagccaggcattatccaacagaggctgggtggctgatatcaagggcgctctaacagttcaggttttgatagaattcctcaaagtctgggagcttgttgagggtatagttctacatcctaatgtcccagatcatttttcttggaagttttcatcttcaggtcagtatagcagcaaatctacatacaatatgatgttcattggctccatcaaattcctagcttggaggaggatctggaaaacttgggcccctgcaaactgcaagttcttcatttggttggccattaataatcgatgttggacttcagatcaactggccaaacgtgggctaccgcatcaggccgcttgtcccctttgtgatcaagatgtggaaaccattaaccacattctagtatcctgtgtgtttgctagggaggtatggagcttagttcttaacaggatcatcccggc

SEQ ID NO: 20251 - DNA, 981 bp, Zea Mays
ggagcaaagttatccaacccaaactttctgagcagattataccagaaaatccttgcaaacacacatgagaccagcaggtgattaatagattcaggttcttggtcacataatggacaactgcttggatgagtgagccccctctttgccaatctgtcagcagtctagcacctgttatgggccaccagccagaggaagaaatgacattttgatggagcccaagttttctagaccctcttatagtggccaaatgtgcaggatcccaggaagagacccttgtaagctgctttcgccaaatactttccatctcgagctacactaaagatatgtctgtcttcaatgagagggtgcagctcaattttggagagatagtcccagagctttaagtaatctgccaaaactccaatagtaagaccacctctaatgtcagatatccatcttctgtttaacaaggcctcatgaattgttctactttttgttatcttctttgggattatagagtatagtctaggggcaatggtcgagatgcttttactctgcagccaattatcaaaccagaaaagggtactatacccatttcccacctccgagacaaggaccttactaaagaactctctggctttacttggaacctgaataggaagccatgtccaaggtcttctagagtcggttttttgaagccacagccatcgcatccggagggcccatccaagctctgggaggcttgatattcccagacctccaagctgaagaggacgacacaccttgccccaagccaccaaacagtgccccctttagcttcctttcttcctctccaaagaaatccctttcttattttatcaatagcatcaagggcccaatggggtatataaattgccattgcaagatacacagtcatacctgtaagaacatgttgcactaggattctcctgcctgctctggtcatcaaatcagctttccaattaggaagttggtcagcaaatc

SEQ ID NO: 20252 - DNA, 598 bp, Zea Mays
atggacaaggacaaggggcctaaacttaacgacgatgagtgtgtctctcaaatggaattgaaggagatgatgcgcgcgatgactgaagcttttaaaaaataccaggactctgcctcgacatcatatgagcagcttgatcgacgagttgctgaacttgttacacgcatggacgtactggaggctggtcccccaccaccaactccagccccagctcactctcctgtggacgacgacgacgatgacgacgatgtttatgcaccgctgcgacaacgcctcgcacgtaatcgacaaggtatgggaggtaatggtagacgtcgtcatcataatcctgaaccagaccatgatccatttgctaagattaagttttctattccaccgttcatgggttcttatgatgctgaagcttacttagactgggagatgacggtagaacaaaaatttaattcccatcttgttcctgagcagcatagggttagacaagccactagtgaatttagagattttgctatcatttggtggaatgaacttgttaacacacgtgttgcaccacaaacatggaatgtgttaaaagaggagatgcgagctcgctttgttcccc

SEQ ID NO: 20253 - DNA, 574 bp, Zea Mays
taatgcagcaagtttattttcttctgccttatgtccattagctgttgtcttacgatgttccccatatggtgtaaacccacgacttacagggactgctactgaatttactcccacagaattaggttttcctggtggctttgaatacccactcatctccacccttctattttccctctttccagtgtgcatcaacacatcctcttgcaacacggctagagaacaggcagtgtccaaatcaactggacgttgaatcgccacaactgacttaatttcatcctttagcccatccacaaaccgagcagtaatcataggtggggttaactgtccttcatgtgctagcaactgatgcattaaaatgtcaaactgcttaatatactctgctacaatattgttttggtaaatatgataaaactgtcgaatgagcatgctatgctgatctctaccaaaccgattgttcaaatgcaaacaaaattcctcccaattcatgcttctaatatgatgttccatagattgaagccaaaatactgctgggccctcgaagtacattattacaaatctaatccacatatctcta

SEQ ID NO: 20254 - DNA, 523 bp, Zea Mays
ctggattcagctggttctcttctgattttggtcaaatggtctggtatgcctacatccttggcgacatgggaagattatacagctcttcatcaggcatttctaggtgcgcctgcttggggtcaagcaggtttccttccaggggggaatgtcagcactaccattactacactgggtgatcaaatgtcaaaggaagcaagctgtcaggctcctgcggacaaggaagatggtggaaagactacagaaccaaagaaacctgggccacgtaaaagtgaacgggcccgacgggctaatgtaaggcttagtgggccagaatggcgctaagtatcttcttgcttaccaagtatatgtaatgcgagtgtggagagagagggtaacaagaaaacaaacaaaaacttgtatctgaagaaaactcacctctgctcttcctggcggctgtctctgttcttcccctaccattctacccttctctacacatactctaatagaggacgagaccgatatgacctctcctccgacgcttgag

SEQ ID NO: 20255 - DNA, 506 bp, Zea Mays
catttgttgcttctggtatgtggcacgaacagccgtaatctatgagccatatgttctccaggcctccgtcctgcatcaatagaatgacacgaggtgagaaaatggcacaacactagggttaggataataagaataatactagtgctacaacatctacccataaaaggtgttaggagattcaccaaccatccccgatcctaaagggaagcgatcatcacaagaaggaaattgtggtccgctggggaagtaagaaccaaagcctctgccacggggtccttggccatatgggacatgaccagcactttgccaggcacgaccaccacatggtctcactgtttgaggcctagcagcaagaggcaaagcacctctaggcctcgcatgacgtcttcgaataggaagatcatgaacaccatgagagaggcggttcatgttctttctgcttagatcagaaacccatcgctcatctctcttcctcctaaagtaaaaagcagccagatgcccatccc

SEQ ID NO: 20256 - DNA, 597 bp, Zea Mays
tgtgaggatagccacaatttcggtggctgccttttctaatccctccaagactttcctcagcctcttgagtgtgcccacggtgagtaaaattctttcacagtcttacccacgacaccagcatgtttaacggatttgacaaacttatgcttcagtttagcagaagaggagccccagtcactgaccttatgatcctttgccttctctctaagctcatcgtagtgaagctcatctataacatcctctgcctcctcaactgcatccctgaactgccacagccaaagatcaagggcagagctttgttccttgatgtattcagggtcaacgatatcaaatacaacctggaccttcttcactgactgcagcaccctacccttgacatcttccaagccatcagccttccagtagtcagtcaggcaggtgaaagctttgttgatccaaaaggagatggttgcatttgccaccgagctcccggccaacttcccagcgaacatgattgtggcggcggcggccatgactttgtgcttttgtgagggaagatatctgaggagagatcaaagcatctgaaagttttgcatgtccagaagaagcactgcagat

SEQ ID NO: 20257 - DNA, 1096 bp, Zea Mays
ggaataaataaaataaaaagaaaagaggaaaagtaaagctaaaatagtaacttgggctaaaaccgccaggtcggcccacttcaacattttccctgtgcggctcatttaaccctacgcgcgctgccggggggagaatacctgcgccgacacgtgggtcccactggagtgccgcaccagcctggcgtgttgggcccacttggcggccgtttccctccgcgcccacgacgtgaactccccgcttcactgagcatcgggtcccactcccacccatctacgcgtcttccacctccgttcgaatcggaatcgctgtcacaaccactcctccgcggatccagctgatgccaacgactgcgccgacttcgccggtaccccgcctgggctgcgcgtataaatgcggacgcctaaccgtggaaccctaaagccccacgaagccagccacccccttctcgtagccgcgcaaacaagcccgtgagagaaagccaccgtccgccatcgtcgccccttaccttacctgcaccgacgtttggtggctggggttgggtcttgggcgttctgcagcgtgtgtggatcgtttgtgtggggtgccaagcgtggggatcaacccgagcccctggaatttcctcgctggtgttagtcgagccgccgcactcggtcgcgaccgtggccgggctttcccttgacttgtcgaccggtaatattcctattcctgagttctcctaatctagttcaacgattacatcggatttgggttggattgtggtactaggcaccggtaattgctcaatggagcaatttctccccgccgcgggtgcaccgtgccgtgggccggcttcatcccataacctaggccaattagtagtggctcatcggattcgccgcgatggtctctctatcaccgcatggacgcattggattttgggttcgggtgcgtgatttgggggttcccggcgagaccgccgccgcgcggtgtgcgcacgccgccgccctgggaaaacagaggtaggtgatggcccctggtccgttggatcgggcgtatacggtcaggattagaagcggacgtaattggctcgggtaccattgatctcgaatctaacgg

SEQ ID NO: 20258 - DNA, 467 bp, Zea Mays
gccccgccgacgccgatcgatttcccggcggatgatgatactaggccgagcaggatacgggccatacgtacgtacggcccacaaaagaaacgtagaatggctattcgactcgcgtacacccgtaaaccgcggaagaactagcttcgccatccaatccaagtcacaactcaggtcaggtcgtcaggagtcgtccttgaaagggcatcagccagccgcagctgtgtgtgtggataagacgagagctctgcagcaacgtgttggtagttttgtgaacggcagtcacggtcgaatctaaacctctagccgactagccgaggcacagaatcttacccgtgttctggtcttctggaccgcgggcaagtcggcccggtccttgcctccttggcgcgttgcgtctcggcattcgctgttccccattcgcctcctcccatcgtcctccacccccaccccactcgcgtcgcgtctgc

SEQ ID NO: 20259 - DNA, 546 bp, Zea Mays
ctttggctgtggggtaggcgcttgtggccacgccccctgggattcgacgccagtgacgagggaatcgctagccggacttgcggcaccgccattgtgccacctccttccgtggtctgacaccgtcatacgcgtaatcgaggtgatgatctctcctttgtgttcgcctggcttctcgggtcgcgtagcacttgtcacgtcgggatttgtgtagagatggggggttaggtgttgcgggcggggcaagtccaccgtcacggtgctcggccggctttggctgagtgtcgcgaggaggaagacagggtagcggccgtagatctgggtatgggcgatggagatctagcgctgtgtcgatgggaagcgtggtccgttgatttttctgttgacggctaagattagaccgcaggaataccgattcgcggtgatgatctggtacgtccgattccgatcgagcgagcgagactcagtttaggttttttaaatctgtgccgttgatatccgatcgtgcagtgatcgtcgcataccagttcacgggggctacgatttaat

SEQ ID NO: 20260 - DNA, 740 bp, Zea Mays
ctctttcttctcaggtcgtaacaaacgcgtgacaaagccagagaccgaatcctcgtaatccccgctaggattagcactggtcggactcaggccttgggtataaaatccagtcgaagccgagaccgcctcctcctccatctcttgcgccctaaaccaaagaactttcgcggtgcgcagagaacaatggaggattgtgggttgccgtattgtgcggagtcgtccgtcaccgctgtgggccggaatttctcaccggtgcaaatcctcaccctcaaatccgccgtacgccgtggccaattcagggaggtacagcagtcgtggtgaccccaattgctcgccggagctcggcggatgtctctggatcgcaccgtgtcgtggatggggtctccgcgctgttcaaaccatcggtaagattgtccctgtcacgctcatcatgaccccctgctacaattgtactcgtcggatcagggtttggggcactaacgcagctgattggtcgggccacccattgccgccaccatggttgggggcgcctcgtcgcttggtggtcgtcgttagtgtgggtgatgtgcggcgaatcgtgcgccgtccgatccactttggatgggcgagattagatgtagggatcgtttttggcgagtaagttagaaccgttgagatcttgtatcgggcggatgtggttagtttgagtcttataaaatccagaccatgggatcttgatctcgcggctgatggcgcgtacc

SEQ ID NO: 20261 - DNA, 440 bp, Zea Mays
gaactactcccatcttccctgtttcaatctccgcggcgcgtaggaccgtaggaatcggagtttaacgcgtgggctgtggggccggggacctctggcaatggcgccgtcgtggtccagagggggcgccaccgctcggcggggttgaggaccggcgtgatagtggaccgttggatgcggggtgtatggtctagattagatgttggcgtaccgattgggggaagggcggtggatcgtccgatcgggatcggatgaggatcagtcctttgggcttcattaaatccggagcgttggatccgaatccaggggccctcgtagtataccgattcgtgctggtcgtgggtctaatccgggccagtcgtttctgatcgtgcggtcggaactggccgatacccctttggctcgcgcagtttgcaattaaacccctgcactttacataatcc

SEQ ID NO: 20262 - DNA, 620 bp, Zea Mays
cccatccacctcaaccaaccttccaccgtcaacctcagccttgctaccacccacatctaccatgcccatacccatccatcagatacccttcccacactccccatcaccaatcccaggctttaccgaaccccactataccgcttacccaccgcagcaaaaccctcccaaccagcaccaccacaaccttccctttcccacattcgacggcaaagaggatcatgttggctggttgtcccgctgtgagagcttcttctacaatcaagcgacgccagaggtggataaagtatggatggccacgtactatctcacgagcgctgcacagctgtggtccgtcatgctacggcgcgacgagcccacactacactggccatgcttcaagacgttgtgccagcaatgttttgggcctcctctgagcacgaacacattgggcgaggtggcacgcctgccgttccgctccacggtggaggactaccaagatcgattcctagctctcctgtgccacacggagcccatgccgctgccgcaccaacaggcccaactattcaccgcgggactgccatggcatctccgggtggacgtcgaactgtgtgtgcccggcgacctgcaacaggccatggccc

SEQ ID NO: 20263 - DNA, 320 bp, Zea Mays
ggcgtcattgtggtgagatggagagtggtcgtcttcgtgtggacgggactggtaagcgggaattgttgtcctcgccggctggggctagtgtgggtgaaggggagctgcaaaatctttttgagggtgaggaattgaggataatgctgttcaactacagagagatgggtatcatcccgaaggttgagccaatgtaatatgtgatgccctcgctgtgtgtatgaaccataattttgtatgatgaagctgcgtgccttcgttgatcaggtcgcgcccgtaggcggcttctgtatggggtcttttggaaaagacttcgattttgc

SEQ ID NO: 20264 - DNA, 454 bp, Zea Mays
tcgtggccggtgggtcaaaaccttcattttcttgccctttggcaaagcagtggtggccgaagcggcaatttttctcttttttccttaccttcgcaatgggtagcagtaatcagggtatatgaagccaattgcatcaaaaaccctgttcaatcttttgttgccccaacccccgaagaccgaggataaagcatcatcttcggctctggtatatgccccaagtaactcgtcgctaatagcctcaatacttttcagccaattgtcatttggctcataaaaccggtccctgaatctgaaggtatatttcagtcgaactaatccacctttggtggacctggcagcagtatccttcggcatctcctagctatctacaagtggccacactctataggctatgtgctcttggattatgtctcttgtgccaatgaaagcacaaacattgctgaaagccttttgg

SEQ ID NO: 20265 - DNA, 751 bp, Zea Mays
catgaaaagagatttttatcctataagatctccattggtctccttccaccgaagaccctacatctgtcatcggctgtcccaccaccacctcctcctccatcgccgtcgggcagggaacctgatgatgatgaccctgatgatcaagacccccagcaacgacggtgatactctgacgatctgcggcggcctatccagctgcgtttgggcccaagcctacctttaggccatgcacatgcaatgaatgtgcctggggcaccccagtagttgaggagacaactggggggcactaggtgtagttattgttgaggatgggagccgaggagaaccttgggcagggagcatggatttttcctcagtcactattatgggcgggagctgaggagagccttggggagggagcttggtttttgcctcttcctgatgctgctggtgtgaaggcattgggagggataactcatactcctagtactcagttgggtgggctgcttggctaggccatttcttctccgccctagggaaaggttttcttagggacgctggagagtttgtgccatggctcgccccaccaggatccttatgatgaaacattaacctttgatgggtcgctgggctcgcttggtccatcttcaccccatcacaattccttggatgggctgctggagatggccaacctaaactcaccccatcatctctctctaattttaaaggacactatgaaagggacgctaggcctgaataggctctcttcgcc

SEQ ID NO: 20266 - DNA, 655 bp, Zea Mays
atcaaaagaatttcatactatagtatatatgaccaaaatacatgaacatttgcattccatacacattcacttcttttgttgccccttgcctgcacacgtcttgtcacagcattccttagagcgtaagagctaatatagttcgctggcacattgtctttcttgttgtttgtgtctggagtacaaacattgttttcacttcttggtgttggtgcaagaggatcagctgggatgagttcaggagtttcagttgggatcactaaaggaggatcgactagagtgatgctttctcggttggcctgcattaaacaattgatcaaacaatttatgttgaagaagtttccaatagcaatggtggtaaaagatacaaatatcaaattttatacctgttgtgctgcagtaagggcaacaaccatttcgttcctcatttcttctctaagtacttgcctttttctttcttcttcttgtagtgcttgcattttttcttgcactattctttcccattctgcaacctcactcgcaagtttttcatttaatagttggacctgggtttcgagttcaatgttcttttggttggttgcagccgttgcacgagcttgtcgaggaattttgaatccatcacttgacttcttgttggatatcttgataggtacccatg

SEQ ID NO: 20267 - DNA, 599 bp, Zea Mays
gtccatagtgtgatattttgcaggggtgtggccaatggaatgtttgttgtccagttcattcttatctcaatcctagcacacaagtatttcctttgttcccatactgcagacatcaaacataactaataattactcactgctcactaattcacaacagtccaaactagatatttttagaggagaaaagctcctagcacacgaattatgcacttcctccatatctccatcactctctcaatctctaccaccagatgaaactcagcatggagagaagatattttctgcaccccagtctgttccagattcagttatctgaaccattcacaccactacctctaaatcagtacaaccttgatatttcctgtagggagttgaggtctctaaaacttggttatgtacttcatccatgtcttcatcccaacacacaagcaaagcacagggagagaggtgatcttcttcagtgatcccattaaacactgaaaccaacttcatatgtcctgctgcttcattcctctcctccatattcattccctggcatctcacaattcccctcacaacagacctaccatgcttagtagaaattattctctaaacatagc

SEQ ID NO: 20268 - DNA, 850 bp, Zea Mays
acgtagacataaaaatctagagctaaaacaactactattttgggatggagggagtattagaaaatattaatattcatagtttatatgtaatacaataagatagatctttggatatatttttaggataagcttatttggagatatatttagaacagatgcttgcgtcacttgccactatttttggtctagtgtgagcggaccagaattaaagcagctcgctagctgacaaaagttgaaggactgaagaaggctatacccacagtgctttaaatgaggtggcagcagcacaatggaaccagacaaaactgaaattgggttcgcatttatttcgctggagaattctcagaagaggagaagcactcagcactcagcagtactggccgtacctcggaggagagcccgtgaccattggcggtaccgcggacgatccattggtggttgccactgaacgcagcacggcctacggtcctgccaaaacaaaaaacacaggcgcatcgcgttctaaacaagagagacgatggccaaaccaagaaatcgctgcggctgcttttgcttacccttgtccgacgacatggacctgcgacgccataacgctgtgaacaagcgagcagatggtgttagcagcaggaacagagcacccggcgtcgctgggcagagattcggaaggctcagatccgacaggacatgacgtgtggccacagtagccgtcctcctgcaccaaatgcctgtgcatttccagggggggaaatgagacagaggaaccataaccatgaggcgatgaggagtatgaaatttggaggaaattgttcggcttttttagctcagatattcccatcttcgaaacttcgag

SEQ ID NO: 20269 - DNA, 691 bp, Zea Mays
ccacctcacaatgattgtagccttagttgcgcctgccaagatcttcgatgtagccaccgcaacgtcaccggaggcagccacctcagcaacctctttgccaccatcgaccgcgacatagaacctcgccgtgggtcagccgtagacccgtgccccgccttcgcttgggtcacaaccagttggctagacctcgcgtctgcatcaacatccattagtgaaaaagacttgaaacaagcacgcacacataaagacatgaataatgtcacttacccccgaccgcctgccgagtatgggcatcgaactcaacaaccccttcgatctcgtagtcctcaacagatacattgaggactgctcctccactagccacgccgacatccgccgccttcgtcggctgcacaacagccgctacggtcggcatcgtctcagtagcagctgcatccttccccctagactttgacccgttggtcgtggtcttgtggagcgccttcgtctcacggtgaggttctaccagccagagcgaagccttcctcttcttcgaggactcttttcgatccttgtccatcaaagcttccacaaaagcaccaatatttcgctaataagggaacaatctaaaacaccaggccagataagacataaggtagcccatgcgccaaaagccttgggaatggggtcatccttatgccactcacccccg

SEQ ID NO: 20270 - DNA, 499 bp, Zea Mays
tgctgcgtggggagggacagaggagggcgccggcacttatgcgcatgcacacatggacattagttccattttatgcgcacgcacgacacaaaggtgcgggcagggtcaagaggagaggcggttttggaaaggatgattatgacgtgtggggccgatagatcaatgaaacggttgagcaagggggtatgcttgtgctgctgacgggcgggactcaagtcaggaacagtttcaggtgatttcgtgcgcgcgacatggcacacaaccgagctgaaccgggagtgaggagttgtcgcgcgaggatgaaaagagaggtggttcacgatgataaggtgtgtgtatatatatagaaagaagagggcgcgaaagtcagttgcacgatttcaccacggctcgcgatgggaggcaagacgaggagaggctgttgaggctttgtccaagtcagacgcgtgcacgcgaaatagacaacttttagagtagataaagctgacacttgggtcct

SEQ ID NO: 20271 - DNA, 625 bp, Zea Mays
gtcgggtacacgcactaatttggaccgaacaggggtggaagagtgagtcgacgtgagtgtgcgcttggaggtgttccacggcggtgagatgatgtctcgatgcccgaacatggtagcgctcaatcggttgggccgatgagcaacgttaacagtcaaggatgctaaaacatggcatagaaggggatgaacggacctgtagatggctagccacggcgaggtatcttacggcggcgcggctcaccgaattgggggaaaactgaaattctcgggctatgatggctaatcaggggcgagaagtggtgctctggcttcgtaacaagctagcggagcaggcggggcgtcaatttatagtgaccagaagcggtggctctgaattttggatgagagcgggactcatttccccggcgagataattactgagatccactgtggagcgcatgtgttcaccgggtgacggtcacgacctaggggatgccacgaccacgacaatacggtgaatcaggcgactacatgtctttcactgcgatcacgacgaacaccggcggcgatatttcactgaccgcgtggcaagtgggcacggcggtgatccagcttaggcctatgttcacctcacccaagatctttt

SEQ ID NO: 20272 - DNA, 721 bp, Zea Mays
gagttgtgcaagttgaacatggaagttgtttcctcaggtaccttgaattatatctcagtggagcccactctacatgagtagataatcatggcatagattggtgacaagggggttcaagtcattaaagagatgctcggacaaaaggtggataagtacagatgcttctgtcaggatagcaagggagttctatggtttgaagaccgattggtggttcctaaaaatccagaactcaggaagaaaatattggatgaagctcatctttccaaattttccatgcaccccggtagtaacaagatgtatcatgatttcaaacccttgtattggtggaccagaatgaagagggaaattgctaagtatgtatctgaatgcgacacttgccaaagaatcaaggctagccatttgaaggtagcgggtaccttacagcctcttcccattccatcttggaaatgggaggacctcagcatggattttattgtgggtttgcccaacacctcccgacaccacgattctatttgggtcattgtggacaggctaactaagacagctcatttcttgccagtacatactacccacagaacagaaaagtatgtagaaatctatattgaccagatagtgtgtttgcatggaataccaaggactatcgtgtcagacagaggagcaccgttcgtagcacgtttctgggagcaactgcaagagtcacttggaacccatgtgataagaa

SEQ ID NO: 20273 - DNA, 1109 bp, Zea Mays
tgcaactgcagtgattttgggcatgaattcaagcaggattgagcaagaatttgcttagggattctataacaatattgtagctagatcttagagctaaaactttgctaaagggtgatgatcatgttactgcacaaaatcgggagtaaacagccctgcaaatcgctctttcaggtgactaaatgggctttcccatggtacagtaacctgaaacggatctggacgccagctcaactcgccgccgacgatccccgccgtgattcgtgtcgccgccgtcctgattcgtgcccagtgaggaacggataacgccggggatggataactcgtatgtggcgccatctcccaagtccagccggagttcttcactggcggccaccgtgactcggtaactttcgccgtggtgtcactcatgccgtgatctgcctcactgtgcctcctaccgacgtggtatgcatgcgctagcaatgctatccgtggccggagatcgtctgttgggttgccgtggctataaatagcacggtggtccacgacgaggtgtgactatcacacacacattcagttgaatcgaagccgaattcgcgctacctctgccccgtcctctcaaattaagtgtgcacagtaaaactagagttctttgtgaagctgaagcaccctctcccaccctcgattagccaccataaccggagaatcaccaatttcccccaaatcggtcagccgcgccaccgagaatagcccgatcgtggccagcccgctcttgtaagttcctatccaattcaagtgttatttccgtggctctgcatgctggtaaagctcaccatggcacccgtttactcaattcggccatgatttggcgggaacgtgtactcgtgaacccggtttccgccatgatcatgggcagacagttcccagtggggtttatgtcaaattaaaggatgttcctagattatccttgatcggttatgcctccccgatagttaaccatagcagtcatcgccggcgatggccggtacagaccacgtcgaagacgaacggcgagcgagccgtggccagggatgtttctagagaagaaatagaagtacgagggtatttctgcaaagtgtcagtgactgttt

SEQ ID NO: 20274 - DNA, 573 bp, Zea Mays
ctcgccggagaccgctccaagcctccccgagctccgccccaaggtgagacacccatccccgtgcccaatttcccttattgcgccctgtgttcgtccaatttcgccttcgtcggtgctcgaccgatttagctcggtctagttcatcggagtagttccctgtgtcacccctttctctgctgaagctagccaaggccttagcgcgccttaagtcccctccctgtggccggaatggctcaccggagttgctccggcccgcccgagaccttctcacggctgttctcccctctttgcccgtggattcatggcctcttccccgccattgatttcgtcgtggcaccctctccctctctgcccaaatccgacgaccctagagccaccctagctcgcgcccgcctcaacttcggcgacctcaccgctgcggagaggaacgacgccgcccgcagccgtctgttccccggtctgatcccctccgtccgattcagatcgaacgacctggaccgtggggtaccgcttcgcgcaagcgcgcctgacgccctgacccacctgttagtgccacctgcagccgctcatcct

SEQ ID NO: 20275 - DNA, 280 bp, Zea Mays
atgaggatgaccccaccatagtctacatggccagatatctccacacccttgacaaccactatgacgaccttttctcccactgcacccacctaaattcccgggtggaaagcctagagcaacaaatcaaggaattaaaaaaggaaaaggcgtccctccaagaaagtctcgaaatagcagaaggtgaagaggccaacactcgtgaagcctaccgaaccctgaagatggactacgataagaagttaaagaagctcgcccacattaagaagacccggaagcggac

SEQ ID NO: 20276 - DNA, 286 bp, Zea Mays
cccggattcaaacagcgataactcctaatttataattccgaattgagcgcataagtacttgttagaaaggtatgacaaagctctacataattatcatactgtttatcactaattaaccacgaaaaatatccaaaaactgctaatactactgctgtacgcccacctgcagaaatctgtttctttggacagccacatacccgggttcaaacggcgatatctcctaatttataactccgaattgggcgcataagtactcgttggaaaggcatgacaaagccctacttga

SEQ ID NO: 20277 - DNA, 289 bp, Zea Mays
caaccatgaaaatctgattatatccggcattaccatcaagaaagctaataattatattccctgatgcattattgattaacatgttgggtatgggcatgggatattcatctttgggagttgctctatttaaattacgaaagtcaatgcatactctaagcttacctgactccttctccaccgacacaatattggagacccactctgcgtatctgcaaggtctaataaaattagcttctagcagcaggtgaatttcgtccttgattcttgggagaaggtccggacgaaatgt

SEQ ID NO: 20278 - DNA, 479 bp, Zea Mays
gcagcctgtaagggaagagcgggtggccgcgtagccgtcgtcgccataccaatagtcatctctctcgctcccatgcctcaccagtgacaggcatggctgaaacaacaccacgctctatgctgcacgacggtgagtactttcctccctttttaatattttattccctctctcctcaattcatgttcgccttattaggtcctggaaccgatagcttctctaacccgtctttgtcgttgttcgccactttggtttgggcacccaccgtcgtcatgggagcgtgtggtctgctcctgctgcccgccgccccgtagacattgtctgtgactccgtaagtccatgtttgctctactagaccccctcatgtcgtctgcatctgcattagggtcggctccattggtgcttgctgcattagggtgtttgctctttgcaagaactgtgttaccgtcggtcatccggtgcacaatccgtgtgtggttggt

SEQ ID NO: 20279 - DNA, 484 bp, Zea Mays
ggggtaaagcatcagccatggcgccgccgcgattgggccacctgccgccgcgtctaggcatgggtttaggaagaaggtgggcgagccgtccatctcgctatgggcgacctggattagaggctcgtacctattcgacttggtcgatctcgactgcagattggtgtgtgtgcgggcacggtttcttggggctgttttaaatcccgggtgtcgatctgtgatcgctgggcctgtatagcataccgagtcgcgtagtgggtggatttaatctgagcctttcatctcagatccggcggccagcgatcaccaatacctcttcgaccgactcttttgcatataagcccctgcacttcttactaataaaccagccattcttgaacagtttgaaacagctatagatcggtgcctggaaattgcaataatacccctggagtcttatttaagtgcaaaataaatattaaaaataacctaaaacttgtttaaccca

SEQ ID NO: 20280 - DNA, 870 bp, Zea Mays
gcctagttgagtttatctagagatattagttgagaatatctaggggtaatagcagattagaagttgttgagattttttaggagaagtttaaggagatagagtcaagcagttaggaggctgcggccaggcagctggcctatatatgtaatggaaagttatgaaacaaagcaggcaatgaattatctccaaattgtctttcttccctgctaatccggtctccctccttgctgcccaacatagatcggcacccagccgatcgcccacgccacctgcggagtcaggggccgacgcctgcgcccttgccacttcccccctacagccggccgcataacatcttggtatcaggagaccagccacgcatcccacccaccaccatgtcctccatccaagtgatccagtgactcaggccttggacgccatcaaccaaaggctggcaaccctggacaccctggacaccactatacagcgcctagaacggcagcagcaggaaagccatgctgccattgatcgccttgatcagcgccagcaggagatcatccctcacgggaaccagcgtccatgaggcgggcccaatgccaaccatgaagaccacccaaccagattccatcatctgaatttcccacgatacgacgggaagacggatccgctactcttcaccaacaaatgcgagtccttcttccagcagcgaatcgttccagaggaacaggtatggatggcatcataccacctggaaaacgctgcacaacagtggtacatgcaattgcaccaggaagaagggacgcccccttggcgacgctttgtcgagctgctgaacctcaggttcggggcccccatccgagcctgtccctcggcgaactagcgagttgccgg

SEQ ID NO: 20281 - DNA, 472 bp, Zea Mays
gccaaagggaaggacgataaaaactagtgaacaaagagttctgaaactgggtgcgaaaggagaaaagaagaagactcgaaagtgccaaaaatgtggcattgctgatggacacaacagtcgaacctgcttgtctatagaggaaaatagggtaaaattggctagccttgctgatagaaaaagaggacgaccgcctgggtctagaaacaaaaattcaacaatggccccgcagtggaatgagacaaccacatcaaaaaaacataaacataccgattgtgaagaacatggttcggatgacgataatttggcatgattgtaaaacatttatacataaataatggatgatattgaaatgttatgatcatgatactatttgatgaatatgaatatttacgttaaaagctcactgtatggattatatctattaatgtgacgtaattatttcttatgagctatgctactgatgggtttgttt

SEQ ID NO: 20282 - DNA, 522 bp, Zea Mays
cgaagacagacttggtgccgatggagaaacagaaatccctgaagtcttggctgtcaaactgtttgccgttgtcgactgagttcggacgggactccgaagcagcagacaatgttttgccagaagaacttttgggcggtcttcgacgttttggtggatactgctctggcctcgatccacttggtgaagtactcgacggcagctaatgtgaatttgaagttcccttgagccataggcagtggtccgacgatatccagccccccagcgttgaagtggccatgtatgggcgattagcttagtgaattgcaaaaggttgcttgagcgaggggacaacttttggcatgcttcgcaagacctcgcgactcgattcgcaatacaaattattgtgggccagtaaaatccttgacaaatcaccttggcagcgagggccctgggtcctgagtgggagccgcaagttccgctgtggacttcgcgaaggatttgaatgccttcggtttcggtcacgcactttagcatgggctgaat

SEQ ID NO: 20283 - DNA, 686 bp, Zea Mays
tctggcctttgtctgataatgaagttcatgcacacgacagaatccttcggcattgacactttttccttggcttcagagagcccatatataaacactgagcctaacaatagcattcggggtcagctaatggagatatatctcaaatctcttcaaaacctcccctatcatatcgtaaagggggaaccaaagctctgtcctaaagaagctcttaaacacgacaacctcatcctccttcggctttggaactacttcctctccagcaaagcgaatcagttcatcttcattttctccaaaataacctaacttcttcatcacaaccaggtcctcagcttttactgtggatcttccaaattcaatatgactaggtttggttgtgctcaaaatgctattgtcctcttcactttcgttgtcactcccaacctcactcttagtctgttcagcttcgacattgagggtaccttcgatagttgctccctcttgcacaaccagacctgagtgcctcatcacttttgatatgggcgctgtctcagtcacttcagtttcgtctccctcacgggacaccctggcagtatatcttactctggccatttcagtgttcagtttctttcagacgaagttgatctcaagtgatgaagcgcttgtttgaaagcacaatgcagagagcttcggcttccgttaaaattttc

SEQ ID NO: 20284 - DNA, 703 bp, Zea Mays
ggcctgcatgcaaactgctggctagacttggcatgcaatgcaacagcggtggagatatgcttttgactataatcgtaatctagctagggtggacaaagtgtgtataaactaactgcacggagtacatggccatgtgagatggtgggaactgggaaacaggacaaagccacgcgatgctgctgcagaggacgacgacggggaggatatatagagatggtgggcgtcttgtgcttgggaacccccggtcaaaacttgggctctaagcaccgtagtgttgtctaatctctactaactattaagaagataacgtagaccaagagtatgcccccgcttaccttatcacgcggagcatgcacctgctctcccactcacgctgcatgcaagcatgcaactatgtaagctacggatgcctccctcatccactcatgctgcatgcaagccgccggagatagagcccgtggctccctccgctcatgctgcatgcgttcttgtcgagtcaaatttttgcatgtgttcttaattaaaataaaaatttgaaaaagctgagtgtagctcagttggtcgacagtatgcatgtacgcccgacccgacccctcaagtccaagtcattgtcgaggcaattttttggatgtgttcttaattaaaaacccttctatgttattcaagtttttttaatagatatacccagattcttaggcatact

SEQ ID NO: 20285 - DNA, 1108 bp, Zea Mays
cgacgagtaaagccatgccgctatagaatcgtactatcgtagtcgtcgccgccgccgccatcgcgccgctccggtctctggcggccaccgcatcatcttctcttgcgttgttctgtctgttacactgactttcttctgctcagcgaccgacgagttttgtcgtatcgcttcctcccccgcctctatgggtccttttggcggtgtcgagctggaattgggggtggatgtggaagcggaacagagagaggtgcaggctttggcctgcttcgctgatgcgacgccgcgggcgagtcagtgctggtgctgtggtgccgggtttgtcgatcacgtctgcaaattttgtggggaaacaccaattttgcagttgtttggtcatcggttaagcagactttcccttttttttaatcttagtaaagttgcagagtagaatggttgtccattactaatctagcatgttgtataccagcacatcaaagctcctttctgaaagcacgaattatataaaccctgcttggctgcttcccacgaggcgttgcaaatcatgctatgtcggttgaggcatttacgaataagagctattctgagtttgtaagaaagataaaagataaatagttcagcaattcacaaactagaaatatataatggcattcttttgcttctaaggtaactaggaagtactcgttccaagttcttttatgtcatcagcatgcatgtgttctccattagttggaggcattgctatttttcagaactctgctgcatgcacaattattttgaggctacctgaacatccgtacctttcgttttaacatttcctttccttttggcaggatacattcagcttgctcatcctatttgtttgcttcatcactgcttttggtggatcagatataaagaatctatatgctctgagggatgaactcgtggaatcaaagcaattccttcaagactggtttgatatagaaagtcctccatgcttgtggtcacatataacttgtgtggacaaatctgttgcagtcatagatttgtcaaatatcccactccatgttccttttccattatgcatcacggcattccaggcacttgctcgtctcaacttaagtaggtg

SEQ ID NO: 20286 - DNA, 379 bp, Zea Mays
gaaggaagtacttcggtggatcaagatgttgatgttccatgatgggtatgcagctaacctgagtaggggggtgaacttatctactatgcgagtcttagggatgaagagtcatgacttccacatatggattgaacggattcttcctgcgatggctcgaggttatgtccctgagcatgtctggctagcgctttcagagttgagctatttcttccgttagctttgtgcaaaagagttatctcggaccgtggttgcagacttggaaagattggcacctgtgttactgtgtaagcttgagaagatatttccacccggcttcttcaatccaatgcagcatttgattcttcatctcccctatgaggcacgaatgggggggcccgtg

SEQ ID NO: 20287 - DNA, 614 bp, Zea Mays
ctccgtcgcaaggccgccgagctctctgcctccttcatccccacggcttcctctcccaagcgccccaagaagcagcatcccctcgcgagaacgaccagccccgtcgtcctccgccgctccttgcgcacccgcggcatccccgccggcgaatcctccgcttgtgacggcgctaacacctcgctaaatacgccgccgtccccgacgaagccccgcagcacacggttctcatcctccctcgcctcggccctgcgagacgccaccgccgcagagccgtcgccatcggtcaaaagctggatcggtgcgcctgacgggttcgacccctgtagggagctggtgctacggcccgtggacgtgaggaaggtggtgccgggccggatattgtccttgcgaatcctgccgctgtccgaccggactgtggtggttgccgggaacgtgcacgggcatattgggttctgggatgtggatcgtctcgtggaggatgaggatggtgatggtgtagacggggtattcgagtattttcctcacagggggtctgtagggggcattgtgatgcaccccgctatgttgcataaggtgattgtttcttctttgtcacttctggatatatgtataaa

SEQ ID NO: 20288 - DNA, 420 bp, Zea Mays
gagtcttctgaggaggatttagactattttgttgtgttggatttggccgcattggagtctccgcagcaacctgatgcgcgcgaagtgtctgccaccccggccagggcgacaatcgaagacacacgcgggcgaagggtggtgtcgaaacagagcattggtgggacgtcacgaagtggaagacatcgccggatgggtatggaccgatcccgtcttcgactagatcggggtaatcaacgcgatctactatcctcgacgtccggaatgtgtattggtgagggggacttgcggaatctgtttgagggcgaagagtttaggatgatgttgtttaatttctgggaggcgggtcttattccgaaggcggagcctatgtagcatttttgctggcctcgccctcgtgttgagatggtgagtgaaaacgtt

SEQ ID NO: 20289 - DNA, 460 bp, Zea Mays
aggttgttacaacgacacaggcaacgaacttcaggtaattttattttgacgatgagttctattttttgttggattgatattattaccagtgcacaatttacaattttgtaggtttcggcggtcccttagagttccatcgacacaacccttggaccaacgtagggtcataaaccctacaggagagaggagctgggtggaggtggcatggagtggcaaaggtcaccggacactagttaacacagtgctgggatctatagctcgttttcactatccaggggtggtacaattcaacggggcagagataggggcgtatcactggactcactggggcctcaaaccatatggacccgaccgtactcaccaagacgcagtgtggtcatcgttttgggtgagtttattatgtcttttaaatttacttaccgtgggcgtctataaatgaatttaattgcttcttcatttt

SEQ ID NO: 20290 - DNA, 672 bp, Zea Mays
gtctcaataaattcctatttatctgaataacctacacttgttacagcctccaatcaatgttcgcacagcatggatcataagtatctttagtatgtacttagaaaaggaaacacatggcaagttagatgacagtagaagggggaaaataatgaaaagaacatgttagctattagctgcaagaagtggagaacaattagggcatgtttggaccacagctaaaaattgagccattttgcaagacgatactgtagactgcccccgccaaatacataggaggtgagcaaatgttgtatgttctcctcttcttgatcatacaatggacaactctcatgatgctcaagtccccagtgagctaacctgactgcagtccaacactgatttagagcagctaaccaaatgaaaaacttgcattggaggtgcagtccaaaacttctagatttctttccatgggtcaaaatcaacagccccgagcccccgacaaagaaactacaataagcagatttggttgagaattctcctataatggatggtgatcaaatgtgccagtaggtcgtgtattcccgggtgaagatcaatttctgctataatatcccttagatcgatggaggtattccatcaaggttgtagctgacagccccctgatgtaccatactcaagcattactgtccaatg

SEQ ID NO: 20291 - DNA, 522 bp, Zea Mays
gccggatagtaggcagtgtgtgcttcataaaaaggatggcctcctgcacacagcccttctctacaaaatgctgaaaaatcattgaggtcctcccacacccttgtccaccttcacctgggaagtaaaactccccgtagagtgcgctttttcacctggcttacctctaaaacagactccaaactcgtgtgaacctctgcaaaaaagaaaattctagacagtgacacttatgtcgtccgcgacgctggccctgagacgacttcacatatccttttccactgcagctttgcaaacaccttctgggctgccattggcatcaccatccccccccccccaacatgcactgctctcgcctccatgaacttgcctgccccccggctctcacatgccgaaattttagcgacatcgtcgtcctgtgcttctggcatctctagaaacgtaggaatgcaaatgttttcataggtgaattctccctctacgccacgtaattcaactatgtagggccgactcctggttgtgggctca

SEQ ID NO: 20292 - DNA, 371 bp, Zea Mays
aacgtgcacccaccatccacgatgcgacagccataattgtgcctaatgaaggggtatgcgttgttttaatcacgaccgcctacacagagctcaacggcggatattcgatctagtcgaaccattaccctgacctaatcccagccacatgctctacatctaactaatggtgtagcttctcctcttcgagccatggtgcggcggtcccgagcttcactacggtagagcacgccggagcgcacctgactccaggactctacgcacggatcccgcaccccgaccgcatttggaacagggctcaaccattgtgaacccgatactcacccccgccaccaggattggcgcactaaggtcattgccaaagcttgaaccca

SEQ ID NO: 20293 - DNA, 388 bp, Zea Mays
aagaaacggaatcaagtgtgtagtgtagttggtacaatcttctctctgttgttcaggacacatggcaccaattaataatcttctctctgctgcccatctcctgctttctctatcattttggaatcatgccgctacaattgtaccatcttggtgtaaaaggaatgccaaagaaattttcattggacacataggctgataggcatgagtttctagcaatatcagtaattcagaatgcatatatgtttgaatagtaggaatcaagtgttaataccgtgggttttgacagtagctaagttaccctggtatatgttttctactcgtacgtactgtatgaagtatactacccttgattggtagttcgaactgtgaacacatctcccactctttc

SEQ ID NO: 20294 - DNA, 608 bp, Zea Mays
tttgcggccattgtctcagcttttttgcggactcctcgagatcggccaaatcaacagtgtctgacgtgaggctccgtccaatccctttcaaaaaacgagctgtgccagcagtggatttactcttctttttcttctcgaacggggacactaattttggtatagaaactttagatttctttgatggtcgtggatcccttgatggctgtggagaaggtggatccctgaagggcgatgtatgtggcggagaaggagggtcagaaagaggatgaggagcagcatgtgaagtttgaggaggtgatgatggatgtacaataggaacagcaatttgagaaggcggagacggttgggcctgcgacgacggctgtcgtggtggatcaaccaattcgacatcccttcgaggccaaaggataaaattcttgatagcttgtccaagtgtctcaataccttcgggcccagggatgtctagcatgtcgtcctcggatccttggacgactgttgtcacttctaccctacaatattcttctggaatgtcgtttccatggaacttgcgtcctgggatcgcaaggcctatggctactttctttgtacgctgattgttaataccatat

SEQ ID NO: 20295 - DNA, 417 bp, Zea Mays
ggctatggcgcaagtatttcaagactcagtgtacagccgcataggacggagggtttatttttaaactactcagggactcttttgcaatattacgcagccgaaagggtatcgttgaatggtggccgcaggatcctagatctacggcgtggaataaaacctatccattacacacctgcgttaaatctgatccgtccgattttcaatctatgacggtgatttgctagaatacctacgctctttcctagccacccgatccagatcccacggaccggattagccacgcgaagagttgtcctcagatcaatccgtagccgcaagatggtgatcgaacggcccctacccttcttcaaccacacgacgcaaggccgagctggcactcaccccggcaaaccagcaacctggaccgcccccgccagc

SEQ ID NO: 20296 - DNA, 451 bp, Zea Mays
gacgaggcggactcagacgaggactacttaccgagggttaggcttcaacattcctttcccatagggacatgcgatccatggtggctcccaacttccgatgaggaattgcgacagcgccagagatcgttccaatcccatgacgcaatgccaaccatccaacaggccggtgattcaccctatctcccagccaagcaccgaagccaatcaacgactcacaatcgatggcagcacggagcggcttcctctgtgctctcccccatggcggctctgagctctcacggtcgtgcggcgttagcaggacgagatgcagaggagtatggggagctaacttaagtacccgagaggatcatgtagtggcccgagaaaaaggggaagagggttgagggagatgcaagattcacgggcgggagatcggcgaagtctgttggcaagacgctcctgacgactcggc

SEQ ID NO: 20297 - DNA, 357 bp, Zea Mays
atacaaagtagtcacttagtggcatgcaacgaaacaagttggagcaggtaccaagcctagctggcaaaaggaagagaagtcccacataatccgcaggccagtgtccatcatgtgcctgcaaattacatatacacggtttacagcccgtttcacagaggtccagacggcttcctccgtaacgtcgtcattctcttgaagcttcactgccggaaggtcgcccagatgattatgagggttttctttagcgtagtgcacaaaagacaacacaattagttaagcaagttgcggtctacaacaatctcattacagagtaatctgaaagatagagctcgatcggcccgtttgtactgatttaat

SEQ ID NO: 20298 - DNA, 1773 bp, Zea Mays
gttcaaacaacgtcaagtttcagaccaagttcaaacaagacaagatttggcttcagacgacatatatgctgtattggttttgctagtattctatccagtttttttcatgggaaaaaagttaggttgttgtatatactgaataaaagaagatcatttgcattgcattacgccactaccccaatccaaatggcaacggccctaccgaaactgactaataatagagtgtttcttctgggttgctccattcacggactgacaggccatgggggcctcaggtaatctctagtcttagccaggccttcgccgtgtcatcaatttcacctctgttgcgtcctcttcaagttaacaggatactataagttagctctgtggcctaacgcacattcaccagaagtcttcacaagaacaagagcctccactgaaatgatggaacctgttggcatctcggaccacaatatcccgttcaaacagcttggaaaccagcttggtgaactcgtggcagtccccgcacaccctgaggttcttggctatccttataggcatgcctgggcgagtgctgatcaagccaaatgctattgcgatcctctcgctgtgcttatgtagcatatctatcttctcctcttcgctcgtatcgtgaaggacaaatcttgtgtcctccacgtacccaccttctctgcgcagcatttccgttatctcggaaagcttgagatggattgcctccgagtctcgatggcagtaatctcctgaggtgaaagtgtggatgttgttccctatctcaatccaactgcaagctggattttttctcaacccccgttctgccatcctggttctagtttccttggcattgttccacttgcccatctcagcaaaaacatttgatacaagaatgtagttgcctgggttgtcaggttccagctcgagaagcttattggctgcaaccacggcgaggccatagttcctgtggacacggcatgcgccgagcagcgcacaccacacagctgattttgggtccataggcatagtcttgatgaactcgtaagcctcctccgtctggcctgagcgtccaaggatatcaaccacacaggcatagtgctcctgccatggttttaacctgtacttgctcaccattatatccagatagtgtttaccctcctcgacgagcttcgaatgactacaagcatacaacagagcaagaaaagacacatgatcaggagtcagaccagtctgcagcattctcttgaaaagatcaatggcttgcttgccatgtccatgcatcccagtagcattaatcattgctgtccaaagaaccacatctttacatttagcccgttcgaatactctgatagcatagttcatgcttccgcaacctgaatacatgtccacaagggaactaacaacaggaccttctataggaaaattccttctgataaggaagccgtgaacctgttttccttttgtcagcgatgacaaaccagcaatagccaccagaatactgactagtgccacagaatcaggttgaatatttgccttttgcatctcagtaaataagaaaacagctccatttaaccgtccgttatttgtgcaacagtttatcatactagtccaactaacaatgtcctttttctctactctctgaaataaatttagtgaatggtcaaactctccacactccccatatatatctatcagtctattctccagtatcaaatcaagcaacccatttctaatggcgtaacaatgcacttgttttagcagcgagatgcttttcaaacc

SEQ ID NO: 20299 - DNA, 484 bp, Zea Mays
atctttgtgcatggactccatttatcatataaatatagcttttactctctgtaaagcttttccgtaacgttatcaaaatgttggaagtatactgagcatgcagtacgatgccaggcatatgatataccgagtgagttcagtgccttttccaatcattgaggcacatgataatttgccacccttgagcagtagtcactggcaatgggccagggtggcaaaacctttccactcaatcgagtgccaaattgttataggacaaacatacaatggtaagcatgcaataactgaaatgaatcaagtttatctttataccacagtagattttttgcattgtgaaaagaatgctcgcattctaaatccattatcacaggtaattccattatattataggaactgagcctagctcagttgattgagaatgtggatgcacccgtaagccacccaagttcgattgtgcctatttctccttaataagaagtcacct

SEQ ID NO: 20300 - DNA, 574 bp, Zea Mays
cgaaattgatttataacgtgaaagatttcgcttatttaacgaactaggagcttatacgtaatgaaccatatgcttcgtggactagcaattagtttttgcatgacttaggagaatagtaaattaattctagaataaaagcaggatcttttctttaaaaggcagctgagcgatgtgtcgcaaatttattggctggaaggctggccacgtggagggctacaaagagcacaaccacagcaactcctgagaggatctagtgtggagcggtttctagatattttcctgcatgcaccaaggaacgtggatgtatgacatcattggcatgcatggagcccacaaggttgtttctaaatattgcgtgacggattgctttttcttccacctctcacgaacatgcatggtttcttttccactaaaatcgaacgggtgattacaggcgcgggcggctccagctgagcagactcacaaggagccagggtgtagtcgacggccaccgaggcatggaacgcaggttggcagcggcgctagcaactaccgcggtaggggcagactggcggcgcacgcaggggagcacgac

SEQ ID NO: 20301 - DNA, 412 bp, Zea Mays
gataaatgtcctctctgtgaccagcaggatgaaacaatccaacatatccttgtgtcttgtgtttttgctagagaaacttggacaaaggtcctgatggttggtttactgcctctggctccagatagtacatatgaagtgtttcagaactggtgaagggcatcagaattacaagtgctcaaaactcaaaaaaaggctttaattccttggtgattctagtggcatggtggctatggaaacacatgaatgcttgtgtctttgaggggggcctccccaaacatcaataagatcctcacatagattcaagataatatcaagttttggggaatggctggtgcaaaggatctaaggaggttgtggccctaggattggaagtagttggtgctgctctcaccacccgtgtgcatagttgttg

SEQ ID NO: 20302 - DNA, 434 bp, Zea Mays
tgaaaagaacaaagtaggtatgctcgaaaatgatgatcggctacaaagagacttactgcaggggtccctgccaaagggataccctcggtagaatctaggtggaggtcatgagtgccacaatcatttgtaggctcacttaatgggatcatattgggggtagattgagcatcaggcacggttggcacgacctcaacaccacgatcatagttttcgtcttcagggcgagtggcaactaacaaacatcgtaccactacatccatgacttgcttttgtgtcttcatagctgatttaacataattatcccactctcactgacactcaattgggaagataagtctttgcacgttgggtagaggacctatgtttagcaccccatcaacgacgatgtcgtcagcatcatgacaacaaatcttctccttagccttagcaaccac

SEQ ID NO: 20303 - DNA, 632 bp, Zea Mays
cccccagcgctatttcttatgcggtttagggcatcgcgaggagcagagggaggcaaagataggggtggaattataccggagtagtaggccgcgaaggcacccgcccacggcaggatgcggtccagagctgtacgccgagctcccaggttcacggtgaacggaggtgatccggtgtaaaattcgttggcgccgaacgcacccaacccgacgtcgatgccgcggaagctatcaccgaaccgaagcgaagctccccgaccgacgacgaccctcaaacggtggcgcggaggggagaggattctgtgaactaacaggaggcggcggcgtctggttttatacagggagagacgaagctgggtgcagaatttacgcaaagcccgcggaatctggtagctacaattccgcgcgcggcaatcggaggttccaacagatctcacggactcaacatttccagccataggtgggagaaggttctgacgaggcgggcccacctgtaggtgactgggacggagtccacgcgggtagacagtggctgacctggtagggtcctcctgtcggcgcatggagttaggtgggcgagggattgggccgaggagtgcagattcggcccaagaagctaacaggtttcatctttt

SEQ ID NO: 20304 - DNA, 440 bp, Zea Mays
aagcatctggcgaaaaatctgaagatgcaagagaagtgattacttcaagcgcaactactgctctcgccaaagccggaccttcaaaagctgcaccggtaagactaatggaagagagtcttcctaaaaaaactacatctcctgctcctgaagcacctccccatggtgatttggaatacattgttcgacacacttcgggaaagcagttatcattagatcaaattgccaaagtgcaacactgtgccaaggacttgaaatacccccaagggtctttggtatatagaggaaatggcgaagacgacttcctctactgtctgcccgatagtaaggaggttaatgtttgtcgcgagatgatgaacaatatggggtttccgaagcttgagcttggtttgtccgctatgacgaaggatcaacttgtggacaacctcacttacaatagcttg

SEQ ID NO: 20305 - DNA, 870 bp, Zea Mays
atcttttccatgccgtgaactctggggatcgaaccaccaaggcgagatttgggctcgggttccaactacttcggtcgtgctcctcggagtataaaatcggggccgctcctacccttattcaccatgctcggcgtgcgcagtggggagtttgggtccgccaggggcgaactgcggattgtgtcgagctctagcctcgatagttggcttggggattcaccgtggcatcccaatggtgcgtgtgaccttcccacccctggaactggatcatgcgccgcccaattgctcgccgaagatcgcgtggcgccgccgaatcgtaccttgtcgtggccagtgtcgctcgaacatcaatgattggtaaggattctcctaatgtattcaccactctccggacatcgcgtagtagtaatcttggtgggtctggatgggggagcgccgaattggggccgctccggccatgggcgccgccgtgaagatggggactgctgtggttcggttgagcggggaggaagaaaaggcatcggtcgttggatcctagccaacggcggagatttgagcgactagataccggttcggggaattgatcggaaccgttgaggaaagatcgagcggttaggattgaagataaagaactccctcggccaatgcgatcgtagccctcgattttaaatcaaacgtttcgggttgtataccggttagagtgtcaacctgatctaatcatggccacccagatcagatcgtgcgactagaatcatacaataccccttcggccgttacgttttgcataagtgccccgcggctttcacataattaacccgccgtccaccagcaggtcaagctgtgtctagggagtttttgtagatcagaccctgc

SEQ ID NO: 20306 - DNA, 696 bp, Zea Mays
gtttgaacagggtaacaaagaagttctccctgccctttcgatgaaggcggatgggaatggacatttctcagtggatttccatgcaggattatcagcattgcaggccttttctatctgcgtctctttgcttcactgttctgaagcttcttcagacattggtatcgagaagtttaagaacaagctatactccagctcgctgaagattctcctgaaggaggaagtgaggcagttaattaattcagtcacgcccaaggagaagaaaccaaagagcaggaatgaaaagacacctccatctattgtcatcgaccctcccttttctcccatgggtagagtatagcatgtggataagcagagaaatagctcttgggagtggaaagataagaagaccagaatcttcccatcatgtacaacattgtttgttttgaccatcttcattttttgtgagatagaaaggggaagtaacgctgttcataaggatagatggagctggtagtttatagtagtagagcttttagcaaccaagggagggcttgaattgttgttgcaatccaccagaggatgcagaaatgtgtcgccagttctgaaagaacatgagcataataaaaaaaaaaactagtgtagccatttccccttgtaacaacattctgaatctctgacatgttttggttgcaagtgcctcttttctcattctcatcc

SEQ ID NO: 20307 - DNA, 272 bp, Zea Mays
aaaaggagaaggaaatcgctgtagccgaagcacgacagaatccgccgaagtaggtcttgcatactgcttcatgctattctccgtatatccctgagtatgtgggcaatcaacaacctatgacatccgtttctacggcaagtcactcccaagcctcctgggttcagttgccaccaccgccaccactagcgccaaacttgatccataaccaacaaccagaagggcatcgtcaggctcagcaacagcgcgacgctcgggaggagtccgaggctcgc

SEQ ID NO: 20308 - DNA, 422 bp, Zea Mays
cttcgtcagcaactccgcatcgtccgattccggcagccggtcgctcatcgtctcctggacagggtagcctcgcttccgccctatgtggagtgagcctaagctcttggctagcgccgcctctgcgccgcacgcctgatccgcatccggtcggcaagtgatgtaatcttggatgaggaggcgacgattctggaggcaccgacggtggcgcatgatcgcgtcgatgtcggtcgccgctctcatcttcactaacgccatgtgcacctcggcgatctccctgaccttagggctccagtagccgctttccttcgccatattgagcaacgtggcctccaactggatcgccgcgtcgagacgtgcattggtcgtctccagcaccccgaggatgcccttgttggcgacgtccggtcgaacgtccgtgcacg

SEQ ID NO: 20309 - DNA, 492 bp, Zea Mays
cacggccgaaggcgacgcccaccgtcacctccctctgcaggtccgcacactcctcgattgctccccaaatcagttgtgatttcacggcaaggtttgctggggtggatggataggctacccgggaccccgttaccccatattgagacagcacggtcgatcgtggagcaacggactccgtaggcgccggcgcaagtccaccatttgcggcggggtggtttatcccgtggctgacagtttgggcccgtaggatagcgagacacagcacacgcggacccagcagaagtaatggcgtgggggtggctgacttcggaggtccaccagtcagcggggtccggtgtccccgacaggtgatatcgccatgtgaccgacgagtaggcgccgcctgtcgatgcgggcatgtccttgggctggtgcacgcggttaaatggctaatgggccagaattgtagtggccgtcccgcttaggttagctccgttttattctttttttctt

SEQ ID NO: 20310 - DNA, 608 bp, Zea Mays
ttgagtgataggaagcagaacatcccagcttggtcatggcccttaggatgggtagggaagaggcggtgctctggtccatgactggtgccaagaccttgtccttcctccaagtcgatgagttgctggcttaaaacagcggagtgggtcgtgtttcttccatgttttagtcggtgatccgtagttagtctctagtggtgtgtgtgctgtattggggttctcccccctttcttttcttctattaatacaaagatgcgcagctctcctgcgtattccagaaaaataggaagcagaacactatttacaggtcagagaataagattcaagaaagagagtgattttactgttggagagtttaattagttattcacatgacacaatagaactgcgaagaatataaataagcacaaatctgattttacccatttgtagcagtgttaatcatttagctcggaaataacaaccggaaagtaatcaacaaagtttgcttgtgaattggcacattctaattaacaatttgcatcataccttcatggattaaaagcaatggttgtatgtatgggtattaactcgatctgggggtagggattgggatggcggttcgtaccttg

SEQ ID NO: 20311 - DNA, 412 bp, Zea Mays
cacggcggagggcgaatgtcggggtagaagcttgctccgatgtgaaattccggcgatgtgtgttggtcccgagcaccggtgagccctggatgtgcacccacggtcaattgtcgaaaccctgagctccttcccccggggcgaatcgatggtagggcgtgattggaaggtggcggccgctcctctctcactccggtcgaccgtgcggtctcaatcccacggtaatggccaccaggggtgcggatgcggcaacaggaggacgccagcgccctatatagctagagaaggagtccacaactgctcccgactcggtcgcaccacgcgcacacgaggatcgcggagtatcccaatcctcacgcgcgcggttccgcgaagaagacgcaacagaacggagaggataagactgacgtcccgg

SEQ ID NO: 20312 - DNA, 617 bp, Zea Mays
ctcattcgttcaccaatagggcggggcctactcgccagccaacccacgctctgtcctggtcataggttgtggactcacgttaccagaagctcacgtcgcctggagtccgagacagaagctccatgcgcgatctgtgtaactaactccccgatcctcgggcgccagctggcatctctaacaaccagtccacgctgggtgtaaaagccaaaccctgcctctcccttagggatcgtttggaaaatacggtattaggtgaccctgctcatttagcaccggcggggcaaacctgcaaataattttccccgtctctgtgttgtccggtgggttttgggtgtcctgtggccatttggaaactgtttggcttgtgcaccaatggaaacggtttggtgaggacgagaaagagataggcgtggggctgtggggggcacacaaaaccgatggtccaatgagtggagccctatccctatccaaaccggtggtgcgcggggtaaggaaacctacatgcagcgcttccaaacgcgcagacagcgagggcgtgttttttttgtccgtggcccgcccgtcccgctgaaaccggccggtgttggtgttcccaaacgaagcattagcagtcaaat

SEQ ID NO: 20313 - DNA, 961 bp, Zea Mays
aaagaatacacggaggcaaagtactgtcccaagtgtaaatcgtctaggtttatggaggtagactggtgatggacagaagaggcagctcgacattcccttgacaatcctacgacaccttccgttcataccgaggatccagcgtttatacatgaccgaggaatccgcgaaacagatgacatggcacaaaaatagaaaacaatacaatcctgacaagatggtgcacgcatccgatggtgaagcatggaaactctttgatgtcattcaccgtgagaaagctgaagaggctcgtaatgtacgtgttgcgctggccacacatgggttcaacccctatggaatgagcgctgccccatacacatgttggcccgtgtttgttatcccaatcaatcttccccccgctgtgtgctttcaaaggcagaatatattcgtgtcttgataattctcggacacccagggaataaaatgtgcgtgtacatggagcctttgattgatgaattggtacatgcttgggaggaaggggtatggacgtatgactgagctacgaagacaaactttagaatgcatgtttggtaccagtactccatgcatgacttaccggcgtatgggctattctgcgcctggtgtgttcacggtaagttcccatgcccagtttgcaagaaagcttttaggttcatttggttgaaaaagggtggcaaatattcgtccttcaataaacatcgacaatttctccctcccgcccatccattccgcctagacatcaagaactttacgaaaggtgtcgtagtgatagaccgcccacctgcaacaatgactggtgccgaaattcgtcaacagataaatgggctcgtggccaatacagaaggtggttttgtgggatatggtgagcagcatatgtggacacataagtcgggcttgactcagctcctctattatgacgacctgctccttccacacaatattgatg

SEQ ID NO: 20314 - DNA, 462 bp, Zea Mays
gggtttgagcacaaccgcagggatgagcgagggtctcaagaactggattgcgacggagaaaaaatagagttagggttcgtttgccaggaaactgccaacagtgacgtatatgcgcacactaatttgggcgcatcatgacagacaagtaattcagaccagacctcaattggatggagtaagtcaggtggatttgttagttgggcctatcagacgaattcactagtcgaagttatcagtcggatctgtcagtaaagcctgtcagttgggttcactcaattggattgatcaggcggaacaagttgaatagaacagaagatactaagaacaacaaccacatttcattcattagaaagaggtcgttacaaagggaagggctggctcattatgaaccgaccctgtcatccctcactccttcatcaccatttccatttctactactactaccaccactaccactaccac

SEQ ID NO: 20315 - DNA, 464 bp, Zea Mays
ataggccactcgctaaaacgaacaagaacactccattacttggtaacctctttgattaaaatcatggatactcacgtcgtctacatccgttacctctctcctagcagccgtcgttcttttctctggaatgcaacaaccgtcttcctcgtccttgcaacagccgctagcccaggacgcgtcggaccgagaaacgcggagcggatgctggaggccgacgaggctccggtggcggcaagcggcgcgactgcgaggagggcgccaactgcgaagcagagcaagaagtgcacgctggcattgatccatggatgcaccctcttcttggacctctctgctggctccatctccagcagctagcgagcttgtttctctgcaaagatggaagggaaagcaaagacggtgcaggaacagaatgtcgaagcagcttttcggattaaatttgtctgtaagcacatctccaaagacac

SEQ ID NO: 20316 - DNA, 534 bp, Zea Mays
atcgaagttgagccattgatctgcccgagtaaaggtgatcgggtgttctgaccaccgatagggggcgggagcactggtggttgccaccagtatctgtcgatcgttgagcttctgctgccttttgctctcttgtgacccgtgtcctccaaagatgacgttgacttctccattgacacgcgggaatgctctacctcctcccccttcctgctgctgaggttgtcgaggttctccgggtcctcctcgtggtgggggaggtggtagaggttggaagggtcggccgtttctgacggagtgcttgaagtctctgcagttccggagggtgtggcgcatatctttgtgatacaggcactgggcgtcgaggatgtcatccaatgttcgttcgcctccgcggggtgcccctcgggtgtgagagacgggtggtccagcggtgtggacctcttcacgaggcctcttctcccaacgcttgtcggtctgctggtttgcgtcacgccgtggtgcagatggagcaggcttcgttcccccgatgaggtcctg

SEQ ID NO: 20317 - DNA, 629 bp, Zea Mays
ggcaattctgcctctatcaatgggctcataatttttggcatcatcactgtttcttccaattctggctctctggccgcatcatccttggcttcggctggcctgactataggcaccttcggcactacaatagatccttcagcgctccgagtggcgggagaagcttgttttgcttcggcagtggaggaggtctattcaccaaattcaggcactacggtcgtttcaatatatcgaggccggtgggtcaaaacctttattttcttgcccttcggcacaacagtggtggctgaagcggcagttttcctcttttttctttccttctcaaggggtagcagtaatcaggatatatgaagccaattgcatcaaaaaccttgttcaatcttttcttgccccgaccccaaaggctgaggacaaggcatcatcttcggccctggtatatgtcccaagcaactcgtcgctagtagcctcaatgcatttcaaccagtcatcatttggttcgtcaaacctctctctgtatctgaaggtatatttcaatcgaactaatccaccttcgctggattcagcagtagtctccttcggcatctcccagctatccacaagtggccacactctgtaggctatgtgctcttgaa

SEQ ID NO: 20318 - DNA, 1277 bp, Zea Mays
aactgaaactgaacctgaagtcagaagtggtcaccgtgatatgagaccgatttaagcacgccataacttttaatacgttcagttttgatccaggaatcctatagtaagtttggagattgatgattagtgaacaacttttattaagagggatcgctctgttcctaacaagaatcgagagataatcgggtgggatcatggccggttcaggcgactgaaatagatgagccatggtacagtgttttggatggatcagaacgccagctcagctcgccgtcgttgatcaccgtccggaatcgtgcagggtgttgggtggataacaccgggaaaaaggtagctcgtacgtggcaccctctccgtgctcggccgaagttactcaccagcggccgccgtgactcagtggattccgccgcagtggcactcatgccatagttctccctcactgtatctctttccgacgtggtaagcatgtgcgtgtgttactctccgtggccgggggccatccgttgggccgccgtgcctataaattgagcagggggtcacggcgaggtgctcgctgatcttcaagtgagctcagatacaaccagaaattcacactatcctctccaccttctctcaaatcgattgcgcacggtgaaagcccagtcccttatgatcctatagcctcaatccccacccctaatttcatccagagacgttgaattgccactttccccaattcagtccgccgcgccacccaaaacagcccgcccgtggccagcgtactctggtaagtcattgtccaatccttgcgtcgttctagtgttcttgcatactcgcgaagctcacggtggcgaccgtttgctctgatcgaccgtggtttggcgagaacatgtactcccgttctcggttcccgccgtgcacgtggaccggctgttctcggggtgctagagttaaattagtgggtgttccgaggccgtcttaggtcggtaaagcctccccgataatcggcttgagcaatcatcgccggtcatggtcggtatgtgcctcggcaggcgtgaacgatgagcgcgccgcggtcgaggactagtttggagaagaaatagaaagtcgggggcgtttctgtgaagtgtcagcgactattttaaatagggtttggagttcttcaggttattcaatactgcaggggtctgttcgcaaaatcgccggagcgcgtgggcgcgcgcatttcttctggtcgtgggccgccctggactggattcggcccaatactattcacgagttttctttttttctttttc

SEQ ID NO: 20319 - DNA, 642 bp, Zea Mays
acagatcaagtccccgcctagcaagtctacgaggtggggcgaccgaccaagtccccaccaagaaagtctatgaggcggggcaacctaccaagtcctcgccgaacaagtctgcgaggcggagcaaacgaccaaacagattagcaaggagggagcctagactaacattatgggtccatggcggccataacagcacacgtcgccgctaaaccatgtccatgtcatgtgtacagcaccaagggggtcacgacattgaagtttccacccacgtaccagaaaggataggacgacacacctagcgcatgctcgaacatgctggagggtgacgcaagggagttgacaaaagatgaatccgtgctgaacacgaacctcaaccttaccaggagcacattttgtgggacacacctggtacaatggcatgggcatagagtaagctacaaggtcttgcacaaaagatagatgggatatagtgccatgtgaggaatacagaggcacaagacttgtcagaaggaaccatatcgtgcgcaggcacaccccaggattgacctagaggtgtccactgtgcactgtagctgaggttgttagttgaagaactctctctcacttttaagtatcgtccgttgaagtataaaagagagccccctc

SEQ ID NO: 20320 - DNA, 705 bp, Zea Mays
cagaaatctcgtcctcgagatttgtaagaaaaggtgtataactatgtcatctcagaacatatgcacacacaaaaatatcagcatgatgcatactttattagcaacacatgggtcaattagaccttattattattactaaaatagtaaaatactactactagctaaactaatatttaggtcttacaaatagtaaaatatgtatatatgtatctatgtttatgtttatctctattcttgttgttcgttgacttcttcaccgactacttcatcttcaaccagctcttcttcttgacggggttgatcttttccttttccagtcttggtctcattgagtcggggtcagggtatatcatcagagttgggacatatggttgaaatagttatgggtgagatggactacatgatgtaggtcaaagtttgtttgatgttaggtggggatagacagattatgcaattcttcatgactcttttggttggatcagatctcatgtatgtggctgagttggtttaaggcactagtttttttagtgcatgaggggtatggccttatcttttgtaccagcattaagtaatttactctagattagatcataatagattagataaaatgtagattaggttggatatgactagattagattagttaagatctaaataaattttggattagctcatggtggttacactagtgtgggataaatatgc

SEQ ID NO: 20321 - DNA, 297 bp, Zea Mays
actattcaccgccggactgccatggcacctacgggtggacgtcaagctctacgcgcccagtgaccttcaacaagcaatggctctagcacgagcgtatgagcaacgcgcccaaggggggacagcaggtcgacgcgaacagatgcgcgcccgctgaccacctctacaccaaaagctcttctcccatgcgcagcagcgtcgccaacaacatcacccgcagccccatcgttcaagcgactaacccctgcagaaatggcggaacgacacaaacaagacttgtgttacaactgtgacgagccg

SEQ ID NO: 20322 - DNA, 460 bp, Zea Mays
tgcgtctgcatgcactgaaatggcgcaccaataaaaaacaagccatgttgagtcgaagtacaagctttggcctaacctgcaggctcgcatcctcccctgaggtggtcccgggggccactgtcggtaccctaaaataggggtaccccctactgctgtataaaagcacaatgcccacgcggctatctgtagttgcgtggtaaaaaggttgtacgtgggaccaggctatgactcgtccaagcgtcgggcgactactctgggccagcaacaacaccgacctcaccacctgggcaggtctggtaccgccacgtgtccagagagctgcacactctggggcatcaccagcgggcctagaccccatgcggaggtgccgggcccctgtatatacagaccagacctccgggtaaggtccaggacctccacgggcgcaaaccagatccctaggatgggaaccgaacccctc

SEQ ID NO: 20323 - DNA, 815 bp, Zea Mays
tgtctgaccatctgtttgaggatggtatgctaaacttcttattacatgggtcccaagtggttcttgcagttgctcccagaaacgtgctacgaacggtgctcctctatctgacacaatattctttggtatgccatgcaaacgaactatctggtcaatataaatctctgcatacttttctgccctatgggtggtatgtactggctagaaatgagctgtcttggtcaacctatccacaatgacccaaatggaatcgtggtgccgggaggtattgggcaatcccaaaataaaatccatgcaaatatcctcccatttccaagatgatatgggaaggggctgtaaggtgcctgccaccttcaaatgattggccttgactctttggcaagtgtcgcattcagatatatacttggcaatctccctcttcattctagtccaccagtacaaggatctgagatcatgatacatcttgttactgccggggtgcatggagaatttggaaaggtgagcttcatccaatattttctttctaagctcgggatttttttaggaacaaccaatcgatctccaaaccatagaattcttttgctgtcctgatggaaacatttgtatttgtccaccttctgtccgatcatttccttaatgacttgaacacccttgtcaccaatttgagtcatgactatctgctcctgcaaggtgggctctactgagatgtaattcaaagcccctgaggaaacaacttccacgttcagcttgcacaattcgtcacacagagtggcaatcttggaatccatactcacacagttgcactgggccttccg

SEQ ID NO: 20324 - DNA, 510 bp, Zea Mays
gatcgacattggcagctccgacactgggatggggctcatccctagtagcaccagtgtcgtgcttgcctcgccggcccactcggcaatgcgctggaccccggcgcggtgttctgcttggagatcttcgagggcctttctggtggcctccatcgcctggggacccggcgccgcctgcgccgcattgaactggcggatctgctcctctagattcctctccttttcctctgcttcgagctcgtgctcggccagcaactcgcctcgccgggtgagcatttcttccctgaaggtgagatctatctctcgcttggcgagatccgtctcccgcctgtccaaggacaactctttctccttaaggttttcctcggcgagggcgacgtcacatgcctttcccttctgctcttgctgccattcctgcagcctttccacggcctttacctgctgggcccgctgggcttccagagtcttgtccagagcactcaatttggtatggtactctgtcgtgagggcctc

SEQ ID NO: 20325 - DNA, 694 bp, Zea Mays
cggccgagctcccacctggacggactcctaacgtaacagaatcgctatcgtctgcgtgaggttgggcggacgtctggggaggtcgccagtgcggatttctcgcctcaatcctacctccttgcgcctttaaataccggctggggtgctctgcgattcaacaatcccgtaatgtatcgaggctgggagatcgcagcgttgagcggagcatcaaaaccagtggaagaggtcggagagagatagagaacggccggtgcggatcttcatcaagcgcggtgtcgagcaaaggaaatggagaggggagagaaaagatgaagccgccgtcgatccataccctcggcttgctgcgtcctgggtgggtgtcctaggagatccaccataataccgtgattgctcgccggtgtaaggatctaaccgctgggccgcgggtcacgtgcgcagggcacctcgcagcttgtaccaaggtatgatgactcccccattatgctcacttccgccccctcttgcatctgcgcttggtttgccgttgatggacctgggagcaccgtcgggtgcgactctgatgtgctcgcggccgtgggggtttgggcgccgcctgtactgatcaggggaggaagaaaggctcctcgccatccaatccgtgatgaagggtgggtcgatcttgaccgtgggttttcgatcgtggggccaaagatag

SEQ ID NO: 20326 - DNA, 1067 bp, Zea Mays
acggagaagactgccggtgcacacaaacgtgtgtaggccacccgccaactccttgaagaggagcaggccgccgctgccgacctggaacggaaggccaccacagccaaatagctgatgccgtctttctcgacctcggacaccccgccagacgcctcttctcctacaaggcgaccgtcatcgttggcctccacattcaggctgcaactgtcccgaacattcaccaactagtgaatatcattttggacgcctcgtcgtccaactacgcttgctggtatgatctcatgctgctggccttgacacagtatgctctcgccgaccacgttgagtccaacgacgccttccccaacaccctcggttggaaccacatggacgtcgttgttctctactagctcaccaacacgatctcccttgatcttcgggaggtcattcggcaacagggccacaccgcgcaatacccgtggattgatcttgagaaccagttcctatgtaatcacaagacatgtattcttcacttggacgccgcctcccgcaactttgtacagggtgacctctccatgagtgagtactgccgcaaattcaaaagcatgaccgatgccctggctgatctgggatctcctgttgacaatcggatcctcatcctcaacatcctacgagggctcaaccagcatttcaagcacatcaacaccatcattcgccgctactcaccattcccgaactttgtcaaggttcgtgatgatcttttgctggaggagatccatctagacaccttaggtccagcaacgactctgacggtggtctactccaacaacatgtcgtctgctccaaagtcaccatccttgacatcgtctcacccgcctggctctggcaccgaaaacggcattggcaacaccaactccggaaacaaccgaaacaagggcaacaaccgccacaacaacaatggtagtcatggtagctcctctggcacatctgccacatctcctatgggtgttggggtcaccaacggcaaggcgtcgccccctggccaacataagtccaccatgacaagggcacattactatgtactcctg

SEQ ID NO: 20327 - DNA, 546 bp, Zea Mays
caaggaccttgtgtccttcgagttcaccctccgcgccgtgaaccccagcggccgcgtccgtctcaacttctacgacatcctggcctacatcttcgacaacagcacgctggcgtcggcgacgacgtcgacgccggccgacgactgcagcatcctcgtcaacacggccaacataactctgaagccgagggcgtacgtggacaacaccaagacagtgatcttgggtgacgaccctaccaaaatcaggcactccttcttccaagcattgaacaagccaggaggcagggtggtcggcgcgacgatgagggtggatggcagcctcgtcagcgagaccgggctgggcttcagcacgagcgccccacggcggatcgtcctttactgccgggacctcatagtcggcccggtggacaaggcggctacggccactcaggagacgacctgcacagcatcgtaggatatgcatcatcgtcgtacgtctatcgatttggtcgatcgccatcgttttcattccccgccccggccgtgtttcttcttttctttgccttttcg

SEQ ID NO: 20328 - DNA, 383 bp, Zea Mays
tgctgatggacccgtacccgacgccgatcggcgccttcgccgcaggcacccagttcttccctcataaccctagaacctagcttaagttagctagctttgctgcttccattattcgtatcggtgctagtagcttaattcctttgatggttccatttacttcttccaacaaattaaagatgatgatgaacatgagctaagtagtcatcgtcatcgtcgcaatcaaattcgagacaagaagagaagagattttaattgttactgcatactactactacaacgtgcattcgagccgttgatcgatgaacactagtgcatgatcagcaatgtgtggatcatatataatgttattagctagtagagctagtgtactgttacttgttgag

SEQ ID NO: 20329 - DNA, 717 bp, Zea Mays
ggacaaatcggagttaaaacgattaaaatatgaattatctaagtttctaggattaattctatacttaaaactcattttccatattaatttacttaatttaattaccctttggactgcgggtattatttcttaagtcttcagggttcattttataattttttggacctatttgttataacctctatgaaggaagggatggtgggttgattataataaagtgcagggactcttatgcaaagtgtcgaggtcgaaggggtaccggttaaccgtgagccatcagatcgcgaatcaaaggttcaaattagaagcttccttatccaaagaggtatgttatctgggccactggattaaagttctacggcatagatttcaaatatgtgcgatctaatccccactctccatctaggatccaacggtcccgattccgacccgaccaaatcgacatgaggatcaatcgtggccctcccttaacctatcaacggtccgaggacccttcttcctccctgcaccagcggtcatggccacgaccatgagcatgacggtgccatggccgacacgcacacagtcaccccctaataccttgaaagagatacgtagatgcgcaaaacaacctagagcctacgacgagtcaatgggcagagaatctaccggtgattaggcagcaccaaactccacccacggcgaagcatgggtcagcggcggaggattgcctcggcg

SEQ ID NO: 20330 - DNA, 651 bp, Zea Mays
ataccagtggcagtgctaactgctaagctctaacaacttctgggccggccggcagccaagtgccagaaaatgccgtatgtgtgtgccagtttgactgactgctgcaacgcaatttcgtgatgtaatatatcaactcggctctttttatcctatgatgtgcacgaatcagcgacgagaggagctggacaagacaaattgctgactgcgagactagcggaacagagaagaaaccaatgcattccttgtttgttttttggcaagaagggcgcacacgcctggagccccaactgacttccaagctggcacagcagcaggcagcagcacacaaccacaacaccagctcacgcgtccagcacaatccccattccccccgtaaccacgcattaagcatgggtttgcgctctaatccgcacacgcacaatccggactgggaacagtgtttcgaaatctgaacaagacggtcggtggcactgtactgccagccaggctaggatgaggctgctgcggacgttttgaagcgagaaggaagcacagctgctcctgctgcctcagtattcacaaaaatctcacatgcccagcaaaaatgggcagttgctggccagtcgtctcgctctcgccccgtttctgttgcacgaagtcgctgcgccttgc

SEQ ID NO: 20331 - DNA, 595 bp, Zea Mays
ccgggggatgccttcgtcttgacgatgaatggaccctcccatttcggctccagcttgccccgtgattctgtccgggtggtccggacgagtacgaggtctcctttgttgaattctcttgggatgaccgcgttgtcgcgccaggccttggtttgagcctggtatttgttgaggacctgcagggcaaggacgcggtctccgtcgatgaggtctttagacgttggttcgtcgacgtcggggaccgctgatgtgcttgttcggggcgacccatgttttatctcctgcggcgtcatggcctccgatccatataatagacgaaaaggtgtgaatccggttgcttggcattcggtcgtgtttagggcccagaccactttaggtagttggtcggcccatttaccattcttgtcgtcgaggagtcttttcttgttggaagtgaaaatcttgtcgttggcgcgctcgacgacgccgttggattgcgagtggtataccgaggcaaagacaggcttggtgccgatggagaggcagaaatccctgaagtcctggctgtcaaactgtttgccgttgtcgaccgtgagctcagacgggactccgaatcggc

SEQ ID NO: 20332 - DNA, 542 bp, Zea Mays
ggtggctcgttggcgtgcctggaacccgattgttgcaaccgttgagggtgtggagtccggggtgacgacgaattgctcatcgtgcttcttcctccgccgcggatccgcgcacctccgtggtcaggacgctgcactgcgagattgacggtatgggtcccttccccatgttcgagttcttcccaatttcaattcgcaccttgtacacctagcagtcgtgcaccataggttggatcagggagtccgacaatggcgcgccgccgtgctgagtgccggcccgccgtgattgtgcgtagtgggggggagagagtcgaccactgtcgatctgtcgatggagggcagagattagatgatagcatacctattcgcgcgatcaaatcgtgaccattgatcctctatctgatggcttagggcagatcgggctaacataaaatcagaaccctaggatcttgatctaatggtcagttttccataccgcttcgtagcgaatagcgatctaatctggaccgcaggtgctcgatccaacggccgagggatcacggtac

SEQ ID NO: 20333 - DNA, 487 bp, Zea Mays
cccgatttgagcttattagggtttcgtgcttcatctggtaaaatgtatgcttcaggagttcaggatttttgcttccccgtctctgcctcacatttttcggatctccttcctccgtcttccttagtcttccagatctgatttcttgccgacgccgctgggattgcctgttgcactgatgccgttcgtgacctagctcgggtggaggcggtcgtggtcgtaggtttgtttggctaactacgcttgcttccgcatcttagtcctctgcttagtgtgcgttcttctttgcttcctagaacacacatgctttgatcggtctctggtgtactgcagaggttaggttagtggcgcgcttagcagacatggtttttcgcatacacgctgatgttaggttgccagcaacacagctgcagaaacacaactacggatagggtcttctaggttgagttgtcaaggcacttagtggatcgtgacagtgtggataattgtt

SEQ ID NO: 20334 - DNA, 628 bp, Zea Mays
actgtccagaaatgagagatttatgcagatcaacatccgatacttgagaacggtttatagcagataaccagataatagggcagaatcattaaaggatctagatattcggatgataaagccaacatgattcacaaggaaaaaagattactgaatccaggtgaaaggagaggtaggcaaacaggatcagctaggatgatcgacagaaatgctatgaagtttttagggcaacgacttatggaaagaaacatggcttggacatggtttgcgcaactagacaccaaacgatgtttttttgacataaccacgtgcacaaggaagttttgttttggctagcggttaagctatgggggtctacaagttatgcaggtgtaaattcaagggtaaaacacgcaagggttagaaaacatcaacacaagcatgattttttaagaggtttcacttgctaaatcaaggttgtttggagaggggggggtcttttaatttatgggcaaaacaggccacaatttttttgtaaaaggggtcgaacacttacaataccacctagatagcaagacaagagaaacacatagcacgacctaacaagacttaccaatctgacacgaggtaaggcatttctaacatagcagta

SEQ ID NO: 20335 - DNA, 418 bp, Zea Mays
gtcgaggagcttcaggaggacttaaggatgttagaacaggagagcagggagtacgaatagacctggaacacgctgaccacggtaagggctcttttacggtggcggagaacggatttgggaggaatgagaaattagcgagctctggtgatcgattgagggcactgtttggtggcttggtgctagactaccctacggagctcacggcaggctcaatttatagcaggcaagagcagtggccggtgaatttggattgagacgcgcggcggccggagataacaggggttactggcacagtggattcgtggagtacaccgtggcggactcaccggcgatgattggatggctaacgtgagttatggcggtgcggttaaaggcttgaggcgtggcgcaactacggtgagcatcgcggatttcagtg

SEQ ID NO: 20336 - DNA, 563 bp, Zea Mays
gggttgcaccataaatagacaaaagcaagaaaactaattctcttcatccactcaattggctattattctgttgtctgctcttaatatcatacagtacccttagtaatctgatggtttcaactcttctcttttctgcaatagaaatttctgccttattttcttccacgaaagaaaaatcaactaatttcaaaatacttggagctggctgtagcatcccccttgtggtgttacaaggagatggatacttagaatcttcattgcatgttattgtcgatacaaaattggagtgacccagtataagttcaagaatttcatcagctgagaactttccttgtgatagcacaacaagaatacatcgaattgcttttatggcgacaagatcattgaatctatgcaagagggacgatctgatgaattgagcaaggaaaggtattgatttcagctgatttagatagctttgaatctctaaagacagttcaatgatattcttgagaaatacatattccagaaaacagatgacctttcgttccttggtagagagtgataagatattgtcactcgat

SEQ ID NO: 20337 - DNA, 700 bp, Zea Mays
ctctccagcccacgaccgcacttggaggcgttgcacagccgcctgtgactgctctgccgccgattcgacagttctgtcacctcacgccggcgggagcagcaggagcgccgccgtcaagggctgtgcttcaactgtgaatgagccattcgtctgtggccatcagtgcaagcaactcttcgacttggagttaggcgacttcgagtttgcggacgaagtcgtggaggacgccataacagaggccaccctgtaggcagaccagtcgacgtaggatgccgtggcgacaaacacgttggtggtctccctccatgcacttgcgggcattcggacggacaacacgatggtcatgcccgtggtgctcaagtggacacgcttcttggccctgctcgacaccggctccacctataatttcctgtagggggccacattgtctctctcggtttggcacctttcggcgacaagcaactttgtgtcacggtggccaacggtgaccgccttcgttgcgccgggattgcttgccacgtgcccatctccattgccagcgacgagtacgacatcacctgcgtcagcatcgacttgagctgcttcgatttcatcctcaacgtcgacttccttcggacattgggccccatcacttgggacctgacggccatgacgagcgccgcgtcgtgtggcacgacgtccagggggcagaggccgcaag

SEQ ID NO: 20338 - DNA, 469 bp, Zea Mays
ttatcttgccgacggaatatatcctgagtgggcggtatttgtgaagacaatacatcgtcctcaatcggaggaagacaaattgtatgcaaaacatcaagaatcagcaaggaaggacgttgagtgcgcttttggtgttctccagtcccgttttgacattgttcacagagatgctcgtttatggaagcggggggatgttgtgaacataatgcaagcttgtgttatccttcacaacatgattgttgaagatgaaaaagaagcagttaaaattccattggatttaaatgaaaacctaggagcaacaattgtgctaccgccagaagtgcagactagtgacaatcccgacccttgcttcgttgaagtgctacaaaggaattctgctatccgtgctcgctcgactcacactcaactgaagagagatttagttgcaaatattgtacacaaatttggaaaccgtcaaaataggtctaca

SEQ ID NO: 20339 - DNA, 403 bp, Zea Mays
gagtagtagtggcagcaatgacccaattggagacctggaagccaaggtggaccaacttcggtcagagctacgtcaccggaatagggcatgagcacaggacagccagcgtatagctgaattgtcaactgacgtcagccgcttgcaatatgagaattcggaacgggattcgaccattgattgggccgtcaactcacgttcgatcgcttgggaccgcgaagcaaaagctcgagctcgtgtggcagagcatagtgcggcactcgacagcctgtaagtgtactgtaatactttacatgaggaagtacatgtactgtatgctcgactgcacccggatgtgccttctgacgctgctgcaatgggagctggaccatcaggaacagcaagtgaaggacctgatggggagttg

SEQ ID NO: 20340 - DNA, 560 bp, Zea Mays
cttggagactggcactggctcaaccactccgtatctagaaagtcaataaaggacactaggtaaactgatgtaggacttgatagagcgtaatgatagacaccaatgtgggggtgttgtggctactgtatcctgacatagggaggagacgtcatctagggcgtttcttggtcgacaagaacctcgagggacaacatgctacgcgatgacacctgaccttaactcgcttcgtcgtaccctacgacacatgtaacgagatccctctctcaccttggcctttaaactggaaggaccatagtttagaagacaagcaatcacttgcatacatcaccagaacaagtcattcacaaagcacttgcaaccgcatgagcactcactccagagacttgggagcttgatccctctctagcttgtttgcaaccccctactataaactagtgcagggtaacatgaatcactcaactgaacgtggggacattctgcctgaactagtataaacttttgtgtcaactacacacaccatccactccaaggcatacaaagcatgatagtaactagccaat

SEQ ID NO: 20341 - DNA, 280 bp, Zea Mays
tttgcctgttaccacgttggcatgaggtggtggaggcatgtgatcccaagtgtgattctgcagaagggcaacatgctcttcctccatggcagcgccaactcgggtcagtgaggccaccacggttggtcttgggcaccacggtggtccaataagatcagatacaatgttaggatcatcaagaaattcaaacgttgcaggagagcttggtccatcgcgatcagcaaagggaaaggcagattcatcaaagatgacatgcctcgagatgatgatgcgattggaa

SEQ ID NO: 20342 - DNA, 471 bp, Zea Mays
tttcttcctgacgacactttccttttcttctgttcgctcgtcgcacatcagctgcggccgcaggtctagttgctttctcctctacttccctaatcttcgaacctgcacacacaaaccagccagcgtagccaccgccgctagcctactcatcttctcacgctcttcgcctcctgggtcatggagcacccgcgacggccgtccgtctccctcctctactgcgacgattctccttactggcggcaaccgttccagcgccctgcatttcttcagcaattcctttcgtcgttatggccatcacaatttcagtttcctctgtaaattcaagagagcatcaattggtcataaaatcctggcgttatttctctctcgcgttggctataaaatggagccgcaatgttgagtcatcatccctgctcgctccctcctccacagtttaatcctctgtgcacttgtctcctccgtgtgcacacc

SEQ ID NO: 20343 - DNA, 528 bp, Zea Mays
agctttcataacagtcataatgtgccgcttctttcgaagaagctggtcgtcacttgcattagcaggttcttccttggaagcccccgaagaacccctccctattccctcttcgacatctttgtcctttatttgtaataagctagtcagatctgaccctaatgggcttagcatagcgaaaggcaaagggcgagtcattacctccaaaatctctgtaacgccaatagaagatgttgaaggggtctcaggaacctgcttcggaggagcatgcattttcttctgagcacgaccaaccttcaaaggttttcgtttttaggagcaggggatttcatccccgactgtgaagtctcacctttgtcaataacctttcgtttcttcgaaggtgcctttttcttgtcatcttgaacagatctcatagcttgccttttcataatactcacaactccattccttttcactccaccaacttattccttagacttctcataatctggaaaatcaaaacccatcgcgtccatgacacggttcaat

SEQ ID NO: 20344 - DNA, 314 bp, Zea Mays
ccacgtcgtcgcaagctgtaaggactcggtagtgaccgccgtagatagttagcctgtgagcgccacgttagcggcctccagtgactcctcccccttctcaccgcgagcacttccccgtccaaattcgccctccatgcaaccgtcctctataaattgatgccttggcctgttccgtcttgttacgaacccagagcaccagccctcgcctccgatcatccatcgtagcgccctaatttcgttttcccccaaatccactctctgcacaaccgcgagtcacctcgtcgtggtcggccatctacaggttcgctctcgcc

SEQ ID NO: 20345 - DNA, 480 bp, Zea Mays
gtctagtgccgccacgtggcgtgtaggcgcgtggcggaagccttcggctagaagtaagctcatcgctcgtattcaatgcaagcggccgaggcatgcccagctgcgcacataacaaggacaggcatttgccagaccatgaaagcgcaaatgaccactctgcacattaccgatgcgtacagttgtgtgtaagtgcgccggccttgtacagtgcatcgcgtgatgtcgagggagacgttgtgtctctgttccgcatgcatgggcggcgtcatcatgagcagtcgtttgctcgggtagtgcgcgacgtccatcgcattaactcacatgcatgtcaacgtgctcgacccttacatacgtcagcatacctggtacactttgtgacaatcacatgctagtaaatggggcagaggacacgcctgtttagatgatctccacgacagcctaggagaagatatttgtccaccgttgcacttaatgcttcat

SEQ ID NO: 20346 - DNA, 580 bp, Zea Mays
gggatctcttggcccactattctcttgccccatctaatcggagctcgagcgtaggctttgatgtaagttgtggcgtaggttgatacgttgtcgtgtgtaggggtgtatggacgttgtcatcatgtcccctccacctgttccaccttgcctcagtaatttgcggggaacagcaagagccataatgaggggcgtccttgcgacgcattgagtcaatggtcctacctcggtaacacgcgggttactggcgtagcccagaccttgcggacttcgcacgtcgcatgcatttaatgcgggccgcacaccacttgccactggcgcgggcaaacacgtatctcgtccgcacttaatgatgtcgaaccccatgtcaagaggcatacgtaaggcgtccccggccatgcgtcggcaccggacctctgcctaggcagggagcaaatctgggaacgtgtggcaacgaggcaccctcggacctccccgactaggggtccgaaacatgcttgagggggtctaggccctagctgtaatgattcatacacgtggcagcactggatctcacttggcttaggtcttgatgacacacgcg

SEQ ID NO: 20347 - DNA, 436 bp, Zea Mays
tggggtctccgcagtgccaacaggcatttgctgacggctggttgcttgcaaccgagggggcctgaaaggagctctgactctgctaactgtaacgtgacggagtaggtccagctggtctagtgaagcttggtcccttgggtggaagcccaaaggatcgagctctctggtgacggtcttgctgctgggcttggagaacctggaatttcctcttgaggtgccctttttattcctcttttgccctttgcacctggatggctttgttggagaggtgcgagaagttgaggaagtcttggctggcgaggatggtcttaagctcaggtcttagccccttcagaaaacgggccatcttcctggtctcggtgctgacatcgtgaggcgcgtaatgagccaactctgtgaacttgtgaacgtactcactgacggtccttccaccttg

SEQ ID NO: 20348 - DNA, 456 bp, Zea Mays
gaacttgtggctcggcgtcggcggctggatgcctggatgtgcacagcgctaaaccctaaacagtaaacacctgatgcttgtcgcttgatgggccggctgatcaagcagcccaagtgcccaacagcaagagccaacgcccaacaggaagtaggcccaagccaaatccagaaatcgggtacccgcccgaatagtacccgtatcctacccgggattttcgggtactgaccgggtattagtgatttcgtatcctacccgtatccgagagccaatatccgggtagtacccgtatccgtcccgacaaataaaatacccgtttccgtatccgaaaattcgtcccgttttggtacccgtatccggtacctgttccgggtacccgtcccgttttcatccctagcaaggacatcttctcctaaaatatgcattatggttcatttgtgatttaactgattttttatc

SEQ ID NO: 20349 - DNA, 635 bp, Zea Mays
gttaggttagtgaggaaagctcccaccaattattggaaccaatcgccattcggcagtggcagctacaggagaagccggcgcaaccttatctaggtgggcgccctccttcttgcgggtggagaagcgggcgggagtctgttgtggagtgggtgagtgggacgcgacgactgacatggcatggaggttacagatggcgtgaagactggagattggcgtggaggatatggtttgttggcggaggaagttcgttgtgagagccaatcggcgcgaacgcgagaagcgggaggctggctggggcgtgtcgtgcggagggtgcaggaggcgatacgagcgttggcgagcgtgtgcaggcctggggcagagacatggtctacttgtgtacgatagaggtgagttggtgtgcattttggtgcgggtggagaagcgggctggagtatgttgtggagtgggcgggtgggacgtgacaactgacatggcatggaggttgcagatggcgtgaagacttgcgactgacgtggaggtcatggtttgcgggcggaggcagttcgttgcgagagtcaatcggcgcgaatgcgagaagcgagaggctggctggggcgtgtcgtgcagaggatgcgggaggcgacacaggtgtt

SEQ ID NO: 20350 - DNA, 397 bp, Zea Mays
aaggccgtggggtcttcggcagccggctcggccaccgccttcaaggcgtcctcgcccgtcggcacggggtctttgctggctccagttggcactgtcggtgcaggggttgatgaggggccctcgccggcataagacggcagcaccagatccgcctccacagcctcgggtagcgcgccgtctagaccaccaaggtcctcgacgccttcggcatgcgccatctgcagcaacaacacacttattcagcaaaaccacacatacccccactcataaccacacaaaaaccagactttaccatttatattgcccggtcggaccgctcctggaccgtttctcggccgtgcgggccccacatcctgtcaaagagtgcccccgccgactgcctaagcatggggtcctc

SEQ ID NO: 20351 - DNA, 570 bp, Zea Mays
cccattcacctgccccacctttggtcgcctcatcggtggtacaagtgcctacttcataatcgcccctcactctggggttttgggagcaaccacgaaccttcacgggatggccttcgaactacaagttttcgactccaatcaggcctccttgcaactaggggttggcttggacccaccaccaattccttccttaaaagggatatagtattacaaattgacaaggcgggacgagtcttactcgagcatggttgcatggcagtcaagccctggcgtcacacctgtgtcgttcggtcgttgcctagcgcctgggtcagatactcggatccgggtgtcatttgatttcggggtaggccttctgctcaacccaggcctattcaccaaggtcaacaacatgtcagtttgagacttcttattattatcgggtcgcgccttcaattcggtgatcgtgtcttggtgggtcggccactctcaattcggggctgagtcaccacttggctttggttccctattcgatctttagggttatgcacgactctcgtttcatcactgccatccatcaccggattctag

SEQ ID NO: 20352 - DNA, 623 bp, Zea Mays
cgactagagatagctgcgcgggcaccgtgtctttaatgctgtagtaaggggtacccctgattcagggtaccgacagtggcccccgggcccgcctcaggggagggtacgagcctgcaggtggggccaaagcttgatcggcgattggcgcgccgcttccgtgcgcttgctgacataattactgtcagtccgccttcagtcacgtcaaccgccacgcctgttcctgtggctaactggcctgtgacctccgcacttgatggttttactgggccacgcgcggggtgcctcggtaccgctgcattgattttgaaatttcaccttctctgtcttctacggcagccccgaggaggcgcggtattggtgcgagccgcgattcgacttctctgtacgcaggaaccggcgcccaaggaggatgactcgtgggcctaggcccccgtgccagagactgggctgtcggtttcggcgggggcgaagaggcgcactaccgcaggcggtggcgcgctcttcacgcgtcggttcgccttctccgcacacagaaaccggtgcgccaggtgcatgacatgtgggcttgggcccccatgctaggggttggaccgctggttgcgacaaagacaagggggcgcact

SEQ ID NO: 20353 - DNA, 303 bp, Zea Mays
gccttgcttggtaagaacatgtaagaacttgaatggacaagtgtgagtgaacatatagtgtgccaccacctatttcctttagttggtacgcaacttcttgtgactttgtttgttgcaagctaaccatggcaggtacagaaagtgaggatgaggatggtggaggtctgcttacacctcacaccaaaggcattgtacaacattttcaaaggcaagtgagggagtacacctttggaattgataatgatttgcaggtgataaatgagaagattgggaaaatggagaccgcaaagatttccaacaaca

SEQ ID NO: 20354 - DNA, 338 bp, Zea Mays
tttgtgtccatttgcaggataaggatgacacaaacataattgttgagttggtgttctacgacaaacattacaaaattgccttatttaaggatggagttgatctacctcctcaaattcctccatcgtagcccatatgacggcgatgttgtgatatctaatctataatgttgtgttcattgtttcttcgtgttgcatgggattttcgaatgttgcaatgaatgattttttaatgtgaaagtgtatgttgcagttgtttcatgtgttcaaatgcatgtttcggatgttgcaatagttcatctagatgtcgcgatagttcaaagtgatgttgtatatgttac

SEQ ID NO: 20355 - DNA, 666 bp, Zea Mays
ctgtgtatgaaactatttatgtttttgagtacaaatctgtttatgggcccgggcccgagcacgacactagtagcccgtcgtgcctccggcccggcctggcccgtgtaagattagccgtgccgggtctggactggctactgtagcccacgggccggcccgacatggcacgacatatgatcaggccgggcttgggcaagtgtatttcgtgctgggtcaaatcatgcccgggccggcccggcacgaacgtttggacatctataggcatagcccagccgaagccaccccattcccttcctctgtttgacagccaggtgagcctgcgctcctatttatcttctttacgaacgttgcagccaatcgtttccatgccgcagccgtagctggccagctacagtgccttctcgactgcccgccggcctctcacctccgagcgcccgcctatagtggagcacctgccaacgcctcctcttcttcctcctcctccacttgctgcgttcgtttccatccgtttcttctccactgtgtcgagccccaccaccatgaatggtgtagcccctagttcttcccctcctggcgctcattcgctctctctcgtcgctataaatcatgaacccgagctccatcctgccgttcccagcctccacttcctcctcccgcgcctcttgc

SEQ ID NO: 20356 - DNA, 776 bp, Zea Mays
agaattctgttcagttggctggagagaccatagacactatgttttcttggttctagtccatcgtgaacaagatgcgtgcaaacaaggcataattaccctatgatgatcaagagagagcgttcaagctacttcatgctctggattggagggtttgggaggtgaaggtctcggtgatcatcgagtgttggtgatcatcgagtcgcctaactacgaaccctcattgtggatgggttgttcatcaagctcaagtccaccgatatttatcaccagaccccgaatcaagattgagaaccctagtgcacccactatgtccctggtctctggaggtggttctacttctaacccttcacatgctatgtttgctctttcttctttgttgacctttatagaggagaaggtggaaagccttggggatggggagctagcgcttgtgtccagtcggttcacctggttccataacaattgctagaatcggtagcgtggtaggtcgaaggattgatgcttcaactgcggtgactctgactactttgtcgccagttgccctcaggagggcaagcaggaggctggcccgcgcaaccactactctagtcggtgcaagggcaagcaggagtacacatccggcaaacacaagtctaagggaggattcaacaacaaggcactcaagaagaagtacctctagaaggctaagatcaaggagcatgccttgctcacctctctcaatgatcacgaccacgactccgacgatgtagcatcttccttgagcgatgaggagatcg

SEQ ID NO: 20357 - DNA, 393 bp, Zea Mays
ctcagcgcctatacgcgtcaccccgtcaatccccttccatcccgcctcttcccctcccaatctctctcagcttgtctcatcttccccactagacgacctaactccctctcccaaaccctaaggatcaagcccacctcctcaacgagatgcccatgggccatggcggcggctgcccctgcccccacccccacagaggaggggacgcacgcagcacaccccggttctcctggcggtgacaacaaatcatgggacacgacattggtgcccccggccacccccatcctcagcagacaaaactctcagatctttcgctcctatatgctcccgtcactctgggttcctctaagaggtcaacctctgcctcctccactgcaacctccctgccccgccctc

SEQ ID NO: 20358 - DNA, 511 bp, Zea Mays
gagaagcgatgggtttgtactctatccatttagtgaatttgtcaatgtcaactagcaagtgagtgtatcctccttgagctttcttgaatggtccaatcatgtccagtccccagcacgcaaatggccatgttacgggtatggtctgcggttgttgtgctggtaaatgctgctgctttgataagtattggcaagcttcacacctctagactagctcaactacatcactctttgctgttagccagtagaaaccagacctgaagaccttcccaactagagtcctggatgctgcgtgtatcccgcattgcccggtgtggatctcatctagtagttgcttccgggtagccgaaagaatgcacttcatgaggactcctgtcgcgccccttctgtacagtgcttccccaatgagagtgtagtgggctgactgccttgcgatgcgttctgccgcagttttgtcatccagctcttcttcattctttatatatctgatgattggctccctccagtcatctga

SEQ ID NO: 20359 - DNA, 1002 bp, Zea Mays
agctcgggggccctgcttgagaccgtacaaagacatgttgaggcgacacacgaagtcgaggcgcaggggatcctcgaacccggtgggctgtggagcgtagaccatctctgatagggttctgtaaagaaagacattcttcaagtatagctggtggactacccatccatgggacaaggcgagggagagcactatgcgaacagtggcaggcttcacgaccgagctgaatgtcacatcaaagtcgatgccgagacgctgagtgaagccgcgaagaacccactgagccttgtagcgctcgagagtcccatcaacatggagtttgtgtttgaagatccacttaccagagacgacgtgggcacgagggtgccacagaacgagatcccaagtgttgttctccatgggtgctgagtgttcggcatccatagccgctcgccaatttggatcggtgagaacgctacgaaaagtccgaggaactagagacaatgtagtggcctggtagacggacaggaaatggaagtcagacttggcccgcgtggtcatcccatggccattgacgactggtgggatcgatacggcgcccttggggaaggcatagtgcaggagtcgggcagccaaggcgtggcgccgatgtgtacacatggaggggcgtgagagccacgagtggtgcaggtgaggctgctgcctgtgacgcatcagtcgaacttgcaccaagatccactcgtagtctttttatcggtactcctctgatcacaagggatatcagtgcattgatcttctcaccaaccacgtcattagctcctgtcacgtggtctttgacgagtacgtctttcccctcgctggctcttccccacctcccgacctcgacatccaggataacgactctatcgccgtccctgctctttctttacccacggtcccgtcgacaccactcatgccatgtgcgaccctgtcacctccgactgcgccatgtgcgatgcctctgcctccgacagcgacctacggggc

SEQ ID NO: 20360 - DNA, 317 bp, Zea Mays
gtttggtaccaacaacgcactatgagatataccatgcaaagcttttgggtggatggtggagtccattgtagctcgatggttcgtgcagggcacgacggaacacagagaattatacaagttcgggccactaaaacacgtaacaccctacgtcatgtgtgcttgcgagattgtattgctcggtgttgttggttatagagagttctggatctagaagatgactatgcctactgagatgtgtcgtgttttcgtaggggtggttcttctaccttatggcgatagaaaactaagttacacgcaccacgcccatgcctgttgct

SEQ ID NO: 20361 - DNA, 638 bp, Zea Mays
aattgggggaaattaggaatttgggggctgtgggggctaatcgagagcgaggaatggtgcactggcttcgtaacaagctagcggagcaagcggggcgtcaatttatagtgaccagaagcggtggctctgaatttggggaggggataagcttgcggccggagcgaaggtgagtcactggagttcgctcaatgtggcatttactggggtagagtcccggggtggtaactaaccatctcgcatgacactttgcgacatggtaacatggtgagtaacgtggtgtattcggggtaacggcgaccatcacggcgacggcagcgcgaccacgtcgacgggcaagtgggtacggcgaagctgactctatccactccccttcggatctttttaccccctgcgactatccactcgccacagagcacaattcgtagcaccggtgcggatcacggcgcgaagatcaccggcggcgagattcactgaacgtggcgatcttgtttagtccactgttcaccactgaacatcgccccgagctgcttgacaaacaaggtttgggagcaatttactccaaaaattgtacagcaccaggccaagctcagtataacaagtttgttcactaatattagggcttcatttttgccacagtg

SEQ ID NO: 20362 - DNA, 515 bp, Zea Mays
gccatccaacgtgaacatgagataggtagatccctgcgatgcgattcgtggcaatcgaataatggaacgattcgtgagacgcttgatatgccgatgctcctcgcaaactctgcgcttgaaaagctacttattaaaggatgatagcgattggagggaaagaaaagatgtgtggtagcgcgcagtggccattggcgtaaggtcacgatcgccaagtacttgcctgtttatgcagcgccagcgcccattaataagcagaggaaggagccgtgggtatgggttccacgtcagtcagcctgatgccgcaaccgtccctttcacttctcaactgtccaacagttcgccccacttgtgaaaagggctgcgacttgtgggatggatcccgtccgtcccgtgagatcagagcataggatcctagtcctactaccatagagaagtggaccgtggacgggatggatcggccatatcagaccatgatgccggctttgatgtccaagaaaggctgctgggatggcaac

SEQ ID NO: 20363 - DNA, 911 bp, Zea Mays
caaaacagctatagcgggagatttaaaaccttgatttttattaaattctatggaaaattaggaatctagcaaaattggtcttacatttttaggatttttctacaattttctagaattgttttgagctctagtagaaaaggaaaaaaactgtgaatagtattggacctcattcaggctagtcggcccaatccgaacaggaaacggggacgtgcccgtgcgcgcgcgcccgcgttggtggtttgcacaaaggccccaaaatacctgaaaaatgcgctaagaaccccctgccactatttattgtctcactgacaaatgcaccgaggtccttcaacttgtgtttcttctccaaactaacccatggccacggtgcgttcaccgccggccatcccgttgcgcggtccggccacgaacaatggtggctacctaaattagctgtcgggcaagcataaccgacccgaggcaaccttagaacaggctccaatttgactaatccggaccaggatgtgcttgaccacggtgatggcagacaccgagcaccgatcaagatgttctagttgcatacgtaaggtcaagctctctgggttgcggataacaatcacgagcacgtgagggcgctaaaacatgagcaacaagagcgagggcagacctgggagcagctagccacaaggaggcggttcacggcggcgtagtcgaccgaattggggaagaaagaaattctctggctatagtgactaattgaaggtgggactgggtgctttggcttcgtgataacatggtgcaacagacccagccatcagtttataggattgctaagcggtggctagtgaatttgtattgagcgcgttggcggtcagagaagaaatgagtcacggacatggtgattcgtggcgttcaccgcggcggcctccctg

SEQ ID NO: 20364 - DNA, 430 bp, Zea Mays
acagctatgttattttggagcgaggagtgagcgtgtgcccgatatcgagaatactccgaacccacaggggaaattgtagtcttcgaggcgttctttgatacgtgactccgtttcccatgccactcgttctttgtcaaagtcttggggcgcttcggtgtttagcagcatcaactgactctgaacgctattgttgcattgtccaaattcctctgggcgacgactacctatggtggggagccttcgatcaaagaattcacgaagcactattgccttcattggcagaaatgactgtgggcagcaaggtgacttaatttggaagttgcacctttaccccgaagactggcaaaattgggggccaggaacaggtggggcagctaggttaagtcgtggttctatgtgaatcttggtgaaggtgttccaggcatggcgc

SEQ ID NO: 20365 - DNA, 706 bp, Zea Mays
tagttctacacccttcggttcgtcgacccctcacaaactttagctaatgttcggttcctttgttcacctgctgttgagcttgaaatgcagataaacctctcctttacattaccattcacgggtgatggaagctctggaagcagaccacaggaatgcagtaggaaaggaacctatcatttgaaactgaaacctgagaaaaacataaaagctgttttctgaaactgcgtcttctcagttatattcgttggtgattcgtgacgctgaaatgcagccaccgaacctgagcacctccacgcgcagtgacatctctggcgatgacccgcatttgcagctggccactacagagtacagaccacagagcaatagctgtgattgacacatctaagattctgaaaataaaaaacatatcactctcctaaatatcactggtcccatgcaccgacgatatctgctcccctcatcgcttggcaggggtgtaaaggctacactcacatacacaggctcagggtcaggctggaggctggcagtgacccgctggagagctggaaacgcaaggcaagcgcaagcgcaactgatggctgccttcattcctccttcttgcgacatccgcccacacccactgatgatggagtgatggtagtggatcatcggtggtcgtctcatcaaccaccctagctacggcaccgtattcaattcctctcacatg

SEQ ID NO: 20366 - DNA, 797 bp, Zea Mays
gaagggataaaccaaggagagccttcccccgcaaatgcggagatacctgaatattatattgtgcctaaatcctccgatgtttatcattttatagtattcaggtggatgaatacctgaatattatattgtgcctaaatacctgaatttctaattctgcttaccctctcctctcctctatgcggcttatatagtcctgcggtcctgccacctagcaccccccctctttagccggctgttgggatatccgtgggcgcctatgctgatacgtacagcagacaaaaagcatcaataacaaggatcaaagtacagggctctggtaacattattagacatgtgttcctcctctccaatagccacagcaggttcacaagttgaagcactccagctggcaaccgagtcaaaatctcttataggttgggccgcctcgactcgtggggcagattacgggcaattagcgctcggcatcaaggctgcttccaactcaggtcgtaattcttcatgataggtcgatgtatatcctttccatgcccctttgcatccaccatgcctccaagccggcaagccagggaacccaaggtgctagccatgcaaccatgcagcgcatgcaaagggaccgaaacagctgccctgaatttcacggccacatccatgataggcaaggcacagccagctgcatgcaccaacggaccctgtggctggaatcatggggtgttacaagataccaagatgtttgtttagaatgtcgccatctacaccgcgacgccagctagggtttcaactcattggtcttgttggtg

SEQ ID NO: 20367 - DNA, 649 bp, Zea Mays
acgaaatgatgtggaattgagccgatacttcacgaataggtttatatgggtgaatatgagtgaagtgagtacttggtttgaatttaggcgaagaaagagagatttgggcactcggctcggaaacgatcgctcgaaacggggaatttggtgaaattaaagcctggaatatcggatgggcgtgaaattttgcgaatatgttactggaggtgttgtgaaggtgcttgaaaaatttgggttcaatcgaagcatctttggctggtttgggcatttcaccgagcatgtggtaggcgaaggtttaggttttcggtgaaatagctatttaaggctgtgaaaccctccctaaggagctgagaacctacaaggatattcaagagacacatgggaacacattccaccacttggattcactagaattgacaggaaattgatttgggcacaaaaggggtggaggtgagctcactgggctgaacagagagaagagagaggagtgaagacattgctgctcaccagagggagaagggatgagcgcaggaggttgccggagtacggtggacgacggtgcacggtggtcgccggtgagaggatctgatcgccagaggagggcagagagccagagagagggaagaaatctgagagcctctggctcggc

SEQ ID NO: 20368 - DNA, 929 bp, Zea Mays
agcacaaaagttttatcaagatgaaaacacaggatcatattttgtgcttgttgatgtgtggaacataggaaaaaatgaggccaaaagtggatttatataacaacaacctacaaagtaacgacaaccaaaaaaataagttaaaggagagggacaatgttgtctggtatcgtaattaggggtacttggattacgctcctaaaatacgcttaaccccaagaccaccgtcagacacattcctcgaggtcaagagagcataacccgcgcttcgcctgaggccccactcggtggtcaccataactccgcttcgcccgagcctgccctcggacaagctacatactcggaagaatcctcgtcccggtccaggtcccctctccctagaattgttgtctcagcctcgctcgagcccatctcgggcaaggaagtcaatcccgaggcaggtctcagccgttggccgcaagagacatgagcattcaatgcgcacacctaacccacgcagtgttgcaggtgaacaggagcgacaagactatggtcccatcggacttcaccaactacgatgacgcatgtggccattgttcccgcacgctgcctgccaactcctaatgggacacacatacgacaaaagtgtggggtgatcctcgagcgcaagctccgcctcgcccgaagtcagcctcagcctcggaacaaactccgcctcgtcccagcccggcctcggctacctgctccctgggaatcccgcgtgatgtcactccttcaagtgtgtcgctcaagtctacgaatcctagagcgggctcggtcacggcctcgatattagcgacagaaggtgcccgacgtcaccaaaaactgcagagctcacgtattacccaagggcttttcgctatactcagcactgcaccaaccactatggcatgggtaacctccctgtcaaatag

SEQ ID NO: 20369 - DNA, 531 bp, Zea Mays
taaactccagccgagtggcggaatgcgcctgtctaatcctaagaacatggaacaacctagagtttgcctgatgagatggacgaacacaaaaacacaaatggatttagattgcttcgggccgacggagcgtaatacgctactccactgtgagttgtattactgagagcttgagaaagtctgggtctggatggagatgtccctaagggagtttgagtgtgcatgtccccttgcattgtactgcatgtgctctcacttttatagtccaaggggagcacgtacaagggagctggaccccaacaagtgggaccagtgttctagtattaaatatatacaacatggagccataagtgcaacggtgggctgagatctcctcttcatttagcgtgtgtttcctccgaccaggtatgttctccacctcgtttgcccgccctgtgcccgtcgcggtatgtacctggtatgctgacgtcgttggggctaagcacgctgacgtgcacatgagttgatgcgatacctcggtgttctcaccttcac

SEQ ID NO: 20370 - DNA, 522 bp, Zea Mays
ctggccgtcgtcgtgctccaactcagcgacggtagttggctgctgcatttcctcgaagtcgtagctgatttgggcggccaacaccggaccaccagacagtggatggacggaccggccgtcgtcatgctctgactcggcgactgtagttggctgctgcattccctcgaagtcgaagttggcttgggcagccaacaacagatcaccagacgtaggatggatggatcggccgtcgtcgtgctccggctcggcgacattagttggctgctgcattccctcgaagtgtaagccaacgatgtgcccgtgcccgtgctgttgcacatctgcttcttgctgctggatcaagctggctggcgtcgcttccgggtggtgcgacttgtctggcatcatctccatgatgtctatgtcatagtcatcgacgtttaactcttcttcgatgctgatgctgaagctggagccgctgtcgtgcccgtgctctgacgagcagcagaccttgaaccggacgtcgtgctccgtctcggcgtc

SEQ ID NO: 20371 - DNA, 394 bp, Zea Mays
attgaagaaaacttgcaaaatacacactaaatcaacaatttaaccaaatacaggctggtaagcaaatagaaagcataaattagcataaaataaagagataaatttaatacaagatatacaaccgtggtactggtcgtgggagcgtagcgtaggttgcgacttatagctgacaccagcaggtcgcatgccgatgcacgtctgtgttgtgtgggtcatggcggtgggccgattacgatggagcacaagacagaatcaacatatgggcggctggactaggaggtgtgccgtgacgctggccaacgatagctggcaacggtgcaataggggtgcacccgagagcgctagagggggattacagtgcagagggcggaggcgctggcgtagagtcgtgggg

SEQ ID NO: 20372 - DNA, 300 bp, Zea Mays
ggttctgagagttcggagacccaattgacacaatatatcaagttcgaggactgctgatgcattttaatcaaacggaaacatcaagcttttggggatagaagtagtaccgaagattgattgtggtgttatgcatgatcatggacatggagcatgtaaagtgaacctgttgtctggaactggattcagtttctctgtaaagtgataggagctgggactcagtatgtaggtggacagttacttgtatagtttccctcttttaaactgactatatatatttttggctgtaaacatgaattcctg

SEQ ID NO: 20373 - DNA, 1081 bp, Zea Mays
agttgttaagagaaattaggagataattaagcccaaagttggactgtcaggctgataaagtctgaatttcaaactgacactggcctggacccaagtttaagagctatttcaactatgatctagtaagaatctacctagggttgctatagcaaagatggagatggtatattgctctacaattttgctgtagagtattgatcatgttgccatataagtttgagagaaaaatcaagctcaaaaacggtctgtcaggttatctgaatgcagttctccatggtacagtaccaggatcagattagatcgcccgcgcgggactctcaccaccgacgactgatcttcgccatgattcgcgccaccgccgttgtgattcacgtcgccggtgaccagataaggccgtccggtaaaagccatgcgctggacgccactccggtgaccccccaccgtacttcccctctgccttgcggcttgagcagataagctcgccggtgaacagccgtcttccggccgtgtgtcacgtacttgagcccctccaccgcatcgccgtgaacccttgtgcctctgcgtggctcgtcggagtgactgccgcggtagatgccacagatccacgtgcgctagtgcccttcctttcctccgaccgccgcgcatcgtcatccaaattcccggccaccgccgttgagccctataaattgaagtccccaccagccccgcaagatcgtcacccacccagccaccgagaatcgttagcaatcgttcgccagagctcgtgaatttcgaattctccccaaactggtctccgccaccgcatgatcaagctcgccgtggccagctcgattcaggttagcccaagttcctctgctgcttgttctagaatccttaggtaccccgcaaacccctcgacccctttaattgaaccagaccgccagggatcaccgggaacgcgtaccattgtcctcatcgtccgcggttcacgtggacagagcttgatagcttaccaattgtgaaattaagttaggggaatcgttcggggagggttcaatccggtgtacgtcgctcgggagcaccggtcgttgcgtaaatccac

SEQ ID NO: 20374 - DNA, 806 bp, Zea Mays
gggatttttgcaggtatattacatggctctgcctcattaaaaacctcaccccccaggaggaaaagagtgcgggccggaatgatactgtttggtgaattacaagagcgtgttagccctgaggattcaaacgaaaaattagcggagattatcgatattctaggaatgctctaggtcctcaccggatggcgttgttagcctgtacgcgctgggggacgcctttgtcttaacgatgaaaggaccctcccatttggctccagcttgccccgtgactctgtccgggttgttcggacgagtacgaggtccccttcgtcaaattctcttgggacgactgcgtggtcgcgccaggccttcgtttgagcttggtatttgttgagggcctgcatggcgaagacacggtctcctcgatgaggtctttggaggttggttcgtctacgtcggggacggctgaagcgcttgtccgtggtgacccatgcttgatttcctgcggggtcatggcctccgatccgtatagcaggcgaaagggagtgaatccagtcgctcggcattcggtcgtgttcagcgcccagactgcttcaggtagcaggtcggcccatttaccctttttgtcgtcgagaagcatttccttgatggcagtgaaaatcttgtcgttggcgcgctccacgacgccgttagattgtgggtgatatactgaggcgaaggcaagcttggtgccaatggtgaagcaaaagtccctgaagtcctggctatcaaactgtttgccattgtcgactgtgagctcagatgggactccgaatcggcaaataatg

SEQ ID NO: 20375 - DNA, 414 bp, Zea Mays
ctcttatgcaattatccaaggccgaaggggtatgctaggatccgagccacaggattagaaaccgagggctaggattagttcagccaaacactgaaccagtaggttttctgggccacaggattgaggatcgacagtccagatttaatgatttgaagggatgcgccgggatttgatctaggccattcaacgcatgatcaacggttgaaggccaatacgagctagatctaatcctagccaaataccgctgatccaacggccagaccactttcttcttcccttggccgtacccagcgacggcgcaggggcaccgcgccggtgagcacgcgcccaacgccccagagcaagattcccagtgccgataggtaatacacgttctacggagcatattgaactgattacggtggggcttacttg

SEQ ID NO: 20376 - DNA, 461 bp, Zea Mays
gtcatctcatccccaaccatctctgcctcctcaaactttagtacctttacatccatcatcacctccacaatcttcccatgctgctcctcatactctttctaatccaccgtctccgccacaggcatcaacatttaggacaccaccaccttctccacagccatcaagggattcacgacaatcaaagaaatctaaattccctctaccaaaattggtgtccacattcgaggaaaagaagagtaaagctaatactgttggcataactcgatttttgaaagggattggataggacctcacgtcacgtactgttgatttggccgagcacgaggagtctgcagaaaaggctaaggcaatggccacaaagataaagatcccaactaaggcagattataaaaatgtgcctaaacattatgtgctgccagacctctactaactcttgagaaactgagaaaggtccctactgg

SEQ ID NO: 20377 - DNA, 828 bp, Zea Mays
ttcgggcgccctctttcctctcttcctctatccttctgcgcagacccgagcaaagaagcacttcaccatcgccgcacaccattagctagggtggagatggtccgccatcgctgcttgattcgcacggacgccgcgcgggtggttttgcacctgggcggggggatcgccgcgtctccgtggagctgccgtgtgcctcgcggaggaagtgctccactgtgtgacccttaattcctcaccggaattactggtccatcgtggatcagtcagcgccatggacttcaccactgccccctcggaatgccggtaagaacctcctacgaagttcgccgacgtgccaattccattttgcgggtgtcaacactagagttaagacactgtagtgacggaattgcccggcgccagccatggcgctgccactggtgttcgtacaccgttgggtggggattagtctccaccgtagctgcgcggtgagggaaggaagaggcagcgtgtgccgtcgatcgtgcgatctgcggttcggattagggcatagcttaccccttcgagcgagaaatcctgaccgtagatctagtcactagtggatgggatggaatcgggagtatttaaatctgagccacttctggtgaatccaatggtggctgttgcgtaccgattcgatcgtagtccgacttgatctagcgtgcccataggcgatcaaacggtcgctatcacccgacgcctattcgaccctagaaatttgcataagagtccctaaatgattgagaaatcaacccgcggtccactggactgttctctgtgtcttaagaaatgttaccccgagacccctga

SEQ ID NO: 20378 - DNA, 567 bp, Zea Mays
gctaaacaatgaaatttctcgagacacagagggtaacccaagtggactgcgggttctaattaggaaaacgcaggggctctttagtgaattggccatcgcgaaggggtatgctcaaatcctagccgtccgatcagaaacaactggccccgattagatctggcgcatgccaaacctgtgagtaatccaaaccgtctgatcaaagatttgtggcccggaataaatcttaccatggtcccttcgcgtccatccgatcgggatcgagtggcgtagggacatctgacagaaacgctactggtgttacgatcctaaccgtcggtcgctcatcccacagccaaaagcccttcttcctctacctactgagctgaccacggcggcgctgctcccccgcggcagagggcacgccggtgaaccccccattggcgattccacacacccaactccgattatccaggtgttaagtgaaggaaatgaccatgcgaatacgaaggaagggttccttaccggggtcattcagtgtcaagagccagccacggcaagaagcggacccacgacgacggcgtgatcccg

SEQ ID NO: 20379 - DNA, 410 bp, Zea Mays
tcgaacggccatcatcctacacccgagctgggccgctatgatccagtctggccgtccatctgcgaaccaacggatcagataccccaagcccaaaaccggtaagagttatgcgatctggaacgtcccttcatgatccgatggtttaggttgcatcacgcgcagagatacgattcctcctaatccggcccacccattacaagatcaacggccaggagcttctctcccttaccactcacacggccggcgaaccccaggtagcggcggcattctgcccacagaacacggcggcgccatgactgaccctggcccaaatccgcctaggtgccccagacttcaattcgcccctagaaacggtatggcaatcacaagggaaaagtcctcaccggcggaaacgacgtgcagaggcccgc

SEQ ID NO: 20380 - DNA, 481 bp, Zea Mays
gcgacgcgaaccaaccacccgacaaacgttgggagaaaaggcctcgcgaagaagtacacgccgccggaccacctgcctctcgcgcccgaggaggacctcgcggaggtgaacgcacgctggacgacatcctcgacgcccaatgcccataccacaaggacatgcgccacactcttcgcaactgccgggacttcaagcactccgtcgggcatggccgacccttccaacctatacctcctcctccgccgaggggaggaccggatgaaccacgacaaccccgtcaaccccaagaggaaggaggaggagctttcccgcgcgtggacagggaggtcaacgtcatcttcggcggacatgggtcgcaggagaacaagagacaacaaaagctcaatgaccgacagatactggtggcaaccaccagccctcccgccccataccggtggtcagaacacccgatcactttcactcgggaggatcaatggctcaa

SEQ ID NO: 20381 - DNA, 463 bp, Zea Mays
gaaaaggagaggagaagaggtccacttcgtccgctgccggagtgcaccgtctaagcggtcgctcgacgttcaaggggggaaggtataggagatgtaccctaggtgcacggcaaaggtatctagggccgcatcgaagctgcatcaactcagagcctccggaattcgtcgacgggattcttgctccgccgcggtaacacctcacgccgtgggcgggactcgtcgccacttcaatcactggtgagttctcatcttctatgacgtgcgctatcatctccgagccgcataactctcagccgtcgatgatttgagggcacccgagtacgtaggcatgcacgtcggcagggagcatcgtcgtggtatgctcgcgccgccggcctgggtactggaagctagctaaaaacccagggtccgttagacccgtatcggatggtctggattaaaccagcattactttggctcaggc

SEQ ID NO: 20382 - DNA, 722 bp, Zea Mays
gtcaaaatgcggggtactagtagtacgctaggcaggcggtgttccaaatagataaatcgggtgatgtggtagttgtcaagcatgatagaggttgagtcacttagctataaattgatgctcgatatgtgaggtctcctaaaatatgatgttttaagtgactcgtgtgttatccaatttaagttgagcaacggttaagaaacactgattaatcgactccaacccatattttgagttacgatgtctaaaatagtttgctaagtcttctactgtgattagccaactcatgttaaataggagtcgatttcgttaagtgtttgttatatatgtgttgtctcggattgcgataataagaggcaagccgacgtgtaggatgtatagcggtctatgttgttgcgctagttagccaaattaatagatgtgtttgggtaatatcgtagtcacagtgatttgcttgttgtagtctaaatgtgtatgtttatggtcgcgggtaaaaagtagtagtgctcatgtgatgtctaatttaaaatgcaaattgttgagtgattgtcgtgaagaatgcattgttaattggttgtagtaattttggtgcactaatgacttgaataaaatttgcaagtcgaattgttggttccaaattgattgtttcaactcgaacaaatagtaaagtgttagagtaattcaagtctctcgaacgcggcgattcttgaattatatatgagcta

SEQ ID NO: 20383 - DNA, 476 bp, Zea Mays
gactgtcagatgttggtgactgagtttagttcagaagctgaaactgaatttttgtgaagttggttcaactttgaaatattgtaacttttaaaccatgagtctttagttatttgtcattgtagaaacattgtagggatattgtagtagtgcaaacttggttaagctatttgaccctagagctacatggaactaggtgtaaagattgctcaaagtggtgctgtcaggcagtgaggcactgaacaaggttcagattaaccaagtctgagttcagttcttttggctcaactttggtggattcttgaaactattttagggagttgtgggtcatgatttatataacaaagtggtagaccaaagtaaaaggaacaaatttcctaaagggcgatggacttggtgctacataaaaataggagtaaaatgggtcccaaccttccctgttcggctgagggtggtctgaatttggttgtattgtctgc

SEQ ID NO: 20384 - DNA, 418 bp, Zea Mays
cactggaaaacccaagaacaaggaagacatcatgacttcttcttcgggtgatggcggccaatcaggtattctcaagtcccccctgcccattttgaaaaaagagaatgaaattgtttgtcgttttttctgtcaaaagtgtggcgcggaggggcatcatgccacggattgcttcaaatctttatggtgcgacatatgtcgtaaagaaactcataacactgctagatgtgtcctccccaagcaaaacaaaccttgtatgcctattgttggtatggcggtggatgggttagggttttactcgtctcacttttccaaacccttgtcaaaaaaacctaagagaagtttcattagtttggtgaaagtggtagagggtttgatttctgctgaagatatcgaaaaggattttgatttccattttcct

SEQ ID NO: 20385 - DNA, 860 bp, Zea Mays
cggagaccctgttccgcccggccgccgtgaccgcttgactcacggccatttcagataagctcaccggagatggctgcctgccaatcggatgccacgtgccttgaagcttcacacatcgcagtaaaccactccatattgctggctcgtcgccggtaggcctgccacggtgaaagacacgcagctcttgtgcaagtgacctctttcttctccggccgccaccgcgccatcccaaattcaccggccaccacccccggagcctataaattgagtgtgccgttgggtccgtaaggtagtcaagcacccaatccaccaaactgtgccttcaattgctcaccagcgagccccaatttcggatttcccccaattccgtccaaaaccccacgccttgtgacctcgccgtggtcagcgtgctccatgtccgctcatgccccctgctctttcgttttagtatccttgtgtgtccctgatgctctcggacccagccgactaggctaggaccccttagatcgacggaaacacttcatgctgtccattgtgcccgctattaccgtgaacagggtgatgtagagctcaaatccagcaattaagcgggggaaaatgtttgttaagggtccatttggtgtctgccgcacgggagcatcagtagttgggtaatccggccggtgtaggctcaccggagctcggttctccgccgtgcgacgtcgtggaccttgggtcgtaaagaattagaacttggagggctttggtgtaaatgtcagtgactaaatcaacagtgtcgcgggctctttcggattgttgtcaaagccagggtcctcagtacaaaaccgtcgcgcgagcacgcgcgcgggggcgcgtcttcc

SEQ ID NO: 20386 - DNA, 300 bp, Zea Mays
gcattaactaaggcagcgatagcctcagccaatgtgggaggtacaggtggcgggtttggagtttcctccccgccgcgggaagttcccaccccatcttgagcacacgttcttgatggcatctaaggaagaaagatatactgaattattacatgccgaaagtacaccacctttattacataatgccaaactagtactaattatacatactcattagtacaactcaacttccttatttaatttacataaggacactacttatactacactactctaattatcttcgtccttggtcgctcctgc

SEQ ID NO: 20387 - DNA, 347 bp, Zea Mays
tggagcgtcattttcttcctcctcatcttccacagcgacaatgcaaacaacacccccattggggtcggcagcagatgaagcacacccattgggatcagtgtcagcaaggccggttgcaggcactacttcagtagcaggagctaaggtgctggcgtcctcatcaaagctggatacttgccgcaggcgtcttttcttcttcctttgttcatcagcagaaggatcgggctgactggtccggctagggcgcctcgggcgagtactgacaggttttgggacatccaaagttgtatcaacctctggaaggggcaccactgccaacgtaccatcaggagcagcatcggacgaat

SEQ ID NO: 20388 - DNA, 282 bp, Zea Mays
gtgatcatgtatatttgaaggtgtcaccactccggggtatgcgaagatttaaagtcaaaggaaagttgtcccctcgcttcattggacctttcttgatcttaaagtgagtgggagaagtggcgtatcaactagaactacccgatcatcctgtggatgtacatgatgtcttccatgtatctcagctgaagaaatgtcttagggtacctaaagagcagctaccaatggaggaccttagtgttcaagatgatctgacttatgctgagtattctatcaagattcttg

SEQ ID NO: 20389 - DNA, 481 bp, Zea Mays
aaaattatacaggcagctcggcctgaagatatagtggaacaagtattgaactttattcaccattcacacataagaagaccctccaaactgcaatagcgtcgtgtgcggatgtcctcgcggcaactgctactacagggagaacccacggcgaccgtgagggagaactagtggcggtggggaggtagggccctagcagcgggggatgggaggaggggaagatggccttgccggcgtcgaggagagagagccctagcggctgggccagctatgtcctttgtggcggctgggaccgctctcgtggtgagacgagtaagaaacccaattcgcgcatatttttatgcgtttggaatatgcgggcataacaaaatttggcgccagattgattttcgggagctatcaagagttggaatactctagctaaatgtattgacaaaatgaggtaggatagaaacttgataaatttattaagttcatttcagga

SEQ ID NO: 20390 - DNA, 951 bp, Zea Mays
gttatttgttggcttctgtggtttatgcccatatgatcgaaggcatgcacaaagatgatatcaacatggctgctgttatcgacgagtactttgtggagctcccaccacgcgactctacaatttatgaccagtgtgtctgcatggggcacactgtggaggtcgacgtctcttgcatcgaaggtgagtggcacgtgagaccactttgtcctgaccatgggtccggtgacggctacatggtttacccttcaatagtggtatttattttgttgtttggttttttgaagtcggagctagaccctctagtgatcatatgaattactcccatgaagggtggatcggcgaagtcttcttgcttaggtggtgggggagtggtagttgttggtttgcatgctgtggtggtggtggcagggctaatatttcttggtgttgaaggcatggttgctgggggaagggattgtggttttgttgttgggggtaatatgggtgtttgttttggtattggtggtggtggttgcagttggtaggtatgagcgatggatctttgtttgtctgtcgaggcggccctagccattcggtccttgatcgttgtctttgggaaatccctaatgggttgcgctgagtcttcaccatggaagacacaataaaatcttttgggttgttgaggacctcgacctctgcccctggtcacgttgccaccgcagccttgttgcggagggttgttctaacgccgggggtggacctctcctggttgttgctggttttttatgttatggacttgtagccaaccacattcttgttgggctgggtcttgttgtggaggcctgattcatgtcctgctagattgcagagtcttctctggctttcgttgtgactcatagtttctatggtggagctcttctgagcgggcatatttttcgaaaagctggtacaactcctataggttggttggtg

SEQ ID NO: 20391 - DNA, 612 bp, Zea Mays
gaagataattcaagtttagtaaaggaaacataaaggaaaactcgatcgtaactaaaacattaaaagtagatatgacgctttatttagatcctgaactacaaatctaactgtgagaaaaaatatgtttatattatttacaattgaagccaaaaaagaaaaaataaatgcaatctaactaaatagcctcaaatccacactaatctttgatggaacaaaaacatcatgaagaaaattagtgcacatatagacaacactttaaatggtcgagatataaagactacacatgtccccaggaccacttccaaagaggcattagtctagtgtggttttatttacaatcaacatttaagccaacactcacactgcaacgtcatttcattttaagtgaaatacaggtaaaaaagacaatgcagacccatagagtctatacaatcaaaatacaccagtttagaaagaaaaaaagtagatgtgttccaggtaggaaataacgtcaagaatctatcaaaggaaagtattatggtatcaataaccaacaagtcaaaattattttagctgaaccaataaaccatggcacaaaccatactgactgttatgaaacatcatgtatgttcc

SEQ ID NO: 20392 - DNA, 798 bp, Zea Mays
cttcggagctcggggtccgaggtctcctgccaactcttcgacctcgggggcctcgtcgcgtgatcttcgtcgtgggtctgcccctacggcgggttctcccaggcctaacgagtgcaggaatgggcgcggatgtcggggctgtgatgattgctccctttcaaattcaaagtcaatctcaaattcaactgttgggcggcattggcctcgtaggttgcagtggcggcccattctgcgtaacgggcccctcaggcctgggcttgggcctggagggatggatttgtcgggctcggttacttcagccttgctctgtcttttttgtaaagccagggggcatttgaaattgttctgcaaacgtaaaaaatcagaatttggtttccctctctcctcgttcccttccttcgaaagtttctgccctttggaagggtctccccgtcccttggacttcgggtcctggttccgctcgtcctcccggtctctgacgggtgggactccaccttcatttgcctccttccgtgaattcgccgaagcggtttccttattaaaaaaatccgaacaggcgccagaaacgtccttggagctcgcgttgggtgtcacttcaacaaaaccccaacctgcttctccaccctttgctctccggcgatcgtctgagaatctgtcaatggcgtaccggctcgtagacccggggccgttcctccctccaggattcagcgccgcggtggtccagcatcgtgggattatggtcaggtcagtttcgcagcgtttgccgccatttcacgaggactgggcgattataaatat

SEQ ID NO: 20393 - DNA, 680 bp, Zea Mays
gcagccaaggtgattcatcagggattttactggcccacgataatatgcacgaccaaccaagtcactaggtcatgtgaagcatgccaaaaattctctcctcgctcaggcgccccttcgcaattcgccaagctcatcgcccacacctggccacttcagcattgggggatggacatcgtcaggccactgcatacggctgaagggaacctaaagttcaccttcgtctccgtcgaatattttaccaagtggatcgaggccagagcagtctccacgataacagcgaagaccacccaaaaattcttctggcaaaacattgtctgctggttcggagtcccgtccgagctaacagtcgacaacagcaaatagtttgacaaccaggacttccaggaattttgcagttccatcggcaccaagacagtcttcgcctctgtctaccacccacaatccaacggcgtcgtcgaacgtgccaacgacaagattttcagcgccatcaagaaaaggctccttgacgacaaaaagggcaaatgggcagaccaattacccgaagtcatatgggcgttgaatacgatagaatgctgagcaaccgggttcacacctttccgcttgatgtatggatccgaagcaatgacaccgcaagagttaaagcacgcatccccccgaaccaaccaatcagccatccccga

SEQ ID NO: 20394 - DNA, 763 bp, Zea Mays
ttcgaaggttagggtctcggtcttgaagttagctagagtcccgaaggttaatggatgatcgacccgtctaagcggggtcacacacccctcggccacgatgccatgaaatggtcccctggttggcctgaggtggtctcgaccaagtcccatggcatcgtacatggcagagtagaggatgttgatcgcgctacctccatccatgagcactttggacagtcatgccacaccaaagatgggattaacgataagggggcatcagtctggctagggaatgtgctcggtgttgtcggattgatcgaacgcaatggcatggtcagaccaattgaggaaggctgaggccgctggccgggtgtcgggcacctcacatcatttgagtttccgatgcctactcgaagcgtagtaatcgcacccctccccccaccccccgcaagatcagcaagcagtcagtttcgcatggggaaagcaatcctcttcccctcggcctttcatcttttcggggcttaggtccccttcccgatggtgcctcgttgcttaggaacttcctaagtaacccacaatccttgtaggcgtgttggaccaggtgccgatggtttggacatggggcttcgagaagtttctcaaagtggtcgatggcttcctctattggaagcctccttcccttctggcctgtcgcagccactggcatatcggctcgccgtcaccggtctcctttccctcttgcatttagctgtctgccgacacccccgctcgactctttgtcgtg

SEQ ID NO: 20395 - DNA, 627 bp, Zea Mays
ggccatagtaccaccataggacaatgtcgaccaagagactgagaaccttgaagctatccaaaaagttgaaatatcgaggcagaagatgctttgggtcgctcatctacaagaatagattgacgaagcatcagaagaattttaccatatgacgagagaagaaaaacacacccacaaccaaggtcatcatgatgtaagagacctacacccacaagggcaagattatgctaccttcgtctacaacaacacatttcctttgttagtcaatctttaaccaacatcacacccaaagctgcacctaatcatgtgcctttaccaacaacaaggtcccacatgtcagcttgggcttgccctccaaccatcgttccctcacaaaagggaccacatcactgtatcaatcccctcagtttgcgagcggtttggccaccttgcacgcatgcacccacttccctttctatacgcacgaccttgcaccttaaccgatcccccgctaggccaccctcactcatcgacactgccaggctgcctctctatgccatgcccacacaccgtcgtcgtagcagttgccgctgcagctagttgtccaaggtcacaaccattcttgtcgtcgagtttgctgggcaaataccg

SEQ ID NO: 20396 - DNA, 963 bp, Zea Mays
gccagatccaaccacgggagaggaaggagcatcgcccaccgaacagaggatgagctgttttcagtcaaatgcaggccttcacaagaggtaaaagcagaggaagttgctttcagctcttgtattaggcaaaagcagcttttggtccaatgcaattgtggcttttcagccccctttggctgtctttttgcttttgcaaaagcaaaaaccatagtcacagaaacagggtcaatgccgcattccatgacccaaggtcggcatcccaaatcgtgggtctaggtcaccataggtaatcgtcccaaacgctagggagtcatcgtaccaatacagatggggacgacgaccagtgctcgttcgtgatggaggatcatgcaggttggggcagggcagctcagattggggcaaggcagcgcagatgacagcaaagcgatgtcgatgtgtaaggagacgaggacggagatcctcctatggccagcaaatggtgacactctggattcttgcatcagtgctcctcctgcaggttccagaggtcctgggctgggcggcgatgcttctgctatatgagctctatggctcctatgtgagtctagggcagaagtacagggcttcattgctataatgggttggtaattgggctggtgttatgttgtgttaaggtagtactaggctaggccagtgaggcatagcacgtagggtccttggaattttggaacacgaacctcgacccatggagtcgacctgggattattgacccattagaattgggttcacgtaccaaacccacgattcacataccatagaggtataacacgctccttctaccatattttttcaagtgtcgacccacgactcttactcaacacaatcgactcgggaacattgtgactatggcaaaaactggttcaaaagcccaactaaagggaccctaaaaagcggtataaaaccaaatactcggtccaaaaagat

SEQ ID NO: 20397 - DNA, 529 bp, Zea Mays
gtcgcctggaatcaaatcaccaacaggaatagcaccattttcatcttccagttcttccacaccaactgggggcccaacagcacagattagtgggtcagcaaaagagaccgacatggcctttacctttggaatccagcgcccagccagcccacgacgacggaaaggggtagacggcctgcgccttccacttgaactgaagcaatcctccggaccgccatggcaccgcgaagaacgcgcccagcccgaaagactgcggtgcctacgggtgccatgacgtctatcctgctgaaagtcctcatcatcatggtcccagcctcgacgaccgaaatccctgcctctgcgatcctctgatctctctcttttttctccgatagagtctggcacgctgtagctccacacaaattctctgcgtggcctacggcaagtgggaccttctctagcatcccttccacgaatgaatgaaaggtcttccacgacttcaatgtggtttcgaatggtgtaaacatggccttcctttagatcagttggc

SEQ ID NO: 20398 - DNA, 294 bp, Zea Mays
cttattacttgtcatgacccatgaatctatttggtgttggtgatctgttcatgcaagccatgctttgctcctactctgccaagtgcatagtagggctttgattgggtgttggctcaagattagagctgctgcaagcagaagccccgccagtaagattattacctaatggcctcaaagatatattatcttacagttaaatcacttgtatataaagtgcatagaattctatattcttattaaaagattatttatgtaccctttctacagtaaaattggcttaaaacaatgcatttc

SEQ ID NO: 20399 - DNA, 552 bp, Zea Mays
gggaaagggtcttgagaggacaagcagactgctgaacagaatcctaggcattagataccgcttcctgaaaaccatcaaatctgggccaaaaggattcaaaatgaaatctccgtttccgagtgtggttgtccttcaatcacaacaggaaaggacagtgatctgaatatggtgatttacatgaaaaagtttatatgcacccaccttcaagtgttgatattccttccggacatgtctgtcatcttcgtatagctttatatagtttgaaacaggctccttgtgcttggttttaaatgtttgtcaccgtaataagggttgctggtttttaccctagtgatcatgatcctgctttatttcttcatccctcttcacgaggacgtactttgctccttttatgtggatgttgattatgggcgatgatccagaacatatttctcaagtaaaacaacatcttactgagcaatttaagatgtctgattcgggccttctcggatatttcctgggttttgaggtattacaatatacaaagggatattatctctcttagtccaaata

SEQ ID NO: 20400 - DNA, 1016 bp, Zea Mays
aaaattggtttgacaattttgggatttttctacacttttctataattgttttagctctggaataaaaagaaaaggagaaacttgtgaatagtattgggctaatttcagcccagacggcccagcaacatagagaaacggggcgcgctcacgcccgcgagggggactttgcagaagggtccttgtcttcttgaatatcccgacagagtccaaggcactatttaacacagtcgctgatagttacaaagacaccctcgcacttctatccattctcggttttcagtccatgatggcgatccgcgctgggagctgagctccggcgagctagaccggccggatgacgccacggcaggagctcccgagcgacagggacacaattgaacctttaccgaacacttcccctccatcaatttcaccaagggggcactaaatcgatcagttcacggtgaccgggcggatgggcaaggggatgaatgtgttctgaccaaacaacggcgtggataaccaaattgaggctggggaaaggttcacggattcgctagaggttaggtacacacttggatttgggcgaaataggaatcaaagagtgggtcgacagaggggtagtcatggcggcgttttacagagcaagggtgcgttccggtgatgggcttcggccgaccttcaattcgccgctttcgagagcaataagagatcaaagactaactaaaacagggaacaatttgataaatactaacccgaggagcgctggccacgggtgttgcttcacggcggagcaagaacagaggagagagggatttgtggtttcttcggtgaaattgagccgagtgctcgatcgcggaggtgcgggatgtgataaagaagtagaacccgggcgcaatttataggccaacgactggaattggatgaggaccgcggactttagattgcgcaggcgagctcaccgcgtggcggaacccggtgatggcacggtggccgccgtttaaccggggcttgccacctcagtaactttctgccac

SEQ ID NO: 20401 - DNA, 553 bp, Zea Mays
taggagacatgtcggatggagatagagatagagaaagagataaagtctggttgcacggagagaaggttggcgcaggtttctaatgcaagtattgtagagaaacaaagagcggatggggtggtacctgattgaaggagcatctcgcgcatagaaggaagaatgtcaagaaatgtccatctgttccttcagacataaaggcatactttcaacttaacatagataagacaaaggaaaagaagagttctaggttcaggcagcagctgagggcagatgaggcagcacgaacccattttggggacgatgagtatgaggatgaacttaaagcggctatgcatcagtcacgtgtagagcacgaatttagtcagagggctggtgcaaggtatgacaggggtggtggatcctccagccagaggatatctcgagggccacttgataggatgatgggaaggagtagggaacaagtacctgagcgtgttagagactacaatcttgctcaagcctctcgaccaaggcaacagaggatagatactggtccctggacaagtaagggaag

SEQ ID NO: 20402 - DNA, 1040 bp, Zea Mays
ccctagggcaccacatcaaagtggtagagcaaacaaaggagaacaattttgcttaagagtgcaagccatgttcttgtgaaaaatttggagataattaaacctaaagtcaggttgtcaggctgttgaagtctgaatttcagactgacagtgccactgcagtgacttttgacatgaatttgggcatgatcgagtaataatttgcttaggattgctataacaatattgtagccggatcttaggactataactttgttaaagagtgtcgatcatgttactacacaaaattggaagttattggctctgcaaatcgggctgtcagttcatctgaataaggaattccatggtacagtagccgagctcaccgccgacgaccttcaccgcgattcgtgctgccgccgtccggattcgtgctcgtggctagtggataacctctcgggtaaaagaatcttcaccgccgtgcgctggacatcactacggtgactcaccgccgtcttcctttttggctttgcggctggcgcggatagcttcgccggtgaccgccgttctccggtcttgcgccgcgtgtcccaatctcgccaccgcatcgccgtgactccctctaactgcccgtcgaccaccggagttactgccacgccactggacacgtattcaccgcgccaaggttcttcctcatctccggccgcccatactgtccgctcaaattaagcgccaccgccccggggatctataaattgaccccgcagagagcttcacaacaccatcacccacccagccaccacgtattgctagcaattgttcgcccgagctcgcgaattttgaattcgccccaaatccattctccgccacccgaaacccaacctcaccgtggccagccttattccggtcagttcatctccttctctccctcgttcaagctttcccttaagtctacgatgcttgccgagccactgaattgaactaggagcccgccaatcgctaggtacacgacggtattgtcgtgatgttcacggccaccgtggccagagcacaccccttgatca

SEQ ID NO: 20403 - DNA, 732 bp, Zea Mays
agaatttgtgttcggcgggggaggctagcgtggacttactccaaatgatgagtcaagagtggtgagtcaagagaccaaagcaggggtacatattggttcaggcttgcaccctagtctagtgtagtgctgatcgtagtattgctataaggaacatgttacaatgggtgcaagtgtgagaatgagaggaagtggataactcaggtcgaatgctcccctctctttggctgtttggtcatccccttttatagttcaaggggaggctcttacaaggggatttgttgtctgaagcaaggagcgtcgcattgtctatggcggtcctgcttacgaagttctcatgacgtcgtcttctggtacgcgagtagtcgtacgcccaatatggcggatcgctccatctacctggtatgcgggtcactctagggactctagcgtttaggcggcacccacgggacagagtcaggggatactgagggccgtacgtggcgatgcctcaacccgttgttagagactctctgtcacccctcagcgcatcgtggcatcatccaaggcggtgtgtggtggcgatgtgccttaccatggctggcgtggggtaacagtgcatgtcttgcctccatgtcaggcgagtattggagtgctcctacgcgcacgtgataggagggcatggcaccagggcccacatgtaccaaagagaaagtcaacgaaatgatataaaggacatgtcctcataaaaatccc

SEQ ID NO: 20404 - DNA, 560 bp, Zea Mays
attcaaaagttctaaaccgatcaagagagcttcgtattcgacttgattattagtgcaatgggttttcaattggctagagaagtcaaaagtggcattccttggtgaaacaagcacgatgctaatcctttgtccttcattgcaaaccgattcatcaaaatacaaagtctagggactaataatgagatatgacatatctatctcaagagtatcatcaatctgatgctctacaacaaaatcagctatgacctggcctttcatggatgccaaagattcataggccaaatcatattctataagtgcataagcccatttaccaattctaccactcatgattgggtttatcagcatatgtttgattacatctgtttgacacaaaactgtgcaagagctagataggaggtaatatctaagcttggtgcatgcataaaacaaacatagacataatttctcaataaaagagtatcttattttagcatccaccaatcttcgacttagataagttatgtaatgctcctttcccttgctctcctaagtcagaacaacttcgatgaccttatctt

SEQ ID NO: 20405 - DNA, 990 bp, Zea Mays
tattgcacaagggtcgagtcatgccaaagttcaatctcaatggactcatcaccatgctcatgagtttctccctttttcttctcttcggctttcacgtaaaaccactcattcgtccacccggtcggccatttggcgcggtagcctatcacggggcctttgtgtccttccggtatgcaaagttgtagcatccgaagttcttgtgcaggccatcggctcttgccttcatctaataatggagctcatgcacccggcagaacccttcggcgttggcactttttccttggctttgaagagcccagatatatacgctgagcctaacaatggcattgggggtcagctggtgtagatagatttcaaacttttcaaaacctcaccaatcatctcataaagggtgaactgaagtcccgccctgaagaagctcttgaaaactacaacttcatcttcttgcggctctagaatcgtctcctctctagcaaaacgaaccaattcatcatcattttctccaaaatatcctagcttcttcatcagaactagatcctcagctttaactgtggatctcccgaattcaatatgcctgggcttagttggacatatgatattatcatcatcctcgctttcattttcactctcagcctcagccacggtctgtttagcttgggcattagtagcaccttcgacaacagtttcttcctgcacaaccaacccagaacgcctcatcatttctgagatgggagttgtctcagtcgtttcaatctcatctccctcgcgggccaccctagcagtactctggccatttcgttgatcagactctaacagaagaagttgcgcttgagcgatgaaatgcttgttcgaagcgtaatgcagaaagcttcggctttggtgaaaattttcaatagcacaatagtgcaatatcaatgaatgttgtggtaacttctcaccaacttgtctgtttatatagccctgcaggagaagaaggcgaaccgccaagac

SEQ ID NO: 20406 - DNA, 623 bp, Zea Mays
caaaaacttgttttagctagggtgggctttcctggcagcattttgcagaatttttcagactttgggatcatatttaggatgtgaccttaactgatcaggaagatagacacatatggaagctggaatcagatgggacatactcctcaaaatcagcttacaggacattctttgagggttctagtacctttgaaccatggaagagaatctaaaaatcatgggcgccaaacaaatgcaagatgtttatgtggctggctgtcagaaatagatgttggacttctgatcggcttgctagaagaggcctacctcatccagacagatgtcccctctgtgatcaagaggatgataccatccaacatctgttaacttcttgtgtggttgccagacaagtctggttttctctgttctccactctgaacctctcaaccttggcccccagacaacaagataataattttgctaaatggtggagaaaggtttcgagaaaaatcagtaaggagaaaagaaaaggattgaactccctgatcatcttaggagcctggagtatatggaagcatagaaatgattgtatttttatggctgaatctccctctgttagtctgattttgtctaattttagggatgag

SEQ ID NO: 20407 - DNA, 382 bp, Zea Mays
cggagagggggcacggctgcacgaacatgacacaagaagaggcacacagagaggaagccatagccacgccaccacgggcacaacactcgaggaggcacataggcaaggaagcaaggtagctcctattcagctgttgaggcatgtagcggaggcgaccacgggctggaatgcaaggagtaaaagtttatcacttcctctattgggccaagccgagaaatttaggtatggagcgggccatagtatgccaatttagatatggagcgggccatagtatgccataacgggtcctctgtcactatctgctagttaatttcttcatgatgtagttagagaactttgaaggaccgatgaggcgaccgaagggggtgaatgagagccacta

SEQ ID NO: 20408 - DNA, 507 bp, Zea Mays
agctggtcttcggttttataccccggaggcgaggatggcatcccccaccatgaaccagcgccggagatcacggaaggtcttcaacgaactctaatttggtacatgcagccttcgcgagggagaagtcctggcgaccctgcaggttgttgtgatcccgttgcgctcggatcggtggatttccgccctgcggtcgcggatgcgttgaccgtggcaagtttgttgggatacggagaagatgaacctgccgcaggggtggcccaccagtcagtcccaccgagccgagacccacgcatttgggaggaggctgcagtccagggcccacgttgcagtgaccaaaacaaaagaaaagggggaggaggctggcgggagtggggaaataggagatgaatgggccggccaagggagaaaacggcccatgcacaggttttctttttcttttctatttaagagctctcatttcaaactcacttcaaattcaaaacccctatttcgaattttatattctcc

SEQ ID NO: 20409 - DNA, 840 bp, Zea Mays
ttgggtggcctatgcgggatgatggtgactttttcaaatccgtgcatgattcaaggcctgtaacaacggtacaaatttgatattcgtatgtgttctgtcaatatttcttgacaacaaatttgattgggattgctttgtgacaaactttatttgtaggctggaagctcaccacaaaaggattccacgaaaagtacagggaagacaaatttcgttgagactagaacattttggcacatcttccgaagttttgaccgaatgtggactttctatattttggctctacaggtactatactgaaattgtatatggatgttcttttatcttgactacagtttgacacctgctaatattctagtatcttatttaacaggcaatgctgatttttgcttggaatgattattcagtgaccgaaatccttcggaaagaccttttgtattatctatctagtgtattcgtcactgcagcatttctacagttcctccaaagtatgttcccctttaacatgcttttgctgaccgaatttttttcttaaatatgtacatatcaacatgatatacaataagttttcctgaactatatatctttatgaagccaaagccattgttgccttatgttctttaattcactctttgtactttcactttttgcaaagtgattgacaaagtgggttttttttgggtggaatgaactgtatttgaatttgtcttcattgtttaaacggtgtcagatgaacttctcagttaatagatcctgaacaaataatggaagtcaaatgtggactaatgactcatattgctagaaggaatttgtttacatctgataatatctgttagccttacc

SEQ ID NO: 20410 - DNA, 338 bp, Zea Mays
catttttgattttttattttgttgtgcttcattgtgtatcatgattatggatacactagcatgtttgacagttcaagaagttcatcatgtcacctactctagcaactcaaactatgagccacactagaggaggcataagaatctcacacagttttcaccatcacaacatgctccccatagactaggcttcaacgcatgccccagcttgggtgtgtaattccctaagggagttatgtcatatacccccatgagccctaaaggtgttgctctagatgtgtcattcctctaccctcatgtcccgaccaggttgatgtgaccaccaagcacaatagctccta

SEQ ID NO: 20411 - DNA, 305 bp, Zea Mays
atggaggtctgcttagtgacgtagactctgggcccgtgctggactcgatgtgtaaagccggcctgctatcctccccacagttggcagcgaggcagtgatcactgctctgttgagccagcctcatcgtcaatgaggtgccgagctttcgctagagctcccgtcagccaccaagtacccaacttgagacgggcagcaagccggcggccaaggcacttgcccatacaccgagtcccaggcccagaagagtcgtaactaaagcgcatccgcaccacccttaatgcccccgcacgggttacaagccctcg

SEQ ID NO: 20412 - DNA, 642 bp, Zea Mays
ctgggtggaacgtgcatggcagattgacgtgtccttatcgtgctaaagatacaaattgtttttgtcttagtgctggtggcaagatatgttactttgattgtcatagatgttttctacccttcaatcaccccttcagaaggaagagaaaggagtttaggaagggcaccatcgtcacgaagggaccacccaagcgacgtagtgggatagaaattacagaagagcataggaaacttgtcctagacgagagtgggaaaaggtatcaaggtattggtgtggagcataactgaactcacatatgtggcttgtgggagcttccttatgctaagtcattgattttgatgcacagcattgatgtcatgcatcaagagagcaactttggtcaagccctcataaatacatgcatggatttccctgataaaacgaaagacaatgacaaggcacacatggacttagtcgtgatatgtgatcgtccaacccaagtgcttagagaaaacggaggcaaaccaaaagctaactattgtctaaaacctaagcaacgaaaagaagtgatgaagtggatgaaggatattaaattccccgatggttatgctgctggttttagaagatatgtgaacttgaagacaatgaagattaatggactga

SEQ ID NO: 20413 - DNA, 377 bp, Zea Mays
tggtaatagtatcaatccaacaaaaaatagaactcatcgtcaaaataaaaatacctgaagttcgttgcctgtgtcgttgtaacaacctcgtcatcggcctctccatcggcctctccatcgtagtcctccccatagtcatcatcatcacgcatcgatgaaccttggcctgccagctcgtcctcctgcctaggtgcattgtggtctgccgcctcgcgctcttgctcaaatgcattgtggtcctgctctagcataagtccacttgagcctatcgcctcacgctcctgctcaagtgcattgtggcctgccacctcgcgctcttgcccaggtgcactatggcctgccacctcacgctcttgcccaggtgcactatggcttgc

SEQ ID NO: 20414 - DNA, 399 bp, Zea Mays
gtggcgaggtccggccatggcctccaccgtgggcgcaccatctccgccgctctggtggtcgtgaggtggaaggccgcccagggttgttggatcctcgatgaagggtggaggtgtggcgatagttttggccgttggatcaggattgcgcgatcgcgattagctatagggcgacgtctcggccatagttcatccttgccgtggatcagtcagtggacggcttcgattaaatcgcctggtacccctttgactcattaaatcatagacatagattgcgagataaatggtggatccggtttcattaactcggggccaacagatcttgatccaatgctcctagttacctaccgattcaacttctaatctgggcgcttgatgagtgatcttgcggctcagatcgtc

SEQ ID NO: 20415 - DNA, 692 bp, Zea Mays
gccggaccgtctaggtgccttcaaactagtccgaagttgagcagaagtatgtgttcttcgaagtgatccaaagtgtttgtattgtggaccgtctgggctaggtggctagaccgttcgacagtattgaccagtgaaggtccaattttctcatagtccctgagttgttgtgtggatcatccggatgaagggcgtggaccattcacatgtgtccaaattggtttgaacagggactttgtggtttttgtaagttgtcttgcgaactgtctggacctaggtcccgaacagtactaactcctaggtcgcagactctctgaccgtgctcgccggaccgtccgtacgtattaagtcagatgggtagagctcggggtgttgaagttccaaggtcgcgtacagtctggtcggggtcagcggaccatctgcacctaacttttctgatagctctgacatgcttttcaaacaaaagtagccattaaagtgaaggtaggtcgttagaccctagggcgtggaccctctggccctagggcggcgcagaaatggggtagtttgcacataactactagttgtgtttggggggctataattagaagtggagctcatgtggggtagctctcttggtcattctttgaacacattgagtacacttgagtcttcaaaacactctcactctcaaccattgcttgggattgcattct

SEQ ID NO: 20416 - DNA, 278 bp, Zea Mays
gaggacgtccctgccgctgaagcagagcaagctgatgttgaggagaccgagtctgaagatgattatagcagcgcggtgccgagcaaacccagccatctggatttcggaaaatccaccatcttcgaaggtgacctacctaagatgttgaaattgggctattttaatgaagaaaagaaagagttggttcgctttggtggggaagaaactactccgaagccaggaaaagatgaagtagtagtttttaaaagtttctttaaagctagtttgagattcccttt

SEQ ID NO: 20417 - DNA, 290 bp, Zea Mays
tttttaagccagttttcagccggagtgagtggtctgtgatcctgagcaatttcaagtctatgcagcagctctcttgccagacaaagctgacaaacaacatcaatcttagcagaatcaaccaaaactctcacaacatcttgtctgaccgaagatttaagtcctctcacatttcagaaaagtattttagaaggatccattggataaactaacagggaaccaactgaacagatgaaaacaagccctaggactttaagtcttctggtgtagaccacccaaaaagagcagctaag

SEQ ID NO: 20418 - DNA, 383 bp, Zea Mays
gagcgaggtggagtatctccatggatttcctggtcatccgaggagtcggattcgaccacagatgggttccttcgacgcaccattctaagaaataagaaatagaacctatgatgagcaaggatcaaacacgtttgagtagaaacgcataagatattgagcatgcacttcaaccgttcatatgagcggttcaactacaacgaacaatatcaaatcgctaatctcaacaatgtttgtgataaatgaagataatctaagtgttgcaatcacttaaactaaaatgtacccaacgaatgatacattagataatcaagaacgcgtaggatcgagtacaaggaaataaaatagggcaatacctcgatccagagattgggtcaagaactccc

SEQ ID NO: 20419 - DNA, 400 bp, Zea Mays
aaaactccttaagttggtgcaatgtgatcaattaagcagcaaaaagctcagggcgcgtactataccctactcacacacaacaaaatgggagaataactcaatgttcaaaaaaccgcgaaaaaatactatctcaatgaaaagtgttttctgtttgaacaaatcaatgttcgctttcactctctagttactgtgcaggagcatcctcgcaaggaaccttgtccgcagggtcaccagaagaacagggattactcaaagtagccgacacagcgagtacatcagctacaatgtcatcagacaccacaacgtcaggcctcttcatcagaatccggctagcccagactgccttatccatcgctttgtcacaccatgccttcatgatggcacggtcgtcatccatgac

SEQ ID NO: 20420 - DNA, 580 bp, Zea Mays
ggacctcgagggtcggacgagacataagccatcattggatcagccaaatcgaatgtgtactcatggagccgggcgggacagaggccggtccaggggtcggctgaatcaaacgtagaccctaggggttgggcgagatggaggcatgctctcttaggtctcccgagtcggacgaaacgcacacggcccgagggacaatcgtgtgagatttgacctctccataccttgacaccactaccgcaacagtcatcacgatgtggcgtggaatggggttgtcctcatttcgtctaactctcatattgattacgtctaaatcaaatgtagaccccacatcccttgtacgaaaacgataaagacgctacggacgatctgtgaggtatgagagatcggcgagactagggtacgaatgtagtctacatcgtatgagcccactccagagacatgcaccatcactatgggcaactctgttttactaaccctggcatggtcccccatcagaaccaaagacattcaacgatacagatcaccgcgctcgcacacacgtcatgccttgaccaggataagtcaacaagtacaagattac

SEQ ID NO: 20421 - DNA, 1174 bp, Zea Mays
gaaaaccagcgccgacacccctaccccacgcggcagccaccccatcgcgtgcctcttctgttagccactgaacagcggggcccccggtcagctccttctccttcctacccgcacgcgcagacgaaacagaacccgccgttctccccgctggttgttcgcaacagacgatgtgcatagctcacgtgccttcgactgatccttcttcccctgctttctcggcaacaaattaggtgcccagtaaccgtcgtcttaactaaatgagcgcaaaacccggtcagataggtccttgccgtcggcacgatattggcggggactttgatcgtgggcttcaaatggatgccgcattgccctccgcgtgagtcgcacttagattagctccagttcacgaattcccatacgccactggattgagagaagaagaaagcgtcggagggaaaacgcgagagaaataggtgagggagggagagtagatccgtcgttggcgcgcgcagtcgtagtagccctggcctcgtcatgatgctctagtgcggcggcgctgtgctctggtgctccaaccgctttcgattccgtcgaggggggacgcatgggtcggcttggtcatctcttaattgctcgtcggactttggagatcaccttctcaccaccatgcgtcgacaccgggacttacgctccacctgtgccggtaaggaccgcttcatgtgtttcgtttctaccttcatatcatgttgcgtctcgccgatgtccatttcgagcactagtgcgctggggcggagatcgctggtgagctcgcctggtggcgatggcggcgccgtcgtctgcgagctgggtatggagggcgatggctatgcagcctttcgattagatacgtgcggccctgatcacctcaaacacatcccctttgcctcatcgaagctgggccattgattcttgatccgtccaccgtgaacactcgcgatggtatgttaaccggggaacgttagatcgggatccaacggttgtgattgtgtccggttcggggtgatgaagatctaatctaggccatcaacgctgatccaacggccgtgatcccgcgataccccttcgcgggcgcagattaacacaaaggcccctgtgttttagagaaatgaacccgccatcctgcgctgtatggcttagtgccttaggaagaattacc

SEQ ID NO: 20422 - DNA, 329 bp, Zea Mays
ccaatcttctaaaaagttggtccctttaatctcgaaaggttttcggctgagggcgtctgctaccacgttggccttcccggggtggtagtggatttcgaggtcataatccttgatcaattcaagccatcttctttgacggaggttaaggtccggttgcgtgaagatatacttcagactgttgtgatcagtgaagatgtggcatttgttcccgattagataatgcctccatatctttagggcgtgcactatggctgccaattccaggtcgtgggtagggtagttctgctcgtgtggcttgagtaagcgggatgcataagcaataactttct

SEQ ID NO: 20423 - DNA, 1116 bp, Zea Mays
gtgttgttactatttggttaaattgaagtgttctagtcacatagcaaacagctgtgggttgcaatataataaagtaatgaggacaagtaatgaaccaaacagtgcatgccagttaccaaattattgttggttgaaatggtcaagcactgtccagtatttgaacacactatccctggcttggtccatatgttagttgcttataaaaaacaaacttgcataacaaacatggaagcacagacaacatacatggacagtacacttaagcagattcataaaaacaaagaacttaagcgaaaaaggatttagaacctcagttagttgaagtggacgtcaaataatgaaattaaatatttgaagttgcataataagtaaaggtatggtcagttccatgcaatgcttagtcatgcaagcaaaattgtatgagacctgactacaaaccatacacagaggtactaagtcgaattacaagaaagtgatatgcaacaaaaaggggatgtgttggggaagtctacggtaaatggtacttagatgttcgcataggaacaagaacattagtttcagtacgagcaacattcaccaatcaacatacaaacaacatgacagcaaaataattgaccacttacaggttggtggatacactgaaatgaccactacacgatgacgaatatcaaaagcagacaagagtattcatgtcgtatcctatgatcgataacttaaagcaattttgttggtgtacatgataacgacggatcagttgagcatattaggcgattcggaggacacagtaaaccctagttctccaagttggccatgaacaaataaatcgatctatgtaaacaacttaagtacatgtaaaccctagggtgaatcgaaattaggtttttttgggacactgattgaatcggagatgtagaacatggagcaggggacacgtaccttggaccttcaagctctaatgacgcagatcgggtgagcgtagatctctcggcgaatcgacgaactcccgttgacctcctcccagcagacgcagcaccggcggacagagacgaccggcagcggcgccttcgcacggatcggcggggtggccgctccacgaagcaagccggcggatccgcg

SEQ ID NO: 20424 - DNA, 755 bp, Zea Mays
aaacaatattctaggttatttagaattaattttatacctaaaatgacttccaggggtttacatgcaaagtctccatttaattctattttctttccactggaaatggacggtgggttctattctaaaggaaggtggggtttcttttgcaaattggcggtcgaagggatattgttgggtcatgaccgtaggatcacccgcatacggtcaggattagaacgggtcccagatttataatatcgacgtgcgagactcaaccgttggatcaaggatcaagagtccaacatggttcagccgaggcgttaaccctccatttaatctaggccaccggtggacagatcaatggctagcatcagccccggctgatgatcaaatctccactattaaacgcaacatcaacggtacttggccaaccccccatctccggtcccaagcccaacggcgcacagagcgcagccaccgggatacgctgatacggcacctcggccataatggacgcacggaaggcagaaggggcggtaagcgatctcaccttacgacgatgcgtagcaagggaaagcgcaagcaacaactcgcggggcctgggcgtggtgctcggttgctcgacgaccggaggtgcggtggttagcagcacgacacgactgcgagagaaacgaccagagcgcgagagcagggaaggctttatactgcggcgtgggcgcgatcgcgacggtggttgccgagatccccggcgcggcctcggtgttctgtttcgcagg

SEQ ID NO: 20425 - DNA, 770 bp, Zea Mays
caatgacaggcacacatgagggtgctcacaatgttttatcccttatgtgttagatttttagaatatactcaaaattttaatttatcatatttttcaactcaatgaaataatttacggtattttttaggtttggtgatttccataatggatcttgtgttggattgctatttgcttttctccataactgtgaaacttggctctgtttttagattgtcaacaatagaagtagtttggtatgttcatctatgatacagtttagtagtagttcgttgttgaatctgtgaggcaactctctgtttaggttgcaacgattattgtctgaagctacaaaacaatttttttcagatgctattattttttgtttcagttcagcttttaaaccaacaacataacacttgctttcgtgtttatttttgcagtgtcgttggatctgttcactgcaaccactatgtatgtaggcaagtcgatattcacattcacaatctcaatgtatcttaataaaatgtgttgatctcaatgtatattaataaaatgtgttgattccgtagcaacgcacgggtatatacctagtttacatagaagaatggaaatggctgaggaatataagactatttgcaagaaattaattacctgtaaaagaagaaaccaaaattcttagcagcagccacaagtgcagcctcatcaggtgaggcagcctggtaacttatcttttccggagtttcctcaccctctggaagaactgtatgacagattgcaaggcatctaaagaa

SEQ ID NO: 20426 - DNA, 448 bp, Zea Mays
cttgagttccaccaactcgagcccagataccctgtaagctcttttagaaatgggggcggtgccaggaagaagctctatggcaaactcaacttttcgctcaggtggcatacttggtaaatctttcgggaacacatccggaaactctgacacaaccttgatagtctcaagtaaatctgcctccttgctatcgatagccatctgaagacaacctcctttccttggctcgggtgagactaactcagccaccacttcttctcctagtggggacaccaacttaattgtcctcttatcacagttgataattgcttggtacttatctagccaattcatccctaggatgacatctattccctgagtacccattactatgaggttagcgggaaactctatcccccttatttccacacttacattcaagcaaacactatcggctcgaactttaccaccg

SEQ ID NO: 20427 - DNA, 484 bp, Zea Mays
cggattcgtgctcatgccgccgtgattcgtgctcggatcatgtggatagcgcctgggatcgagtaagaattctcgctgtggataaactccggccattaaactactccggccaccgtaccgagcttgccccggtcacttcggataacctcaccggtgactgccgcctcccggccttgtgccacatgcctgggcacctccaccgcattgccgttacccgtcataactctctgttgatcgccagagtgattgccacggtaataggacaccaatccactgtgccagtaactttccactcctccgaccgccgctcgtcgtcgctcgaattcccggccactgctcttgcctattataaattgaagccaccgtgagctccgtaggatcatcacgcacccagccaccaagtattttcctcagtcgatcaccagggagctttaattttggatttcccccaatctgctcaggtccaactcaggtccgatctcgc

SEQ ID NO: 20428 - DNA, 651 bp, Zea Mays
tagtaaactcatgcgatctttcatgcttgacgaacagcacctttcttcctcaagtttccttactaattctcccatttccttttcatactctttaaactcatcagtaataattttcgtttttgagaggttctcaagttgttgctgctgctaacaacagatgccagaatagcaacattgtcatgagatggacttcttcaattcagcaacagtacaatgttaaactagaacaaaataaaaaaaaatgagcaatgcataaagaaacatataaggtggtagtgtcaagctaccttgttttcgtcgagcaatttctcaagctcagtgacttgtttggacaacaaattgttttggcctctctctttgtctaagtcctgcgtcaatcttttgactgaagattccaaatgacggttttccttctccagattctgggttaataaatcacttgttatattcttgccccctgaagcaaggtttcatatcatggtactgaagagggtcatactgaacgctgtgaacacttcaatgaaaagcaaagtgaatgtacaaacaatttcctatttgagggaaatacagcagggcaaagcacaacttcaaatttgtatctcataaacaaagcagtagaccgttctttgatggaattggctgttcaacgcc

SEQ ID NO: 20429 - DNA, 322 bp, Zea Mays
cgccagctcagctcgccgtcgttgatcgccgtccggattcgtgaagggtattggatggataacaccggaaaaagggtaactcgtacgtggcaccatctcgtgagctcggccagagttactcaccggcggccgccgtgactcagtgagctctcgccgcgctgtcgcacatgctttgattcacctcactgtgcctcttccttacgtggttgccatgcattaatagcccacctcgtagccgtggatcgatcaccggaccgtcgtgcctatatataggacagggagccatggcgaggtgctcactgttcttcaagtaagcttgagt

SEQ ID NO: 20430 - DNA, 464 bp, Zea Mays
cgaagcaagtgcagggtcaatagccggaggggcagcaggggcagcactagaactcccagcctcatgatcatgtgagcgtggaggcataggaggcggaggcggaggaatccctaaatcatcatcatcatcatcaacaacaacaacaactgtatcctgagtgtcgaactgacgaagagcagcatcctcggcctgagagtcaaaaacaggagcagaagctggcacaggagcctcaggcgcaggatggtaggatccaaaaacaaggcgtgaggcctcaagtgtgccctgaaactgtggaggccgaatcagctgcgcaaagatgtggcacaagtagtgagcatatggcaactttcgacgagcacgaatgccatccaaaacagtgtcctcgatctcacaaataagaaaatccacgacgtcaaactcagagtgagagactagggcaccaaggagccagagctggatatgtg

SEQ ID NO: 20431 - DNA, 2298 bp, Zea Mays
gggagtaaattcaacaaggaactcaccgagtacgactcccggagcttgctgggcctcctgagcatcgacgtggttgactcgtgctctgccctggtactgggtcctgctctgctgactgttggagggaggtgccttggaggtaggtgccgagggaatcttggggccattcaccgagttggagtaggtgggtccgggtgccttcaactgggggtagttattcttgaagtgactggggtctccgtagtgccaacaggcatttgctggcggttggttgcttgcaacggagggtgcctgaagggagctctgactctgctgactgtagcgcgatggagtgtgtccagatggtttattgaagcttggtcccctggggggagcccaaagggtcgagctctctggtgacgatcttgctgctgagctcggagaacttggaatttcctcttgaggtgccctttttcttcctcttttgccctttccagttggatggctttgttggagaggtgagagaagttgaggaagtcttagctggcgaggatggtcttaagctcgggtcttagccctttcagaaaacgggccatcttcctggactcggtgctgacatcgtcaggcgcgtaacgggccaactctgtgaacttgtgcacatattcgctgacggtccttccaccttgagttagttcccggaactcgtcttccttgagttgaactatcccctggggtacatggtgctcacggaaagctgtttcgaattctgtccaggtagcatctctgacggcctcgctgaaggtgtcccaccatgctagggccattccagaaagttgatgagcagctagttgaacacgctgatttttggggcatctgatggcttccagtttcctcttgatcgtgcgtagccagtcatcagcatcgaggggattgctagaccccacgaacatgggaggcttgagtctaaaaaattctcccatcctgtcctgtggtcttccaccacctgggcgctggttttccagacttctagtgaggacttcaatgagtcgggtttgattggccagaacttgggctaggtctagtggtagtttcggaggtgcggggaggtgggtctcactcccttctccgccagcctctccttcggctcttagaggaaaacctgctccaatcccggaggcgataggcatggttttatccgaagccatctgccatgggaagagagtcactatcatgcacatgccattttttttaactagttactttattcattacatcaggccattacataatacagcacacagctaccataagctcattacacgtgagtgctatctagggtactcccgaactccttctctaaagtgtccccaaattccttgagaaggtcatcaaggctcgctagggacatctcctcggtgtcagacgagtttcttatcccggcagggggtagggctggaggggcttcctccttatgctcagtctgacatccttggcttttggtcttcttgcagattcttcttgcgggagcgagcttcttcagtttcttgtcataatccatcttcagagtgtggtaggcctcacgggtattggtttcctcgccttctgctatttcgaggctctcttgaagggacgccttttcccttgtaagttccctgactttttgctctaggctttccacccgggaggttaggtgagtgcagtggagggcaaggtcatcgtattggttatcaagggtgtggaggtatccaaccatgtagacgatggtggggtcatcctcgacagggtctctacctgacaaggcctgaagtcttttcctccaggtgggggtattcttgttgctgggtggaaagtagcgaaggggagtttcaaagattactttgctgtagttctggcatagttgccggagggctgttcgggcaacattctggcaggtatctgggaagcggtatccggtaaaagtgacttggaaagaaggatggttcgaatagtttcggctttctcccaggtagactgccatagagcatttctccattccattctcgagatactccttccagacgtattctggcttcttgcggactcccatgcgaagcgcacagcttcgcaacagatgtgggaacccttccacttctgagcagtaggatgtcctaatggccagagagtcttccatctagaataggaaaagaaaggtctgttaacaacggggaagaggagagaagacttttcttggggtaagaggtattttctcttagggcaagttttagggtcagggctgcgacctacgaccagtcctatggctctgataccacctgaagcgtc

SEQ ID NO: 20432 - DNA, 345 bp, Zea Mays
gagcggcaagtccattttgaggtacctttggatcctagtgacgcagaaataagtgctatgcttgatttgctggctgaggactcttctgatgttgctcctgctgggacgttggtggtggcacctcccctagaaactgatacaaccttggatattcagaagcccgtcagtgctcgcccgagacgcccttcccgagccaatcaacttgatcctcctgctgaagagcagaaaaagaaaaagagacgtctccggcgagtatctagtttggatcgggatgttggtccttcggttcctgctgctgaagaagtgcttgttcctgaatttactgatgctgaccccaatgggggt

SEQ ID NO: 20433 - DNA, 1048 bp, Zea Mays
ctagaactttattcatcggagttccattcttcaccaatgtgggcttggccatatttcttcttcttaaagtatcctttgttcttgcccccatttttgaacttatcctttttgtactccttggcttcttgttcctttttgtttggacaatccgctatgaaatgaccggtttggccactttcataacatgcctcttctttccttttcgttgatacttatcatttttactaacaaacttcttgaaggttttgatgaacataactgtgtcttcatcacttgaactatcttcatcacttgatgtttcgaccactttctttgtcctgtgatctttgttcttcttggaggaatcttgttcatttgagatcaaggcatgggtgtctcttgtcttgattggagcttcttcggactcatgttgttgaatcttagcaaatagttggtgaggtgtcatttcctcatagtcatcacggtcccttatcattctttgtagacttttatccttttctttgtatgctctcataaatagtctagtgaccttagagtcactccaatcttcacttccaagcactcttattttgttgaccaacaccattagccggtcaaagagtgattgaagtgactcacccttagtccaatcatatcgtgcaagctcatcacttgaactatcttcatcacttgatctttcgaccactttctttgtcttgtgatctttgttcttcttggaggaatcttgttcatttgagatcaaggcatgagtgtctcttgtcttgattggggcttcttcggactcatgttgttaaatcttagcaaatagttggtgaggtgtcatttactcatagtcatcacggtcccttatcattttgctagacttttatccttttcttttgtatgctctcataaatagtctagtgaccttagagtcactccaatcttcacttccaagcactcttattttgttgaccaacaccattagccggtcaaagagtgattgaagtgactcacccttagtccaatcatatcgtgcaagctcactcttcaaagcttcaattctatg

SEQ ID NO: 20434 - DNA, 682 bp, Zea Mays
cgacaagtttcctcctgggtcatcctgcgaatgggccagctgaaggtaaccaggcgaggcaagcccactcggaactggcaaaaggtcaacgcccaagttaagcgctacaggagcacgagcatatcgggtggacggttgtgatcacccgacaggttgagccctcgacggtaactcatacagataaatgaagatgattccagagatgtaggaggacgctttgctacaaacagagagatagcgaatggattacgtttatcacttgcgcaggatagctctcctcggacgtatatataaggccaggaagcacccctaccattttcatctcaccgtgaaacacaacactcatagttcccaacttgtaatctctccccaatacaagaaacaccgtatgaagtagggtattacgcagctctcgcggcccgaacctgtataagcccgcatgactttctatcgtgccaccatacgaaccattgagtcacgatcaacgacgtcgtcgtgcctaaaagcataacgtggggtaccccgtggtgctcagtcgggtaacaaacaccgacagtggtgttgtgttatgtgtgcaacaataaatgcacatgctagaaaatactcaatctgatcatatgcacaagatatgtgaagtgtaagcattttgattcagttttaagcagttcaaaagagaagttca

SEQ ID NO: 20435 - DNA, 1374 bp, Zea Mays
accttgatggagctcggtgccgaaccccgcccctgaagcatcacagtccaccatgaagcgcttggagaagtacgacatttggaggagtggcgccgtcatcagtgagtgtttgagttgcatgaacgctgtgtccacagcgtccgaccagtgaaaggcctctttcttcaagagggctgttagcggggcagccacctcgccatagcccgctatgaatttgcggtagtagccggtgaggccaaggaagccccgcaacgcctggagagactgcggtcgaggccatgcctccaccgcctcgatcttggccggatccatggcgacgccgtccctggaaatgatgtgccctaagtaggacacattttctttcccaaagaaacacttggagcgcttcaggaacaacttgttgtcgctgaggacttggaagacctgtttcacatgctgcaagtgttctgcccatgtcttactgaagataagtatgtcatcaaaaaataccaggacaaacttccgaatataggatttgaggacgtcattcattaaggactgaaaggtggagggtgcgttcgtcaacccaaagggcatgacgaggaactcgaatttcccgtggtgtgtgcggaaggctgtcttgctgatgtttcccaaactcatgcgaacttgatgatatccgctgcggaggtcaagcttggtgaagaacctcgcaccgcggagtccatccaacagctcgtctactactggaatgggaaaggagtcctttaccgtcttgctgttgcgctcgcggtagtcaatgcagaacctccacgacccatctgctttccgtaccaggaggaccggggaggaatacgcagatgaacactcccggatgatgccttgctgcagcatagcctcgcattgcttcttgatctcatccttcagcagctgcgggtaacgatacggtttcaccgcaattggtgttgtaccctagaggagtgtgatgcgatgatcatggcgccgaggaggtgggaggctgcgcggttcctcaaatatgtcggtgaaggagtcgagtagtgttgcaaggagatccctagtgatggccagcacagagagctgcgactaggggccactgatcccggaccaacggacaacacgctccttgtgccagaacgccatggtgaggtcgccgaagttccacaagatcggccccagggtatgcaaccactgtactccaaggacgatgtcgaagccatccatcgcgagggtgtagtaggagatgtcaaaggtgtcgttgtcgatggagatgaccacctggcgacatacccccgtgctggggacacggtcgccgttcgccactttgacggagaggcaggttcgacgctccaccgtgagccccaacttgtccaccag

SEQ ID NO: 20436 - DNA, 284 bp, Zea Mays
ggcgaggatctccggttcaatccttatatcgaacacctaacaaacatcgcccggacctcacctgcttattcaaagatagcacctccatcttcctaaatcgctgcaaaggacacgcaccaatcaaccatcatctcgacatcacacacatcatccacatagggagcaaaacctagatggcctaccttaccaccggacgatcggcgcgaggcgtggtgttgacaactagctgtgagcaacgacaacacatggtttagacatttcatcgagcagctagggcacacaaa

SEQ ID NO: 20437 - DNA, 363 bp, Zea Mays
cccgaccagaaaccgaccaggtgctctgaccggcgcgcacgcttttctggttgactgtaatacatagttacgtcaattataaatatgcgttatgctcaattttgttaccgtttacactcttttggtgtgcgcacgtctcgcggcatccgggcccacgaaaagatcgtgtccccgcaatctgggcagcttacgtctaccgggcccacgaatcaaggaaccgagctctcattttctcagctcatctctcccgtaactatcgctgccgccgaaccctagccaaatccgccgccgtatgctgattctcctccgcgcccgtcaaaccctagactaatcgccgccgtgagcattaagattctcccccgc

SEQ ID NO: 20438 - DNA, 322 bp, Zea Mays
tttccacgaataggacaggggcagcccaaggtgaggtgcttggtcagatgtaacctttctctaacagctcatctatttgcttcttgatttcaaccaactcaagtccagataccctgtaggctcttttataaatgggggcagttcctggaagaagctctatggcaaactcaactttccgctcaggtggcatacctggtaaatcttttgggaacacatccagaaactctgacacaaccttgatagtctcgagtaaatctgcctccttgctatcaatagccatctgatgacaacctcctttccttggatcgggtgagactaactc

SEQ ID NO: 20439 - DNA, 506 bp, Zea Mays
gggagaggtagatgttttggggggttgttgaggtggtggtgggagttatagcctttcttggtggatggggagaggttggtagttttgttgatattgctggtagggggatcatctctaggtaaaggtgtgtgtagtgtggctagaaggtgtgggttattgtttgctgcctgcctggggtgcgctcttgctggcctttcgccctccattatttctttggcctctttgatagtgtggcagtcttcggttgagtgtccgacgtcttcgtcattaaagacacattatatcttacggttgcacatggggacgcatcccttgccactaggacctttgtcgcctctggctggttactgattttgatcatagagacgaggggggtctttgagctatttctactagttgatggtgtgggttcgttgctgctaatttgggggtggaggcttctgatttctggtcatgatttgatgtttgctatatgtgagggcttgcatatttttcaaagatttgat

SEQ ID NO: 20440 - DNA, 609 bp, Zea Mays
caaggggtcacaccttagtctcgtctcgctccctgaagcgaggcggtggaatgggcggagcggaaatgggagcgagaggtggaacagtggaagctggagtggtggaggttgtgggtatggcggaagtggtggatgactctggagcgatgggaggtggagtagaagctgtggcagagggggtggagggagcagaagagcgaggccgagatgcgaggcgacgaactctataggcaatctggtctgaggaaatctgcaactggccaccgctacttcttttggccttcctgctgctctaggtacactgtcttgcccttgacctgcctgaaggggcgaggagggtcctcgtcgtctcctccccctagcgctgagacattcttcgtctgcaccatcctgacctgagtgctgcataggagagtgaaaagctaagcacaagtagatagcagctgataagattagtaatgaaagaatggctacctggaaaccatacgagaaagagagaatccaggcaggacaagagacaggcacacaggtaggcgagatcactgaaatgacagaagaggtgagcacgtattagtcacatagtcataagtatatgaaatgtgaataaat

SEQ ID NO: 20441 - DNA, 441 bp, Zea Mays
gcgcgagcgggtgagcagcaacaaagctagagagaaaacgagggagttggagctcggggcaccagcttttatagccacgggcaagggagcgaggggacgccgtgtcatggtggccattcatggcgccattagagtggaggaaactgccgcatgaatgggggtgtgagtgaaggggaagcaaaccgtcgcatcgtaacgggggagaggaaggggcggcgtgcgtggctccacaagaataagagggacgacaggcagacagtagtgctgtccggcggctcggcgctttgcgtccagcagctaaactgcgagcgttatgtgggatgagaaatagaagattcatatgacacaagggtcccacatgtataggaaaagagaggaggtggatgacgggtgggccttatgcatggctgtgaagaattcttacgtgcatctggattggac

SEQ ID NO: 20442 - DNA, 708 bp, Zea Mays
ggaaatatgagaaacaagatcccctgggcaaccaaaacccgagaaaaagcccatttaatgcgcacttcattgtcatcctcaaggagttgcaaaacagaaaatagattgaaatgcaaatttgaaaccaaagctacatccttgagaacaaaactctcgttcactcgagcggagccataagacattaccttacctctagaattatccacgaatgtgatgtattccttaccaataacggggtcaagactggagaaccattttttttgcttccggtcatgtggcgcgaacagtcgaaatccatgagccatatgttctctaggcttccttcctgcatcaatagaaagacacggggtgaacaaatggcacaacactggggttaggatattgagaataataccagtgcttcggcatctacccacaaaaagtgttaggaaaacaccacccatcccccgtctagaagggaagcgatcaccataaggaaactatggtccactagggaagtaagaaccaaagccactgccacgaggtccttgaccatatgacacatgactagcacctcgtcgggcatgaccaccatgtggtcttgctgtctcaggctagcagcaagaggcaaagcacctctaggcttcacgggacgtctttgaatcggaggatcatgaacaccatgagaagggcgattcatgttccctctactcgactcagaaacccggc

SEQ ID NO: 20443 - DNA, 834 bp, Zea Mays
caccccaccgcattggcctcctaccctcgcccctatataaccgttgcgcccgtgacccctttgtctcccggctctgtcaccgtcgtttaccgggctgggcggaccatcagggagcaatcgagagaagagagagaacagaggggtgattcatcgtcaggttgtggtgtggagtcgcgacgccgtcgctcctcatgacattccacggttcttctggtggcttccacgaatactgtgtgtttggcggtcggatttcggcaattcctcacaggtgaactcgactcgccttggggccaagccgtatcgaggccgcggaaccactgagcgcaagtgtcggccagtccctcccctccaacgctggtatgaactctcctagtagatttggtgaattccctggtgctttgaggtttcggattggaaaaaaaaagaaaccaggcgccgccgtcttgtgagctggaggtggaagaagggacctgagtcgtccatctggtcaggggcggttcagatcagtttggggaatacctcttcactcggattaattgtgaccatcgcatattagcggtgcggccaggattagattcacatgtggcagcgttaggtctcatttcataaaatctgagccctcagtttagatcgaacggccagtggtgaaaccctcttcacaatctaatctaaaccacaagatgtagatccaacggcccactatcgtcgataccttttcagccgagtccttattcaaaagagaccctgtcattttagataataaaccatcggtccatccttggggtttctgagtctagggaatgtttctaagttagcccctggtctgtctggaat

SEQ ID NO: 20444 - DNA, 627 bp, Zea Mays
atgtgtttaatacttagaactcttagtcgatggtagaaattgttttggcttatatagagaggtggtgacatgccaaagtagccatcgtttcctctatatcttgagtcgggtcaatacgcgttatgtgttcatgaattgggaagtaagcgcatgatggtttcgagttagagattagtggtttacgattcgtatgctttggtcggtgtgcgaaaatacttgtgaatatatatgtttataaaaatgttgtagtatatgttgtgtctcggattgtgataacaatggactagccgacgtgtatgttatttagcgggctatgtcgttactctagttagtcgaattgttggacggctttagttaagcacgtaatcgcgataaattgcttgttgtagtctaaatgcgcatggttacagtcgtcggtaaagattagtagtgttcatgtgatgcccaagttaaactgcaaattactatgtgaagagcgcatcgataaacacatatatgccgggtaagattattgtggtagatgcgttgctaattgtgtatgacaattctagtgcacaaaatgaattgtataaaattagtaagtctacttgttggtcctaatttgattgtttcaactttaacaaatga

SEQ ID NO: 20445 - DNA, 413 bp, Zea Mays
aataagttgtctttcttgtacaaaggggagcgaatctctttgcttcctttaacaccggaggaaattttgaaggatgatctaaagaagaaaaggcgagagagcgagaaccaattgaaagtgatccacaaaaatagtaagggggagtttccaaagccaaataaaactccaccacctccaataaccaagacaccgggaaaagagggattagtcatgatgactaggaatggggatctaaaagaattgagtgaacctaatgccatgttctttgtgctcctatacaaggacacccttctttctactaacaacttaccctctaccttgccaagtattgtctttgatgcattacaggaatatgaggatgtgtttcctaatgaagtgccaccagggctaccacctaagagagggattgaaca

SEQ ID NO: 20446 - DNA, 1129 bp, Zea Mays
cttgtgactaaattgatcgtcatgacatattcgtcacaaaaactgccatgtggcaatgatctaatgccacactatatgacgtttttggccttgtttataacgatttagggtgtcatagattttatgacgaaaatatttttcgtcactatatttatgacatgttttgccttttgtcacaaaaggtcctttaacacgcacattctgtgacgatggccttttcgtcacggagtcgtcacaaccaaatagattatgacaaacaaatccctatctgtgacgtaatgagaatgtcatagaaggccacatgtgttgtagtgtctaatggggaaggtatctaggtgtcagcagtggtgaagcctaggtgtgaagattcagttatggttggctggcactttggatcttgaggtcgcacacccaaggaaggggtaggcagagcagcatacaagatactttaggacttaatggacccttttcctcgagagattgctaccgtcatacctaggatctttcctaggggtgatcctttcaaccctaagtgggaccagcctgagggtagagctctgatagggggtgatagtgagcagcagtacagtgacactgtagcctccagtgctatgtttgcagttatgcaactgtataacagctctgagcgcaacttggagatggtcaatggctctcttgccatggcttagaatgagttgcaccggactcgagaggcacatgctgtagagatagctcaagtctagatagagttagcccaggttaccttagacaaggatgaggcaattcaggttagggatgtggatgtacttgacaatgcgttgtggattgacaaatgccaggactaccaggccatggtagtagagatcatcagggagaggaatgtagcctggtccaagataacctagcttagggcaacacaggtcaatctgatgcagcagctgaacaatgtaaaggcttggaatgctaacctgcatgaagaggtttttcagttgcatggccagctaaacccagttaaccttccagaacctgaggaagcagatgcagccgcaatagacgacggaggggcagtctttgaggtcaacagtacacagaattagtcagttagccgtcgttagatgctagactaatt

SEQ ID NO: 20447 - DNA, 424 bp, Zea Mays
tgggaactagactcgcgcgagacgatagcagggaaagaacgggtcatggggacacccatttatcccacagggttccggtttggagggagggggaagtcgttcacgttcccggtcatggcggtgatatctccgtgccttccattgcgaagaagaagagtgcactgacgtgggggccccacaacgcagcgtccacgtgcgtctgtagagctcgcaggttacggttccgcccctggacccacgtgccagtgagacatcttccacacgtctgagttcgcgaggtgactgtccaaccggacccattggccagtggcccatagcgcaagccacactttcacctaggccgcgcggaggggagtgcgaagctgggccaaattggatggggttgggcccagcttggtttttttattcttttcttttatcctcc

SEQ ID NO: 20448 - DNA, 405 bp, Zea Mays
tccctaatgcggggtggagaaactggtggagtagcagagggagcgggagtggtggaagtatgtgtggtggaggttgcgggtgtatcaagggtagtggtaggcactggatagtggaggctggagtcatagtggtgaatggagtggtagtggtggctggaaccgagaagatattcatctaacacagtaagcaatttgatatgagccaatatgcatctatcctccgttctcttctctctcacctgctgctgctaccactgctcgagtagctctatccaatctgcacttcttctctgcctccctactgctcaaggtagactgccttgcccttgtcctattgataagggtgaggagggtcctgatcatcacctctccctctcggagtcacattctttgtccgaaccatac

SEQ ID NO: 20449 - DNA, 772 bp, Zea Mays
gggggctatagaatgagtacctacaagtaaaagacgtgttccgatgggtgaaggcatcggatccgtctcagacaaaaaatcaaaatcattagttcgagggggcaaggctgcgaaagggaagcaagtctcatcaaagacaacatgacgagatgttaagacccgatttgtggatagatctagacagcgataacctttatgctcagtagaataccctagaaaaacacacctagtagaacggggagcaagcttatgcggcgcggtggcagagaggttcggatagcaagcacatccaaagactcgaagctgcgcatatgtgggaggtgtgttgtatagggcagcaaagggacaagaggcgtggacagttttagtgggaaggcaattgagaagataagtggttgtatgaagagcatctacccaatagcgaggaggcatggacgcctagagcagcaaggtgcggatcatattgttggtggtgcggagcatgcgttcggctttaccgttctgcgacgatgtataggggcaagacatacgaagtttcacaccattggtgagaaataaggtccgggtagaggagttgtcaaactcccgaccattatcacattggacttacttgatcgtgcgcccaaactgagtatgggcataagagaaaaaatgagagatggttgaaaaggtgtcagatttgaggcacagaggaaaagtccaagaataatgtgaaaaatcaccaaggataaccaaatagtatttaaacccggagacactgatgacaggtgag

SEQ ID NO: 20450 - DNA, 478 bp, Zea Mays
gcagtatggtaggtggtgttataccaaaactttgctaaagccaaccactgcctccatttgtgaggatgatcatggactgcacacctaagatattgttccaaacactgattcaccctctcagtctgcccatctgtctgaggatgatatgcagtagaaaacagcaacttcactcccataagctgaaacaaatgtgtccagaaataacttgtaaacactttatctctgtctgacacaatagttttaggagccccatgaagcttaaccacagtgtccagaaacacctgagctaccccttgagcagtgtatggatgtttgagggaaataaaatgagcatatttggagaatctgtccaccactaccaaaatagtgtcaaaaccttcagatttaggcagcccttccacaaaatccatagaaacatcctcccaagcacctgtaggaataggcagaggctgtaacagtcctggtggatgcactcttt

SEQ ID NO: 20451 - DNA, 442 bp, Zea Mays
gactgctatagtaagattgaagctggatagtagagaaacaactttcttaaagatggattaggaagtcactgcatgagaaattaagatccaggccttgcaagttgggctgtcaggctgactgaagaaccatcccatggtacagtaactgaaaaatattacaagttcagcccccctcgccgccggtgacctttgcgccatgatttgcgtcgtcgccgcgattcatgctctctggtaagtggataaccacgacggagtaaagatcttggcaccagatcagctcaggctcggtcgcggatgagtttcaccgtacccacttgctcgtcgtgcggccgggatagacctcgccgccgttggccgctcaccgctatgcgccacatgctaaagcgctataccacgtctcagtggaacacgtcatgcatgcccggtgatcgccgaagatctg

SEQ ID NO: 20452 - DNA, 712 bp, Zea Mays
gaagaaaccactccgacaccggaaaatgatgaggtggtagttttcaggagtttcttcagagcgggattgaggtttcctttgaacgagatgattggggaagttttggtaaatttcgaaatctatcttcatcagctgactcctaacgctatcattaggctcagcgtcttcatctgggcactccgaagccaaggaatagacccgaatgccgaagctttttgccgagtgcatgagcttcattatcagacgaaggccagagaagatgggcttcatgagaattttggttgttacaacttcgcttaccgcaaagatatgaaggctctggtggttagctatcgcaccaagtggccaactggttggaaaaatgagtggttctatgttaaggccgatgaaaagaagagggagaagctaaagacgctagtactgagcccgctgagcttaagcttctggttgactaggcccctatgccacatgacgtcggggtcaccgtgccaacaagctgtggcagaattcagggtggtagccgagcagatcagcaccagagatctagtccaagaatatctggcctataaggtgttcccgacgctgagtcaatggaatataccaaagctaaaagggacaaaggaaaagaatgaacttgtgcgacttccttatcggttcaaatttgagaaacagttcaaagggccatgccaagaatggttagaaatgatagaaa

SEQ ID NO: 20453 - DNA, 544 bp, Zea Mays
gtgccacacacaactttttttgttgactttgtaggactagaacgagggaggaagagccagcgtagaggccaaattttccatagacagctggcacgttattgttgtgtgacgactgacgagacgggaaataacttggcgttgcatcaatttggtccagctgttctcacccggcgacgtgtggggcagctagcgccctgcgccccgtaggcattggccacagccctgcacccccacatgtgcccaacgacgttgtccttctcgaggactgtgcaaatgtaggagtattgactattgaccgccttgacttctcgtgcacctctttactcttcacggtccgatatcaatccacggactggcacgctgcctcctacaaaccagaaccctaccgcgccgccgaacacactgggcagtaggtagcctagccagacaagacagtcttgctctatgcctcgatcggcatgtggacgtcgtcgccgactgggagtcagggactggcacgctccgagcaaagcgcggccggccgccgtcgataacacgcccccca

SEQ ID NO: 20454 - DNA, 655 bp, Zea Mays
cgaaggacttaaaatatctaaccttttttgcttcttcagtttttggttcttcgaccttatctctatcagcctttagttcagttatctcggctgagggcgccttcggtatggtagccggttcttcagacttctgtgtaggaggagtgggctcctttggagaagcagctgaagaagtttccccgccaaaatcaggcaccacggccggctcaatgtagcgtggccgatgggtaagaaccttcaacttcttgctcttcggtgcaggctcatctaaagtagccgaagcaacagtcttgacttaagtagcagccttggtagaagcagcagtcttcctcttctttccctgtccccgcagtggatagcagtagtcagggtacacaaatccaatagcatcaaaaaccctatttaatcttttcttttttcggctctcgaaggccgcagatagtgcattatctttggacttggaatatgctccaagtagctcatcgctagtattttcaataaactttagccaatcatcatctggttcgacaaacttgtccccaaacctgaaggtgtattttaatcgaaccaggccgccttcgctagggttagtgatggtttctttcggcatctcccagttgtctaaaagtggccatatcttataggctatatgttc

SEQ ID NO: 20455 - DNA, 636 bp, Zea Mays
ggaaacgagcaccagtggcactcggctgagttgttgaagtgggggcagtggcaaggcggatgaatacatgttgtttaaaggggtaggagggtggacgtggtgaagaacggttttgattaaaaggtcggatcaccaaccttcgtagcttctcaggcccctggttggacctgtcacctccatagccctttgactttcctgggcctgcatacttggcttcaactgctagcgtcgtgttgatagccctactgtaggagaggtcgaggcaggtggccatctttcgctgcagtcggtcattgaggcctctcataagacaatttctcttcttcaggtcagtgttgacctggtcaatggcgtactgggacaaatgattgaacttgttgagataaccttgcttaagcttcataaattcttcttgcttcatatggagcactccttcaggaatgtagtgctcccgaaatgccaacttattcgtcccaggtaacttgatggctagcaggctgaatagccacataatttccccaccaggtgcttgcagggcctcttaactgctgcgccgcaaataagggcttctgagtcttcgtgcatcggagaagtccaaacttctgctcaataacccggatccattcgtcaacttcg

SEQ ID NO: 20456 - DNA, 501 bp, Zea Mays
ggatagataagatggggacgcagacgaaccgagtcaagcaggcaagcagccaaggcgcaacggcaacaaaaactagagaggagaaataagaaaaacggcctagccctatcctaccaaaaataatctgaacaaacttccaaatcctccttggaacagtcaacagccaaacccccaagaacacaccgtctcatcccagagtcccggcttccgatctcttcccttccccccgccgccggaaagatcccggctttttgggttccgcggcgagggataggccccaagaaggaggagggggcctcacggcggcggccttgcggtcgatgcgatcggttgacgcggcgggggcggagagctcggatcaccacaacctcaagaagccgcgcctggaacccaggaccaagatgccgctcgcggatgccgttgcggccggtgacagcggcgggggtgtggatgccgcggcggcgggcgccgacttctttggcatgacggtcgaggagatcg

SEQ ID NO: 20457 - DNA, 576 bp, Zea Mays
ttctggtcctccttgacagatcgggtagcttgcctacctagaattctgacaactctttttcttttggcccctccagccccttcatcaagcctttcatagtcaagatattcaaagttaagagcatccataacacagttcaaccttcatttcggccgggagccaaaggcggcagtcatcaactggtcttccttcttcatatagttctcaagaatctcgttgcacattgtttctatcaattctagccatttagtgcatggctctttaaatgtcttctgaaatttgaagcggtaagggagtcggacaagttcatactttttcccttcttccttcttccttcttctttggcattccccacccactggaggttaggacggttctgtttgccaagtattcttgcaccaaatctctagagctaatatgcccagccaccaccctaaattccacatcggctagttggcagggtgagcctagctaaatattgcacaaaggtcgagtcatgccgaagctcagtttcaaaggactcattaccatggtcacgagcttctcccttttcttctcatcagccttcatgtaaaa

SEQ ID NO: 20458 - DNA, 368 bp, Zea Mays
gagccgtagtgactacccagtaaccgtcgtagctcattgcccagtgaccaccacggcagaccgctacgatgactcactctcttttccggccgtcgtgcgtcttctcaaaattagccaccaccaccgatggaacctataaattgtcgccccaataagcttcgctaagtaatcacacacccaacgcaccagcccgtgcctcagattgtccaccagagcgctccaattttgaagttcccccaaatcagtcaaaactctgccgtgagtgagctcgccgtggccagatgtctacaggttagctcatgctcttctgtgggatgttctagcctccctcatgtcccctattgctcacagaaccatccaattgaact

SEQ ID NO: 20459 - DNA, 686 bp, Zea Mays
ggggaatgcatcgataggtgtctatgtgaaaagtgtatttgttttatgcatgtgatcgatgattgggatagtcgatgcgaatgaggagtatgattaatcctgttagaatcactggtgcggttgatgtcttatgcgtaatatggggacatgtatgtgcgcgtgtgtcgttgtgtattatagtgatggtggcgtaagataattgattgaggtgtgcgggtatatgccgtaatatggttatactcgcaacgaagaaagatgtatgtcttgtgtaacacaacgtttagattgatgtcgtataaccgtgtgaagggcgctcccaatggtcatgtgactaaagggggttgtagtggcaaagcgagaagtaagtttaatatttttaaacgattagttgatagcacctatcgacatcgtcatgatttttgttgtatggtggatcgatgccttgtcgtcgttgtcttggggaattttcggaaatgtgctggtgctttgctgatggggttgaatgtacttgtgatgtattagaataactgcgtgtcgtacgagtatccgaaaatggtgaaagttggtgtacgttggaaattagaaaatagtcacgacgttagccaatagccaaggttatgccgaaatttaaaatatgggcaatttgagttgaaattatgcttatctaggcgtgtggattaataata

SEQ ID NO: 20460 - DNA, 344 bp, Zea Mays
tgaggtgacggatgttgccttagagccagacttgacatattcagaacatcttgttcgagtcttggatccaaatgacaggattacccaaagtagaactctcaaattctataagatacaatggaaccaacatacggaagatgaagctacttgggaaactcaagactttttagaaaagaatttcccaggctttttagcttcatgtaaattgtaagatatgtacacttgttgtaatagaggaatgaactccataccaccccagccttgtaccaaaaataaggaaataaaaatatgacacatttccttttccattactagccctagacttttaaatctcgggacgagat

SEQ ID NO: 20461 - DNA, 506 bp, Zea Mays
ggtctgtgatcttgcactcgatgatctgcaccatcgctgcaggagctgctcctctctatgtacttccggatgatccgtgcataagctcgtttctagttggttctcaaaccaatcctgcagagtttgctaacaaatcgcacatgaaattaggatccccaactgaaagtgttccagcgcggaccgtccgagtcaccacaagagaccgtacggggtgtggaccgttcagactataaggtcggacgttcggccatatttggtgctcaacactcgccctagcagtggtggatctaggaatggactaaaggaggtgttgatttcttagtgatcaatgacacaggcaccacaaactattaggaggctaatttttctcccttcttcttcctcctcctcccttcttgccctctacatctttcttcaatagagtagggggctcatttttctctcttcttcctcccctcccttctcctctaccctccacctctttctccattggagtttcattgatg

SEQ ID NO: 20462 - DNA, 498 bp, Zea Mays
atcgatacagcatgcagcgttcttgttgccgcacgttacgaatgcatatatatcacgacggccgcctgcgacttgtgtagccgacgtgaacgatccggcagggtgaccatctctatcaatctactggtagcggtaggccattgcatccagtgggaagcccggacacagccgatccatggggagaggagaagcgacggcaagcgagggcacgttgaggctagggatgagatacactgtttaaagagtggaattcgaaataagtagtgagatagagaaattgctgaagatagtctttgatgcacgtagcacaatccactactaactcctatagttatttgacgagtaaagtacacgctagcgatccacgaactaggcatactgtgtcacttacatccgaacacagaaaaaaaggacataggttctcaaactttgtcagcccatgcaaaaccatccaaagacgggtttgtaaaatcagatgccaacatgacatgccacgtc

SEQ ID NO: 20463 - DNA, 396 bp, Zea Mays
cggtagggtagtaagttgtccagccaccacgaatcagccacgatcgttcactggaatcctcgaatttggaattctccccaaaactgtttccgccaccgtagaactcaaccccgccgtggtcagcccaattcgggtcagctcctctcctctgcctccttgtttaagcatttgcatacgtctgtgagactcgccaacccatccaattgaactgtgtgaccaccaatcgccgggaacacgactgccaagtcgcgatgctcacggccaccgtggccagagctccgtagttgatcataagcgcaattgagtgaggggaaatactccttaggggtataatctggtgtaaacttaagattagcgccgatcatcgcctcaatcggccggtgcagtggctcgccg

SEQ ID NO: 20464 - DNA, 1048 bp, Zea Mays
gcttgagactggacaataatgcaagattgttcttctaactgtctcttggcaaaaccaatttccttttcaatttcttgacaatgatgctgcatattcagtttagcagtatcaacaaatgagcaggactcatgaaattttcctagtacaacagtaagaaatatcaaagcttcccaactctccactgtttgtagctcaagggacctataactaccgcgtaactcattctgcagttgcccgataagaatatctttggattctaaatctgatatgcattcaaccaagtcattcacaagctttgtcatctgtattctccattcttcttccttatctcttagcttcttagtgcaacttctatgtgtctgctccagggctcggaacttctcccataaacttttcaatgacacaacagcatatgtgccaccaatctgtgcctcctgatactccttgagacttgagcgcaaatcctcattttcttgttcaagatgtgccttactgtatcctatttccttgagcaatgtaaccttctcagccagtgctcttctcaaatatgcaatccccccatccgtcttggagctcaacgactccatcattgatttggccccttcatattcagagaccacatagccatacatgaggcgcaactcagacaactctgcttcgactcgcttcctgcagccttcctcatgggccaacgcctggctgcacatatccaacctcgacgggaaatcctccgtgaccctggtcttggaatccaaatcatcctcaagagtgccaattcgatcaacggaagttgatctatctaagccccactccttcttgacagccctgaagccatcgtggagcttattgagagcctcctcgaggtgcctgaactgctcagccttccagttgagcttaccctcgacggtggccttctcctcctccggcttcaccagcatgtcgtccctcatcaccacctccctcggtgtcaacaccctcttctcagcctcgcttcccctccagtccttctctgacaggagccccctaagccgcgcgatctcgttgtcac

SEQ ID NO: 20465 - DNA, 2098 bp, Zea Mays
ctcatccgatttcatgtatagtggaacatctggttttgtccttagaaccgggtgtgacatacttcacaggcggccacatacttagaaacgtcaaccttcatccgcttccaccagaagttttgcttcagatctcggtacattttggtttcgccagggtgaacggtgtaaggcattttatgagcttctcccaagatatccatcttcacctatgatttctgaggcacacaaaggcggcccctaaaacgaaccaaatcattctcatcaatggagaactcccggggttaaccatcgccaaccctctttcgagcttcgtgcaataaatgatcctgctgctgagctgcacacactctttccatgagggaagattgaataagcatacaagtctcctcactagcggtgccgacatagcacaaagcgatccccaaacggtccagatcagcgatcaacggcaaggccacttttggaaccccggacctgctaagggcatcatccaccacatttgccttccccaggtgatattgaatggacaaatcataatctttaatcaattcgagccatcaacgctgcctcaaatttagctccttctgagtgaaaatatacttgagacttttatgatcggtgtaaatgtcacaagcctcgccataaagataatgcctccacgactttagagcaaaaaccatcacgaccaattcaagatcatgagttggataagcaatcactttgccttcctgcatcaacacacagccaagaccaattcgcgaagcattcatataaactgtgaaacgcttaccgctctctagcaaagctaggataggggcgtccaccaacttgttcttcaatgtctgataactgacctcacaatcgttggaccagacgaagagaacacccttctccaagagtctagtcaaaggcttagaaatgctggaaaaatttggtacgaagcgccgataatatccagcgagccccaagaaacttcggatttcagagacactagagggtctcttccactccaccacagccgcaacatttttgggatcaaccgcaatgccctgctgattaatcacatgccccaggaaagccacttcggacagccaaaaggcacacttctttaacttgccatataactgattcttcctaagggcacccagaacgagacggagatgctgctcatgctcagcccggtctttgaataaatcataatatcatccaggaacatgaccacaaagtcatccaagaactcatgcaacatcctattcattgcttccataaaagcagcaggggcattagttaagtcaaacggcatgactatgaactcataatgcccatacctggtgcaaaaagcggtcttctcaatatcctcctcacgaatcctcaattgatgataaccagagttcaaatcaattttggagaacacctgggcacccctcaactgttcaaagagaacctcaatacggggtagcggataattattcttgattgtcacttgattcaaagcgcgataatccacacatagcctcttgcttttatccttcttctcaacaaacaatactggggaagcccatggagacctgctaggcctaatgaaacccttagccagcagatcatccaattgtcgcttcaattcaacctgctcctttgggcccatctgatatggggccttatgaataggctgcgtacccaaaatcagcttgatctcaaaagttgcatcgcgctccggaggaatgcctggaagctctgctggaaacacgtcggcaaagtcacacaccacccggatgtcctgcacccgcaaggcagcctcaccctccaccaccatggagaaaaagattcacgacttccttgaccggcaatccagaagcaattgcgccaacaaggataacgtgaactttggggaacttcccaagaataccacctccctacccgatggcgcctgcaataacagtgtcttccaaaaacaggatatgactgcgcgatactgagataactaatccatacccaagataacattgaatgcccccaaggaaatcacaacaagattggccgaaaagacctcatcagcaagaatgacggaacacccctgacaaattgaacagctactaat

SEQ ID NO: 20466 - DNA, 943 bp, Zea Mays
aaccgtagtgcctgccaatgacaatttatctgcttctggatctaggtgtttttcgtctgatggtgagtttgggagtccgttttcctggaccgaagagtcttcggatgaagacttggattattttgttgcgttagatgtggccgcggcggagtcctcgccgcgggtggaggttggcgaggtggctgatcttcctagtgcgaggaccaagtgccgacgacgaagggtggtgtcgaagcatagcgtgggcgaggtttcgcggagtggtaggtgccgtcggatggggatggagcgggaccgtcttcgagtagattgtattggtaaacgagaactattgtctttgccgattgggacgagcattggtgagggggatctgcggaacctttttgagggtgaggaattgaaaataatgttgttcaattatagggaggcaggcatcatcccgaaggttgagccgatgtagtatgtggtgccctcgctgagtctatgtaactgtaacttgtattgtaatgtggcctgttggccgttttcgcatacttgtgctaatctggctgcacccttaggcgacttttgcgtggagtgtcgattggcgtacttatcgcgcttatccggttgcatcctcgggcgacttttgcgcggagtgtctttttagtaaaagactttgattgacgcacttattgtgcttgtccggctgcacccttaggcgacttttgcatggagtgtctttttaataaaagacttcgattgacgcacttgttgtgctattccggctacacccttgggcgacttttgcatggagtgtctttttaataaaagactttgactgacgcatgcacttgttgtgctattccggctgcacccttgggcgacttttgcatggagtgtctttttaataaaagacttcgactgacgcacttgttgtgctattccgactgcacccttgggt

SEQ ID NO: 20467 - DNA, 448 bp, Zea Mays
cgcaccggcagcaccatgacgcgacgcgaaccagcaacccgacaaacgatgggagaagagacctcgcgaagaagtacatgctgccggaccacctgcctctcgcgcccgaggaggacctcgtggaggtgaacgcacgctggacgacatcctcgacacccagtgcccataccacaaagacatgcgccacactcttcgcaactgccgggacttcaagcactccatcgggcacggccgacccttccaacctctacctcctcctccaccgagaggaggaccagatgaaccacggcaaccccatcagcaggaggaggggggaggaggaggagccttcccacgcgtcgacagggaggtcaacgtcatcttcggcggacacggatcgcaggagaacaaacgacaacaaaagctcaacgaccgccagatattggtggcgaccaccggtcctcccgcc

SEQ ID NO: 20468 - DNA, 501 bp, Zea Mays
gtcggctctaacaacattcatattttgggggtcacctgcattcatttcctccataacatttggctcatggatactgctgggggttcctctgacagctggaactgttttgtcagctcttgcgacattccgcatgctacaagatctaattttcacacttcctgacttactttcagtgtttgctcagggaaaagtttcagctgatagagtggcaaaataccttgaggaagaagaattgaaatgtgatgcagttacacaagtaccaagaaatgacacagactttgatgtgaagattgatcatggaatattcagttgggaacttgagacaacttctccaactctgacagatgtagagttaaaggtaaagagagggatgaaagtggctatctgtggaatggtcggttctggaaaatccagtctattatcatgcatacttggggagatgccaaaactagatgggactgtcagggtcagtggccgtaaagcatatgttcctcaaactgc

SEQ ID NO: 20469 - DNA, 541 bp, Zea Mays
ggggactggtgaggaagatctcgacacttctatctcggcaccgtacctcgacggcactggcggcactagcacgaccacgtagtcggccggcgacctaccaaagtccacaagaaagcagcgaagaggagattagggttagagaatgccgactggggagtgaggactggtgaggaagatctggagagtgacatacctgccaagccggagcccagagccggagacaagggtcaagtgcacgacgacggacgacgcgagagggagagtctgagaagaggagattagggttagggttagggattgggatggccgactggagagggagagccggagagggacgtatctgccaagccacaacccgaagccggagacgatgacatgggagggagagtcggagtactaagaagaggagattagggttagggatttctgattgggcagggaccgagccaccgagggagagccggagtctggagaggggcgccgcacggaagggggccggtgacgaagatccgacagagactatgacgacgggacaacggtg

SEQ ID NO: 20470 - DNA, 1094 bp, Zea Mays
gtgaacccggttgtgccacgtcgaagcttattgctccgcggtgaccggcgtggcacccttgggagcgttatccatgtgctgtacaccggtgaccgccacggttacagccaccgtgctcttctccgtctccggccgccagcgcatccggctcgaattgaccgtcgccgctgtcgctccctataaattgagcccgcgaatagcttcgcaatatcatcactcgctcagtcaccgctaaccgctagccgcccctcgccagagcttgcgaattttggattcgccccaaatctctttccgccgccgcgaatcacaccctgtcgtggccagcttttcccaggtccgctcattccctccttgtccctgttctagcatccttacttgatgatgatgctccccgatcccttcaattgaaccgaaccgccagggatcgccgggaacacgcaccattttcttcctcatccgcggttcacgtgggcagaaccggatagttgacttaatgagaaattaggttgggggaaacagttgggaagggttcaatccggggtacgtcgctcgggagcgtcggtccttgcgtaaatcgaccggtgcgtgggctcgccggagctctgcaacgccgctcgacgtcgtggacttttccctgcgaagaaataggaatcggaggtcttttctgcaaacagtcagcgacccagaacaacagtgaccaaactcacttctatttagtccaaaccccgagtccctttgcgcaaaacagccagcgcgcgggcgcgggcgcgcgcttgggcgcacttctgccctaactgggccgacgcaggcttgtttgagcccaagactgtttaaagtttttctttttctttttcagcagaactttgaaaaagtgtagaaaatggtaggaaaatcctaaaaatatgagaccaattttcttagaaccctaatttcctgtagtaattaataaaaataatttcatgatttttaggttaaataaggaattttgaggcatttaaaatagcttaaagaagtggttctggatttttagaaaataattgataagtcctaaaatgcccaaaaaatttttatgagtgttatataatatttagaag

SEQ ID NO: 20471 - DNA, 434 bp, Zea Mays
cattgagggtctgtgaaaggaaaaagatgaagagtatcatgacattccaatatgattggaatgatgaagtgattgcccaattctactcaactttgtggatcaagccagctgacgaggagagtccatacaactatccttatctgaacttcttcattgaaggtagttggtataaggtgagctaccgtaggtttgctcacattcttggtttttctgacaatgatatctctggcgacaagatcaagatacatgatttccggcagcctactagagatgaagccaaagatcttcatctttctgagtctgggaagtattgggagtctacaaacatgcataagtattatcgatacatcaactccctctgcaggatgaccctcattccaaaagggggtaatcagatgaacattcttggagagagcaaggtcttgctctctttc

SEQ ID NO: 20472 - DNA, 797 bp, Zea Mays
tgtttgcgcatgctgtttcaatactggttcatcgtgcatttcagaatcagaatttgtgtatgtgtccttcaattaggtagtctaaggaaattctgttatgtcagtatctgtggggtagtgtagggaaattgtgttatgtgtgaggtaacttatggcttctggaattgtttaggaactaacatcgccttctatggtgttgatgatccatttgagaccatacttcatattgcatattatatagatgaacaaagatgaggaaggcaggagcgaagctaggttcatgagagagggtgcatatgcacccacaaaaatttgcaaaatcagtgatttagactggattttcaccatatatatacaccacctataaatcattactatgcaccctcctccaatttactctagcttcgccattggaggaaggtttgattaattagtcatgcatgcaaacaggttcactcaagattctccacgaacaccttccccagctgggatcgggcacaaccaatgcgtgttttgggacataatggcgagatcaatacccttagagggaacaagaactggtaacagcccccctcctcccaccccgctacacaatttgcaaagttttgtaagcaataatctccatatgacaggcattcatggacgcatttcactgcgatgtgctatatttttatgtttaataggatgacagcacgtgaaggtcttctggagtgcaagggactcggtctatcaagggatgaaatgtcaaaacttctgcctatagtggatgttacctcttcagactcaggttccatttt

SEQ ID NO: 20473 - DNA, 536 bp, Zea Mays
cacgaccattcaatgcgacgggatgtcctgtcagtcagccaatcgtttgcgacgtgcgtgtgcgagagattcgaaacgactgtcgtccgactattacgatttgcaccttggtggcttcgcccgtccctataaattcgcccgagatggacgcttcggaccgttacctttgttgctttagccttcttgctttacatgccatcttcgccttctgctcaaaagagctcttcgtctcctcgccgtcttcttcctccatcgtgatggccgagaagataagcgtccttcctcctcgtgacccatggcccatctccttcgtcaccaaagaggatttggaggcactggtcgatgctggtctgctccacccccgctcccacggcccgcagcccaagtctttcgcgccaggtgatgagcagatgtcggatctgatcatgggctatttggtgagtttcacctcgtttcatgagcgggggtttgtagttccggcaagccgcttcatgcgggctctagcgcactactacggggtggagctgtccaacttc

SEQ ID NO: 20474 - DNA, 284 bp, Zea Mays
agatagtctaagatgttgtcctccacaccacaagggctgcagctgagatgctgtcctctactgtccataaaggagagatgctgtcctctaagcagtcaaagaactgcagcaaggcatgtcctctacccaaactgcagcaaggactaaagcctaagttgctgtcctctacccaaaactgtagcaaagactaaagcctaagatgttgtcctctaccaagattgcagcaaaggcatgcaaagattgctactacaggtcgtacacaagaggccacaaggcttattcta

SEQ ID NO: 20475 - DNA, 544 bp, Zea Mays
attgcgctgaacatgccatggagccatcctcgaagaggtggcctccccatcaacaacaacctcaactcctccagtctcagcaggagctggtttgagtgaaccccaagtagaggaagtagtgggatcgggtccgtcagctgaagtagtggaagtaggctcgactagggcagctagcggagtcggatcaagatcacccgagtcggtgttgtcatgctcctcctccacaaatatggtctgtcccatctggtctggacttgcaggcccaaagacaggggatggacaaggtgcagtctcatcgaatgtaacctcacaagtctccataatgcagtcagtctccaggtttaagaacacaataagcacgagtatataatgcataacccaggaaaaccccatcagatgaccgagactcaaatttgtccaagtttctgtgttttggaacaaagcatctgcatccaaaaccattaaatgactaaccttggttggttgtccaaaccccatctcataagaagtcttgttcaagaaagctcgaagaaagatgcgtttc

SEQ ID NO: 20476 - DNA, 637 bp, Zea Mays
ctttccccggtggtgcggtgcggtgcgggtgctggactgctggcctctgcgtccgcatccggcgggcaagtgcgaaagctgccaactctttccctgctcggttttcccttctccaggccagccacaccacttcttcgccaagctcgcatccatttccaaactcttacctccatcccccacctgccctcctttatctcccaaatcggtcttcttgcgctggtggaattcctcgtcggcggtatagattcagatttgctgttgctcttgtgctgctctgctccccggatttctactactgcgagcttctttctagctgtgaggcactgagatggatccgctgctgaatgtgtgtacaattattgggccgtggcaggtggcgagtgaggcgctgctggtggtatgcaggagctaggaggtaggcaacaaccatacgaaggcaagggcgagcggagccgaggcacaccgcgcgttctgcgccgaccagcactgcccgatctcgcgcgggggaggggggattcgtgagcgccggcggcagccatgccggagtcctggagacccgccgaggcggatgccctgcagccggcggcaggcacggcgtccgcgtccggcccctcggctcggagcccgggcaatggcg

SEQ ID NO: 20477 - DNA, 712 bp, Zea Mays
tcttgataattctatggtgatctcttcgcccttgtgcgagttccagtgtttggtcactaaaccggtggatgccttgctgccaactccacggtttcccaagagaaggaagaagcctctacccagtaattttacaagacatgctgggacatcattaaagtcgatataatggctgctcttaattccctttaccatggagatgcctataagcttgatttgctgaactcagcgtatctcattcttcttccgaaaagagaagatgcttcttcagctggtgtttttcgaccaattagcttgattcatagttttgctaagttggtcactaagatcctcgctaatcgtttggggccatatcttcaagacctagtggcagctaactagagtgcttttattagaggaaggtcaatacacgacaatttcatgctagtgcaacaatcgattaagttccttcataagaggaggatctctagtttgctgctgaaactggatatttccaaggcttttgactcagtctcgtgggcgtttttgttggaaattttgacacatttgggctttggtcctgtttggcgtaatctgatctccaacttgttattcacttctactcaggtgctcctgaatggctcgcctggtaatcatatttttcatcggagaggtcttcgccagggagatcctctttctcccatgttatttgtgttggttatggatgttcttagca

SEQ ID NO: 20478 - DNA, 451 bp, Zea Mays
gccccgtcctaacgccacaacacaccagacgaacttcatagggtcggcataagacggggcaggacactcccgtgtacgaccctgaacacccccaaacactatgatatgggacctgccagaacttgtgtcaggaaggagtcatccagatgagatgtagtggagaaacgtgccatattgtgcatgcgcttacgcatgcatcggaagacaacatcaccaaaagaacccctgtaaatgatgaactccattctcttccatgacagtcaacccatctctttgtaatccacccctagaattataaaaggatgtcgacaggacaggaaaggggcaaggaaaaatgaaggagcatccagtagaagccctgttgttccccggctctttcattctcactcgcactccttgtaacacatccccgggccttcagccctaaagagcacaatacattatcagcact

SEQ ID NO: 20479 - DNA, 548 bp, Zea Mays
ctctgatttacaaaatccctggactgcgcaccgaataaccagataacccaggggctagcctgcaagtttccccagactcagtaaaccacgagttggacggcgtgtttattatgaataaccccgagggctcttttacaaatttactatggcgaaagggcatctatgaatcctgaccgctggatccatcgcgagggcatagattaaatcgcgaatggtatgagatcacgccccttggatccaaaacctacggtccggatcacatctctgaaacagtacgatggtttctctaatctgcgccgtccctgaccgaatcaacggcgcaaacattctcttctaccccaggatggtcaggaacggcggtgctctacacctacagtggtgggttcgccggagtgaaatccccaggtgcccccaaggcctaatccctaccctggtagcggtggtatggggtaagattatggtgaatccaatccggggaagggcgcaccgacgacgatcatgaagacgacaggttacgcgcaggcggatccttggcgaggctaaaccac

SEQ ID NO: 20480 - DNA, 434 bp, Zea Mays
aggatccgaggacgacatgctagacatccctgggcccgaaggaatcgagacacttggacaagccatcaaaaatttcatcctttggcctcgaagggatgtcgaattggctaatccaccaacggcgtcaccatctcatccctaaccatctccgcctcctcaaactttagtacctattgtacatccatcatcacctcctcaatcttcacatgctgctcctcatcctctttctaacccaccatctccgccacaaacatcaacatttaggacaccaccaccttctccacaaccttcaagggattcacgacaatcaaagaaatctaaattccctataccaaaattggtgtccacactcgagaaaaagaagagtaaagctactacttctggcacagctcgatttttgaaagggattgcacaggacctcacgtcacataatg

SEQ ID NO: 20481 - DNA, 666 bp, Zea Mays
ggtgtggccttgggagcagagggggaagaagccctggcaaacagatgatgggttaagacctgtcggcatgatgatgaggctcaaagaaaagggactacacttacttggggccctggaccttccagtgaccctcgaagcgagatcgccgctcctgctgctgttgttgctgctgctggtgcccctggggagatcacccccagatggtggtggtggcggcgggacagatggtggtggtggcggtgggacagatggtggtggtggcggcaggaccggaggactaacgcgcctctgcgcgccgtgggcctgggagttggcctcctcagccccaccaatagtcctctagcgcttctaggggctccgaaacgcatgacccatcagcgcgacgcagcctgtgtcacctctcctcttccaaccccccggagccacctgggtggaggcgctgcttgcagcccctttacccttgtccaaggggctggggccacggcggggcgctgggagccacgacgggggcgctgtgagccacgccggtgggctggggggctccagccgatgcatcggagatccggatcccgcggtgggggtcccggccaccggtctggcaaaccgccacgtcgctctcgtcgagggtcggcaacgtggccaagatcgccgtcctcagctctgggt

SEQ ID NO: 20482 - DNA, 404 bp, Zea Mays
gaaaatgcataataccctttttcgatctcttggccttgatcatcatgtttcatgttcgcatgcacatcagcagaacggctctgttgaacgcaaacatcgacatattgtcgaaactggtcttgccatcctcactcatgctcacatgcctttaaaattttgggatgaagcgtttcttacagcctcttacctcattaaccgcattcccacacgtgttatagataataccagccctctagaacgcctgtttcaaaaatcacctaattattcttggctccgagtatttggttatgcatgttggcctaacctccgcccataccaaacacaaaaactctccttccgctcaaaacaatgtgttttcatcagctatagttccttgcataaaggatacaagtgtttagatcctg

SEQ ID NO: 20483 - DNA, 796 bp, Zea Mays
ctcatcccgatctgatttaattcatccgatcaccatccaatggttcctattagttttaaccgaagcgatacgcggcatcaaatccgagccatctaaaggagatcaaatggcccagagccttcttcctcccccggctaaactctggtgatgacgcagagtgtcgcggcgacccgccatggtcggaatgcccgcggcgctccacgatacacgatcgctaaatatactgggtgcgaaatgaaattgagaaggaggcgaacatggagagcgggtccttacaatgattccggcgttgccccggtcagcccacggtgaaccgcggatacgtgacggcgaaggtaaattagccgcgccccggtcacactccagtcccgctatcgccaccaaagcgatccggggacacgggcgaagcttcctggacgcacccaaggctccaatttggcaccgagcacgacgaacgacggtgggacgatgacccgcccgctcggtcacgacgggttctggctctctctctctctctcacaacccatttggtggacgtgtgccaggttaagggataggaggggcgtggcgcgactcattttatgcgcaggtggttggtcagcaacggattgcccggagctcacaacgacgccccgccattgtcggtgaggttgttgagggagggagtcgcccgactgactggtggagcccatagggctgtggcgtcgagtggtgtttgtgatcgcacgtgatgctgtgtagcgagtctggcaaacggcccccccggacagcgactacttcaatacgcgggcgcgat

SEQ ID NO: 20484 - DNA, 465 bp, Zea Mays
caattccaactcttatcttcctcaaacagaacatctctgctcacatgtagccactcagtggaaggatcaaaaaacctgtaacccttcgtgcctgtctcagacatctttccaaggccagtaccaatttttcttgacatgacatacacaaccaaaagttctaaggtgaccaacttgtggtttcctgccatgccatacttcataaggagttttgcctttaatacttttagtaggagacctattcagcagactgctgttgtcactgcctcccccaaaaaccttggtggtacccctttgctttgcagtaagcaccttgtcatctctactgcagattggtttctcctgtcaactacaccattctgctgaggtgaataaggagtagtggtgtagtgcttaatgccttgctcactgcagaacacatcaaaaaaggttgagttgaactcaccacctctatcagttctcaaagcc

SEQ ID NO: 20485 - DNA, 741 bp, Zea Mays
gggattttttgcgtgtaatttacatggctccgcctcattaaaaacctcaccccctaggaggaaaagagtgcgggccggaataaaactgtttggtgaattacaagggcaagctggccctgaggagtcaaacaaaaaatttgcggagattgtcaatattccatgaatgctctaagtcctcgccgaacggtgttgttagcctgtacgcgctgggggacgccttcgtcttgacgatgaaggggccctcccactttggctccagcttgccccgtgactctgtccgagttgttcggacgagtacgaggtctccttcgctgaattctctcggggcgactgtgtggtcgcgccatgcttttgtttgagcttggtacttgtttagggcctgtagggcgaagacacggtctccgttgatgaggtccttcgaagtaggctcgtctacgtcagggacggctgaagtgattgtccgtggtgacccatgttttatttcttgcggggtcatggcctccgatccatatagcaggcagaaaggggtgaacccagtcgccctgcactcagtcgtgttcagcgcccagaccgcttcaggtaacaggtcggcccacttgcccttcttatcgtcgaggagcatcttcttgacggctgtgaaaatcttaccattggcgcgctccacgacgccattggattgtgggtggtacactgaggcgaaggcaagcttggtgccaatggagaagcagaaatccctgaagt

SEQ ID NO: 20486 - DNA, 670 bp, Zea Mays
gtcactgacgatttgcagaaacatcctcacatttctatttcttctccaaggagctccccgacggcggcgcgctcgcagatgacctctgacgcggtttgtgcaggccatggccggcgatagttgttatggccaactaccggggaggcatcactgacctaaggcggcctaggaacgtgtgctaatttagcttgaacacttgaagaatggtctgctcacgtgcatggcagacaccgtgtctacgagcttgtgttcccacacaaccatagaggaatcgagcaaacgggcaccaccgtaagattcgcaagcatgcaaaggcatgaaaacaacacgtggatttgacaacgacttaccagaacaagctggccacgggcgggctgttctccacggtgcggcggaccgatttggggaaaatggtgccgcagcgttcacgagtggaattgagggcggggcttggggctatacggccataagggattctagttttactgcgcacaaccaatttgggaggagggggcagaggcagcgcgaattttcgcttcggttcaacttatggtgtgtgtgatgctcatacctcgccgcggatcatgggctatttatagccacgccggtccggcgattactagacatgcacctcgtgagtcaccacgatgaggaccagtgcttaagcacg

SEQ ID NO: 20487 - DNA, 655 bp, Zea Mays
cggggctccatctacatttcaaggggccatgtacaacatgttgaagccattgttgcgcaggtgtgttctagtgttctttgatgacatccttgtctacagtgacacttgggaacaacatatccaacatttggaacaagtgttgtagttattgtatcaagaccactagcaagtcaagctttctaagtgcacatttgcaaagcaagaaataggttacttgggccatatcattagtagagcgggcgtggctactgatccggccaaagtggaggttgttgcatcttggcctacacccactatttctaaagaattacgaggttttcttggattggccggttactaccgcaaatttgtcaaaaacttcggtgtcattgccaagccccttactacccttctaaagaagcatgttgtttttgtatggacatcagaacatgctactgcttttgctttgctgaaatcagccttatctttagcaccagtgttgggtctcccggattttaccaaacaattcaccattgaaatagatgcttctggagcaggtgttggtgccgtcgtgctacaaaacagccaccctctcgcctatgtgagcaagcctttgggtgtcaaaaatatgggtctctctgcttatgaaaaggagtacctcgccattttgctcgct

SEQ ID NO: 20488 - DNA, 482 bp, Zea Mays
taattggattgacctaccttcatccactatgacgtgaagatcttcacctagaccaagacacgccaggagcagcatgcatcgtgcaaagagggccatgaggtagtgactagtgaaacaggaagcgaatagtgcaacgttcttcatgggtatttagcgctaatttttccctccaaaattttcaccggccgccaccacgcgcacgcaattcctttgcccgccaccgcataatgagtcaggaagcaaatgaacgcgcccaaaattccttcggccggcaaaataatctattccttgcatgcatggtgctaatatatttccatccatgcagtttcctgtatgtgcatgtccataattatctgcccacgattctctctcacgcccacaaatttctcctccacgcttgcagccaggggcaaccagggaataaacaaagttacactaattttcgtgcaaagcctttggacgccttgtttcatgggaaggag

SEQ ID NO: 20489 - DNA, 645 bp, Zea Mays
aaaaaaaccaaaggaagctgctgaccatcttccggagcatgcagaattgggtcctcgtcttgagcttgccctccaagcatgttttgttggattatttcacactggactgtccatgaatctccaacgaaaccatctgcttccgaaaaaacaatgaactgagggacttcttcaagggatgtgacacggacacgaagcaatgtcctggtcacattatgtcgatcctcctcccaaagaatcaacctgccaaacgaaccaataactgcttgcaagtactctaaggaacgataatccagaggaaaacctagtaacatgagccaacattcacggatgaaaaaagagcccggtgattccaggcgtcattatgacgaagagcagtgaaagtagcatccaaatattgttgagggccaagcaaaacaaggttatcacgctccaaaacactgtaaaactgcaccaacacctgccccaagtgagagcgctaaatatctctcaccccaacccttcgatgttccactaaatattctctaatcacatctctgaccgcaaggaataagacctcatgcgcaggtaaaggatggatattaataatcgcccaatcctcatgcattggcgggagtctccgtgagactgacctgaccatgatttcgc

SEQ ID NO: 20490 - DNA, 1290 bp, Zea Mays
aggacggagtagctatgactaggctagtggtggtggactggcggtggacggacgccatgcgacatgcgcgcgccgctggagttgatagggcagtagccggtgacgtcggagggacacggccctaggatgcgtgggccaaactctggatgttgctgcaagctgctgcgcgcgtaaacaggagaaatagctaaccgcgaacggatccttgacatgcaaatgatttctctccgttatgaggggatctgaggtaggacggagtagctatgactaggctggtggtacgtggtggactggcggtggacacacgtcatgtgacatgcgcgcgtcgctggagttgatagggcagtacccagtgacgtgggagggacatggccctaggacgcgtggccccaactctggatgttgctgcaaactgcggcgcgcgtaaacaggagcaatagctaaccgcgaacgggtccttgacatgcaaatgatttctctttgttacgaggggatctgaggtaggacggagtagctacgactaggctggtggtggtggactggtggtggacggacgccatgcgacatgcgcgcgccgctggatccgatagggcagtagctggtgacgtcggagggacacggccctaggacacgtgggctaaactctggatgttgctgcaagctgctgcgcgcgtaaacaggagcaatagctaaccgtgaacaggtccttgacatgcaaatgatttctctccgttatgaggggatctgaggtaggacggagtagctatgactaggatggtggtggtggactggcggtggacgcacgccatgtgacatgcgcgcgtcgctggagttgatagggcagtacccagtgacatgggagggacatggccctaggacgcgtggccccaactctggatgttgctgcaaactgtggcgcgcgtaaacaggagcaatagctaaccgcgaacgggtccttgacatgcaaatgatttctctttgttacgaggggatctgaggtaggacggagtagctacgactaggctggtggtggtggactggtggtggacggacgccatgcgacatgcgcgcgccgctagattcgatagggcagtagctggtgacgtgggagggacacagccctaggacgtgtgggcccaactctggatgttgttgtaagctgcggcgcgtgtaaacaggagcaatagctaatcgcgaacgggtccttgacatgcaaatgacttctctccgttatgaggggatctgaggtaggacggagtagctacgactaggctggtggtggtggactgg

SEQ ID NO: 20491 - DNA, 517 bp, Zea Mays
agaaggattacggaacatgtcttactcgtgggtgggattgctccagctaccctggccacggtgaggtgagtcatcggtgaacgtggtcaccactgtcagctatcaactccagatcaggtgctggcaaagcagtagaagagctggggaatggttaaaggcttgatcaagctatggaggacaggtttgatatgctggagatgctaggaaaacagcaagagcacgacagggtcctcattaggctttatagcccatggcaagccatcccaaaccatgggtttgctggggccaggctgtaacttagcaggaggacaccatatcaacatgttccacactactcttgcatgaccaccacgtagagcagaggtcaatagacatgacagaggtggccaaggtcctagggacagcaagttacctagcagataagcagctgcacacaagagaccaggttcacccccccatccaccttgctgcgtgtattgcatgggtgccatgtacacctctcatagcacaatttgcc

SEQ ID NO: 20492 - DNA, 673 bp, Zea Mays
atctatagtgggactagaaactgaaggcacgttcaaatctccaaaaaaaagaagagccaaattagcagactacacaagcaacatcgtctgtgggggagcagcgatactcaagcacgcgcggatctagttgtagatgtcgagggagaaggcgacgttgaacgctcatcttggggcagcagagcgaatccttgtgcacgacgacgaagggcatctcggtcgcggattcgggatggaatcaccacctcctcgctggatctttgccaacagtcttcaaatccaccccgagattcccaccgggcaaggaatcgccctctgctgaaggtcacttcccggcctcagtcccaacttcatccctcggacgacctaagtcttctggaatgcaaacctaagtctttctggaatgcgggagatgaagaggtcgggggatcaagatgccaggaacgcgggagatgaagagggaaatgggacgacctaagtctttttggaatgcaaaccttagtcccaactggtcacgtcgaccaatctttcctctgccctcgatgtccactaccaccctattgtctaaataggaggaactactggagagcaagctatttttactactaatagctatttggcaacttactaaacaaaagtttagatagcttttttcgagaaaactattggagtttgc

SEQ ID NO: 20493 - DNA, 707 bp, Zea Mays
ttctaatttccacagaacttcaactatgaatcgatgcgctggcaagcgaagtccagcagcgaaaaatgcctcaaacacaaccaactctccctctagctcggggacatcttcagcccccggcgttgtccaactccattcccaaaataacccacacgctacatctcgtgcatgtggcccgagtaaatcctcgatgtaccaaactccaccgtgtgcccatgctgtagctcgacaaccgccgttgggtcactaatcgtcttctccgaggacggcacgttcgaggatgcagtcgccgcggacgatgacgaggaagaagacgacatgatcacgtaccgtcggcggcgacgggcagtttgcttgaggcgaggcagatcaccagtggcgcgagagcgaaagaagtcaaacaagcagagtgcaagaaggctgggttttttccgcacgaagatgggtaaaaatccagcagcacgcgtgcggcattttataggcaaggggaagcacctcgggaactaaacagtcccacagtaaaatgtcacttttcaacaatcacatttcaaaaaccttcgcggggccacttcaaccaggtgagggcagcgtttcggccatctctcggcagacttcggcaccagctcacttagttgaactagcccctcggagggcaagtgttggggcaaaggcgtaacacccccctcgctcggtcgtttcataatagg

SEQ ID NO: 20494 - DNA, 443 bp, Zea Mays
gttgactcataatgagtcggcttcgagtttgtgctaccccctctattacgaatcaaggacgcggttgctccaaatggttatcgttgttttgctttttcatttgcgcgcttgaaggtttgtccatgcgcctgacagtgatgacattttagaggtaatgccctgcagtttttacttttctgagtggtgatctggcactttagaggtaatgctcgacctaaggagtccatttatacccatgccaacgtgccttttgatttccgagccctatcttcactttttccctctgccacttgtctgctttcgcgaaactcgagcctgctcgttccgcccaagagattgcaatggctccaaagcggaagagacagagcgccattgttccgatcatcccgcccatcgatcccaacagccagcttccgtttgctagtaatcacatatctattatt

SEQ ID NO: 20495 - DNA, 480 bp, Zea Mays
cggtcgtttggccattactggcatggttttgttgaaacacgggctcgacgtcgtgtgctctaccgagtacgacgcttacgtcgaccaactaggattctgttggaccgacgctgatttaagggagcaccatgacctacatgaccccctgatgctcttcgttcccttaatttgcaattcccatggcgaataccccatgaacgtgcgccgcggaaccggcacaccgtcgtggccatgggtaggtctctagggggtttgtgaactggattcgtgtccaagacggttcgggttgagtctaggttaagtctagtaggtgtctatggggcgctcgagctcttcgccaccgtggcttggtgggtggtccgtccacgccgccgtctggggtcaaggacccaatttaaaaagacatagaagttagaaggggcaaaaaggaaagtgtcagtgacacattaacatcagttgaggacttcttctcagattttt

SEQ ID NO: 20496 - DNA, 435 bp, Zea Mays
ctcgtttgtttgctggcgggagctagcatttgtaaactatcttacggaaattaaaggccagctcaggttcttcagttccgcctgtgcatcgtcgatatgatcttcttcccacaagaaggttttctgaaattcccccacgcgatcacaaatcactactactcgtacgtgttccaacttccaacgcaattccttttaataaagcggggagggaatctggcaggtagagatgtccacgtctgcaaaatttctctcaatcctttgattcgccgtgtacgtccaagatgcagcacgtgaatatgagattctccagaccacggaatgcttccagacaaggctgccaggttcccagtcaaacggaaaaaatgtggcctgctggccacaccacggaacgcttccacataaggccttgttcgtttctgtcggattgcacccgga

SEQ ID NO: 20497 - DNA, 363 bp, Zea Mays
agaaccgagagaatggggatgaatgccggttgatgagtcgctagacctggcgtaccactagggagctgccaattgctcgtcggaggaaaagcctgccactgggccgctgcgcgtcgtgggcggtcttgtcgtcatctcggatgctggtaataaacccactacatattttgtcaccttcttggtatcacatagcaactgtctattattgaatcgtggcaccacaacgctgggcgagaatctcgccggagctcctccgccatggaaccaagtgtgccgccatccagtggtcgtgggatgaagatgacctctggccattggatctgccatgtggggtctggatccgatgaagggataccctttcac

SEQ ID NO: 20498 - DNA, 953 bp, Zea Mays
tgggtagtgtgtcctgacttcccatagtgatcacataggttcatgttgaccggattgtttttggaatgaacgcctggggcatccgactaatgtgggacaaaaggaacaatagcctgtcggacacacgactgttgtgaactgggtaactaggatggaggatcaagagaacaaatgataggttgataaacaatcctctgatgtcgattactgctacttgaggattcttcggcaaatttctttctcttagactcttgatgaaggcgaatcttatcatcacctagaatggcctgactgactacatcattgtaactttcagccacattgggtgctatcaagagttggagcttcatattaaggccacacatgaagtagaacttcttcatggcttcagtaccgacataggctgcaacatactgagataactgattaaacatctccaaatactccataacactctccccttcaccttgctttaggttaaagaactcatcaacttttatactcatgatacccttcagaatataatgtgcctgaaatgcctcacagaactcaacccaaggaacttgatatccctctggctgggtcacacaatattttgcccaccaggctccagcttgaccctgggtcacacaatattatgcctcacagaaggtgagtatgatcaatgcctacactaatgagttgtgcaactgcattctcaagcatggatgttgactgtggattcgatgtgttagccttattctgggaaatgccctcaccatgaaccaatccagaatgagtcctcattctgtcaacaaaagagaacttagctcccaatctcacggatttgaaaagacaagacagaaaagcaagaatgggtagcatgaatagggtggatgaaacactctcaaatagctacatgggggttgaatttaaggttatatgtcatgatgcatgctcgtcctaaacgtcac

SEQ ID NO: 20499 - DNA, 626 bp, Zea Mays
tccacacttcttcctgtcctctcccctccctctctcctctcgccgaccgcgtgcctggcgaagctctcatttatccatctgctcgccgcgccgactcgtggggcggtcctggtacccagagcttagaggtcggacctttcagacgcggaacgtcgcgggattgagttcgacgcttgcggcagtgatggcgagcgaggacctgttgccgctgggcgcaacgacttgagggcactgaggttggttcttggttgtggcttgggtgagagcgatggcggctagcgcctaggatctggcaagacaactgctagcgtgagggcgctatgggctggcgcatgcgccgccgatttgccgaaggccgaagcacggccacacgatcgtgttggtcgagcagagcctacgccagtgccgatgacgatggctgaggaaggagtcatgtcggttttttctggaaggatcccgtatggtatgaccgtgtcgctgtaaatgaaacagactcgtgaacgtttgatgcatatcgtacggctgacgaagaaagggatgacgtggaccaacgtggagagaattttgctcccacggttaatatatagaaataatgaaaagaattgaaagctaaacatgtttgagta

SEQ ID NO: 20500 - DNA, 457 bp, Zea Mays
gcctgatcctaagaaacctgggccaacgacttcatcaagaggtctattttggttgcaggtattgcatgaccttgtcatgttccatctacctattctccatctcatgtaacttgttcatcactatcccaagtccatccatcttctttgagagttccatgagtgtcgtggtcgaagcatccatcgcctgttgaaacttctcaatcaagtgcttggagctgtggagacgaactccgaatccgcaccaccaacaaagaacaaccgccaacaactagaagttgaaaggaagaatgacgtgaactgatgatgatggctccgatactaatatgtggtgtccaggtagactttttcggtgatcaccagaataggaatgggagatagtgagggaaagaagaatttaggtagaagaatgtaggtgggaagagttatgttccttttcatttcgtgcctttggattaca

SEQ ID NO: 20501 - DNA, 563 bp, Zea Mays
ctgtttattgaaagacagaggtttgattgctgaggttgtggttgctgactttgtcttcaagaatattcagcctttgaaagacagggcatacccagcttatctgtatagtggtgtcaatgactctacccgggttaccaacaagaaaattcccattgaagatttggtgagccaactggacatgattctgaggtgcagagtgtcaaatgttggtgctcctattgcctattctgcctggaatctgccacctcataggtcattttttgagtttgtgtccaaccctcctgctagtaatgatggtctgggtcatagagtgcgaccctctcccgaggacattgaggctctaattgccccttttcggaatcttcccaataatgagaagcaaactcattttgagatgccagctagcccagacgatgcagagatagatgttgtgcttagtatattggctagggaatcttccgactcgacccttgctgagccgatggctatcatggctagacgagagtttggcaaagcagtggagactcggaagcctaagggtgctcgcccaaagcgtccctgcc

SEQ ID NO: 20502 - DNA, 625 bp, Zea Mays
cgcatctctgccagccacgtcctccgggaccggaggtctgacagttcgaaagcctcgcaaaccctatggaagggataagaggaatgagacaaggagaggaccagaaatagagggagaagtcgaagactcaccagggacacgtagccctgatcagggcgcatcgggacgacgatggagtagtctgcctttcccactgttcccttcacccaccggggaagttcgtcgatggggaggacagtcgaggccatccgagagctctccacggaagcctcgagcaacatctcgtcgaggcaaagccggtgctcggtcagcggcatcaccctcctccggtggaatgcggcaatgaccccggtcatggtaaggccgcaatcccaaaacctccgcagggcatccagcaacggctttaggtgagcctgaaccactcgaggagggccccacctccggcgttcctccgctccaaaaatgacgcagtgcgtaaacgccggcagccgccagtcgtcatagtgggcaacgtttcacattacacctcaaaaggtacgcccttctccccctgcctttctttcccttttccatatccttgcgaataacgagaagagagtgtcttctacctcgagcattctccccc

SEQ ID NO: 20503 - DNA, 1003 bp, Zea Mays
agcaattgcagagcaggaaactagccaaaatacaacagaaaggtctcgacccttcgcagttcaccatgagttatcaggtcgcgatggcctcttcagggggagacgacaatggaatggcgaaatcacttataatcgccctcgaaggcctcgctctaacatggtacaccagactaccatcgctctcgatcgactcatgtgcagcccttcgggagaaattcctcaacttctaagcgtacatgccatagactaacactcacataattatcactatgtaggcagttggagagggagagcctccacaattattataataagttcttgccgctcaagtctcaactaccgttagttgaggacggaatcgccatccactacactatcaacggcctccgcgtaggctagttatatagtcattgcacccaagatcccccaacaacccttcaagaactctaacaactattcgagaaatatgcacggttcgaggacctccattaccgcaagatcgaggcacaatgtaaaccgagggagccctctcatccaggaaactcagaacacatggttaagaggacaacagccaccaccgcctaaccagcaagtcaacactatcaaccaccagcagcaattcgaaggcccctctcgcaactacgaccacaactaacaaccaggaagaggcgacagaacgccaaggggcaggaggcgtggccgtggccctaccagtgaccacaaactgcactatgttttctagggcgaggacactagccactcaactagggacggccatgcctccaaggaaaccaataaagaatggaggccaaaagggtagcgaggggacaccaagatcaacaaccgaaggccataaaccataatttccaaccccaattccaccacccgcaccaagaaaggtaccaaccctaccaatagtatcaacaaaattaccagcccctagctaaccacccagaaatattacagctccccctccacctcaaccaatccaacaacaaaggca

SEQ ID NO: 20504 - DNA, 471 bp, Zea Mays
gatcactagtggattaggtttcgctttgagcgagaggatattactattcatgccagccagattcgccagctgtttggatttactgagtcgtcgactcgccttcacagcttgtgctacggtacctctgattctcttcgacaccctcacggcagagtcgctccagctacagctcacgtcgcagccttgttccgaccgcccttcatagatgggtcgcgacactctccggcagatttcactccagcggccaagaacttatatcagctcatgagacggatgctactgccctgcatgggttatagagaggccaccactcacatccagctctggctacttggtgccttgatctctcattccgagtttgatgtagttgacttccttatatgtgagatcgaggacacggtaatggatggtcttcgtgcccgacgatagctgccatatgctcattatctctgctacattttcgcacagctg

SEQ ID NO: 20505 - DNA, 352 bp, Zea Mays
tggccacgtggcggccctcgaaccgtccacgtggtggggtcaggtactgttcgccacgcgactaaggatagccgcatggacagtgcacctccatactgtagtaacgggtaccccttttccagggtactgacagtggtccccgtgcccgcctcaggggaggatacgagcctgcaggtgggggccaaagctagattgtcgataggcgcgctacttctgtgcgcttgctggcgaaatcactgccagcccaccttcgaacacgccaaccgccacgcctgtccccgcagctgactgacccgtgacctccgcacttgatgctttttgctgggccacgcgcggggtacctcgataccgc

SEQ ID NO: 20506 - DNA, 915 bp, Zea Mays
gtgttcactatcatctagttttggcgctctacaacgccattttgttgtggcaagtacggcgctgagtagtgtcgttgaatgccttctcctgcacagtatttgccaaactacacagatgtgaactcaccaccattatcggtacgaagtaccttcagcttcttgccggtttcactctcgacacgcgcctggaacgccatgatcactgctggtgcatctgcctttgaccgcaatagcgtgagccacatgtaacggctcatgtcgtcaaccaacagtaggaagtaggcattctcggccggcgtaggtggcgagatcgggccacagaggtcaccatgtacgagttcgagctcctcctgagcccggtacttggtagcctgtgagaacggcgtccacttttgttttgctagagtgcagtcctcgcagacttggtcgaggtggtcaatcgccggcagcccacgcaccatatccgcacgtccgagcttgcgcagcgactggaagttgaggtgaccgtagcgttcatgccagcgccatgccacgtcgccaacccccatggtgagacacactagggcaacgatgtttatgtcgaggaagtacaattggctaggtgatcgattcaccttcgccagcagtttgcgctgcaggtcgtagaggcgtagaacgcccgactcaatgtcgaccttgaacccgtcctcttccatttggctgaggctcacgatgttggtggtgaggcgcgggatgtagtagaccccatcaagacgacggtgctcgtcggacttgcacacgaagaggacagtgcccttgcccttgatgtcgaccaccgagccgtcgccgaattttacggtgccgatgacaccggtattcagtacgacgaagacaacccgcaagcccgtcatgtgattcgccgcaccagtgtcgagc

SEQ ID NO: 20507 - DNA, 644 bp, Zea Mays
ggggagagggagtggggtgcgggtgagggacgaatccgagctgccgaatcccgagcggacggttaggattaggtttgatctatttaaatacgggccatccgctctgagatgaacgtcggggattgaacagctggcctgtgctggggctccctggtagagctccgccgaacatgagggcgcgggcacgctagggccccggagtgtcgggaagggcttagagaggttcgggggagtgtggcgaactcggcgatgggcacagcaccggcacaggggcgctggagggtggcggtccacaacgaggtggcttggcggcggtgcaactctactccgaagagcaatcgtgcacaaccgagggcagacatggggaaaataggggcgaggataggttggttacctcgaggggagtctccgggacccttgaatggcggcagggacatggcgaggcctcgggtcgacggcggcggagctgctgctgtgcggaggaagggccggtgagcgtggacagagagaaatagagggggagggggcgaactgaggggtgtcccgggttgctgacgtcgaggcaaagctcaccgaggcaacagacacggcgagggctcgacggctattgtggaacaggcacgagaccacggcggacggcgacg

SEQ ID NO: 20508 - DNA, 280 bp, Zea Mays
ttgtaggtgccctagaagttcccgacgaaggtcctttgatcggcctagtcatgtatggtgctggtcggtagttgaaaaagccaggcactcgccccttccgcgaggtggagggggaggaaatggatgactaagtggtcatccttgatccccgccatggcacgcgaggtggtagtcttctagccacacgacggggttcatggaatcgtcatacttagaaatgttggctggcgcgcataccttcgggggcagggggactggactttttgatctcgcggccaaa

SEQ ID NO: 20509 - DNA, 807 bp, Zea Mays
ggttcatatgctaaaagatcaggggctttttaagaagaggggcgcggcgaagggaaaccgatcagatctggctgtccgatccttggctgatggcgcagattagatcagacatatgctgaatcggtacgcgatcctggcccttggatcagagatccatgactacggtttaatgggtcgaaggggtacgtgatgatctaatcctggccatccgttagccgatcgatggctagaatgcttcttctttctctagacccaagggacaccctggggcattctagtccggcggccttcctaccgtcgagctgcatcccggcgtcctagagcttccacggataccgaacggcgccacaccacaccgggatggagtaatccccggcgagatggcgggcaaagccccagcgtgtggatcaaggcgtgagcagaaactgcgcttagcgaagccaatggcaaactacaggaacatgctcgtaccggtgattgaggcataggtcagccgcctcgcgtgatggtgcttcttcatcaccgccggtgaggttctgcatcttcgtctccgtgacgtcgcggattattccccctcactctagacagggagacgtcgtgggccttccccccatgcttcaacgtcgaagaacccgcaccctcctctcggtttcctgtgttcaccctctctctccaaaggccatggcacacggtggcgatcacgcgctgctttccttctggtcgaccgaggcggtgagttccagggccaatgaatttataggccaggcaaaggtggtcggagtttgagcaacggaattcccatgtccg

SEQ ID NO: 20510 - DNA, 398 bp, Zea Mays
ttacagagtatggcctctttcaagtggatgggaaatgctgaaggagattgccactggctctagtcaaggtggcttggtctatctcaagtattccttccgatacagaagccaatttgatgaaccaaatgatgactggctagatgctatagaggcaactagtggtgagctacttggagcctactcgaaggctaaagacaaagctatgacggtcgccttcagcgctcgagggaaaaagaggctaaatagggtttttgatgttatcgggtttgtctaccctgattactgttttcctgttcggaaacaagggagaaaaaggaaaattgttgctttggcatcctctagtgcgtcgaaggcgaagaaagtgaaggtcttgacacgtagaccgagacgcgttgaga

SEQ ID NO: 20511 - DNA, 444 bp, Zea Mays
gaagttttgaagagattcaagatataccttcatcagcttaccctcgaagctcttatcagagtgggggtttttatatgagccatgaggagtcagggactggagccagatgccagatgcttcttcaacattcatgagctatcttaccagacgaaggctaccagaaaagaacaatatcataacaactttggctactacggcttcgtgcctcgctctgaggcaaattaccctgtgcttacatttcgcaagaagtggccaggttcttggatgaaggaatggttttacatgaagaatgacctgaatcagagggaggatgtgagaggcgttatccaacatcctatatggtcacgtttcgacattagaaggtcatccatcgctctcgggaatgaagtgcgggcgtgccaaatagctttcaacaccatatgcacctatattggcacaagagat

SEQ ID NO: 20512 - DNA, 438 bp, Zea Mays
cggtctctaaaagcgagacccacgtgttgtattcctcctccgcaaaggtcggatccacaccgccataccggcctccccgcatgcgccgggaatccgttcccaacctcaacccttgagtccgcgctcagccatcatattaacccgcaccgatccccagtccgtccgctccgtcctcgccctagaatacacgactcgtgagctcgcctttagatttgggagcgccgccatagccgccatagccgtctaccgtcgtcgtccccggttagcactcgtggtgcgctcccggacaactcgacggttgtgtggaccgtgtcctgggggagaatcgggcgcggggagccgcgttgtggagggaattgctcgccggcctttaccgtccgccgtgaagccgccccgcttcgtggacagtctcgtcatcaagccaattgtgagtaccaa

SEQ ID NO: 20513 - DNA, 606 bp, Zea Mays
atctgaataagaatagatcgatagctcaattcttcgccgccgacgaccgccgcgcacggattcgcgtttttagccaccgtgattcgtgctgaccgattggatagcgctcaaggtcacgtaaatatcgtcgccgtggataactccggccagtaaacaattccggccatcgtaccgcactcaccacgacggatttggataagctcgccggcggcagccgcctcacggcttggcgccacgtgccctggcacctccaccgcgtcaccgtgacccgctgtaatcctctgtccatccccggggagatggccacggtaacccgacactaatcgcgcgccagtaactccttgtccctccggccgccgcgcgtcgtcgctcaaattcccggccaccgctcatgcttactataaattgaagccaccatgagctccgtaggatcatcacgcacccagcaaccgagtattgctctcaatcgatcaccagtgagctccaattttgaacttcccccaattcggtttttgccagcgcagacagcctcaccgcggccagtctactccaggttagttcaagcttctcagttgtttgttctagcatccttaggttctcctcaag

SEQ ID NO: 20514 - DNA, 700 bp, Zea Mays
ccacggggtcggctggggggttggtttcctccatgacggcgaccggttctagggtcggtgggtccacgcccgtgagttgcctaccactctggtgggcatcgtcgtactgggcggttggtttaaaaaggtcaatcacaaagatctcgatgggacgctagttcatcccgatgccatttttgtagtgtctaccgtttcattgtcccgtcgtgggagtcgcacaatgtactgcaaccgctttcctaagggtgacataaaaaacaaggccaccactagctccccctttgtcattgacccatcgaagtgcatgatccaacatttcttggtggttcgcgtcagctctaattgggtctcggtccacttcgcgatgaagtcagcaaggacttgtgatttaatcgttgttcacagggtgtaggagatcccatatcccatcaattcaagagcccatttggcaatcctcccataaatgtctgaattgtaggtcacgtcgcacaaaggaaacaaagtcaccatggtaaaaggatgcgactcgaactaatgcataagcttccttttagtaattagaacgacatacattaatttttgtacctaggggtagccagtttttgtgcccgtaaggacttgacttgtgaattagacagaatactaaagcgggtgcacgccttcttcttcctgcctctccatgacgagcactgagctaacc

SEQ ID NO: 20515 - DNA, 501 bp, Zea Mays
cagcaacgacatcggtgtggtctggaccaccggaatggccattgattttgggagtctatatttcatcgtcgacatcgaaggggagatgaccaaggcctcagaaactctagaccctttgacaactaacctacccaatgttgttataggtctcaatgacctccagctcggtccccctcacaaggagtgcgggccacaaggctcaccatgaccagtcgtaccgaggtcataggggtattggaccccatctgggattcattcatggacatcctcctgtcaggggcaaaggataggctctcctcctcgcctaacgaggctagttgcaaccccagccaggagtgcctcgtatccaacacgactggggatcattcccccgcacaggaggcccaagggaaacttctgccggtgtctcgatgtgtgccatggtgttcgccctgccccagctcaacccgcttcctcagggatcaccaccgggcctgagcctttcgtggagcagccagcgcc

SEQ ID NO: 20516 - DNA, 1082 bp, Zea Mays
cttccattcgggcactgggaggggttgcagcaggcctgcaggcttttgatgttcggccttcgttcactgacaggtgtcacatcgggccacatactatgttatttccttcttcatccctttccaccagtatctggctttgaggtccaggtacatcttggtggttcctgggtggatggagtaagctgagttgtgggcttcattgagcaggacttctcgtgcctctcccattggtacacacaggtggttcttgaaccaaaggactccttgctcatctgtcctaagatccggaagttgctccttgtgagctctctctccatgagtttggctgtctctgcggccaggcgttgagccttgcatatgagatcttctagaattggcttgacttctaggctaccattgtctcccagacatgcatttagctgagctgattccttcttccaatcctctaaaaagttggtccctttaatcccgaaaggttttcgactgagggcgtccgctaccacgttggcctttccggggtggtagtggatttcgaggtcataatccttgatcaattcaagccatcttctttgacggaggttgaggtccggctgagtgaagatgtacttcagactcttgtgattagtgaagatgtggcatttgttcccaatcaggtaatgcctccatattttcagggcgtgaactatggctgtcaactccaagtcgtgggtagggtagttctgctcgtgtggcttgagtaagcgggatgcataagcaataactttctcattttgcatcaagacacaccctaagccttgccttgaagcatcacagaagatgacgaaatcctggtgtatatctggtagtgtcaggacgggcgcggttgtaagcttttccttgatgatctggaaactttcctcacacttcggagtccacacaaacttattgtcctttttgagaagtttggtcataggtttcgctatgctggagaatcctttgataaagcggcggtaataccccgccattcccagaaagcttcgtacttcactgacgttggatgattgtttccattttgaaacggcttccaccttggatgggtccac

SEQ ID NO: 20517 - DNA, 926 bp, Zea Mays
ccaaagccatctaacaagttgattaaccaaaggaatggcatagcccgccatacgacatacacgtcggcttgcctattattaacgcagttcgagacaccacatgtatatatatcacaatcacttacgccatcgactcttacttaacatgagttggctaacgccatataagacttaccaaaccattttaaacattgtaactcgaaacatgggttgaagcaggttaattagtttttcttaaccatttctccactcgaattagttaacacacaagtcacttaaaacaccatattttaggagggctaacatagagacattaaaacatggcataaaactccataagacttacactggctaatgaaagacctaaagcacccatgtgcatatgttatcggactgttcttaaattttagcaaggattgactcatgaacactacttgcctccaataattattgggctgcgataacgctcatataagacctctaatcgatcaacaagacatttatttatccaaagggaatggaatgcaataatttataaagctaagcatcgatcggtcatacaacaaaaatcatgacaacactgacagatactatccactaaccgttgaaaatttaaacttacttctcgcttgccactacatcactcctcaatcacacaaccatcacgagcatccttcacacgattatataatagcgacctaaacgtcgtgttacacaatacatacatctttcctcgtcgcgagtataaccacattacgacatatacccgcacacctcaatcaattatcttacgccaccactacaacaatacaccacagcacacacgtacatatgtgtccccactgccttctcatgcccaattttagaacaattatttatgacaacgtttatcgattagacaagtgaaacactaaccgatcattcgc

SEQ ID NO: 20518 - DNA, 330 bp, Zea Mays
tttgggcaaggggtacttgttcttgattgtgacctcattcagagcttgataatcgatgcacatcctcctagtgccatctttcttctccacgaacaggacaggggcggcccaaggcgagatgcttggccttatataacctttctctgactgctcatcgatctgcttcttgagttcaactaactctggtccagatactctgtaggctctttataagataggggcggtgccaggaagaagctctatagcaaactcaactttctgctctggtggcatacctagtaaatcttctgaaaacacatctggaaattctgacacaaccttgataatctc

SEQ ID NO: 20519 - DNA, 716 bp, Zea Mays
ggcagtttgttcatacagaagttgttctgaagcttctcttcccgtttctttatctccaatttctagggattcctttttggcgggctttgagggcccagcttcgggtttggcatgactctttgcagcttcgacttcagtttgctttgtttcaatttgcgtttttgaaacttcagatgttttccctcgagtagagcttgaagtctttatttcttccagtacatctagtacgtggaccatccttttcctcttaggggtaactgtaagatctttttgtgccttcggcactgtcacctctgccgaaggacttataacttctgatatctttgttctctcgacctccggctcacccaatttggccaatggtgccttcggcgttgcagtcgtctctccagtcttctgcataagcgcagtttctttggcttcgttagctgaagaggtctcaccgccaaattcaggcactgtggccgtttcgatgtagcatggtcggtgagtgaggaccttcacttttttcctcttcggcgtaggctcactagagacagccgaagcaacatctttcacaggagccgcacctttccttttctgaccccgtagtgggtaccgatagtcagggtacacaaatcctatagcatcaaaaactctgtttagtctcttcttttttcggttcccaaaggccgcagataatgtgttatcttctgctctggagtacggcccaagca

SEQ ID NO: 20520 - DNA, 608 bp, Zea Mays
cacatttttaccgtggtggatgacgtgggggcgacagtggtcccatgtgccatcgttccggctacgtcgacccttggcttccgtagcctggggctcgacgcaacacgttgtgtagtgccctgcgagaggtctacgcactcaggcttagttcaataggccataagtgtgccacgggccgaggggcgcacaagccattaatgcgtcgcagtccgagagctcgtaggtcttgagcgctatgcggcccaaggggtccgtagatcaagagtgggaagcggagcgaagcccacgctatagctcgatgcgaggcacgattaatgcaactaatcatttatggcgggtcaggcccggcgtgggatccacttgagtggttcccttccaacacgcccgacatcccttgtcaggttctgccacgctcgaccctaggctcggtgactcaaagttcggctggggcgggtcctttcagggttgacgtatctgtcttccgactgactaacgacccctaacaattaggtactctttcctcagcgctcactgaccggtgagtcctagggttcgggggtaatccccctatagtgcttttagccaccatgcttgtttctttagtagct

SEQ ID NO: 20521 - DNA, 1315 bp, Zea Mays
cgctacccactcaagctggatcattgccgacaacaccctcgggggctgggtaatcgctggcgccatccttggggaccgggttctctgcagcagccacctctaaggctgaaggattctcagtcacctccatgggaatggagcaacctagaccagcttcttgactctgaagaccgcactccaaggtcgacgaggcacgagacgctgctcgggataactctaactccacatccggaatgtcagtgcaaacgtccatcataccaccatctattggctcggacagcagatcttcaggaaccatatcctcgagagcctggtcaaaatttgctatggacaactcttgcagaccaacgagtgcagacaaggctagagaaggaatatcactactcccccactgaccaggtagcgccgactgtttttccgaattaaggggatttccttctcttcttcctcaacctcgtcaacaatacgaacaacacacccattggggtcagctctggccggattgcacccattgggatcagcatcatcaaggtcacacccattagggtcagcgtcagtagggtcacacccattaggatcggctccagtaaaaagttccactggcacttcctcagcagcaggagcagaagggccggcatcctgattcaaacatgacactcgccgaagcctcctctttttcttcttcttcccctcggcaggagcagttggatgactggccgggcgaaggcgctttgggcgagcaccatcagatttttgagcagtcaaggtcttctcaggctcggggacagttgcaatagctatggttttagcagggacagagtcagatgaatcctcagccaacatgtccagcatagcacttatctctgcatcactcgggtttataggcatctcaaagtgaacttgcctttcatcgttggggagatcaccaagtgaagcaactagagcctcgacttcttcgggagagggtcgcactctaagacctaggccactgtcgctagtaggaggattggacagaaaactgaaaaaaagtcttggaaggtggcagattccaggcagaatatgcaacaggagcaccaatattcgacactttgcctctaaggatcatctccagccggcttaccaaatccacagcaggaatcctcctgttggtaacccgggttgagtcagtgacaccactatacaaataaggcgggtatgctctatcctttagtggctgaatgttcttaaaaacaaagtctgcaactacagcttcggcagtcagacctctctccttcaacaaaccaacttcggcaagcagaaccctggccttagctat

SEQ ID NO: 20522 - DNA, 902 bp, Zea Mays
gcgagccaacgacatgatactacaaggccttaagcatcgggttttcacctgccttaagcgacttggctgacaatggccccaagagctaactgttgtcctctagagcctgagaactatctcaaaccattcgactgggtacacgccttacttcatgacctatggagttgaggcgatcctccccaccgatctcaagtatggcgtcctaatactgaaggcgtacatggacgaaagaaacgaacaagcctctaaaacacactagatcaacttaacgaagcccgcgacatggttctcctatggtcgacaaggtaccaacagacgctatgaatgtatcacaaccgtcgcatatgagaaaggccactggaggtgggagaccttgtgctgcgatgggtacaaagcaacaaagatcggcataggttgtctccaccctaggagggtccattcataattggagaagtactatggttgggcacctacaagttgaaggatgaggaaggaagtatgctcaccgacgtgtggaacatcgagcaactttgatgattctacccttagtgaagcctatgcattcatgaccgaccctaagaactattcctgaccctgagacgatagtcgcaggggttggggatagcgagggctatggagaaatcaatagaccctccttggaaaaacatcaggtagctcgtctcctgtcaaaacatatgcgtcctcccagtaggcattatcgtgcactaacatctctcctcttttgcttgctcaatcaacgcagggccaccctcccatgctcgaaaaaaattgaagggaacgagagtcgtccaaaaccgacgcaccggaccgggccactcttcgagccacccctgcttaggaaatggagtgagcaagggccactgtctagtaacaccccaaaa

SEQ ID NO: 20523 - DNA, 516 bp, Zea Mays
aatttctccccttccctgttcttgctccgccgcaaggaactctaccgtaatcagcaacctcgggttagtaattcccccaattgctccttgttttagcatgcttatggtttcttatagttcttggaaccggccaattgaagttcggccgaagcctttcaccggaacacgtgcctgttctgtagaacgccgccgtaacccaccctcactgtcgacctgctcttcagctcgtattctgcccaaaccaaagtgtgtgcataactcctggtgaacctgtgaacccttcctcagcctcaatttggtcgtccccgccgtcgtttggccggaacgcgttcgtccctataaccatcctcctgtcaccatgaaccagttgtttcaaagccccggttataaaattgattgaggggaaatggtccttagaacttgaatttggtttcagccaaagtaggacaccgatcgctgagcgaaatggccgattcacgtgctcgtcggagccctgcgcatcgccgtccgccgtcg

SEQ ID NO: 20524 - DNA, 481 bp, Zea Mays
tgcttttgcgctgcactctgtgccctgccgtgtgggacccacttgtcggtggcgttgtcgttccttcccccattcttctctcgctgtcaacctgggccagtccctggctctctccagtgcgcatgcgtaagtcttcgtggtcgctgccatgtaggccccacgtgtctgtcgcactgaccccgctactgtggatcttcctaggccgaacaactcggtacaagtcgttgcgccgccgacttctccgcagctgcccttggccagttcaactgagtaccctggatactcgcctaccatcccctactcgcgctcggactccatggacataaaaacctcaactgccgcacttccttcttccctctaagccacccaaagatctgcgccacgccgccattgcgccaggcgggatctggttcgacactattaccaccgtcgattggtgtgcgcgtccttgcgattgatgatcgccagagcgggtcgaagt

SEQ ID NO: 20525 - DNA, 686 bp, Zea Mays
catgcatgcccggtgatcgccggagagccgccacggtgaaagccactaatctcgtgcgccagtgactcctttcttctccgaccgccaccgcgcccaacccaaattcatgcgccaccgctcaagcactctataaattgagcacaccgacgggtccgtagggtagtcacgcaccaagccaccaagccgtgccaccaattgttcaccagagctcgccaattccaaatttcccccaaatttgctttgcgccgccgtgaaagagacctcgtcgtggctagctcgtctcaggtccgctcataccctctgccctttcgtttcagtgttctggtgtatccctaatgctccccgaccccgccaattggactaggaccccttagatcgccgggaacgcgttcgattgtccgtggtgcccgctgccaccgtggacagagcgagttagagctccgctagtgaaattagttgaggggaaactcttgttaaggcttgaattaggttccagccgaaggagagcaccggtcatcgcgtgtcctggccagtgcaagcttgccggatctcggttccccaccgttcgccatcgtggactgtggaatgtaaagaggtgaaagcgcgggggtgtttctgcaagtgtcagcgagacagaggaatagtgggaaggactctttatagaaatttcaaaccgtcagggttcc

SEQ ID NO: 20526 - DNA, 962 bp, Zea Mays
ggttctcgcactgcaggcgggatcctcgctggcgttgttcgtgacttccttgcagccgcctttggcgtccccagggaaggtttcttcccggatgggtccgctatacaatgcaaggttccctcctggtctgcaatgtaggaggtggatctgaagcagaagattgctctagggttgaaggtgattatggtcttgaaggtgactataattgagtcattgtatatcaatgtcacaccccctacctggcgtgccagttgtcagtgtttgtgatctgaccgcgtaccacggggttacccatgtgatgcttttgggtaggacgacgtcattgatcgcgactcgatggttcatgctgtaacacaacggagtgacgtgcagacttattcaggttcgggctgtgtggagttgcgtaataccctacttcttgtggtggttctggtattgatgtgaggattacaagctgagagttgggggtgttgtaggataagatgagatgaaatggtaggggattcctcccggccttatatatgcgaccagggagagttatcccgtacaagtgataactactatctacttgcttatctcatggtttgtagcaggctatatccctacatattcggagtccttctcgcccattcacccgagctatcactgagggcttatcatgtaaggtgatcccaacagtaccacctgatacatccgtgctcctgtagcacttaactcgggtatcgatttctgtcggcttagatcgggcctgcccagcctggctatgtttagctagcccatcccgctggacgacctaggagaggacctgccaggcggtccatgacacattttagtgtacatgaggagctgggggacatccatcccccacgctcataacctacgaacccttcgaacggtggcgcatttatggctcacgcaccccctggcctgtggtgcactcatgacctatcggactaggccta

SEQ ID NO: 20527 - DNA, 308 bp, Zea Mays
atggcccttcccataatggtgataatttgtgccgtccttcccccgttagaattcggtgaaggaccaagtctcccactacaaaggatcgatgtcgtatggccttgtcatgatagcgcctcagggtttgctggtatctagctgactgaattactgtattcaatcgctcttcctccaatatgtcaacgtcctctaatatggtagcctctgccttagctatgctttcgaagaccaaccttggtgccccaaacttgaggtcagcaggtagcactgcctccgaaccatagaccatgaataaaggagtatttccg

SEQ ID NO: 20528 - DNA, 377 bp, Zea Mays
gtgatcaccctaagttgtgtaagcgtgagtatgtcgcaccaacttaaggtgtttccgacttaagtcgattgctcggttagtatggcatagtgatcaccctaagtcatgtaagcgtgagcatgtcacaccgacttaaggcgtttctgacttaggccaattgctccgttagtagggcatagtgatcaccctaagttgtgtaagcgtgagcatgtcgcaccgacttagggcgttttcgactaaagctgattgctcctttagtagggcatagtgatcaccctaagtcatgtcatgccgatttcgagtcgtgcccaatctaagtcggttgtcaatcaagagattgaatgcctttggaagatgaaagctttattaatgatgaa

SEQ ID NO: 20529 - DNA, 446 bp, Zea Mays
ctaatctattaaacattagtcaagcagacatttaataaattatttaaattatgtgacacgatgaattaatgtcattaacatgtggaaaacatcattataaatctgacataatctgaatggggtgaaataaacttaaaacgtaagagatatcatatttttactagctctcggatataaaatgatgtggcacatttttattgatcaaaaactcgccaggcggagggccacatggggctcagccacagtggatcatggaggtgggatccggtgtggctacagccatgcatgggccacgggacgtacgacagcaaaagtcacatgcatgggagacgtatcgggcatgctggagagtcgcagtgcaccatcgcgcatgcaggtggggctcacactgcatgcagtaaggggttcacaagacggttcctatatccacttctcctgcaaccgca

SEQ ID NO: 20530 - DNA, 453 bp, Zea Mays
aaattgaatctttcattaaccatatagtttagttcagtttttttgtttaaccaaaaaaccgaggggcaagggcgatggcttaggcttggctcaacaggcgtgatggcttgttgttgctcatgatgaaggtgatgacttatgcatggcaacgaaggctacacaccaagcatgacatctagcggctatatcgtgacgagggtgggctgctggtggtggctggtgggcggcggtcgccaggtgatgagggtggctagtgttcgcaatgtgagggctattgcgtctgtgattgaattacgtgagggatttgccgctgtggtgtgacagcatgagggtatgtgcttcccgcggcatgcagggttgagtcaccctggtggcatgaggctgagaggtgaggggctagcgtagtcgcatgaagggctaggctcgtgggattgagatttgagaaggttgcaa

SEQ ID NO: 20531 - DNA, 429 bp, Zea Mays
cgcagagggagtaagaaatatcacctagtggatgaactccgaccactgttcactccggtcgtcgtgtccgtttagctcacggccgcttcggatctccactcgccggagttagacacatcgcagccttgcgccatgtgcctcggcactttaaccacaccgctgtgactcatgttagcccatccagtgatcgccggtgagcttgccatggtagtggccaccaatcgtgtgcgccagtgcacgtcctcctctccgacctccaccgcgcgagttcaaattcaccggccaccgctcaagagccctataaattgagcacatcctcagctccattaggtattcaagcatccaatccacccgctcctgcctccaattactcaccagagcccctgaatcgctcagttcccccaaatctgttttccgccaccatgaaca

SEQ ID NO: 20532 - DNA, 455 bp, Zea Mays
gtttaatgaacgtctgcccgcaataggagatcgaaggctacatcatcgtgatccagaagaattttactgagaagaatccggagatgagaattctagtttcagccatgaattcgatcccttcggcgatggtcgtagaatttatggtgatggtcaccacgctgatttcaataatctgcgtggaaggcatcgtgcataaggacaccgagtaaggtttgaagacgagtttgaagaccatgaccatgaggaaggatctgatgagaatccctttgcaaatgatggaatgtttggtcgacgacatcatcaccgacatgctgattttgaagatagagaccgttatcatgggcgtcgtcatagaaatgacctagacaatattgcccgagataagttggatattcctaaatttactgggaaagaaagtgcagatgaatatcttaattaggttgagcagtgtgatc

SEQ ID NO: 20533 - DNA, 621 bp, Zea Mays
gtcggttcatcatcacttgttgcgcgctcagcagcgcatgaaacatttcgcagacaagcgtcgttctgaacgcgtgttcaatgtcggggatatggtatatctgaagctccagccctatgtgcaaacttcggtggcccctcgtgccagtcacaaacttgcctacaaatatttcgggccctttgagattttacagaaggttggtgctgtggcttataagctgaaattaccagagtctgcttccatccacccggtgtttcacgtctcccagttaaagccatcagttcatccatcgtgctctgtcagttctgctcttccagctgtggcatctgccgtcagttacccagagcaaattctgcaacgccgtactatctcacgtggaggccatcaggttgctcaggtcttggtacgctggtccggttgcgacgccactctggattcatgggaagatgaacaagctctgcaaggccgtttcccagctgccaccgcttggggacaagcggctcttcaacaggaggggattatcagcataccaaaggggttaccagggaactctgatgaaagtgagctgcaggaggagcaaaccaaggtgtcgggccgccgtgtccgtaggcccaattccct

SEQ ID NO: 20534 - DNA, 748 bp, Zea Mays
gccacagccccctcgcggccggcgacgcgtccaactccttctcgtcggcctcggcggggtcgtcgtctcccgagagcaactgcagcggtgggcctccgccgccggtggcgccgcatgcgcttccttcttttcacatgagccccttctgcatgtaggcagctagctgcacggctgcaccactgatcgacaggagcaaggggcatagttgtcattagtgctagcttaagtacccaataatttctgcggcgatgtcttgtaaagactttgcacccttgcttggagcctttggacgcttgggggcccgtatgtaaattgttttggtacgccatgcagcatgctgatcgatgcggcccagcaagtcgagagtgcgtcggtgattagtactacgtcatcagtgctgcgctggctttatttgtctgactaaaataagtgggcaaataaagactattgggggcatgcatgcatatatgcgtactacactggagtctggacaggcacatgcatgcatgccactgatcagaacttagtagtatatcgtcatcggtgcagcagctagctaacttgtggtcagatctttgtttcatgtactataatttaagaacattttcgtcctgattaattagttccatcgtgtgcaaatagccgtattggattttctctccgttcaaccctccgccgtcgtatctgcggcccaccaacctccatcgtcgtgctaggctaggctaataatggtctcagtagttggccg

SEQ ID NO: 20535 - DNA, 658 bp, Zea Mays
gtggtactaaaaattgctgctcaacgcttgacatcatgttgacagtgccctgagaagaggaagaagtcactggctcccatttgagcttcccattgggattcctcctacacaccacatccttgtgatcctggctacaaatagaacaccttccactccactgacactcggcacggcgatgcgcttcaccacaatggaagcaaaccagccccaacccgggcttaggaacagcccgatacctctgagtactccctcctgtagtacccgaatcagaggattttccacgacaggggtagtgacgctggtgttgtgactttcccctcttgtgggatggacccccagtgttgcccctcctcgcgtcctagccacgaagctgatcaacacccgaagacttctgagactccatgttgtactgatgttgcatctccacacccaatgcctgctccaccgtagtacgaaaatccaccaacggaaaggcgcccagtgtaatatcccaaaaaattgttgaccaaaagttaatgtttggtgcgtggatgaggtaaagggttgtgggccattggatgcaaagatagaagtcatccgaggcgtcgtttctttctcccacaaaaaccctaggtggccaccccttttttcccttcaccccccctcttggccgccaccc

SEQ ID NO: 20536 - DNA, 441 bp, Zea Mays
cgacgacgccctcaccgacaccggcggcatcgcctgctccgccaccaccaccactgccgccacgtaccacccgcaccatgacgggtgccatccctcgcgttcgctatgaagggctggcggccactacatcatcctcaccatcgccgattccgacgaactaccgcagcgcgctggccgacgccaactagcataccgcgatgatggatgagtaccaggccctcgccgacaacaatacctggcagctcgttctgcgccccctggcgccaacatcgtgacggggaagtggatcttccggcacaagttccatgccgatgggtccctcgctcgccacaaggctcgctgggttgtccgaggcttctcccagcgcgagggtgtcgactacgacgataccttcagcccggtcgtcaaaccggccaccatacggtctgtactcagcatcgc

SEQ ID NO: 20537 - DNA, 324 bp, Zea Mays
gttatggcggaggagagtttgctcatagtatgagacggtgtgagttgttatacacgtatgatctgagtgctgcagtacattaagtttaccgatgagttaaagagcagtttctcacatgatatgatgattcatgcttaacatcactagtgaatacgataattctgtcgttaatcagttctgtagtaatcattccattgtaatgggaatggactgttctttcagcttccagcgtttagagtgaaatctttctgctggaaaatagatacagggtaacagggatgtgtactatgatttcttgttacatgttaatatatccaattctgt

SEQ ID NO: 20538 - DNA, 368 bp, Zea Mays
agccataagaaagcaagatgagggagaagaccgaacaacaccaaacctaggacaatcgacccaccaggccacaatcattcgaccgaggacatacaccgataagcagcgagagatgataactgacgtatcgctagtttcgatgtacaaggttgggacaggcatgataggctccttggaatcacgcggcccacaggcccgaccatcaggttgggagacagccacaccagaagtggcgtcgaggcccagccattatcgagccaatactaggtaagccgactcaacccatcttttccatattcaatattcgatactatctctcatttgctgggaaaaaacgtagggttctcgttaacccatgactgtgaggc

SEQ ID NO: 20539 - DNA, 661 bp, Zea Mays
cagggggtatgcacaagggtactgagccccgacatgtgggcccaggaacataacggatgtagcacttggagccactaatgtttgctgttggagcaatctccttgcgccctgacatccgagatctgcatagtatcgacgtgcaggggaagcttctcgtacaagggatgatggacacagtgtgccgcgtagcacgggcgcactgtttgacaatggattggacaggtgcgccgtctgcaggatggacctggcgccgcctgccagcggagtggataggacacattaaatgctgagggggcacatcgcctgtcagcagggtggacaggcggcgcgtcctctccgcaataaatgcagagaccgcgcgacctagaggccttacgtcaggctccgccagctggcttatgtcacgggcaagatgccacgcggcatcatcgggactccgcctgagcggggagcgcaagcgcacgagataaggcctggacacgtgtcagtaccggacccttgcttatgccagggtatcccttgtcccaggacctcattgcggtccggaccttactcggagggagtctcggaccgtaatcaggggtccgggttatgcgtacaggggtccgttgcttcctcacggaggtccggtccaactgatacatcctggcatgtatcatct

SEQ ID NO: 20540 - DNA, 995 bp, Zea Mays
gttggcctcatcctcaatcctccgctctttgcgtattcgtatcatcgagtacttttcgagatccagaacgcgcgtttaacacatcacatcacctccgtgcatgcattcacaccacaggagagacaaagtaatactccaaggcttgtggtactagtagcaatataaaaaggtagattaaattatcttcaatgcaatactggccctgcaatacctacgggtactggtagcaatataaaaggtggagtggacacatagcagtactctaagattgttgaggtgctcatatctagtagctccatcttgggtttggaatgtggccgatcgatcgtttaaacaagttgaaagaaaattaagtttttttattcggttgcgtcatgcaccgtgatgatagcgaactagtagaagtcatcgcgtacgtgtgtctctagatcaagtactagtaggggctgtaaggtgtagtaggagaaatgatggtctagtctatagggtgcagtacaagtaggtggccagggtcaagtcgagacgatctggcctgagccagtaacccacccatgccccatgtccatcgcccgttgcttccagccatgtgggcctcatagtgacacggactaggggtgaaaacgggatgggtactcggaacgggtactaaaattatctaaattttcgaatacggatacgtgtattttttgtcggtaaggatacgggtactacgcagatattgaactcccagatacgggtaggatacgtaatcgttgttacccagcaactacccggataccctgggtcggatacgggtaaaattcggtcgggtacccgggctggcgcagtacagtgtacatcggtgcccatctgccttgtgcgttggcctgctacagtgctggcccaaagtccaatggcccattatcaatacgtgcccaagcggccaagcccaaagcaaatctgcaaaaggccaaaagcattaggttctagggtttcacttgctatctggtatatcg

SEQ ID NO: 20541 - DNA, 390 bp, Zea Mays
cacagaggtagtggcggcgagctgtggacccgcgccgacggaggaggaatgcacctcaacatcggtcgtgctccagttcatcatcctcgttaggagcaacaacgacgcgtccagcacgggcgaggacgacgatgacatcacgttgtcgagcaagaaggcaatgcataccgtagcagtcagaagacaaaaatcaaaggtggagctaacgatgggctgacaaacggggggatgcggtgggagaaggaagggagatagaggtggggccgtaggagggtggcatgatctgttgcggcggcatgggtggggtagcggcgggaggtgagagacaccacgaagcattggaggagagatgcggtggcggagtcggggtgggacttggaagaagataga

SEQ ID NO: 20542 - DNA, 299 bp, Zea Mays
cggacctctaaaatgtcaggaccggcactgagcgcagtagctgaggcagaattcagcatcatcatcgtcatgacaacttaccttgctacctcaatgtatactggtgtcgattatttaccaaagaaaattacaaatccgtgcactaattctccaaactttccaagatcctccagaattttggccaacattttgacattgagcaaatttatttgcacagacccggtttgacatgcttgatttgtttacgtggccaccaggccatcgcggttccatgcatggagatgcgcaagcagccaatg

SEQ ID NO: 20543 - DNA, 567 bp, Zea Mays
accgcaattccgcaccatcgtagatacgcgcattaccgtgggccgggggctacacgtcttgaccactggtaagccagtcaccacctcgttgctattttcctactcttcacgttgggcgtacattgggggaaaatgggggtcgggttggccgattgcgtgaactccggtgcgttacgccgccgtgattctgcactggcgcgtcggggggaagaagatagtgtgtgagccgttggatgatgtgttgacggcctagattagattgattagataccggttcggtggagtcaattatagccgatggatctagatcgggcgtggggtgatgaatcctactgtatttaaatctggggcgtccgtccagatcgtgcggtccacgttgcgtaccgattcaatctaatctcgcgtgtttgatttggatcctgcggctcataacgcaccgtaccctttcggcttggcgactttgcataagagcccctggaatttaccgaaacaaacccgccgtccattgcggggttagcctgagtctagggatgtttttatggaatagcccctgtgcttcctggtatt

SEQ ID NO: 20544 - DNA, 304 bp, Zea Mays
tgaggatgaacttcaagcctttgcatacatgtgcagcacgaatttagtcagagggctagtgcaaggtatgccaggggtggtggatcctccagccagagggtatctcaagggccacttgataggatgatgtgaaggagtagggaacaagtacctgagagtgttagagactacaatcttgctcaagcctctagaccaaggcaacagaggacagatactggtccctggacaagtaagggaaggagctcgaaatagattcttggtacggattgggcaaaggcttgtcatgccattggcatcccgggtc

SEQ ID NO: 20545 - DNA, 429 bp, Zea Mays
aaacacagtggggtcgtacattattctatttagagaggctcgataggggaactacagcaggcaatcaaatatttcaagaataaccccaatctccaccaaaaaattgtagacatagaggtaaggccagtatttgggaacgggtcaaaatggatttattactggtaaaaagtcgcttattttacctgaactgtttcactggaagaagagtgggggatgtgtgcggcgcagacgcaggacaccggagagacgccgcctatggacggcaaagtcggcagatcctcccagcgcttttatagaggagaccagatggattctgaaggtgggagatccggccgccaaggtttagcgaacagacgaagggtttccgcgcccaccgcccagggagggcagggactcggcgaggttttcggcgagtagacgatgccaacg

SEQ ID NO: 20546 - DNA, 620 bp, Zea Mays
gattgtctccatgaggatcgaggccttggcttcttccccatctatgattgccgtcagcatgctcactgctactggccccaacaccctttccgatggccttgtgggggtgccccgctggttctctccccgttccccatatcattaccaccatctcctcccaccgactgggttgcgaactctggcgcctcattccataccactcctaaccccagaattgtctctttacctcatcctcctggcaccacattcccttcctccatcatcgttgataatgggtcaactctacctaccacctcggtagatgacactgtacttcctggtcctttgtacctcaacaacattcttgtggcccccaacatcatccaaaaccttctctcggttcgtcacttcaccactaacaaccgttgttctatagagtttgatccttgggggctcaccattcgggaccttaccactcgtgctatggttgctcgatgcgacacccttatattccattcgcttccccgctccaccttcctccgcccatgttgccacaccttacgcccttgcctccattgttcctgcctccactttgcactgtcgtcatggccaccctggacatgacatcatctctcgtctct

SEQ ID NO: 20547 - DNA, 596 bp, Zea Mays
ataaaaataaactcaggggccagagcgcaaggttccctagactcagcgaatagtgagcggggacggcgggttgattagctaatttatcaggggcgttttagcaaagttgcggcaccgaagggggtacggggctggctgggccgtctgatctgagatggaaggctcagattaaatcgagcaccaccccaaaccggtatccagtattggcccttagatccgagatcagtggccgtggtttaatgaaacgagatcccctcgattaccacacgatttcagatcaacggtggtaattcaaccctggtgatcggttcacaacctttaatctcgtgcgttgggaacaatccgatggtcatcgtatatcttcaacctcacgtgctcctgcctcccctttctctctcccatctctcacgctgagaaccgaggcagcgccgatggttctgaccacccccagaccacgagtttagagtgtcgatgctttaatccaacccatgaaatacacagcgggtagaacgacgaaggtattatgcggctccttacctttatccgagcagtggagtaccctgccccattgccttcccatgcgtgcggacagcata

SEQ ID NO: 20548 - DNA, 949 bp, Zea Mays
gttcgcatgggagtcgttgcagatgcctaggatccctagggaggtgatcgagcatcatctgaaaatccaccctaacgccaaaccggtgagtcagaagcctcggagatagtccgttgagctgcaggacttcatccgaaaggaggtccggaagctgcttgacgtcggcttcatcgaagaggttcatcacccagtgtggctggccaacccagtcatcgttccaaaggcaaacgggaagcttcggatgtgcatcgactacaccagccttaataaggcttgtcccaaggacctatatccacttccatgtatagatcaaatcatggattctacctccgggtgcgacctcttgtccttcttagatgcttactctggtttccatcaaatccagatgtctagggaagataggtagcataccgcttttgtaacagtggatgggctttactactatgtcgtaatgcctttacagtctgaaaaacgccttgccgacatttgtgcgggcgatgagtaagactttcagggacctgattagggacagagtagaggtatacgtcgatgacatcgtggtcaagactaagagagggtcgaccctagtggaagacttaaccctggtcttcgacaagctgcaggcaacacgcatgaagctaaacccggacaagtgcgtctttggtgtctccgcaggaaagttgctgggctcctggtttcgcaccggggaattgaagcaaacccggagaagatcaaggcgattgaggcgatgaggcctccggcccgcatcaaagacgtccaaaagcttacggggtcattagccgcccttagccgcttcatttcaaggctggctgagagggcgctgcccttcttcaagctgttgcggaagtccggcccattctcttggaccaaggaggtggaacaagcctttcaagagttgaagcagcacctggtgtccctaccaatactg

SEQ ID NO: 20549 - DNA, 2311 bp, Zea Mays
ttgcctaatctatgattaactaccatgaacaaggcacatatggcaggtacaatcagcctaattacatagtctaacacccttcgggtcccaactctagccactacagatgtagaatagtgaagatggcaagcctttggtgaagatatcagcaaactaagaagtcatcagacgtgtagaacacgggcgtgggcgtctccaacggcaaccttggcatgcacgaagtggagatcaatctcaatgtgattggtacgttgatgttgaaccaggttggtggacaagtaaaagtagacaagagtattatggctcagagaggaatatagctccatcaacaactggtgaagctattagctaactggcctcgacaacatcattggcaacaatctgatacttggctccaccactagagcagggacgaccaggagaccagattgtcacccaaataaaaactgcaataccagaggtggaccgacgagtatcaagatagtcgactcagtcagcatcagtgtagacaatcaaatttgaagccgaggagcaccaaagaagaacatcgtgatcaagagtcccctggagataacgtaaaatgcgcctaactgcagtcaagtaaggctctcacggtgaatgcatgtaaagacaaacctgctgatctacataagagataccaggtctggtgaaggtgggatactgtagagcaccgactaggctgcgatatgcagtgacgtcagcatctattccaagcagaaatcttgacctgagcatcaattagaatggagaccaacttacaatcaaccatgcccgcgtgtctaataatgtcctgggcataggaacattgagacaatagcagacctctagattgacgccaaacagatattcccaaaaaagtgatgcagctctcccaggtccatcaaaaattcttactgcaatgctagtatgcatgctttgaaccatcaggacctgtagcctggagccttgtctgttggcatgctttgtacgatcttacaaatctattcatgactaaaagaatatattaagctatcaagaccatcagagggctgaatcagtttttcaaggtcaaagagcatttgtgggtcatcagatttacccactctttttaatgatcaaacactgcaagaccctactcataagccagcgaggtaatattattatggtgatatctgttagtagcagagtcatggaagaacttagtacattatccccaagtttaacccatttatcactatatctttgccgccaaaaaccatttttgtatttcagcaacctggcgatttgttgtttgatagtcctcctcatgtttctttcctacaggaaaagagtttctttgttcttctggcaaatccaaaacttccaccacctcattacagttccaaatcaaataattaagccttgaaataattttactccatcttttgagagcacttctgacatttttgaatttcgccacaatgatagcagggctagaagtagctctcacctccctgctccaaggtgactgaaccacatcaagaaaacctcgatgtgcaatccagtagttctcgaatctgaaaattattgcttcaggtatttttgtacctatttgcaccgcaaggaatatgatcagaagtcttagccagaggtaccagcagagtattgggaaaaaaaggttgtggtgaaacaccagtcatgttgtactagcaacagattaggctgcatattgctccaggtgaaatcaataatccccaggttgctgatgatatactattaaagatgttcatttcatttagattccatttcggccaattcctatcctcaactaatctatagaaattgaaatcaccagtaatcatccaatcctcatcaggggagatgtctagatcattaagccactaaacaaaaaagaccatttcttctccgtgacagggaccgtaaactgttgtgagcttccaactgtcagcattgtgctttgaggtaaactcaatagtaatagcaaagcttttgagttcaataacagaacccaagaaaatactttcattccagctaaccaaaatacctcctgaatcccggcgagaaggcttgaacacaaatttattgaaacgtttagaagcaattttcttcaaatgagcagcacagccggcactaaaatcttccaatttgatttccttaatgcagaagataacacaataaaccaaatcaaagccacgacaaaagatgaatgaggtgtcaaacttagcttcaatgaaccccagatacagcaatgaggcaaaccagctataccaaacacgaggagctgcttgagtccatagagggacttgttgag

SEQ ID NO: 20550 - DNA, 552 bp, Zea Mays
cgcttatcaccctcagacagatgggcagacagaaagagtcaacaaagtcctcgaggatctattaagagcatgtgtgctagcatttgatagaagttgggaatccagtctaccctacgcagaattctcatacaacaacagctatcagaccagcatcaagatgtcaccgttcgaagcattgtatggacagaaatgccagacccctctcatgtggtccaacgtaggggaaaaagcactagaaggacctgcctttgtcaaggaggcggaagagaaagttgctctgatccgcagaaggttacttgaagctcagagtcggcagaagacttatgcggacaacaggcggagggaactcagatttgaggaaggagacttcgtctacctcaaggtttctccaatgcatggtgtcaggaggttccaagtaaaagggaagctagcaccgcgattcgtcggtccctatcccatcattggcagggtaggacccgcagcataccgtcttgaattaccggaatccatgtccgacatccacaatgtgtttcacgtatcccagctccgcaa

SEQ ID NO: 20551 - DNA, 495 bp, Zea Mays
aggatctgatggggggattgacctttttggagcccctccttccatgaatcttgcagatgaacggtctcttgaagcaggcagtggaatagctaaggacgaagaggattagagtagtatagtctaagtactgtacttatgtaaaataagtaaggaagtcgagttgtataatggagtatgtatattattactgttccgcaatgaaataaagatggtgtatgtttggcatattttatttccaaatgtttctttgcctcagatgccatcccggacctatgctcatgatgcggcaggtacatcccgcggtggggaggacactcccaatccaccacctgtacctcctaccctggccgaggctatcactgccttgatcaacgccaccgccgacaacacgcgctttctgcgcgaaatggcgggcagccaatttcaacaacacggaggaagagttctccctcaaggaccatgagacactacctatctagagttctccgaaacctg

SEQ ID NO: 20552 - DNA, 668 bp, Zea Mays
ggccgagctatggaccatgtacttcgacgggtcattgatgaaaataggagcaggcgtgggactactcttcatctcacacctcggagtgcatctacgacacgtcatacggatccacttcgccacatccaacaacatggctgaatatgaagccttggtcaatggcttgcgtattgtcatcgagctaggagtcagatgcctcgatgtcctaggggactcccaactcgttattgaccaagttattaagaactcggttgccacgacgcaagaatggaagcctactgcgaagaagtttggtgtctagaagacaagttctttagcctagaacttaatcacatcgcgcgacggtacaataaggtcgtcgacgaattgacgaagatagcctcaaggcgagtcgcagttccaccgaaggtgtctccagggacatctacaaaccctcggtggtacccaaggagacatctgaaccagccccaacaacgacatgcccccagccgccagccccaacaacgacatgcccccagccggtgagcccgaagccatacagatcgacggtaagcagggcagggccaccctagcctcggattggcggacctcgtacctagagtatttccttcgaggagagctccctctcggtaaggccgaggctcgatgcgcgaaggcttttgtgctac

SEQ ID NO: 20553 - DNA, 568 bp, Zea Mays
cgcgcgtggattcgtgctatcaccgtgattcacgctgaattaaacgcggataatgatcacggggtgaaagatctcgccgcggatagggctggaatgtactgtgtgcttaatggttcatcagtgcacaccgacgacgtggccgagcggcaatcaccgacgtgttcgccgttcaccgggtggacgccacgccttaggaggtttatcacgtcagtatgagccgaagtgaccatccaatgaccgtcgtagttcaatcgctctgcggttgccacggtagatcaccgccgtgacttattcccctctcggccgccagcgcaattcgtccaaattaagcaacaccgctcacagactttataaattgagcacgccatgagctctgtagggtagtcaagcaccaagccaccaagccgtgccctcaattgatcaccagagctcgccaatttcccatttcccccaaacctgctttccgccaccgtgaaagaggcctcgccgtggccatctcatcttaggtccgctcataccctatgtcctttcatttcattgtccttgtgtgcccatgatgctccccaac

SEQ ID NO: 20554 - DNA, 562 bp, Zea Mays
atttccttgagatacacccgggcgagggtggctcctctgtaggtagtatttactggtgtgaagtgagcaaccttggtaaaacagtcaattatgacccagatggaatcattccctttttgggtcctgggcagtccaatcacgaaatccatgcctatttcttcccacttctagttgggcactaggaggggttgcagtaatcctacaggcttttgatgatctgccttagtccgctgacaagtgtcacaccgagctacatgctgagttatgtcctttttcattcccttccaccagtatctggttttgaggtataggtacatctgggtggaccctggatggatagaataagctgaactgtgggcttcatctagcagaatttctcgtgcttctccctttggcacacacaagcggtctttgaaccaaagggttcccctttcatctattctgagatatgagggttattttttgctagcctttctgcaagtctcattgtctcctcatccaagcgttgagcttttcgaatgcagtcttctagcagggatttaacttctatactgcctttctc

SEQ ID NO: 20555 - DNA, 753 bp, Zea Mays
caaaacttctcacaactccatctaaccctggtcgttcatccagagatcaacggcataggcttcttctttctccctgatccaagcgctacggccgcatgcaacggagacccttcgagctgcgagctagcggccctaggccacggtttggagcatgaatggaacttgcgcagcacaggaatgatggcgaactactaggtcgcgaccttaccggtgatagtagcgtgggcagagccgcccacgggaggtcagtgcaacggagcgccctggttcgccaatggcggtgcatcggctctccgacacagtgacgccccatacaaccaccgccgtacgggaaacgccgcggagcacccctgcttgactccgcccttggcttcccgcgcacacctcgcacttcgacggctgatccaatcctctggcctctccctttccctttccctctctcctatcaacagtttcaacagaggcaactcccagcgtggcgcaaatcctcgaagcatagggctggaaaaggtggcggacgggtttatatccaggcgccaagggcccagcatgcgcacaactgggggaagattcgcgcaggaggtggttagatccgttcatgcggcgctattctcgcggagacgaagaccggaagcgcgcacacacagcgactgacacaagggcccctcttgccatgtgatgagagcgtgcatacgcgccgcggcggcacaagcgactggcccacgcagacgcgtaggcgcattgggttgaaat

SEQ ID NO: 20556 - DNA, 414 bp, Zea Mays
cagaaatcggtgtcatgcttggtacatgggctaagtgtctaatgtatttgtgtcatgcttgctacatgggctaagtgtaggaggtagggttgcatgttcggtctcaactctaaactatatcatagaaaagaagggtctgaagcttcattggatgcaggccagttaatgttcccattgtttctctctctcaagtcaatcgtggatcttgctagttccatgcctctcattggtatgacttatggttgatagtttcctgctcatcatctgttgtgtacatggattgtgcacactcaactgctcacagccatataaacaacaaattcagttaactaactaatcgtcatcttcaggatgtaacatcctcccggttacttggacttggaccaaggcagtagcgaagctagcaaatatttt

SEQ ID NO: 20557 - DNA, 443 bp, Zea Mays
cacccagagacaaacatcgcgagttcatgatccacaaaccacccacattttctagctccctagacccactaaagttgttgacttgctgaaatatgtggagaagatgctcaacattgcccagtgcacagacatggagaaagtgttatatgcatcgggtcacctcactggccccgctgctgattggtgggacacctattctgccccacatgctgccgctgacaccatcacttgggtagaattctcaaccaactttagaaactaccatattcttgctagtttaatgaagatcaacaaggagtttctctcactcagacagggagggatgtcagtgagcgaatacagaggcaaattcatccagttatctagatatgcttctgaggaggttgctgaagatgaaaagaagcaagagtttttcttggagggactcatcgggccactccaat

SEQ ID NO: 20558 - DNA, 741 bp, Zea Mays
aagaatttcttccctgctccaatctccaaccccgaaattcgaacaacgggtgacagcagagaggaggttgggtgggctatggactatggttgaggcagctagtaggccggcatctgtgggagaggaagggagtgaatgagctggccaccctggcctattagaagaagggaggtgggctgaactgtgcccgtggtaaaccgaagcattaaaaaatgtttatctaaacaaaaacaaaccaaataattaaatttgtacgcacaatgtagaacgcctagagtaaggaggccatataaagaccgtccgccaaatcattccaagggtagccagtgtttgtttcaaagcgcagaacattatactattgccaaaggcagaggggcctttaatcactacaacattttccatctgattccatccctacaatcggcatttttaaaattatattgtacgaccacggggcttttattacaagatgatctgtttatttcgagatgaatgttcgtgagaatcagtcgcagaactggcagtgacagacgcctctcttggagccttcgcaccagctattcttgtacttggtatggtactgcttggcgtcgatcaggcagccgaacttgcacgcccagttcacacaccaggtcgccacccggtcagtggtgttaaagcagttctggtcgtctgccatcacaacaaaataagacgtggtgtggtggatatgttatctctaatctagcagcaggtcttgag

SEQ ID NO: 20559 - DNA, 694 bp, Zea Mays
tcccaaatctacgcctaccatacacatacgtactatgtctccttgtatccggaaatgaagatgtgagcgattcctgcagattttcccgatctccatcctttccaaataaacaaggaagcaaatttgaaactgcctccggctgccccactaacccagccgtacattccgccttcttcatcccctgaacactacgcccatcgtcgtaatttggtttccggcgctcttgcaccattgataggacatctccaagcgtgagcttcggcgaacaccgtggcgacggcaacttgccctgccatggcttcaccttactcctagaagaaggtgtcaaaggaggagggtgaagcggactatgaacaggcgtccgcacaggtcccgacctgtagacccccattgtgtcttcaccaacggactgtaacgcctccatccactcggactttgccggagctgagtcccatcccagtttacagccaccacctccagccgcagaaaccttacccagatcatgcagcggagatgcagaacacgtcggcgaagaaaacgtactggtgacctccccatgatgagcatcagcaacattttccggaagcaacaaattttccgctttcaccaccaaagcacgaatgccatctgcttccgaaggcgcaagcgttttccggcgacaaccctttcgcgcgtactgtcgcatgatactgac

SEQ ID NO: 20560 - DNA, 677 bp, Zea Mays
acctcttttagaactgccgggttgatatcagacggcaggaaacaatcctcagcacaaggtttaacacagtttgtcttcagacttccttcggttctgaccttcatcaaagacacagcagttggtgctgaagggtccatataaactgctcgagtttgaactccattgatgtttaagtgatacagcaaactttgaccgtagtcatcatcacctaattttcccatgaatgcaacccttccaccaatcgctgctaaagctagagcaacattggatgaagaccctcctggtgccctcacaaatttgtctggagaccaaaacatgtccttcattctatcatgaatctcatggtctatcaacctatttgctggtcttccagaaggaataaaggagtatttggcaggtccaaagcagcacacgagcggaattaaatcgtcaacctctccaatatcctcatgtagcactgacgctattttactttccagaacactggcagaattctgtagacgagtctgatcttctctttcattatagagcatcaaatctttgctcagatgctctccagcattatcaataggttcctctacagtcttaacttttctacgtcccctcttcttcggttccttggccttatccttctcctcttctgagcttgcagaagtagcagctgtaacagaatagac

SEQ ID NO: 20561 - DNA, 1053 bp, Zea Mays
tgaatatcaactggatttgcatgactacgtcagcatccctttctttgacttctgcaggtggtagatctctgatgagcaacatgcttgtctatttggtgggagatctccaatgtgccaccggactggccgtggcagggctgcagggtagagattggggcacaatgagccagtgacttggggagagggagccagagaggggcagcactgagagattcagagggagtggcagcggggggcagcaagcactagaggctggttagggttcggctgggggcgcattggaggccatgtaggtgggctggggtgttgggtgcctgtgactggtgggttgctcagctggaggagctaaaggccctgtttgtttcggtttctggccatcggaatcggcttttggcagtcaaaaaagtttctttctcagtccgcttatgtgagaatcacttctgtgaaaatcgtccaaatcaacgtgaatgcagaatccgccaagttgtcgtgatgggaggaatctatcgcttcctaaactctaaaccatgcagtccccttcatcttcctccatatgtaagccccacaatatctagattctcgtgacagctagattatccagtatccagattctcagaaaagctcttcaaaaaagctgtcccaaacaggcccccgttaggaaacttctgctgagacctgagagtacaggaaccaacaaaatggtcagtaaaacagctctcccgattttatcctgtatgctggattttttttcctgtttctgtttttcccgagaatatgagatacagacagtttatgcagtacactgtgccgttcagtacgagatttttccttcctgttttcatccctacacgcacaggccgtggtcgtagttgttgctactactggtttgctgctctcctaatgctatctcccgctcacctctttacctaatttccattagcttgtgcattgatcggatggggctgtgaagatgcggagggccccatttatgtgattaagtaggtcatgtgtgcagaagatgtgtatgtgtaggaaaattcttttctactccta

SEQ ID NO: 20562 - DNA, 726 bp, Zea Mays
agaaagagttcaaaggcctgatgtctgaaatgctatcgaatcctcctctagaattgatgcagcaattggcgatggcgagtgcgatgtctgttcaacagatgaccactccacatatgcaaataattcgagcagctcaaacgtcggcttccatcgagggtacgaccatcccaagctctatcgcgtcaacgagaaataaggttcgctatccagttgatgacatcacaaggcatgtggcatgcacactagttataagatatggtattaacaatcagcgtacaaagaaagtagccacaggccttgcaatcccaagacgcaagttccatggaaacgacattccagaagaatattgcagggtagaagtgacgacagtcgtccaaggatccgaggacgacatgctagacatccctgggcccgaagatatcaagacacttggacaagctatcaagaattttatcctttggcctcgaagggatgtcgaattggttgatccaccacgacagccgtcgtcacaggcccaaccgtctccgccttctcaaattgttgttcctattgtacatccatcatcacctcctcaaacttcacatgctactcctcatcctctttctgaccctccttctcctcatcctcatggtggcccaccgtctccaccacatacatcgcccttcagggatccaccttctccacagccatcaagggatccacgaccatcaaaaaaatctaaagttt

SEQ ID NO: 20563 - DNA, 432 bp, Zea Mays
gcacgagcggcaagcttcaaggattgccccagcgaagtctggaccgtggtctagcgcagctcgaccggcggcggcgtactttcctctcccctattctctgttggcggcgcgggtgggtgaacaagctacaaagcatggccaggtcgggaagaaagaggaactgccctggccacctttatacggaggagagaaggttggtagtgcctggattgcggatatggccgagaatcacggcagctcaggcagggtccgtgcggcttcctagcgccggtagttttcccgagcgcgaggatgcaggaggctaatacgacagatgggccccacgagccagtgaaggccagagcgcgcgcgtgtgggcttgagagctggctggcgtgcagtagagagggtggggtgggccggtttgagggaataggcccaacaggagaaaaa

SEQ ID NO: 20564 - DNA, 369 bp, Zea Mays
agaagattagtgcttatgtgatgtctaagttaaaatacaaactagtgtgtgaagagcgcatcgatatatgtatatgtaccgggtacgattattctggtggatgtgtttgttaattgtgtgtggtgattctagcgcacgaaatgacttgaataaaatttgtaagtcgacttgttgttcctcatttggttgttttaactctaacaaatggtaaagtgttagagtcatcccagtctctagaacatggcaaattctgaagtatataggagctgaaaatttattaattgctgttttaggttgcacgcactgttctcgtcgtgttgtatgtttgatgaactaaattatgttttctacagaaacgccatatagaag

SEQ ID NO: 20565 - DNA, 633 bp, Zea Mays
cgggcgtgcgcggggatcgctagagagttaggaatttctcacccaagctctgtcaccaccaccgaaccgcccttcatcgacatcgggtctctgcgctctccgattcttcggtaagacctccccattgagttcgcatctgtcttacctacgcgtaccctccttgggggagtcagctttggacagctattggcggcaagtgtgggggggctggccatgtgcgccaccgggtgctggtgcgctgtcggccagaatttggggagaaggaagaagggccactggccattgatctgagggtgggcggtctggattagaaggttgcttaccccttcggttaaagagaacccggaccatagatctgcaatcctatggctacgattcgatctcggttattttggatccgagccgtagatataggatccagcggctattgttgaatactagttcagatttataaccctctaatctgggccatgtggtttagatctgacggtcacaattcaacaataccccttcgcgagcacatttttcatatgagcccttgggaaacagggaaaataacccgcggtccaatccagggttgtctgagtcttaggaattcttctttattaacccctgaccttttatgacattgag

SEQ ID NO: 20566 - DNA, 1034 bp, Zea Mays
tctcagtaggcaagacatgccttagagaagggcaaatatgataacaagagtcgctcaagtggcaaacaagatatggcgatgggctggctcccaacagccatgccctatatttttcggaggagtaatcttcgctgacgcgcaagagtagctaacatacttcatgaaagatcactttggcatcctccccaagtggaaggtggtcgcctacgccaagtcatacactaagagttcaaccatatgccacagccacccaagttcaaggcactagagttttataaagttactagtaatgacgacatgagcatcgtcgatcaccatggtgtggagccggacactggctcaaccacactatagctaggaagttaacaaaagacactaaataaaccactgcgggacatgatggagcataacaacaggctttggggtggtctaggcatggctacaatatcctaatgaagggaggaggagtcatccatggtgtcccttgaccgacgggaatgccaaatacaacaaactatgcgataacgcctgacctccatccacttcacctaacccttagagttttgtaatgaggtttttctcccaccttagcctataaaagtaagggaagtgaccagggttgaggacacaagcaatcacacgaacacaccgccagcacaaatcaaagcatataacacttgtaactaccgaacactcgcacaccaaagacttgggagcttgatctttctcttgtttgtttgtaaccccatactacaaactagtgcaaggcaacatgagcagcctaactatatgtagggacattccacccgaaccagtataaaaccatgtgtcctctttgcacaccattcgttctaaggcacgcacaacatgatatttactagctagtggtttcgaaacaacgatagttagcatgctacataggtttttttgtgtgtcataacaccttttcccccatcacacgataacatatggccatccatgtagttagttgggtcccaagcgtgagcatacattttggtatcctcgacttcatc

SEQ ID NO: 20567 - DNA, 347 bp, Zea Mays
taaaagcccattcatgccaacctgagtaataccatatgatctgcatttaacacattttcttgcatttgcatctgttgatgttctcggtgctagactgctagtaaattctaagatcatcgatgcttcatatgcatgcatgaatgggaataactactaaccttccaatgttaatcactcaatgaaagtaaactattattatttactatgtcataaataatttctacattatttgcacattaatctggatactggaaaattgacattgacacgaggaattatcccctcctgtttctcgtcttttgcatgatgtcattgtgtggttttcagatgtagaatatattgtttga

SEQ ID NO: 20568 - DNA, 326 bp, Zea Mays
cgggaccatgttatgactccatgctaagtttcactattgtttacgcacaattggtatttatttatttatttatttcgacttgaaaaggcatttgaagcatagaaattagtaaatggtccaaaatagagacaaacaaaagttagaaatatagctcaaattgtgaaatttggcatttgatctgaaattcggtaattccatatttgttttttccctaatttttcaagttttcccaccaatttcgttgtggagccaccgtacagaccctacaaacccatctggctgtacatagcgtcaatgtgatccctaaccctcaccctctttcctca

SEQ ID NO: 20569 - DNA, 419 bp, Zea Mays
ctgcataaattccaggactaaacggtaatggtcttaaccctgacttggacgacgggttagtttaggaaaagccgaggggcctttttgcaacatcgcacgaccgaaggggtatcggcaactgtgggccgttggatctatatgctacggttgcgattagatcttaataagacccgaaccggtatcggatacggaccatcagattaccatccaagggtcgggatctaacgacactagcgctcccgctcacccacacatccgtagatccacggctcctatccattagcgcgaaggggtatccacaacttaatcatagtcgtctgataagatcaaacggtgcacatcctttctctttcccccaacccagtgtgtggcggcgccatggccgacgcaccacgattcggcacgcaggcgcatcaaac

SEQ ID NO: 20570 - DNA, 635 bp, Zea Mays
cctgggccgaaaccctgcgctcggcccaccaatcatgcccgagcgcagcccacccaggcctaacgggcgcgctgacagacggggccgtgcgtcaacctcaccgtgtgagtcgttcacgaacgcaatgcaatctccgtcactgaccagtggggtcgacccataagatcccttcttctagcttcggttgttgcgatttgcacgccgtagctgccgctgcctccccctggctcgaactggccgaaccctccgaactgcgcgacgtatgacctggtgccagacccccccactctccatcaaagttgtgcctcccttctttctcgtgacgccagccccataattgccatctgcgccgagtatgatagggagagatagctgccagcgctccatgaaattggtgggatctgggcctcggcgtggttcccgggtgaggcgtatgggggccaggaaccattctaggacgattgtgcgtgctgcggaggtctcaccaccgtcgaattgctcgtcggagcagttactctgccaccgaatcgccatcgtgcgtgtccaggctctggtcgtgcaccaaccctaggtatgaaccctgctcagcttcgtactaccattgaattcgcaaaacgcctcctagattgaagagt

SEQ ID NO: 20571 - DNA, 671 bp, Zea Mays
ctgaattgtctcttctcttgtagatggttcgcactctccaaactacccgcgtcaacaccagctacgtcccttagccccggcagatcccggtctacccagtggtagtcgaggaagttccgacggatctccctcccatccgagtggagaatgtagtcatcctggaggatagctcggaggaacagctgccgacccccaccccgttggtagagtccctggccttcgcagctgggtcatcgacgtcagcaccgtctgcactagccttccaagcacctgcacccggaggagacgacctcgacaactccggagacgacgatgacgaggatgaagacgacgaagaaggtggagacgaacacgtccacgaggaagctgactacacccagcagggacaacttcatggggtttggtcctgttgtcgaacattacacatcaatgttcgagacggggcacttccccaacctgctacaagaagtgctgcacgcgctaggcacctacgtccgccccctgtacgaaacaaggcgagtgagcgagcctcctcgggcttgctattacatcactcgcatccacgtcagggtgatggatgcaggggacaggggattcaggactctgtctgctcacgagtccctgacaccactatccacctacgctgcctcggtcagcgatgctgcccgtcg

SEQ ID NO: 20572 - DNA, 595 bp, Zea Mays
gtaaggtagggggtagcgcaatgtgattgtggatcgaagtcgctcgtggggaacgacaggtccatgacggggaactcaaagctctcggctggaccgagcaaagtggtaacgctagaactatggcctggctgaggccagcattgtggggggacgtcgtcgttgaagcagctagaggaggagttggagtcagtgtcaagggtgggcaagagcagagctgctatcgcttccatggactcatccacgtcatgctcgtaatcgtaggtgaagcagtggtcatcatctgctccaagaaactgagccatcatgtcgatttccatcggtagcgcagatgaaggcatgaagcgtgggatctctctgctctagtaatgcgggagggctcaagggaaggagaggagagactacagctcaaagacaaagaaatgctgcaatgcctgagtgctcctgccgtgtgctcccccgagagggtatttgtagggtgcgggcggcccagccgtgcaggtggcccccattgctgaccaaggatggtatggtagcttcacaatcagcatcaaattgtctggcttttctagcaaacaaaaataaaaatcttcagagt

SEQ ID NO: 20573 - DNA, 307 bp, Zea Mays
gtggaaaaggtccacggaataggatccttctgctacataagctcatgcttttcaggaacttcgatgcatactgagtagtggaccaaaatgcgttcgcattgcataaacaatctcggaatcagttttgtgtattttggatacgatagctaggccgacgcctctataggcagcggcccaaaagcatggcatctcgaggcccatgtggccatgtcgtctatcgacggagagcgtggctccggcagtgaccggtgcaacggtgctccgtccctgatgccgttcttgactgggaggaggaagaaggatcgat

SEQ ID NO: 20574 - DNA, 680 bp, Zea Mays
atcctagggagctgccaggagcacataccgccagtccaaggattggacagggtgttacacgtcgttgctctgtcgtcgtctctggtcctctgccatcgcctcggccacgatgagcttcacctgagctctgtgcaccgggttcccgcggtggtttcccctttcattgccccttctgtctgatccatgtctaacccctcccctgcgcagactgtagttgccgccgccatgattcctcgttgtccagccaaccagagctccccgcatgtcgtgctaagctgtcccgagcaccgcccctgggtaaggaacctcccctgcccttcttctgcactaattttgtcttagcgtggggaattttggctcgctggagctgcctctcatcggaccatcgtgtcttcaaggcattcggccagtacagcccttccccgtgcccaatcctaggcatagagtactcgtaccccctcactgaagctcatgttggcctcggtgcatcggattgtcccccattgcgacgggtattgctcaccggagtgttctctggtcgcccaaggtccccctccatcgtctgcccgcttcggtttcgtcttcgcgacccaggcttcgccatagtgttcgcaaggccctccccaacctccctggctacccagaccaccccagcacccctagaaaccccggtatgtctc

SEQ ID NO: 20575 - DNA, 725 bp, Zea Mays
ggaatccattgctagctctcggcctccgcataaaacaagcaaagttgcgtcgtcctcgtcgactgcctgcactcacgttcaccagggggagcgaggagagggagaattagggctcgaatctcgtggcggacgagggaagggagagcgccgccacccatactcacggccagcgccgtcgcgccgtctgtgtggggagccgtgtgttctgcttgagctcgcgcttgcggtggatgcactcataggcaagaccgatggagggacgacgtctaatttctcgctgtcgacagccctgtgtcacgattctgctgtgcgctgcgggcaaacatctccgggcgccgattaccggtgagttaccctactgtggaatcccattgctatcagctatgtttaggcgttgctcgcaggggaaaagggttgctcgaactctggggtggggctcgccgttgagggcgccgtcgcgatgaggacctaccgccggtcggtatgtgcgatggaagaagaaggggcgccaactgttggatgagctatgggcgtctaagattagatctccgcgtaatgtgttagcaccgttagatttgaatccaatagatctcgtgacgtaccggtttgcgggaattggggatcggatctggtccgtgcgatcttgatccggtgtatgtggatcgatttcatctacttaaaacctggggcgtagatcttagatccatgggctaggagcgcttgcg

SEQ ID NO: 20576 - DNA, 682 bp, Zea Mays
ggggggggggcactgaatggctcagagacgtggagtaagcgtggagaccctgcatgtatcttcctgtcggtgttcgtgaggtcggtcctgaggaggtgagctggtggtgtgtcgtctcgaccgttctcgggttgggccactagtcgaggccacaaccgactcaactcgagtggcgtgacttcaagctgggacgccatgatctcggtcatactcctcctggcgccatatctcgctttcgtgccatcggtcgcacgaagcattgatggagctctgcgtgtctcgttggctattgatggcttggtgtagttcactcggggggatgagcgatggacagaaggtgattagctgctcgagtaagcagcccctggtagccttctgcgtccagagttcgtgggaggccatcagctatttgggctagcacccctccaacttcacttggcatgttcattgcgcaagcgaagtcggggtacaagtttggagcaaagagagggttctctcggcgcaaccttgcgccttgctcgacttgctcccgctcggtcctgagcctgtcggcgatcacggtggcgagaattccgtctttctcggtgtagtcgctcgtcgggagtttctcccacttctgaagcttcgtcccgggatacgggctgcgctgggtcccgttccccagcctcgtgatgtcgccgca

SEQ ID NO: 20577 - DNA, 667 bp, Zea Mays
aacttttctacagatggattagtgagtcactacataaaaatttgagaaccaagccttttaaattgctctgtcaggcacattgaatagacttcccattgtacagtaacctggagaagatcacaggtaatttagtgtatctcgccgccggtgatcccgcgccgcgatccatgctggtgttgtgattcgtgctcggtggcacacggataactatgcggggtgaaaaatcttgcgcaagagatgaagtcggggcactatgactgccaagtcgtcgtacccacttgcgtcgcaatgtggtcggacggtcatcactgtggaaatagtcgttcaccgcgattgcgccacgccatagtcgatccaccacgttgttgcaagccgcaaggactcagcggtaaccgtcgtagttcgttaaccagtgaccgccacggtagctcgcgcctgtgactcacctcctctctccgaccgccagcgtttcccttccaaattcagagccgccgctcaaagcttctataaattgatgccccagttttcttcgctcagttgttacaaacctagagcactagccctcgcctcggctcatccatcatagcgccccaattttgtatttcccccaaatcgatttttcatgccgccgttagcatctcgccgtggccagccgcccacaggttga

SEQ ID NO: 20578 - DNA, 555 bp, Zea Mays
tgggcgcagtgttggatcccccggctggtgcgagggtcgaacgccgtcaacgaaaagtggtggcgaagcatagtgttggtgagaggtcgcgaagtggcaggcgccgtcagatagggttggagcgaactcgtcttcgtgtagatcggagtaatcaacgcgacttgttgtcttcgtcgtttgggacgagtattggtgagggggacctatggaatttgtttgagggtgaggaattgaaaatgatgttgtttaattatcgggaggcgggcattattccgaaggttgagccgatgtagaatgtgtggtgccctcgcttgtcgtgcggtagtagagggcgcaattgtatgtctttgtgcggtgggtctggtgacccttcgctgtgtgtatgtaatctgtgacttgtattgtaatgtggcatgttgccattcgcttggcagtgtgatgttgtaagtgtccggcggcgccgttgggcgatttttgcacggggttgtcttgtgggaaagacttcgtgtcgcacacttgttgtgcttgtccggctgcacccgtaggcgacttttg

SEQ ID NO: 20579 - DNA, 420 bp, Zea Mays
tagtacttcagcgactgcgagatcatcacctgtatgccaaattctccaaatgtgatttctagctatgggagatcaaattcttgggtcatacaatttgttaggacgggatagcagttgatcctgagaaagtgcaagaggtgatggattggaagccccctaccaccattcgatagattcggagttttctgggactggtaagatactatcgacgattcattcctgacttctccagaattgctaagccaatgactgagttgttgaaaaagggagtgaagtttgattggggtcagaaatgtgaagatgcctttcacaccttgaggcggcatctgacaacagcacccgtgctagcgcagcctgacaacaccaaatcatttgatgtgtattgtgatgcttcgggcactagactaggttgtgttttga

SEQ ID NO: 20580 - DNA, 376 bp, Zea Mays
gtggacacggattacagatgagatgtgggcggtagagagtgaattctcatgtcaatctagtggaggcgtggttgttgtgagaggactaatgaggtatgaggtggccatgaactaagatgtgttgagctgagagatgagatgtgttcgtaggggtaccccctcagccttatatagatgaccatagggttatcccattacaagtcgtgatcggtctttaaataaatcatccttttaaagcagcacgccttctagcttatccgaaattcagttgcccttcatcggagtcatctttgagtatctagaacttctggtacgctcaacctccccgcccgaggtagtgacgcatgactcgatcatctggtcttgatctccccag

SEQ ID NO: 20581 - DNA, 434 bp, Zea Mays
caaagggctttggaggtgacaagtccaactaggggcctaaaaagcgacaaaggttggtaatccgacctttcaatcaaaaccgttcttcacctcgtccaccctcctaccccttcaaacagtctgtattcatccgccctgccactgcccccacctcaacaactcagccgagtgcccctggtgctagtttccccgcactcccgagttcatcaactggctgcttcaattgtgggaagtcaggacatttcatcaaagactgcccatatccaaggcggaacaactccaataatcagcagaaccctgggagttcaagccaaggcaagggaaacacagcaaataatgcagcgagcaagaatatgaagaaaactgggcgaatctactatacacaagtggccactacaccggagggagagctagttatgatgggtacgtttctc

SEQ ID NO: 20582 - DNA, 446 bp, Zea Mays
ctttcttctggttaattattagaagaccattctgctttcatgaaacgcagggcctgaatgtttacagtatcctccagaatgacacccttgtcagcagaaacgtctaagcgtaactgataactccaccaactgctggcaaggagggttctgtgtcagaccactgtttcctacaaccggcaactgtggttccgtccactcatcgatcgatgaagctcgaagattcccagctgtctctgtgctagagctgcaacatcaactgtctatattctgtcagaagactgaaggtaccgaggtaggactgtaggagggaaatgttggagcccttcttctgtggcttcttgcccggacaatgacaccctagttttgcaattcagcaataagaacaagaccgtagctcgtgattgtcactgaatttgctatactagattcatttgcttgcctttccg

SEQ ID NO: 20583 - DNA, 317 bp, Zea Mays
cttgcctcgaggcatcacagaagacgacaaaatcttgatgaatatctggcagtgatagaacgagtgccgttgtgagtttctcttttatgatttggaaacttttttcacattttggggtccacacaaatttatggtctttcttgagaagttatgtcattggccttgcgatgttggagagtcctttgatgaagtggcggtaataccctgccattcctaggaagcttcgaacttcactgacgttggttggttgcctccattttgacactgcttctactttggaagggtccacttctatcccttctgcggttaagatatgc

SEQ ID NO: 20584 - DNA, 437 bp, Zea Mays
gtcttaccaaagtcacgaagttggagtagtggcgcgtgagtaagcttctcttttaaaagagcaaaaggatcctcttgtgactgcccccaattaaatgaaacacccttcttggtcaactcatgtaatggggctgcgatggtgctgaaatccttcacgaaacgacgataaaatcctgcaagtccaagaaaactccgcacttgtgtcaccgtcgatggcgttggccaactctgaatagcatgcaccttagcctcatcaacctcaataccctatggagtgacaacatagccaagaaacgatactcgttcggtgcaaaaggtgcatttctcaaggttagcaaataagcgcgcggcgagcagagcatcaaaaacagcacgtagacggtcaatatgttcagataaacaagtgttgtagatcaagatatcatcaaaataaaccac

SEQ ID NO: 20585 - DNA, 386 bp, Zea Mays
ggatgaactagtaggatgtagccaactcaggtgagcccgatccaagctaatgaagaccgacgtccgagttaagcgtcgttgaagcccggatgtgtcggatgatgtagttgcaaacacctgaaaggcttggcattcgacgataactcgggcggctaggcgatgaagactccggatatgtagggacacaatctgcgacaaagaaggagataagcaagtagatagtaatcgcaacttgtaacgggataactctctctggtcgcgtatatgaggccgagggggaccccctaccattccatctcatcacccaccactccagctcatcctcacccacaaccctgagcttgtaatcctcgtacttcggagatcaatatcaaacccaacaggaa

SEQ ID NO: 20586 - DNA, 609 bp, Zea Mays
tctagttccgcaccactcaaaggcctgcattctgaccaaaaaccactaatctagtccacctattataggacccatgaactagtcctaacagttttacgagcataaacgtacctaccgactgatagagcaccagtggcttctctccaaggcagaaatctcttggccggcatatgaatgtcaacaaccaaagccaggtaaacacatcagaagagttagagcgagcatgagtcggacattgcagagttgcggggcaacacgaattgtttaaagaacatcaatattcctttggcattaaagtctccaccttcttcattgcctcattcatcctgacaccacctaaccaactaagccaccgggatcgtgtgtgtggccgattggagcaccgtcacggttgcgctgccgttgttgatgcaggagatgaaccaatcaagcattaagcaacattaaaaaataaaacgaacaaggcagataggaagacaagattcaaggtaggagagtgtactgatttgatctggcggatctcattgaagaagccggcgtcgtagagtggaggacgccggcgagtcggtgcttctcaacatgatatgtgactccgttggccacctcgcc

SEQ ID NO: 20587 - DNA, 346 bp, Zea Mays
gcgatatatataaatatacgatgccacacaacacaatcaaacaaaatataaagtgaaaacaaaattgtttacgaaggttgcacataatgtgacttcacgaccttgaacaacccaccacaatccacgcgagtacaagctctagcgtatctggcgtcaacgcgtgtgcggccatcagggctacgatagtatagcaagccttcgtaataagcgcaacaggcacaattatggctcggtaattggggaacacgataaatccacgcaacgtgcacaacaggcgcaatttttggctcgcgttagacagacagtgcctacagggcatgcaaaaaatacgcgacacagcgatgac

SEQ ID NO: 20588 - DNA, 756 bp, Zea Mays
gggtgcaccaccttgtatcagcagagaagaaacccctggccttagagagaaggcgcaggagctcctcctcacctcctatctgctgtaatcctcttcttgtcatccaattcaatctctagccataacacattggtacccagagccagcaattctgcacctgaggatctcctagctcacccctccctctatctgttccattcctcgatcatcaccactccttgcaccatcacagaagtccatctccagcacttgtgccaccaacatggcctttgatagcatccacaaagccatcacgctcaaggacctcgccattcagatccaaaacctcaccatcaccctcaacgatgtgcccggcaaggtgaccaacaattcatcgtggttgacggctctaggtgataacgtcaccaacctgtccatcgatgtctccttcgtcaaggacgataaaggccacatctatgtcgcctcaacaacgtcaagacaactcgaggccgctgacaggtgtcctatggctgattagggggccaaacccattggccctatttgtttcggcttctggcagccaaacgcttctcttatcagcccacttatgtgagaattgtttctgtgaaaatcgaccaaatcaacatgaatgcataatccccccgagtcgtcgcgacgggaggaatccgccgtttcctaaactttaaaccgtgcagaccactttatcttcctccgcacgtaagcccagcaatatccagattctcgtgacaactagat

SEQ ID NO: 20589 - DNA, 703 bp, Zea Mays
tgaggcagcctgatcagctgcgcgaagatgtagcagaggtagtgcgcatatggcagctatcgacgagcacgaagaccatccaacactgtgtcctcaatctcacagataacaaaatcaacctcatcaaactctgattgtgagatcacggcaccaagtagccaaagctgaatgtgtgtgttggcctctctgtaacccatcctgggcagcaatgtccatctcatcacctgatataagtactttgttgtagaggtgaaatcagctggtgagcgtcgcgacccatctatgaaaggtgggttgaacagggccgcgacatgagcagtggctggagcgactccactgtgagggcgtcggggaggatctgatgtaccatagcacagactgtgaaggcgagtcaacgactcgggaaatccatacagctgatgtatctggctggcatgtatagtaacatcctctcgctcgaaacggaacctcatccactgatggtccaggtctatccacactatagcataaaagactttgacccactcctcaacgtatctaccactcgtagtcagtagagaaagaagtcccgacagataggagagatgcacttcggaatccgcaccagctgctagcagaaaggcaggtagatccaatagccggtgtgctcgtagggcaatctgtgctgacaactgagcttagaagaatgattcctgaatcccgg

SEQ ID NO: 20590 - DNA, 482 bp, Zea Mays
gtctgattgcttggcctaaagtcactagacctaaagagctggatgttctcggcatctctaatttacaatctttgaattgggctctccgtgttagatggctttggcttcaaaagactagtccggaaaaggcttgggcttcttttcaactccagtttttggatcaagtcaagtctctcttcgatcttgccttagtctctgaagttggagatggctgcaacaccttgttttggtgtgacagatggctgttagggcagcgcctggctgatgtggcccccacctatatgctatggttcctaagagagtagctaacaagagaacgatcgttgagggcttaactgatatggcttgggttcacgatcttcgtggtacggtcactactgtggtcatcgcggagttcattaacttagcggaagctgtttcagaggtattgttgttgcccgatacccctgataagcatatctggagattctcaagctcgggcc

SEQ ID NO: 20591 - DNA, 526 bp, Zea Mays
accggacgtccagttcgctgacaggttccctgctgcgggccgggatttgcaaaaccagccaggatttgccgccgtcccccttcttccatatgcgcaggccagcgatctgtgactctccggttggcgaggaaaagatggatcaatcaatcacacaggctggtccaatccctctgggctctgcttcttcttgccttgttgccctgttggggcttccagcccactagcgatcggggaaagtgaggagtgagtatgcccgccgtcgctgtcagtcgtcgtctccaagcattcaacacactcctgctgctttgtttgaactttgactagtcaactttgtgctgctagactattcagctaatcagctgtagtgtgatgctctgtgtctgtggacatatactagtgatgattatttgatgccattggaagaagaaatgaccaaccactgcgacctccctgatccccacagcctgctcctgctcgcaaacggctcgtgaaaacccaaacaccaccgctgcttgcctgagtcaga

SEQ ID NO: 20592 - DNA, 564 bp, Zea Mays
cagtcggggcgcctgaaccggagggtgagtcggcacggcctgtgccttggccaggcatgccctagccatggatctcgcgggagtcatttcaggcccagtggatggacccttccgagttggagcagctgctaactatctcttgattttaccctctatgtcgacgatgcggtggggctctgctctagtcagcgatgcacgagattgatccaaaatggaacatctcacccagagcgaagttgacgatggtggtgaaggtgacagccatggagctatccatagtcgatgttgcaccccctacctggtgcgccagctgatagtgtctagcactgacaacacactatggggtataccgtagagtacttttggtggtcggcgatgttgattgtagctcgatggttcatgcaaagcacgacatgacacaaagatgtatacaggttcaggccgctaaggagcataataccatacgtcttgtgtgttgctggagtttgaggttacagaggagatgagttcagtgttctagatgtgtctaatagaagatccaatcgccttttaggggtccctatc

SEQ ID NO: 20593 - DNA, 492 bp, Zea Mays
cgattgattgagagcgagtgagaggggaagccaaagatgcatgcatgggaatgggatgggaggaggggcctggaagagtggtgtcaacagtttccattcgagggcaggctacaccgctcgctgaacgaaaagcccaagtacatacaggaaagcacagtgcggagggggaatttcttttgggggccggcaggtttcttttccaacagtgaaagcctactacgcttatcctcaaaagctgcgtgctttcagcaatcctatttctaccctgtctgcctgcctgcttttgcttctgctggcatctgtgtaaagaagcgatcctaaagccaggacgctactgcttctactactacgtactactatactactcagcgaaaagaaacctaatcgtcccagaacgccaatccacgcaatcttatcttatcttaactattaagagaggactgtagactgcccccgcttcctaatcccgtccgcccgctcgtctgccacgat

SEQ ID NO: 20594 - DNA, 609 bp, Zea Mays
gtgaaaatcggagacaaaccgaggtgttcttggtgattcagtgaggtctagctcaatcaaacgggtctatgagcaacaggagacataagagaggctagaacatcaagcagagaagcttgaactaacctgaggagggctggccacagtgagagactctcgacggcgcggaaaacccgatttgggggaaatgcgaaattgggaggctatggtggacaatcaaaggcgagggctggtgcattggatgcgtaattacctagcggaacttactggggcatcaatttatagaatcccttgatggtggtgtctaacttggagaagacgcgccggcagccggagagaggggaaatcaccgggaagcgctaacgtggcttttactgaggcaaggctcccggcgaaggacagactccctattgcggttcactgcgatgtggtaatgctcctaggcacgtggcgcatgggtggcaagcggccaacgctggcgaggatcatcttggccgggcgcagaacaagtgggtacggtgaaatctagtgaccgggtctgagcctatccggcgcgccaagatcttttactcccctcggttatccactttgcgccaagcacaaatcacg

SEQ ID NO: 20595 - DNA, 783 bp, Zea Mays
cttacctcattataatgttcctcaagttccaagaatcatcgatgaaatgggctgtgacagccatgtaacctcttttttagttgtcagaagtccacatgtctctagtgatagcaactcgtgacttacatgcacacatgtactgcaacactcttttcttttcttctgtatatgcatccataatgtcctttctaccacatcacaaaattagaaaatagcacaacacttcaaatcacaaatcttgatacaaagaatagtgtattccttacctaatagtattctcgctaaccatcttgaataatggctgacatgcactcacaaatcgacgaaagccaatatgctcaacgatgcataaaggatattcatgcaatgctatcatagcagcaagctcctttctagcaacttcaggatcaaaagtgtagctctccacggatactttccccccttcttgtgaactaaacctcaaagatgattgtgacataatcttgttctggctagtgagctttatcttgcgcaaaacacaaatcttcaaatgatcatgaagatgctttgttccatgagtacttttcccattaagcttcttatgacaataagaacattgtgccttgatttcactagaacttaacttcaccctcttgaattcattccaaacaacagatgtaagcttcctctttggttctgcaatcacttcttcaatttcatcaacatcatcatcaatctgtattggctctgaatcattcacagattggggttgcatgctgctctcagtttcattcccactctcag

SEQ ID NO: 20596 - DNA, 693 bp, Zea Mays
caagtatcaatgagatatggttaaagaatttccgtaaagatgacaaatagttatttggctggcttgctgacagcaggtcggtaggaggaaacaaactgcttgactagttgactgaatatttcagcaacccacagaaatagttgtccgacgcggtgcatggctgccaacagctgaagagtggaaggcgtcgacgacgatctttgtgttgaaacgtcacggcagcggtccctgatgcagtatgcagtggggatcggcagcagaagcgaacgcgggctaaccgatccaacagatcctgggcctttgctgtcatggccataactcgccagaatcatgccagtaaagcccaaataccgggcgcgacgagatagatgatcctgtactgtactgacgaccaaggcaaggcagtaaggcacggaagcaaccggggcgaaaaccttctgctgccacatcgtgtcgtgtgtagccactgttcagtcaagcaattcgttgtagaacccgaaaggacccgtgcagctcctgaacgttaggggggggaagggtggtgtcggtggctcattgggatgggagggaactgctgggcctgaacctgatcgcgcctggtgagaacccgaaagccatgatgacactctaattaatatctaaattcgagagtggcccgcatgagtagagaaagcagtcttgattgaattcgtc

SEQ ID NO: 20597 - DNA, 452 bp, Zea Mays
gcactccgaagggagtcgcatttggacttggagctggctctaattcctcaggaccctcctctccctcgtttcctgcatcatttacctccatgtcctggtggtgcatctccaggtggtcattggcttcctcaatttcctcctgcacatcatggagctggatctccaggatatcgatggtgttatcctagatttccacctgctgctctaaaattgcgatgcgctggctcaattgttccacctgtaggtctttccaccaattccgaagacaagtccaccatgaagtcctctcgactgtcgagagtgatcttagtagtctgagcaagatcagtgaggtgtgctatggtgtcgctctgcagggcctgtaggtgatacaatgtgctcatacactgaacagtgatcctcccaccttggtcgggatgcatagcccacacgtccttcacgtggctcactct

SEQ ID NO: 20598 - DNA, 848 bp, Zea Mays
ggctctcttctgtaagattttctggtacagcttccaaaggacccgcatcagcatgggcaaaggtactagtagtaatcatctttgaaacatcttcagttttactcctagaagctttggcagaagaaggaggtggcattttcacagattctagaatagcttccaaaacgctagccatcctccttttccttggagtttctgcgatagccgacagcttcggcaatatcattactttcatgttcggctgctatggtactttttctggttctggctctttggtcgggtctgcaataattccagtaggcacaacaacaatagtctctatggctagggggtgtttccaccctttcacttaacttcggcacatcggtcgtctcgatgcgcctaggtctacatgtcaaaactttgattttcttcgacctcaacacacaagtagatgccgaggtagcggctttcctcttcctcccttgcttccgggtgggatagtagtagtctgggtatacgaacccgataacatcaaacaccatgtttaaccgcttcttgtcgtgagcgccgaaggaagttttcatagcttcgtctccaagtatctcatcacttgttgcttctatggcttccaaccaatcatcatttggctcgtcaaactggttcctgaaccaaaaagtgtacttcagataaaccaggccactctggctggagctagcggcgacctccttcagcatttcccactcgcttgcaagaggccatactttgtacgcaatatgctcttgaattaagtctcttgtgctaatataggtgcacactgtgttgaaagccgcttggcatgcttgcacatcatttccaagtgtagtggc

SEQ ID NO: 20599 - DNA, 1059 bp, Zea Mays
taagatctttataacaaacttgtagctggttctttggagaacaatattgatgtagacaagtgaccgagttgttacatgaaaaatagagaatgaagctctccaaatcgcgctgtcagagtgtgtgatgaagatcgccatggtacagtgaccataaagatctccggtgttgtgagctcgacgccggtgatctgccgccataattcgcgcccgcctaggagattcgtgccacgggaagagtagataacgtcgggacggggtgaaaatatctagcttggggtgaatccagtcgctggccggaccggtcgtcatgtcccgccgcggtcaatcgcgctggcatcaccggagttcgccgttatctggccaggctacatgcctcaaagccttaccacatcacagtagaccgccttaggtagcttgttcatcgcctgagataatgccccggtaaaagccacgatagcgcttgcgccagtgacttcccctctctccggccgccagcacacttccttcaaattggacgccaccgccgtaggactctataaattgttgcccccgtgagttctgctaggtaattgcacatccaacgcagcagccctagcctcggatcatccactagagactctcaatttcgtgttttccccaaatacgtttttcgtgccaccgtgaacacttagccgtggccagccctctgcaggttagttcaagcttctttgattggtgttctagcctccctcaagccccctgttgctcgtagacccattcgattaagctagaccgcaccaaatcgtgaacacctcggattgtctcggattttcgccgtcgtcgtgggcagagatattttggccgggattcatgcaattagtcgagggattagggtcgccaggggtagaatttagtgtcgaccgagtaaggagcttagcctttgcgtattccggccggtacaggctcaccggagagtgttcaccgccgttggtggtcggggacctgaccttgcgaagaaacaaaaagggaggggcctcggtgcgaatgtcagagacaaatgtgaatagtgcgcaaggattc

SEQ ID NO: 20600 - DNA, 1331 bp, Zea Mays
gaaaataacaagcctaggaaaattggtttcataattttatcatttttctactattttctaaaattgttttggctctggaaataaaagaaaaggaaaccagtgaatagtactgggccgaatccagcctaggacggcccacgaccagaagaaatgcgtgcgcccgcgcccgttgtggagtttttgcaacagggcccttggggttttaactaattggagatgggtttgattactactctactgtgtcgctgacaacttgcagataagccctccatgttctatttcttcgcagtgggaggtccacgacaacggccgcgtggaggatgaactccggtgaggttgtgccggcggatttaagcaacagccagggctcccgagcggtgtacaccggattaaacccttcccgaacgattcccctaacttaatttcacgattggtaagctatcacgccctgtccacgtgaaccgcgaatgatgaggacaatggtacgcgttcccggtgatccctggcggtccggttcaattaaagggttcgaggggtttgcggggtacctaaggaggctagaacaagtggcagagggacttgagctcacctgaattgagctggccacggtgaggtcttcttcgcggtggcggaaaccgaattaggggaagtgagcgattctctagctatgggggctaatcggagacgggagtggtggttatggctttggtatgacctagcgcagctggccgggggctcaatttataggcggagcgagcggtggcgcttgaattgatgatggcacggtggcggccggagaggaggaagaaccttggcgcgcgtggttacgtgtcctatggtgtggcagtaactccggtgatcgatagacagttagagggggtcacggtgatgcggtggcgcggttaagacacacggcgcacggtcggacggcggcggttcaccggcgagcctatcgctccagccgcaaagcagaggggaaggcaggggaggccgtaggagtggtgtccagctcaccggcggtgaggatctttaccgagctatgtttatccgatggccacaacgcacgaatcatggcgagcggtgatcaacggtgatggaccaccggcgacgagcagagggataggatcttcttcagttaccctttactgtaccatgggacattcagtttatgatgcctgacagtcatagtttaggctcaattttctcacaaattttcatggcaacatacccaatgatctgtagcaaagttgtagatctacaatccatctataactttactacaatgtgctcccacaaaaagtcactggatcttgcttaaaatcaagccctaa

SEQ ID NO: 20601 - DNA, 362 bp, Zea Mays
cccatgaggttatacttgtgactcgttttaatcgtgtttgtagctgtactccccttgaggttgtgctgtggggtgagcaggcaacctccttcccggctgatcagattagtattgccggccaggactcagtccagattattatctttgttggtactattgctagatcctatgctggtatgtttgtctaaccttgctatttacacttctattaagactctatgtttacccaaggttccaaacctttcaggtaccacttcgctgacaggtggatcgtcttgcaaatggtacgtgaatccgcaggttccagaggcaacaagccttgcagccaggtaccataaacacgtcacccgcttcccttgagc

SEQ ID NO: 20602 - DNA, 452 bp, Zea Mays
gtgcgagcttcggactcctcccaaaggtcgcgttgttgctgagcgtgacagtgcccttctggctgctgactgtgaaccaagacaggtgctagcggtggtggtggaaacatgccccaggaagtttgagaatggcttgccgaagcaacagaggccgtaggctgttggttgcctacatactccgggacataaggagagtagcacgaagtagtgtggaggacctgcttcggctgactctgccgcgcttcagcttcagcaatttccttcttcttctgaattgtgacctggcatgtccttgttgtgtggcccttgtcctcgccacaaaaaggcagtacaactttcagggttgattgccaaaccttcctccactaaaacttcttcctcctctacttctcggagttggtggtctgaaagaagtctgttgcatgctcgaagactgagaactatgatggcta

SEQ ID NO: 20603 - DNA, 438 bp, Zea Mays
gaaactgaggggctcttaagcaaaatgtccaggccgaaggggtatgggtgattctgagccgcccgatcaagtgtcgtccacacatctaggatcctacggtctggatcgcatcgctatttcccccaatcctggtcgttcattctaaaatccacggcaatagaatcttcttccacccagcccaccagacggcggcgctaggtacactgcggtggcgctgccacggcaagcacccgcccaggtgagcccgtgcacaaaaatgagcgcaaagagttgcagagcgatgcagacttatagagagaagggatccagggcttcctaccgggtcttgatgtagcggtggttgtggccacggagaagcgcgtcccagccgcagaggaagaagtccggcgaacgattcccagcaaccccggcactctccgcacacgtacgtgccacgag

SEQ ID NO: 20604 - DNA, 597 bp, Zea Mays
gggcatcggcacttgcccctgccggctgctggcgctgcatccacgaatggccgaggggacagtcggacacacacagcatggacacgatagcatggtcagtagacagtagtagctagacagggaagctcggttcagaaaatagtaggagtgcacgcagattatctgctgcgtgccactgccacgccacggcaccctgaggtcacagaccatgcatgggtagctaggaggcgtaggctgcttgaccaccgctagctagctggctgcttcgacaaagcataaaacatcactagtacacgtacgctcggccggtgtctgcctgccgcgaacgacacaccactcttggttagcatggtctcgcaatgatgcctttccgttccaccaccacatgttttgccggcacggcggtaatcaccggcgcaaacggcaatcattcggcgacagctagcccgcccgcgctgtctttaatctgctcggttatttttagagtactactagatgaagcggaaaaaggcagctgatagatacaaccgatctatggctgggatgcaaacggctacgtatactacactacactgccggagggacagacagggagtc

SEQ ID NO: 20605 - DNA, 460 bp, Zea Mays
tgttcatgtgcaagagacatcagctttatgtctcaaatctaacattgataagttgtttgttaagtatggattaagcataaaacaagtcagaggacagggctatgatggggctagcaatatgagaggtgagttcaatggattaagggctttaatcttaagagagaacagctcagcatattatatacattgctttgctcatcagttacagttagtcattgttgttgtagctaaaaagaatgatgactgtagtgatttctttgacatgatatccctattgcttactgtggctggatcttcttgcaagcgtaaagatatgatccgagaaaatcaacaagagagagttagcaaatccataggaagtggaaaactaagcagtggaactggattaaatcaagagcaatccctccaaagagctggagatacacgttggggttcacattataaaactctcaagagccta

SEQ ID NO: 20606 - DNA, 323 bp, Zea Mays
cctttgattccaaacctctgcactcccttggtgggtgatactttcaaatacacgaaatctcccacctcgaactggagaggtttccttctcttatcatggtaactcttctgcctggcctgagcagcttctagatttttccagattagtttgacattcctttcggcttcagtcactaagtcaggtccaaaaacttctctttctccaggctgagaccaattgagtggtgttctacaccttcttccataaagagcttcaaaaggtgccatcctgaggctggattgataactgttgttataagcaaactctgctaaggagaggtgctt

SEQ ID NO: 20607 - DNA, 549 bp, Zea Mays
gtggccaaggctggggcgaggagatgaggggctcagggtggcccttttataggcgcccggggaaggggaggagcgggggctgacggacaccagcaaggtgtacaacgacgacgataatggcacacagcgccgaggacgagacgacttaaggcaggatgtcgtgcgggggttcgagcatagtgggcaaggatgaagcattgtctaactccactagcgcggaagtgatggcggaacggggaaggacggtggccagcgggcgtcatgtcgatgttgtgtgtgggtgagggagctgacatacggggcccacttggcagagggagagcggcgcaagagaggaagcgacgcgagagaggaagcggctgacgagcggggccaagcggtcagcgagagagagagaggggaagcgcggcgtgggagcgcgcgtacgctggtgggctgggtgggccgagagggggagcaccacgggtgagagagcgggatggggagcatgggtcggaatcggcccagccgagacggggagaggtttttttcttttttcctctattttct

SEQ ID NO: 20608 - DNA, 737 bp, Zea Mays
tgagatcagcaggtagcacagcctctgaaccatagaccatgaagaaaggggtatttccatgcagagctcgactgggttgggttcttaagctccaaacgatgtagggcaactcccttatccatttccctacaaatttttcctgagggcctccaatatcatcccgttagctctttcaacctgcccgttggctcttgggtgtgccaccgaagcgtatttgatctgaatgcttttttgctcacagaagtcaaagaactctgaacttgtgaagttggaccccaggtcagttatgatactatttggtattccaaatctgaatattatgtcttgtatgaactccattgccttggctgaagttaaggaagcaatgggtttgaattctatccacttagtcaacttgtcgatggccaccagcacatgagtgtatcctccttgggctttctcgaagggtccaatcatgtctagtccccagcgcgtgaacgaccaagttatgggtatcgtttgcagttgctgtgctggcagatgctgctgctttgacaggtactggcaggcctcgcacctctggactaactcggccgcatcactctttgccgttggccaatagaaacctgacatgaagaccttcccaaccagggttctggatgtcgcgtgcactccacactgaccagcatggacctcgtccagaagttgctttccagtagttgagagaatgcatttcatgaggactcctgacgcacccc

SEQ ID NO: 20609 - DNA, 320 bp, Zea Mays
ggcggcgacggctgctgcgccggagagtggaggagaggcttcacgcctccgaggtagcggcgatgcgcaagatggaggagggagggggcgcgcgcccgtgcgtttgtttgttccacttccactccacgaccacgatggtttggtttccttccactcgggcggagacgaggtagggggagaagggaagggaacacagctgcgtcgaaggagacgctttcttttcttctttcctcccgtctccttttgcttcctccgctccgccgcgtttacttcctcgctactgcgccgtttcgcccgggtcttttggggttttccctttc

SEQ ID NO: 20610 - DNA, 307 bp, Zea Mays
ccgctgatgggtgggcccgccatgtcggattcatcatgtccgtggagatccttgcgagcaccatagaacccgccaacaacccctcatcgatctccgaccattgcaggcggatcttgtgccgaagccgtgggttttcggttgctatcgatcggaatttgcctgcccttttctccgtgctacataatcccagagcttcccccaacagcctctcccatggctgggcgggcgtcgttcatccacggtgggggctccctgccagggctgcacgaccagctctccctgttccccagggcgagctccctccaac

SEQ ID NO: 20611 - DNA, 390 bp, Zea Mays
ctaccctagggtttattacacaccaagtcctatcatcacaacttgtttgaaaattttacctagtgaatgcactctaggtgtgacaagcaacatgaaatgtcaatgcacatgatgtcatgctcaagttttagtgctagtaacaccatgggtgttacatccttccccccataaaagaatctcgtcccgagatttaaggtcctagggttagtaatggaaatggaaacgcgtcacatctttatttccttacttgtcttacagagcagggggtggtatggggtttattccaactttacaaacaaatgtatatatcttacaggttacatgaagctaaaaacctaggaaaattcttttctaagaaatcttgagtctcccacgtagcttcatcttcag

SEQ ID NO: 20612 - DNA, 647 bp, Zea Mays
cgaagatcaattctaatgggctttggaccaacttctcctttttctcatcaactttgacataaaaccattcagtcttccagccatctggccatttggtacgatagctgataaccggagacttcgcatctttgcgatagtcaaaattgtagcagccgacgttctcatgcatcccatcttctctagcttttgtctgataatgaagctcatgtgcccgttagaagcctttggcaagcggttctgcccctggcttcggagagcctagatgtagacgctaagcctaacgatggcgttagaagttagctgatgaagataaatcccaaacttctccaaaacatccgcaatcatctcattcaaaggaaatcttaatcctgctttaaagaagcttttaaagactaccacctcatccttttctggcttcggagtaatttcctctccgccaaagcgaatcatcttctttttggcttcactgaaatagcctaacttcatcaacttaggcatatcatcttcggtaacagtggacctcccaaactctaggtggctgggtttagatggcagggcactataatcatcttcagattcaccttcctcagcaccaacctgctcagcttcagtggcaggtgcaccttcgtcagaaacatcctccggca

SEQ ID NO: 20613 - DNA, 410 bp, Zea Mays
gcgatactgaaaataaaacttgtctatttagagtgcattattttgtctgaagattttggtacaagtaagtagcagataaaatgcaaactttccattgagcaagacagtggtgcggtgttgattcctatatgcatatagacttggaattgaaaagaactgtgcattaaccatctcactacaacacgtgtcaccttctgtgacatttcatttatgtcgtaatgccttgaatttacgtcacattttgaagtttatgacatctccatgacaaaaattactttgtcacctatcatgcgtggcattacatgttctatgacgtttcgtagtttttcatcataaaatttgtgacacattattcgacgtcatagtttgtgacacacttctttcgtcattaacaatctccaaaaaaacgc

SEQ ID NO: 20614 - DNA, 388 bp, Zea Mays
ctttttcccgcgagcgccgaaggcagctgtcatagcttcgtcttctgccctcgagtacgctccaagtagttcatcactcgttgcctctatagcgtctagccaatcatcatttggctcatcaaattggcttatgtaccgaaaggtatatttgagataaacgaagccactttggatggagccagcgatggcttccttcggcatttcaattcgtttgcaagaagccatactttataagtaatgtgctattgaacaaaatatctcatgccaatgtaagtgcatatgatgttgaaagcaatttggcacgcctgcacttcattcccaagtgcgatggatggccttctaatgccgaaacatgaccatataggacgttggataacgcctctcacat

SEQ ID NO: 20615 - DNA, 425 bp, Zea Mays
cggagaacagcgagatcagcctgctgaaagcgctggcccatcagcctgtcagcgtcggcatagctgcagggagcagggacttccagttctacagaggggtaagtatcaactgacttgcctgtagtatggttggtttcagatggtgtcatcactagctgtcacagaagggaagtaacatgtgcgtgtatacctcgtctggctggctgcactgctgcagggggtgtttgacggggcctgcagcgtcgagctcgaccatgcgctgacggccgtcgggtacggctcatcgtacggccagaactacatcaccatgaagaactcgtggggcaagaactggggggagcaaggctacgtcaggataaagatgggcaccgggaagccggagggtgtctgcggaatctataccatggcctcctatcccgtgaaaa

SEQ ID NO: 20616 - DNA, 1042 bp, Zea Mays
aaaacatgctgcaagctgctcaagagtttacaccgaaatggaaatgaagaggtcatacaaccattgctatgtgatttcattaaaatccatggcctgcttgatctgacaatgataaatatgctgtcctgttatctcagcgaaaaagatattagcaaaactatttggttttctaattacatggacaaaggtagtgttcctgtcagtgttctgagaggagctgtctttgctctaaagaagcaaggtgaagttctggacgcatgtaactttttgaaggtagctgaacaaagtgggttttcagtagatctaactatgtattccatagtggtggatggcctttgtaagggtgggtatcttgaaaaagcgctagacctttgtgaaggcatgaaaaaagagggatttcaacctaacattgtcattcataactcagttctcagtggtttgtgtcatcaaggatgccttactgaagctttcaggctctttgactacttagaaaacagcaagatgcttccaacaataatcacctatactattcttataggtgctttgtgtagagaaggtttattagatgatgcagatcagttattccaaaaaatgtccaccaaaggtatcaaacccactacccgtgtttacaacttgctgataagtggtcattgtaactttggattaactggaaaggcccttgagcttatgtctcatatggaggaactctttatacttccagattgttttacacttggtgcaattatcaatggactttgtctgaaaggtgagactgaagctgcattaagattctttaatgaataccgccataggaatatagatcctgattttgttggtttcatgagccttatcaaaggactctatgcaaaaggaaggatggaagaatccaggggcatcttgagggagatgtttcagtgcaaagaagtcacggagttaataaacagtgttggagataagattcaggcagagtcccttgttgatctcctatcttctgcatgtgatcaggggaggattgatgagattgtaacaatcctaaatgaag

SEQ ID NO: 20617 - DNA, 461 bp, Zea Mays
ttactcgaaaatttgagagctattatttgttgcccaatgaggatgagacttatcgtacttgtcggagaagaacaacatcccgaagctcatgttcttatgtgccatcgctcgtccaagatttgagaatggaatttgcacgttcgatgggaagattggatgcttctctttagttacttttgaacgtgcaaaaaggagtagtattaattgtccagctggaacaatggaagtgaaacccatcacttcgataaagagagatgtcgttagagagttcatgatacaaaaggtacttccatctattaaagctaagtggccacgtgaagatgtcaacaaaccaatttatattcaacaagacaatgcgccatctcatatttgaagttaacaatccaatattttgtgaagctgcacaacaagatggtcttgacattcgtctcacttgtcaaccggcgaattccctagatttt

SEQ ID NO: 20618 - DNA, 726 bp, Zea Mays
tgccgatgtacagttcaacgagtcctatttgtcgagtgtcacactcggtaaaaaaaactctcatccggtagcgagggacagtggttgttcggggaaacagacgggcggggtagaggcctatcgaggcagcagatgggttggcaggcaaggattgggagcagaagacaggcagagattgcgagcaatagacgagtgggcacatgagatatccacaggcgggtgggtaatccattaatatctgtaatcgtgtcatcaaccaattaaaatgagttgatttttatcagttactaacacaacgtcgaccgagcatagaccgacagaagttagctaatttccatgagcttaactaaatagtggcatgattttttagtattctctgatactacatattctacatattctagacaacatttttggaccgactgtgcataacattatgtttctcctaagtggtacattcttgttgactgctgagaacatgttgatccacagtccaaacaaagaggaaggagactgtgcatatatattatgttccaatattcgacggcgcacgcacacgatttcccctgttgttgacaataatgaggagggcacagcacgtacacatttccattacagcatcatgcatatctctagtaataaccatttgaccgatggatggatggatccatccagcaccagcaggcacgactaataaaccaacccctcgaccaatcacaaactccg

SEQ ID NO: 20619 - DNA, 361 bp, Zea Mays
gccgggcccgggcgggaatggaatcggagggtgatttggaaaatggcagggaagcgtaggcgccactccataaatctccagcagtttagtttacctataccactacctatacccaaagtagtttccagcagcttatttatagtttatgcaaaatatacagcgtcgcctatatataccacgcgtcgcacttatactaaatgcactatgccaactgtcgttcttctcgtttccatccccttcttcccttccctcaccgaaccttgatttcggtgccaacatttgagctagagaacacggccgcctcccccacccctcggctactaggacaaaggtagcatgcaacaagcgccgccgctcttcg

SEQ ID NO: 20620 - DNA, 379 bp, Zea Mays
gttttggccccatggtcgactggagaacgtcgtatcatgacctcttgaccgacagtttgctaccccgtgacgaaacagaagtacgaaggcttcaccagcgggccaagtccttcgtcgtgattggaaaagacctctacaagaagtggcacaacggaataaggtagctgtgcatcccaatcgagcagggaagcagttcctagaagatatatatggtgggatcttcacgcaccatgctgccccaagaagcctcatgggggacgccttccaacaaggattctattcgcccaccgtagtgtcggatgcacatcaggtagtgagaacctatgaagggtgccaatactacacatgacaaacccatctgcccacgcgcactccaaac

SEQ ID NO: 20621 - DNA, 734 bp, Zea Mays
tgctcgctatgagatgatcatttgtctctccgacgtggtggatctctcacgaccacatacaatctctgagttaggtcactaacaaagcctccggggtgatcaccgagctccaattgccactgagtcgtctaagtgatgctgatcaccaagagtaataagccatagactttcacttaaacaagagaagcctaatgcatgcggtgtgtgctataggtggctctcatgtgcactaaggaggttctaacacgagattatgactttgttaatcacctcactatgcaatgtggacttgcaagtctcaagcaatgaatgcttggtggttggggcagcaagacaatgaatatgggtgttggaaggggtataaatagccaaccaacataaactaattgttactctgtcttttagaggctgaatattcttgaaaacaaagtcgatcaccgcagcttcagtagtcagacatctgtcttttaaacccgcactcttagccaacaagaccttcgccttagcaacttcagattcagttggggcctctatccaacttggcacgcgaacatccggctgtcttccagaatgagcatgcaaggacttgttataattctccatagtgaactactcaaagtgccatcatttcatgttatcctttagggggatatctaggtattcaactttcctaccccgccgaagttcaaggctagccccaccaactacttgatgttgtccaccatccatccccc

SEQ ID NO: 20622 - DNA, 1088 bp, Zea Mays
gtccgactaatcgcgattagtcgggctggtcgcctgtaagcggccgaccagggggacgacgtgatcaggtttcctggtcgtcctaatcgtcgattaggcgtccaaagcgaccgattagtcgtccgattagctaggttctggtcgaccagtgcgcgcgggctaaatgtggctgtgctattgggcttcaccgtttttgggcccagtagccgcatacatctattggcgcccctaagccctaaatcctccatgtgcctgcgcccctctcaagtttttgtcctctgccagcagctgctgctctagcctccaggtctctctagtctccaccgtccaccatcgccgacggctgcccctctcaaggtcgtccctgccccctgctcatctacaaggcacaagatgagctcgtcatccgaaggtcatccatgctcccctccttcccccttgtctgcactctgcagttttgcattctgcgcagcacgacagttttgccaagaatctgcattctgcgcagtctgccctggccctggtcatctagtgttctatacctctatgttctactgccttacttcaatagtacttagcttcatttccgccaaccagtttccatcagcccagcagtagcatatctagtgcctagtattgacttgacctctatctgttgacatgtttagagtttcatgctgccggtggacgaagaggtgctgatgttgaggtattattccccgggtccaatgtggctggcagtggcagtgcaactgcaagtgattttgttcctcccgtgacctcaaatgttgataacacaggccctgcttcggcattatcagctgttggagactcaaaaagccttgctgaaaaggctattgcagcactccctcctgagcttagtgcacaagcaactgacccaaaaaaggcaaggtcacaggacccaggatggaagtttgggtggtggccagacacaacaaagaaggattttgttcagtgtattttctgttcgaagattgttccttccggaatcaaaaggttcaagcagcatcttgccggtgggtttggtgacaccatgaagtgtgctagagtaccagaattggtttcaa

SEQ ID NO: 20623 - DNA, 1006 bp, Zea Mays
cgcaacgcaagctgagcaaccgctgccggccgcgcacggccgcccacccaccagtccaccactaaagcctcacaccgccacagcagctgccgcggccgagccgacgacgaggatgagcggggccgcgctgtgcgcggcgctgacggagctggggttcgacggggaggacccgctggacgcggatgcgctggagtggccgttccagtatgaggaggcgcgaccgctgcttgcctggatctgctcctgcctccgcccctctaacgtcctctccccgtcccacctggcccagtaagcgaatgatttccatccccttgtccaatcgtgctgttgcacccttttttggctgtggtagtggtggtgattgctgctgaggccgatttcgctgcggcattgctgtggtatgcgacgaaatggtaggctagttgttgggagattcgggcagctggggccaatctatggtggagttactgcgaattctcggggaggctaggtgcaatagggttgtaggggagtgtttgtgtctctaactctatgggcgcgaaatgttggtaattagtggcaaatgcctgtgttgcgttgaggatttagtgagagattgtggccccatattgataaagctgtgagtttctgtgtgaagttatggattctgggtggggctaatttgcagttgcattttgtgaaagtgcatccattttattacatttgggatgaacaatttgaaggatgcctgttgcgtggggagaacatgtcaaatttttctggttttttgttaataaatgttgtttcctactgtatgatttgcttaatgcttctgaatttgcagttttacttgtgctgtggttagtgatttgtcgtgcatttgctaggcctactgatcaattatccgaagttttgatgtcacatttttcattttcatactaatttgaataggtgagtccgttttttttacttaatttgtgcatgtggttgtcaggtatgaacaactcgtggaagagggaagactgtt

SEQ ID NO: 20624 - DNA, 453 bp, Zea Mays
tcgcgatggtacagtggactgaacaagaatccaggttcagcgcatctcaccgtcggtgaacctgcgtcgcgatccacgccggcgctgctattcgtgcccagtggtgcgcgaatatctacatgaggtgaaagatctcacgcggaggatgaacttggagcactattactgctaagtcgccgtacccacttgaccggcaaggtggccgcgtgaccaccgtcgtcgtgccgccgtttccttcggtcatgacatgccttaagccgtttcaccatgttgacgtgagttgtggaggataaccagtgatggccgtaagtctttgcccagtgaatgccacgttagcatgctccagtgactcattccctcatcaccgtgggctcttctccgttcaaattcgttgtgctcgcagtcgcccgctataaattgatgccccggcctgctccgttatatcgttgcgaa

SEQ ID NO: 20625 - DNA, 560 bp, Zea Mays
aagctaacggtggagcttaaccaggtgaagggtggctgtgatggacggaccctggtggccagggctcgagtgacaatggtagggcggggctcgggtgacaatggtagggcggtggtgcgcttggttaaggtgaaattctgggacggtgcacttgccaactggttaggggcttgcggggagaacggccgagggcggggtggtcttataggcacgggcgcaggtggaaacatgcgatggtcgatcgcaggcacgagggcattggttggacgcgcactaacgtggcaatggcccgtgtagtcatattcagacgcctatggccccaaatcttgttgaattcgggcaagatcagtttgtaggatcccctcccttgacttccctctatctgttcgatgtggagatcgtagcatttcttggcatgggtgaggagttgtcttgtcccaaaggttgatctgtctcaagggcccaaactgagaggaaactagcgttttggcttgtcaaaaagtttggtcccaatgccatcttctgacatgttatgagtggggtagtttaacacaactttg

SEQ ID NO: 20626 - DNA, 649 bp, Zea Mays
gtcgtttctcgctctattctcgtaggatttataccgtgctgggaactgccactattgaatctgtcgacaggagagagggcgtgtggcgtgtggagtggggcgtcggtgttgacctcgcccacgactggcgttcggggatccgtggtgagccatggtgcttcgtgtggattgccggtggatcgtcgtagcctgattgggggggaatcgaccctagggtggccagaatccatcaccatacacatcgagccgctgcgtcgcgtgggcaacaccaaagtcgctccgatccgcggtgaggaacatcccatatagtttgtcttgctcccctctttcacacgtgttcacgctaaggttgggttgccggagcgctgtgccagtcttccctggcatggccacctctctgtggatcgggccgcaccgcaactctggtcgtctagggaagaaccagccgtggccctagatccaggagttaacggtggtgattagatcacagcagtgttacacttcgtccatagatttaggattggtcggtcgatgttgattggaacccgcatgtcatccaaactgtagatcagaaatccaatggctatttccgcgcgctggtttaggatatcggcgatctaatctgagccctaggattttgattggacgg

SEQ ID NO: 20627 - DNA, 409 bp, Zea Mays
ccggtcggccatttagtgcggtagctaaccactggtgtcttcatgtccttgcggtacgcaaaattataacagctgaagttcttgtgcagtccatcctccctagccttcgtctgatagtgaagttcgtgtacttggcagaaggcttcagcaagcggctcggctccttggcttcggagagcccagataaacacgctgagcctaacgatagcgttaggagtcagctgatgaagataaatctcaaaatttttcagcacatctgcaatcattccgtgtagaggaaacctcaaccctgctttgaagaagctcttaaaaactaccacttcatcactttctggtttcgggatagtctcttccctgccaaagcgaatcaacttcttctcgacttcatcgaagtagcctagcttcgtca

SEQ ID NO: 20628 - DNA, 479 bp, Zea Mays
tattttattcgcggtggatcggtggcacccatacctgcagcaccaagaatttataatcaaaacttatcaaaaaagcttgacacaactggatgaccagcggttgtccaccccttggcaacagaaagctctgacgaagttgttgggattgcaataccggatctgctacaaaagggggcagaaaatcgggtgaccgatgcattgtcgcgtcgaccagacatagatcaagatacaaccacgttaaatcagttggctagctcgtcggtggtgcctaaatggttggaagaggttatgcagggttatgagaatgatgcccaagcctagaaaatacttggagtgctagcaacaggggtgagttacctccgtatgagttgactgatggggtgatcagacataaggggcgagtgtggttgggccataacgaatcacttcaaacaaaggttatgcaggcactacatgatagtgctctgggggccactctg

SEQ ID NO: 20629 - DNA, 673 bp, Zea Mays
aggggaggcataaccgacccaaggtgaccctagaacatgctctaattggactaattcgggcccggatgtgcctgaccacgatgaccgcggatactgaactctgatcgaggcgttccggttgattaggtgaagtcaagctccaagggctgggcaagtgacgatcacaagcacatgtgggtgctaaaacacgaacaacaagggcgaggacggacctggaatcagctagccgtgagtaggcggttcacggcggcgcagtcggccgaactgggggaagaaggaaattctctagttatggtggctaattgagggtgagaacgggtgcttcggcttcgtgataacatggtgcaactgacccggccttcaatttatagaaatactaagcggtggtgtccaattttgaaaggagagaccggcggccgagaagagagatgagtcatcggcgtgaactgtcgtggcgcttcctggggtaattactccggcgaggaactgacctcctacggatatctacggcgacgtggtacatcttctaagcacgtggcgtggttataatcgtcggcgaactccgacgaggacactgtcgtccactgcgcggcaggtgtcgtggtgaatagtccggcgataagcttctctcctttccccgagttgagatctttctctgcccttgattatccgt

SEQ ID NO: 20630 - DNA, 676 bp, Zea Mays
ctcagaactaacaaatctagctgtccagcaatgaacccccacctccgcagtctgtcaggtaccagatctagcttccacaacggtgtcttgtgatgtggatctgctaatagctccagtcagataatggcagggggaattaatggagggaggagctgttcagatatggaagcttatggggataagccagcatctcagagtcactaacacgtttagtcacctcattcacgacggacgcatacccacgcccaagatttggtggacctctttctttttacctcatcagatgcattctatttctacaactcgccgtataagagagaacccagcccagagaagcaaaccgtgatttgcacgcaattccgtgatcttgcattgtgccccttaatcagaactccacaaaaaaaaacaactcatgccatgataaaagtagcattcacaccgctccaatactctaccattttcggtgccgaacaagtagactcgcacaagtttctttattatttcaccatatgattattccaaccccctttagcttagctatacaaggcacgcgtatgtgcgcgggtatctaactgtctgtatatagtatatatagttcaagtttacttactgactaatgagaagcagtcaaaaagggcatgcattatgccatgtaaaagcgtttctaattctactc

SEQ ID NO: 20631 - DNA, 476 bp, Zea Mays
ccgctaatcgctagcagtccttcgctaggactcgcgaattttgaattcgccccaaatcgactctccgccaccgtaaaccacccatcaccgcggccagccttccccaggtctgctcattcccttctcgttcctgttctagcatccttacatgttggtgatgctccccgaccattttaattgaaccaaaccgccaaggatcgccgggaacacgatcgccaagccgcgatactcacggccaccgtggccagagctccttagttggtcttagatgcaattaggttgggggaaatgatcaaggtagccccgatttcatgtctgctgctcggagaacctagccgttgccgcaatcggccggtacaatggctcaccggagcgcgactgcgttcaccgtcgtcgtggacttggccgtgcgaagaaatagaaatcaagggggctttctgtaaaccgtcagcgacacataggaatagtaaaggaac

SEQ ID NO: 20632 - DNA, 331 bp, Zea Mays
ccgtgattcggctataaattctagaatctccaggagcgaactggtggggaatttttgaaatcctgtctttgcttaattggctactacactgaaggcgtatgctcgaaaaaattgtgtacctgttgtcctgtttgagttacttcaagggttggtgagaaatatgcatatggatgggggtgggagccctaaattttgtttctagatgcaggactggttttgactatactggattggctgtatatttggcacgaaacagattggtagactcactggaccgcaggaagaacaagaggaataattcactgttatcgtggataaactaaatttgtat

SEQ ID NO: 20633 - DNA, 470 bp, Zea Mays
cacttatcccaggacggacggtgcaggggcttcttcttcatccgcccagacgcaagagatgagagcgcccagggcggcggtgccattgctggtgtaaaccttcccattgatccggtgtgctaaatttcaaggaaaaacgttctaccccacacggataccctagcgagtcacttcgagccgtcgcattggggattgggatgatattccggccagtcgtcgacaagaaggagctccccgctcatatcccgccggccaacagaccacgaccgataccctgcccaaaatccacaaccgaccaacactatacgatgctgggacccaggcgaagaaggttacagcgccataccagaattcaaagcgtgagatccagccatggcggcgcgctgcacagcggcgttcccccggtcgctccaccctttgcccacaccgatggcgctccatctctcttactcggccagcgagtttacgac

SEQ ID NO: 20634 - DNA, 572 bp, Zea Mays
tacattggccacaaactagatgattgtggttggggattttatatgtatgcttttagaacatctcggcattagggggaggaatgcccatatagtgtaatgcctcaatattctattaaacgcacaaaagccaaactgaacctgtcgttcggtgtgtactcctatgtatatggagcttgccagaaattgttgaggagtaaccatatatgtttgaatgcttatacctgatgtagatgtggatatacccgggattaatatcatatccacatttgacttattggcatttgatctattctcggggacgcctgcgaatatgatccatcggcctcagtcaaagcatatgttctgattgcagattcacgtggtctgtgataactttcctctgattaattcaccctgatggtgatttgcctcacaaagaggttcatctgaagatgaagttcctagcaatgcgcgcaatatcattgtgctaggaatacgaaacaatgaaatctttcattttgggaaatgacagagatcattataaatgtgggagacaaatgtgtcgacacctatcttgcctctatagattgcaa

SEQ ID NO: 20635 - DNA, 586 bp, Zea Mays
gtcgatttggggagaactggaaattcacgcgtgctggtggataatcgagggtgggaacgggtgctatagctcggcaattacatggcgcaactgacctagccctcaatttataggcacatcaaaggacggtgaagaatttggtcgagggatgtgagcggccggagagctcggtgcggaggaaaaagtaactttcaccgtggcagtggctccggtgatcgccagacatgcaactaatgagtcactgcaagagagtttcgtgctgagacacgtggtgtgcaacggcggtggcttatcagcgacgaggtcatccaaccggcgatgagctgggggtaaagtatggcggccttagccttagctccatccagtaccggatttttatccggtcaagcttatcggttaaacacggcgcacgaatcgcagtaaaggatcaaccaccggcgacgactcatcggcgacgagcgaaccagctggcggtctgatcttcttcagtcgtgacactgtaccatggtgaacactccatcagagcagctgacagagcaactttaggtcctattttctccagattttctatggtaccaagtccaac

SEQ ID NO: 20636 - DNA, 378 bp, Zea Mays
gaggagtcttcagatgaggacttggattattttgcggcgttggatgtggctgcagcggagccttcgccgcgcgcggatggttccgaggaactcctgagcgtgagtactgggtataggcggcgaaggggcggtggcgaagcggagagtgagtgaattgtcgcgaagtggtaggcgttatcgtggcgaggtggagagtggtcgtcttcgcgtggacgggactggtaagcgggaattgttgtcctcgccgattggggtgagtgtaggtgagggagagctgcgaaatctgtttgaggatgaggaactgaggataatgctgttcaactacagggatatgggtatcatcccaaaggttgagccaatgtaatatatgatgccctc

SEQ ID NO: 20637 - DNA, 496 bp, Zea Mays
gacgtattagtaagcatccagatattaaatgatagacaacgccaagctattgcacggagaggattttccagtattcttgatatgagacttgacgcactcggcagtagatcacatctagcttggctgatggaaaagcttgaccataatgacatgacaattcgagccggcccagggaaggagctcaaaattacaaaggatacggtgcaccttattttggggttaccaaatgctagtggaggaacgacattgggcatcgatgaagctgttgctgccaacaatttaagggctgaacttggtttatcgaaagaagattttggggttgcagctcttcaagatcgtctgagaaaagggtctgacgatgatctaagcatcagatcctttttcctgatactgttcaataggttgttgttccctactgccagctggggaataaccaaccatgtggttcttttaactgaggagatggatcgtttccaccagatggactggtgccagc

SEQ ID NO: 20638 - DNA, 818 bp, Zea Mays
tctaacgggggagggatggcacaaattgtcaccactatgggaagggccattcatagtagcggaagtcactcggcctggctcgtatcgtcttactcaaatggacggcacggaaattgggaactcatgaaatatagaacatctcaggaagttttacccctagctagatttcaaaagctattgggacgaccttgtattctataaactgggagatatatcatcaataaaaagacttcattctcaaaagcactcaaattgtttactgccaacctgcatgcttacttaactcagggtgaccactataccctactaacggagcaatcgacttaagtcagcaacgacttaaggcggtgtgacatgctcacgcgtaactcagggtgaccactataccctactaacggagcaatcgacttaagtcggcggtgtgacatgctcacgcttacttaactcagggtgaccactataccctactaacggagcaatcgacttaagtcagcaacgacttaaggcggtgtgacatgctcacgcttacttaactcagggtgaccactataccctactaacggagcaatcgacttaagtcggtggcgacttaaggtggtgtgacatgctcacgcgtaactcagggtgaccactataccctactaacggagcaatcgacttaagtcggcaatgacttaaggcggtgtgacatgctcatgcgtaactcagggtgactactataccctactaacagagcagtcggtttaagtcggtagtgacttaaatcggcacggcgtgctcacgtatactcgatccaacacaagcacgtttgcaattac

SEQ ID NO: 20639 - DNA, 494 bp, Zea Mays
tgacgacgagctcagtctcgatgcggtggtcgaggagcggaggcttgaagcacagaacgaggcagacgatgcccggtgcctcctccttggtaccacctccgctggtgccatcgatctggacggcgccggtgcacaaacggggacgggctccacaagcccgacggccgacgcgagcacctctgtccctgtgcctggtaaacgttctagaaggagaggtccgacctctaaggtgtggctacactttgaggaggtaactgtgattcaaaatagtaaggaggtaagagtatcttccatttgtcttcacttcaagaataacatgtatgctaaatcttcatctggaactggccatttgattcgacacctcgatgtttgccctgctaagaaagaaaaagatagatctagaaaaactcagtctttgcttaaatataatgcagatggatttgttaatcactgggagtattccccttctgttgctagaactgagctttgtcgtt

SEQ ID NO: 20640 - DNA, 293 bp, Zea Mays
caccgtacgttgtgacctaaccatgcacatcacaaacatacatatgccacttggctgctggcctagcagtttcaagtctgcgtacgtactgggctagctactcattcatgagctgcaaaggttggtggtacgcttgtacagctggggtatttggcccccatgcatggacgcgcgcgggggggaaacgggagcaccagctgtgctgtgtgtacaaccatgcatggcttcctgtcctgggggtcgacaggcggttgtaccatgagcaagtacaatgagacgcacggaccaatgcg

SEQ ID NO: 20641 - DNA, 739 bp, Zea Mays
gggtgggaatgtaggcgcctgccgaatccggccttgtctggaagtagtaggcgccgaggtggtccttcgccttccccgacttcaccagcacaaagaaatggcggaagagggaggtgcctacattcccaccataccatgtacgcttctgctccctgctcaggcggagacccgatgctgccacgtggcccactgcccgtgacgtaagccagcgggcggagcctgatgtaaggcctcggggccacgcggcctcaacatttattgcggataaggcgcgccacctttctattccactggcaggtgatgtgccgcctcgacatttaatgagccctgtcctttccactggcaggcgatgtgctgcctcagcatttaatgagccctgtccactccgctgacgggcggtgacctagccaccccgcaggcggcgtgcctgtccattctattggcaggcagtacgcccatgctgccgcgtgtactacactcatcatgactcgcacgttaccgaggatgcagccgcgacatatcaataatgtatgcactacagacattatggcgcttaggagatcgcctaggcgttacaagcgttagttacttcctccattttgcccctgggcccacatgtcggggctcagtatccttgtacgtgccccccttgagctataaaagggagggcacacgacgttacaaagcacttacacgctcacagacgctcaggctcacttagactctcagactcacaagt

SEQ ID NO: 20642 - DNA, 451 bp, Zea Mays
ttctgccaattctgtgggagccatgcggtatggtctctttgcgattggtgtggtgcctgggatgagatcaatgtagaattccacctctctttctggaggcattttggcaattctttcgagaacacatccatgaattcttctaccatagatatactttatgctgttaggctaaacaccattggatcttgggttggtggctgagccttacacgaaactgattttccctcgtggtttgtgagaagaatagtcttatttgcgcaacttatgatgccattgtgcttggtcaaccaatccattcctagtatcacatcaattccgtgggatgggagtatggctaagtccgccaagaatactaccccacttaaaagagttctgacttgggagcatttgaggtggcatagaaggtatgaccctggggttcgggtgaccaaagaggtttctgaaaggggaa

SEQ ID NO: 20643 - DNA, 1038 bp, Zea Mays
aatgatgactattctttttctttttatccttttggctcctccgtcgagcttctcatattaaggggagctgtacaagctcatgtttcttcccccccccccttctttcttcttcgacattccccaaccgctagaagttggaaatgtcttgtttgccaaatattcttgtactagatccctagtactaatttcggcagcaaccaccctaaactcaacttcggctacctggcatggagagccaagttgcatatggcacaaggacctggtcatcctgaagcttagtttcatagacttcatgaccatagtcatcagcttctcccttctcttctcgtctgctttcacataaaaccattcatttgtccacctggttggccatttggtgcgatagccaatcactggagccttcatatcttttctataagcaaagttgtagcaaccgaagttcttatgaagaccatctaccctggccttcatctgataatgtagttcatgtacccggcaaaaagcttcgacattagcatccataccctggcttcatagagcccatataaaaacactaagcctaacgatagcattgggtgtcaattgaagaaggtatatctcaaagttcttcaaaacctcccctatcatgtcattcaaggggaaccgaagtcctgctctgaagaagctcttgaaaatgacaacttcgtcttcttttggttccggaataatttcctccccagcaaaccggacaagcttactttcagcctacccgaaataaccaagtttcctcatcataaccatgtcatcctccgttatagtagacttcccaaactcaatgtgactaggctttgttgggttcaggatgttgttatcttcttcactttcattgtcactttcgcctcctgctacaatatgttcagcttcagtattggaggcaccttcgacagcaatttcctctgacacaaccagacccgaccgcttcatcacttctgaaattggtgctgcctcgctggtttcggtctcctttccttcatgagataccctagcagtggatctcac

SEQ ID NO: 20644 - DNA, 553 bp, Zea Mays
gcgaaggagtcgacgaggcgagcagtagcctagcccccgagttgatgaagaagcgggtcggtaaggtaggcagcaacctagccccccgaattggcaaaggagttggcgaggcgagcagcaacttagcccccctcccaagtcagcgaaggagtcagcgagactcagcggtggtgtagcctttaagcagtcaacgagtcgcctaggcaacacgactgtggagctgcttctaagtcgatagagaagtaggtgaggcaggcagcaacccggtgccttaagtcgatgaaggagtcagcgaggcgagcaacatcttagcccccgagtcgatgaagaaacatgtcaacgtcgcgagcagcagtctagtcccctgagtcgacgaaggagtcattgaaggagtcggcgaggcgagtagcagctcagcccttgagtcggtgaaggagtcgacgagactcagcggtggcataacccttgagtagttgacatgttggcatggcgacgtggctacggagctgcctctaagtcgacgaagaagttggcgaggcaggcaccagcccag

SEQ ID NO: 20645 - DNA, 565 bp, Zea Mays
ggttatataaaaattgtggggtaaatagacataatatatgtgatctaggtgtgtccatcttctacctaaagacaactgcgtacgacgaacacgccaccgtggcggtgccatagctctacggcggcgatcacgtcgatgactagcgtaacgtcgctcaggaactaaaatcagacacggataagtgatacacaaagcgtagaccacgacgaatctataagactgatactcacaaagttttgcagcgtggaaccccttctgcccgcgagaagtcatggctatgtggttgtgctcgtcttcggcgagaaatctctggcttcacgattgactctgtgctccaggaagctacgcacaaccccctatggtcccggtgatcatcgctccacccctcgatcactaggctgctctcctgctcaacaccggcagcgacgcgatgcttccatcttatcgaatccatgggactaggggcacgacattcaaatatatatatccctggggcacctgatccaagcatccggatttttctaacaaactcatgggtgttctgttatgcgggtgagtttgttac

SEQ ID NO: 20646 - DNA, 797 bp, Zea Mays
cacgcacgctgggcgtggggatggagcgtggagcaagaggtggagggaggagggtgcgggaatggggatgatggtgttggacgagtggcagagatgatggaaggagttgccacggatagaggagcgtgtggggatgaggacgactctcatcgcagacaagctcgccggctgcatcaccggccgcacgggggcgtcggtggcggtattctcgttcggcgagttgcgggcgggcaaccgctccttcgctacgctcgtgatctaggtgccgggggagagacgacagtttgggcagaacaacaggtgggcagatgggcacttggacggactgcgggaggtggtgaacctcgacgatctggccgatgtggagggtgaggcgatgcgaggaggacgacatcgtgggtggccaaggaggactgaggcggtgtcggttgcagctgcgagggaggcggggaggggagggcgagcaaacgaacggtgcagcgggcgcgggggtgatgctcgacaaacagacgacgtagattgatggaaggcagaacacaaggaggcaggctacccttgcagccttaataggtagtatagatacgatcaatactacattggactaggatgcaagcctgaacgagtataaacccatcatttcaaatccttcgcctaagtcccggcgacttaccattcagagtgagtccgtgctaacttctcctacgaacacaaatcttactgtccctgatttttaaaaccacaataaataccatatgtagaaattgtcgatgcttcatcgagcagcatcttaagttaat

SEQ ID NO: 20647 - DNA, 403 bp, Zea Mays
gtttcacataaaaataggagaaagtgaggctccaaaatgctttgtcaggctgtctgatggagttggccatggtacagtgctcgtgcagatcagaccgccagcgcagcaaaagaatcccaccgccggtgacccctccgccgtgattcgcgtcgccggtctcaagattcgtgtgcggggtggattgataaggttgcagggtaagaatcctcaccgacggtgagctggaggtcactccggtgacatcaccgtggctttcttatccactttgcggctaagcagattacctcactggtgaccgccgcctcccgaccatgcgccgcgtggctctcgctttccaccgcaccgccgcgacttacccttgctctccgtggctcgccggagtaattgccacgactgtggacac

SEQ ID NO: 20648 - DNA, 489 bp, Zea Mays
cagaggtcgtagcatttagtgttgataggtaggccggtcgtaggtggcataggcggcgcccgccgcaatgtcgatggccggagcagtgtaggccatcccgcccatccgacgatccagtgcttgacttagatgcagcagcaagatatggttgggtatagctagagcgcagttggccggccagaacaatgctaggcgagagagggaagtggtggtgataggaatgtgagaggagagggattgttatctgttaggtcttacgaatatagaggaccagccggcagcaaaaaaaagtgaacactaatcatagctgctgttgggcagggattcttttccatctcgcgtcctcagttgagagatatatatgtctgctgctctcgctatatagagggccggcctgccttgctagctagctagctagttcaagttctaggcacagattggatcggatagatcaacattaatttaattacttaattattagttcctgac

SEQ ID NO: 20649 - DNA, 584 bp, Zea Mays
cattttcactcactgtcgcaacacgagagccaggccagcaaacatgctacattggctcagccttcagaataagacccgcctcctggaaattaaacaacatcatcttgaactcttcgccttcaaacagattccgaaaatcccccttcctaatacacttcccggacgtcgaggatagtaaattgcgttggctgccccgatcgaatcgaagacgggatcgttccatacccatactttgacgtctcccactttgtgacatcccaccaacacttagcttcgataccacctttcgccgacagtggtctttggctatcgccccaaccgggggagcagactcttcacgcactttaggttgtggcaaggactccgctgtggccaaatccaacacagcaaaataatctaaatcttcatcagaagactcctcaatccacgaaaacgggctcccaaaatcatccccgttcgatgaccacgactcagttttagaaccataagcatttccattaacgggcattgcattcgcaaccgccacaaaattagtatcaacgccagagggggttgcttgcgtaggctcggtcgtcggaacctgc

SEQ ID NO: 20650 - DNA, 452 bp, Zea Mays
atcggaggagagttatcacagaccacgtgaatctgcaatcggaacatattctttgactaaggccgatggatcatatccgcaggcgtccccgcagaatagatcaaatgccaataagtcaaatgtggatatgatattaatcccgggtatatccacatctacatcaggtagaagcgttcaaacctatttggttactcctcaacgatttctggcaaactccatatacacaggagtacacaccgaacgacaggttcagtttggcttatgtgcgtttaatagaatattgaggcattacactatatgggcattcctccccctaatgccgagatgttctaaaagcatatagataaaatcctcaaccacaatcatccagttgtgggcaatgtatgctattgtggtgatttatttgggaaatcttacgcacattacagataggggttttatgcaatgaactt

SEQ ID NO: 20651 - DNA, 313 bp, Zea Mays
ctcggactccgagtgggatgccgcacctccgcatccttgaccaaaagattacacttctgccacgagtcctcgcggctgagcgcaccacgcgcgcctcccgatccccacgcctgcgtgacatgtgagccccacaaccgtttcttattcttatccagaatatatccattccagaatttcttacagccagcaggggagaaaattgaagagtttgaagcccacgtggcgagcaaaggaagactgtgaggtgcatcggacgaccttcagtagttcttggagagataattagcggggaaaaaagacgcggcgatttttc

SEQ ID NO: 20652 - DNA, 520 bp, Zea Mays
gccggatccgaagagctccaccagcgcaaggtcgagtcccagaggaaacccaaagaccctccgcagtccagtcgaacgtggacgagaccctcgcagtcagactctggtcgggacggccgcagtcagcagcaggtgcacaacatcgccaaccagcaccccgctggtgaggctcctcgccgccaggattacccccccagggccgcggcaacgtaactcgtggtcggggccgaggacgggcgcaacagccgcgcaaattttactgcttgtttcacggcgaagactgcgcgcacccaacaagggactgcccggaaacgaaggccaccagagacaggatgtctcgggcgcaaccagccgacaacccaagagttatcgcgcacacatatcaacaactcccacaaccatacaaccacgaccccgctcagcatccacctaaccacgcataccaacaccaccaggaggtacaaatcatacctcccccactcccacctccacacccgcaacagtcaaacatccaccaccc

SEQ ID NO: 20653 - DNA, 385 bp, Zea Mays
cggccatcttccccgttgcctcctccgcaccgcgcctaactctcccaagctcgcccgcagctccggcgacctccccgcgacccgccagagccgcccgagggcgcccgccgtggctagaccatccccgcccaccttcgctcgatccgagccctcggatagcttccccaggaggccgtgaagtttgcccaagcttgagctgaggaccagccccaccggaatagtgcaatcgtgctcgccagagttcgtaacccagccggagcgcgtggaccaggtaaccctctgcaccatttctcaattcctggcgcacatggcctctacatcacccagtggagctcctcgtgcactttaattgaaccccaccgccgtggtttggccggagcaggag

SEQ ID NO: 20654 - DNA, 680 bp, Zea Mays
aagtggtatgcttcctatcttccctagacatctagatttgatggaaaccagaataagcatctaagaaagacaaaaggtcgcacccggaggtagaatccatgatttgatctattcgcggaagtggatacgggtccttgggacaagccttgttaaggctggtgtagtcgatgcacatccgaagcttcccattcgccttggggatgatgactgggttggccagccatactgggtgatggacctcttcgatgaagccaacgtctagcagcttccggacctcgtctcggatgaagtcctgtcgctcgatggactgtctgcgaggcttctgactcaccggtctggcgtcagggttgatcttcagatggtgctcgattacctccctggggatcccaggcatctacgacggctcccatgcgaacacgtcggcatttgcctggaggaaggcgacgagcgcgagttcctatttctcctccagatcacccacaatgcgagtggtgtggggggaatccgcgcaaagccggatggccttgatggggatgtcgtccgcaccagatggccgcaccttcggcaccttggtgggcgtcttggtaccggaggtggaggggctcctccctccgtcgtccgggcgagcggtttccgccgccagggcgtgcaacttctccacagctgcaagcgcagcggcg

SEQ ID NO: 20655 - DNA, 1141 bp, Zea Mays
ctatcgttgtactttggtcccgctacatggggcgctgctcctacgaccttcactatttaacaaactcgagagccggagtatgtaactgcatggacaacgtgagccgtgaccgccaggaagatcgcactcatctgctccatacccgccagccacggccgccgagaccaacagggcggagctggcgccgggatttccggggaaaggtcgcgctcgtaatccgcttggctcgcctgggatgttgctagctgtgcccgccgcctaaaaattcgtcgggcgtgaatctgttgcgaagaacgagtcgctgttatggttgttaggattttagcgaatctatagcgattcggttgtgcggtctagcacgtttctgccgcctctgcctatatagtctttccgcgacctcccctctcatcacaactggttaaacatcgccattgccgaccagagagcgccacacaccacaaggtcgcggtgcttgtcgtcaacctctacgatctctccaaatgctggtatgaccccccgtggatagcttcatcgttctcctctcatcgtttagcacatatgcacgcgagggattatgcaccggatcgccgaatgcgcttcactccggcagggctccaccttggatcttgccgcctccgctcggtctgtctgagggaggaagatgcacagcggccgtcagatgtcaaaggtgtggtcaggatttggacgagatcacgccaccacatacccctttcgtccatcggatccccgccatcgatcctcgatctaatggttaggatggcgtaccggttcgggttctgatctggtgcgttggatcttgatcgggcggcccacattatgttccggttcacttaaagcacggttctaatctgggccctcgattctgattggacgactcaagttggctgataccccttcggcctgaccgatttgcaaaagagcccctggctttcttaacaataaacccgccgtccgtgggcgatgatcacggagtcttgggtgtatttgtagatcagtccctaggtttttcagaatttagcgcccaatccagagatcagaaagaattagaaaaataattatagaaatcgatttttaatacaaaacaatttcagaaacttgtataattcatattaaatccatt

SEQ ID NO: 20656 - DNA, 349 bp, Zea Mays
tgcattgactgttcggaccgccgggtacatgtgaatgtcatctcgtgaggagcccatgcctttccacagaatccgcttgcaagtcttccagatcccaaagggttggccccagggtgcgcaaaaactggactccgaggataatatcgaaggagtccagtggaatatcatatgcgtcaattaggaagtcctcgaggccgatagtcatgctaatgctgtttgggaacctgcaacatgagaccttgtcaccgtttgccaccgtggcctggagataaagttgttagtagaacccgtgtccagtagtgctgtgagagcttgtcctttgatagatacctccagctgcattgtgccc

SEQ ID NO: 20657 - DNA, 590 bp, Zea Mays
tcctggcacatacacaagctcacatgtgcacagatcaggattcacacacgagtttagtttacaactaggtccacacacaagttagattacaagcaggttcacacacaagttcacaattgtcgatcatgataagaagcaggtcttcttttttaggtgtcaacttcttttttagcacacgaacgcctgaacatgctgctaccacctgatttccagaagtatctagtgctcctccgtgggaaattgtccttggactactttgggtatcatgacctgggactacagccacctgagtagcaggtgttagatggtatgaatatctgctatgcgtgtattgtagatgggaagtgatccttgattacaggatactccttccatcattgttgtatccatacttgtgtacatgccaccgccgaggggcttttccttgtgcttatataacacgcaaccgtggacctgagaaggcaccacgttacaccaattctcacatggtaatcagagcatctatcctagcggaaaactatggcgctcacatccttttccactgccgccgccctagccgcgttttctcccctcggcatgttcccagtcac

SEQ ID NO: 20658 - DNA, 386 bp, Zea Mays
tagccattctagccatcgtctctcttgaatgacaagcggtctaagtgtaatgtcgtaggtcgatagcttgttgtacgtttgagttagatgcaagatagatctggccaacgtaggaaataagattcaagttatcctccggtcagtgtaagaacagtcaaagttccggctacgaatctcgagagaatgccaaggacttggtcgctgccttgcggaggcgccgcggcggcggaccccgaccaataatctggttgtggctcgacgtcggcgaagctgcttggtggtggtggcggtggctttctcctcttttcccctcggcggtttctaggttcaggtgatctccttcctcccgcttccctaccctctggtcgccctctggtcttctcgat

SEQ ID NO: 20659 - DNA, 535 bp, Zea Mays
cttgtagacggcctgggcctgctcaagacggtgacgtatgtcagccaagaactcatcccattccaccatgtgtttggccattgcagctaccctcgtttcgtcgggctcatacacgcggatggagggtgggtctcggccataaaccacccggaacggagtatcgctgagcgccgactggtaggcaatgttgtagatgtactctgcccagggaagctagcctagccactggcaaggtcgatcccctgtgaagcagcgcaagtacatggtgatgactttattggcggcctccgtctggccgtcggcttgcggatgaaaagtcgtggtcatgtgcatcttggctccggtgagacgcatcaattcctgccaaaagatggatgtgaatacggtgtcctggtcgagaccatgtaccgtgcaggcgcacgatctcggcgaagaagacccggaccacaaactttgccgtgtatgggtgtgcaagtgagatgaagtggcagtatttgctgaagcgatccaccaccgtcaggatgacatactttcc

SEQ ID NO: 20660 - DNA, 1024 bp, Zea Mays
aaaatttactagtacttcctatatttctgcttttctctgtaccattttatgtacccaatgtgatttccctctactattttgtagtctagtaagagcttgtaagcccacaatatatttttctatatattaagcaatggcgcaaaattcgcaccctgcttttgccacgtcacgctttttttaccctccgttggatcgtcattttctatatagtaaagttttgcacaaatacgcctcagcagagagccaggtcgtcatttttaatgtcagacgtcggatctttattggacggttggcatttgtttggatccaaacgctagagccaggagcaaaactttgcgtccaaggtgttcacgccttcctcattcttctcagccgttcgatttcgttcctatagttaccgaatgcacgcagcccaaacacgcatagtggttcctttggacaaggccccacaccgtcctcgcgcgacaggattcttccagatggaaacaaataccacatgacggggaagggaaaaggggagcaggcaccgtcgtctccgctcagccgcgacatcgttgccatcgactacagcgaccatggtggcagccattcctctgtgtccacacctcccccgttcgctttgtcattatctctccgattgccataggtatgaacattccttttcaccgtaacttcacagatctgcgtccccttagtgttagggttgtcttccagcctcccgcaatgtgcgctcccatgccattactacacatcgagtagcaatagccttcctcgcgtttttccatcgctcgctccccctgcagtgaagagtttgcttaggtattgcccaacccgcaggactgacaggccacaccatgatactatgaatcttctcttcatcaataaacctaagtcacgtcacagcagatagcagccacatagacgttgtggatcagtcgcctactccatgtcctcccccttgctttacggaattgaggatatgttcttggttttgctgcgcaggagtattatactacattctaag

SEQ ID NO: 20661 - DNA, 461 bp, Zea Mays
aagaaaaggaaatgggactgttgggctggaatcagcgtgttttggcccactttccaacctccaccgcgcgccccagctcaaagtcacgcccgcgccgacaggtgggacccacgtctgggcgcttcttccccgcagatctcgccaacggaagcaagtccgtccaaccttggccgccacgatttccgggtcaccggggacgccagctagagatggttttctctgttgcgttcaggcctcggggtatataacccaccctagacacgcccagttctccgtcgaatttgggcgaaccaccgtttccgccgcgcgccatggccagtacgacctagacgtccgccgccatcgactgcacccacacgctgctgacagggtccgtgtgccgtggccggagcttctccaagtcttcacgaaggcgcttgtggacatctgggggcatgatcggcagtcgtgctgaggcaatt

SEQ ID NO: 20662 - DNA, 413 bp, Zea Mays
tagagataccccttcatcgtataaaaatcaggctatcgagattggattggagggctgggagtagcgcagatgtggtcgtctctttggccatcgaccccagatctagcggacgacatttcataccatttcataagatataggatctaatctgtaccatcgaccaatgatcagacgaccaggaagaaggcttggtgtcctgacggacaaagacatcgcaatggtgactaaaaatttgggtttaggccctaacctactttggtaccatgttactaacattagattagtgggtgagagtacaattagtactaatgacttagtagaatatataggcacaactaatatgggccacatgggccttaacatcaaccaccactagaattgagctactgccattcaagggtggatgaccctct

SEQ ID NO: 20663 - DNA, 462 bp, Zea Mays
cgggtccacgaccaccgcggttgccggcgacggtgaggggaaggagtcgctggacaaccctttggtggccatggagtgcttcatcttcctgtagcactaaccttctcctgacccgttctccgctgtcagcaaattactccacatagttttagcaggagtaaaggtggtggtgttggtagcagcagcaggcagtaggccagtagcagcgtaatttggtgagtaataatctcgtcgtgtaaaacgtttcccccctgggctggctttttaacccccgcgggagaaaaattactggctattcccgtagagccttcagcccgtcagaattcagatcgcagggctgggctctgacgcgctgtgctgatgtattgtctgcactctgtagagtacctctccgattgtgcatgtctacttgtaatcttctgttcctttttgcaatggcgagtcattcagagctggaaaggc

SEQ ID NO: 20664 - DNA, 703 bp, Zea Mays
gcaaagatggatttaagtctactatatgtggctgtagcaccagagtgaccacctagaggagagttgtgcaaggctgtaataatacgatgttgcaaatctggattctgtccaacccatatgcggttcttatatttgagtattccattttggagggtgaaatgaggtacagctgagtcgatggccaacttggacaagagagactaggagtctgaatcttttatgtagctctgttgaacgtcggacagccattggggtaccaccatggacatagcactaagctctgtgggcatgcatctagatagtgcatccgcaacacggtttgcagcaccgtgccggtatacgatcttataatgaagactaaaagttttgtgaatactttgtgctgccacgatgtatgcaaacgttgctcgttgagttgcgagaggctttggtgatcagtaagtatgatgaactctccagattgcaggtaaggacgccactgttgtactgctaccagcacagccatgtattccttttcataggctgagaggcccctagattttggtcccaaggctttgctaaggaaggccaatggatgacccttctgcataagcactgctccaacggccaaggaactggcatccgtttcaattgtaaactgggaagaaaaatccggcatagacagaacaggagccgttatcaaagcttgtttcaaagcttggaa

SEQ ID NO: 20665 - DNA, 294 bp, Zea Mays
tttccttagctgctaagagctgattcttaacattgccaacactctgctgactccaggactgcaagtgtttcgaaagcctttttaacttcactgcaaaacgttgcaggggacaataggaacccactggctgcacccaagattcttccaccttttccataaaaccttccaattttggccaatagctttcaaagtgaaacagtctcctgccctgggaatactcatgcagccccaacagaagaggacagtggtctgaaatgaatgttgccgaactttgcaatacgcagtccgggaaat

SEQ ID NO: 20666 - DNA, 471 bp, Zea Mays
aaatcatataaaaacaatccaagagaactttccacaactccaggaacagcagtgacatccctacaagcaattctagctctcacatattcatttctgagtctggttctttcatcaattttgaccactttacccacgagtccgccaacttttgcaattgtcaccagagatctttgctccattggaatgccacttatcctgaaccaccctttttgcaagcagcctttagcattgactacaggggtccaagggtcaattgtgatatgagctttagttgttctcatgcctaagggtctaaagtatccaagatcccctatcattttaggatctggaaatctcattacaaacttattgtcccccacagatctagcagtcaagccttctcatctgatatgtaaagctttgagtatttttgctaaagtcatcatgctgcttaatgtttccatcatcaagattcccaaaatccactttctt

SEQ ID NO: 20667 - DNA, 470 bp, Zea Mays
gtgcacacttctcccacaaatctggtttagctaatataatccccatagtctcattccatcctataccactctcattctttgcgttgcttatggccttgtagcttgctttcaaatctttctccttgtcttgaagttgttgctttgtgaaatgtgctgaggggaatttctcattgaacttacaagtgatgcttctccaaccatctgaggtccaaccattctgtcccttaaatcggacatcaaccttgtgctcagttaatacttcaattaaacccttctcatataagaagttccagttcaccctagatgcttcatttgccattactattttaaattacacataaaaattaaattgtgtgcaagaagtacataaataagatacaaatattaggtgcatcaagtacataaataacgatacaagtgctatcacatcaactaaacattgtgtgcaacccacatctgcatcgcaatgt

SEQ ID NO: 20668 - DNA, 762 bp, Zea Mays
gtcggataaacgcgataagggtgcagccggattagcacaagtacgcgaaaacggccaacatgccacattacaatacaagttacagttacatacactcagcgaggacaccacatactacatcggctcaaccttcaggatgatgcccgcctccctataattgaacaacattattttcaatttcacaccctcaaaaaggttccacagatcccctcaccaatgctcatcccaatcggcgaagacaatagttctcgtttaccaatacggtctactcgaagacggtcccgctccatccccatccgacggtgcctaccactccgcgaaacctcgcccacgctatgcttcgacaccacccttcgtcgtcggcacttggtcctcgcactaggaagatcagccacctcgccaacctccacccgcgacgaggactccgccgcggccacatctaacgcagcaaaataatccaagtcttcatccgaagactcttcggtccaggaaaacggactcccagactcaccatcagacaaaaaacacccagatccaaaaccagataaattgtcattggcaggcactacggttgcggctgccacaaaattagtatcgtcagcagaggttgcttgctcaagcccatacgtcggaacctgcgcagcaaccgagtttcagtatcacaaaaacaaaatcttacacccgatagccctagcccctatctcgccacctgcgaagggccggccgacgccgcagggtcttcggcagctggttcgcccgcca

SEQ ID NO: 20669 - DNA, 284 bp, Zea Mays
ccattcgggctcacgtctgcgattttatatgtcttgtcaggaaacttgtttagccccctgtcacctctgttccgatcgctctgcttccttttccttgacctctcggtggttgtctcggtcgattccggtgtgccttgggtcggttccggtgcgccttgggtcagttctggtgcgccttgggtcggttctggtgcatcttgggtcggttccggtgcgtcttggtatcgtgccgtagctttttcgagcatcacacgaaattgagacaagacctccttttcatgtaa

SEQ ID NO: 20670 - DNA, 685 bp, Zea Mays
gggggtgcctgggcggaaggagtctggtcctaaccttggcaagggtgcgtgtgccaccagctaacacctggagcaaccgcgacgggcggaattcatcgtcggtttctttacgccaccgctgtgccgcggctctgcgtgaaccacgtcgattgcgcccagattcacggtaaaattcttcccattgagttcgttgtcagctagtatacgtaaattccctatcagtgtagaaatccaatcacctgtgtggtgcttcctcgtgctccggcgaactgcgccgccgcgaggtttctgtttcgccgtcgtgtccagggttgggttgggggcgatgatcgccgaccgttggatgaccagcgtgtggcgttgatcacatatggatgttcggcttggaggcgatttagtccaagccgtagatccttaatcgagcggtcaccgtgcgatccacgcgacttaggagccatagctgttcgatccatatccgagggcctgtgttgtgtcacgtttcagatggttgtagatctaatccagaccttggattgccagttgtgcgaccaagatcgatttgtaccccttcggccctgcacatttccttaagagccccctagtaaacagaaaatcaacccgacgtccagggatcctgttccctgtgtctctggattcttaccccgagccccatatgttcctgttt

SEQ ID NO: 20671 - DNA, 349 bp, Zea Mays
gacaggtgatacaggtcgaggaggccaacattacagagatggtttgcctgcctcatttggagtccttgggtaactctatgcctgtgtgcactgctgatgccccttcccatagaattgctgctgaagtccaacctcatgaagcagcaagctttgaagctagaaaacatgagtttttcaatggaatcaccaagcaatcttctggaattcttcctgttccgcgaactgatttgcatgcagatcctccaccttccccacctgctgctcccatgccaagaagaagtcgtcgtgttgcgtgtgttggagtggaatttaatttacatgacctaggagggagaactaccaggaaagt

SEQ ID NO: 20672 - DNA, 674 bp, Zea Mays
accgaccacgttcttaggtctactggtgggtagcgcacacgtgcgccatttcccatgtgcccgatcttcctttttgccaacctgacacacttcatcatcaatgagtcgtcgatcatggctggttagcagaatccagtagctaaactttccccacattttccatgcacacagttcccaaccgtatagcgatcgagctccaaacgacgacccggccgtcacctacgattaggtgtttttgtaggcatttcctaggcagcgccaggtcgggcagtagttgtagttgaccccgcccgccgtcgcgagtgcgctaccgatcggcgcccaagggttggtgtcgagcacagtcagcacctcgcgatgctccggcggcgatctcattgctcaccgggatctcattctttagcggcggcgtcgttgtcaggcacctgtctttacatacctcagaattgtctgagatttttcagtccacgagctgaatgcgtggagtatatagtagtggtgtggccggggcatctcttatgctgcgttttttttttctttttctcatctgctgtcactctcgtggatgctaatataatgactgccaaccccacaccagaaatggagtccgaatatgaactcgtgaggatatgcaacaacaaccgtcactctctgagagtgcgatcgcgatcgtg

SEQ ID NO: 20673 - DNA, 472 bp, Zea Mays
ggaagacgaagatgaaggggcccttcgacatgttgcccgcctgagtagcgggcgtgacttggttgaggaatttattgcctatcgagtgtggcccttggtgcatggctgggtattgggcgaagtgaccccctgtcggatgccaaccctgggcgaccagctggtacgatgtccaaccttcatagtggatttacacggtcgcaacacggccacgtttgtgcgtgaagtggaggccgaagtcgcggagattgtaggaaaatatgtgtcgaagacgaaaactctgaggagttgggatatccgcggttcaaatgttaggttgaaccgtttgccgtatgctggctacccgggggacgactatgccaatgttgttgttcgcaggaggaaaaaggcgatgacaacggccgacgagggcccttcatggggaacagcatcgggcacggccgctaagaataggaaattaggtactgcagctgag

SEQ ID NO: 20674 - DNA, 664 bp, Zea Mays
aacaatagcattaccaatattgctaatagtcatacctataccattggcagcaatgatctgatccgtgacggggtacttgtcatgcatcgtcaaacgatcgagatctccagtgatatgatccgtcgctccggtgtccgtgtaccaaggaacattggagccattttgatgagcgacagaattcgccgagcgctgatccggcacagttctcatcgaacatgtaccagcaatttagggccgtatggccaactcttgagcaaacttggcatcgtggccttgaggaggtatctgcatctgtagcgccagaagaaatgttgcctcgcccggacgactagaaaccaccccgagagggacccctgccgcggcctcggccacgagagaagccacagccaccagagcgccccaagacatgccgcgtccacgagacgccgcatttgccgaagactgcataggcgaggatgaactggtctggagatgcatcctattctcgtaactaaggagttgtgtatacatatcacctggagtaattggattcgaacgagccaccacagtagtgactagtggattgaaatcttcatcaagtacggtgaacagaaaagacacgaactcctcgccatcaaggggtttacccgcagcaacaagttcatcagcaaagccacgcatcttt

SEQ ID NO: 20675 - DNA, 822 bp, Zea Mays
gccgaaggagaccatcaccaagtctagcgaaggtgaactggtctggctgaagtatacattcagatatggggataaattcgatgaaccaaacgatgattggctaaaatgtatcgaagttacaagtgatgaactgctcggatcatattccaaggcagaagataatgcattatccacagccttcggaagtcgagaaaagaagagattgaacagagtttttgacgttattggcttcgtctaccccgactaccgctacccggtgcgggggcaagggaagaagaggaaagctgctgctctagccgcctcggctgaacctgtgccgaaggctgcggtcaaaaagatgaaggtacttacccatcggccacgttacattgaaccggccatggtgcctgagtttggtggggaggcctcttcagctgctgaatcaagagaaaccgcttctccaatgcagggggctgaagaaccgactataatgccgaaggcaccttcggttgagctagttgaaatgaaggttgacaaagataaggctgaaaggtcaacaactgaagaagtaacaaagatgccagggactttaagtccttcaacagaagcaacagcgctgaggacacaaaagagttctgccataactccgaggagaaggaggatggtaaatgtattagatgtactagaaacaaccaactccataagtttcactcccaaagggaaggttgccgaaggtgacaaaacgcaactcaaagctgatactaagcaaatagatgttgaagctacaacaacccaggctaaaaccaaggcagggccctcagtgcctgctgagacgaagcctgc

SEQ ID NO: 20676 - DNA, 319 bp, Zea Mays
accacacgtatactatacggccccgtatctgtatcctaccgatccgttcaggcaaatcaagggccgttccccccagcatttaaatcgacgggcgacgacgcggcggtgtcgatcccgctccatcgccgatcctctagaacaacggccaggggaagaaagtccacctccgaactgggacacctatttacttgccacgcagacttcgctctccctccattgaatgcgcttccctgccgctcgtgccaagctcaacgccgggacacgtggcaggcagggcacggcctgggatgcccgacgggagcttcagtggctggaccgc

SEQ ID NO: 20677 - DNA, 372 bp, Zea Mays
ccggagttgcagcccttctcttcttcgaaatagccaccttcggctcaggattggattttctctttttcagagcttcttcatcctctttcaccatcccagcagcctgtctgctcagaacactgacaaccctttttctctttggaccttcggcacccttgcttagtcgttcatagtcagggtattcaaagtttaaagcgtccattacccgattcaacctttgttttggtcgagtgccgaaagctgcagtcatcagcttttttggtataattacccaaaatttcgttgcacatagtttcaatcatttctagccactcttggcaaggctctttgaattgtttctcaaatttgaagcgatagggcaatcgaacaagt

SEQ ID NO: 20678 - DNA, 620 bp, Zea Mays
ggaggacgtgtcagatcggctgcgcgcctgcgcgggctagcagcgtggaaggacacaacacaaggccgggctggcgcacaacactagcagcgtggaaggacgttcttgcgatgctgggctggtgtggccgtgcggcagcgaggaccacacggagccgtggtttgggaaggatggaagggaggaacatgcactggagggttaatgctatatatgtgggtccaagtgcataagtaacggcgtcgattagtgaatggacggcgatggcatagaggaaaacaaagtctaaaactgatggcatagagggaatgctataatttccaatgacacataaggaattggtataatttctaatggcatagagggaattttctctaaaatgaatcagggggtgggtcacttttgactgccgaaggaacgctgtcggtcccgaggtggcaaacccgcttggtctcgggagtttgcacacgcagatttgtgaaatcatgacgcccatcgtgtgctgctcgtcttcgccatacgaccagcggcttgcctgtgctcgtgctcgtgctcccgagcaggatacaagcgctgtacgtactactatacaggacgggtggtcctcgttcgtatagcagtac

SEQ ID NO: 20679 - DNA, 1643 bp, Zea Mays
caaaataggcgctgcaacgtgaggtgtcaccatgaagtgggggaacggtatccagcacaacccgtctcctaggatgagacctctgaagtaggggaaacccccaacaaaagaacgctccgagaaagccgcaactcccatcgttgtgatcgtcaccgcgcccaggaacgtgagcaggatcaaggtgaacaaggcactaggctctgacgcgagaacccacttctcccttggaacctattccctgactttgttcgagcactaaatacgctaagtgaggtcggaggggtccgagctcaaattaccaacatcctaccacacaccccagatgcggagggctattgacaagtgctcacccaagcggcgaaccaccttctccccctcactcacccactgaatgatcagcgccactccatcaacaatcggcgagacgcacggagcaacattaacacttcacgcggtcgtcggaatgaagaagagatgaggcggcgagaagagtacgatcaggatcatggtgcgctatcacacaaccatgccaccaggactgagtcagcagtggcctccaccaacggtccagccccgggtcgatcgagacgacacaacgcccgacatcagtcgccttctcggtaccgttgacatgatcatcaccggaaggaccgagtgacatgtggtgtctccgcccataccccttggctccgagcaatccaatggccgccaaacttgtcaacatcgacacatacgagcccaagaaagacccaggtggctggttgggtgtctatacgactgccgcccaggccgctagggcgacagaagatgtcatgacagcgtacctgcccattgccctggggcaggatgcactaaaatggcctagcatctacctcgacactgcatcaatgattgggatgacttcagccgccattttgtcgtgaactttcaatctctttccgacaaactggcacagccttgagacctcaagtccatcaagcgccagagcgacgagacactccgcccgttccttaggcattttcagaagatgaggaaccacatccctaatgtcatggaggtagctgtgatcaaggacttctaccgtggatccaatgactcagccttcatccgagccatcctctaaaaggcactcgccaccattgaacaactgttctgagaggcggacatctaaatcaccgtcgatgagtgagcctaggacctcatcgggggcatgaagcctgcacccccagcgccaaagaaagacataaaccagcaataggacaagtgttgggataagaggcatcaggaagaagtacacgccgttgggccaccggctgcttggccccgcgacacgccacgcggcggtatacggacactggacgagatccttgactcccagtgtctgtaccacaaggagatccgccacaccctgtgaaactttcaggacttcaagaactcagttggccacgaccgaccgttctagccgctactgcctccccaccgcaaagatagcctgccaagcagggccaactgcagcaacaaggcgggggcggggcggtggtggagccttctcacggattgacaaggaggttaacattatcttcggcggccatggggcccaagagaacaagaggcaacagaagctcaccaatcggtaggtcctg

SEQ ID NO: 20680 - DNA, 398 bp, Zea Mays
ttagcaagcagaaccttggcttctgttatctccaaggcagtaggagactcaatccaactcgaagtgcgcacatccggctgtctccctgaccgagggggagggacttgccatggttttccacaataaacactctaaacgccatcctttaatgttgtccttaagtgtgatatcaaggtattctgttttcctcccacggcgcatctccagacttgcatcgcccacgagctggtgctgcccccagccatcccaacacgacagtgatacaagtacttccacaaaccgaagtgaggaagaattccgaggtaggcctcgcacagatgaacaaagatagaaatttgtagaatagaattgggattcatatgagtcagattcagattataaaagtcaaggagaccgcg

SEQ ID NO: 20681 - DNA, 616 bp, Zea Mays
tcactacacaaaatttggcacaaattgccctcaaaagagctctgtcagtcgttctgaaggttaatcgcgatggtacagtgccctgaacaagatcgctggtgcagcgcacgttaccgccggtgaccgtgagcccagatccacgtcgccgttgtgattcgtgctcaccgttgaccggataacgctcctaggtaaaagatcttcgcttagggataaccccggtggctggccgtcgtacccccttgccttgcggccggcgcagataagctcaccggcattggctgcctgccgatcatatgccacgtgtattgagacttcaccacgtcgcagtaggctgctttacattgcggactcatcaccggcgaacctgctacggtgaaggacacatagctattgcgctagtactcttccctacctccgaccgccagcacgccatgaccaaattgagagccaccgctttgagatactataaactgagcacacctctagctccgttaaggcatcacgaagccaaagcatccgctattgcctccgattagccaccagagagctccaatttccttttctccccaaatcagttttccgcgctcgtaagcacctcatcgtggcctgacgcttg

SEQ ID NO: 20682 - DNA, 434 bp, Zea Mays
tggcgggaggtggtgttggaggggctttcttcttccgcttagtctggcatccttggctcttggtcttcttttggattttcttcgtgggtgcgagcttctttagcttcttatcgtaatccatcttcagggttcggtaggcttcacgagtgttggcctcctcgccttctgctacatcgacacactcttggagggatgccttctcctttttaagttccttgacctgctgctctaagctttccacctgggagtttaggtgggtgcagtggaaggagaggtcatcatagtggttatcgagagtgtggagatatccagccttgtagacgatggtggggtcatcctcattaggatctctccctgacagggcctgaagtcttttcctccaggtgggggtatttttgttgctgggtgggaagtaacaaaggggggtttcaaaa

SEQ ID NO: 20683 - DNA, 596 bp, Zea Mays
ggtcgatccaccaaacggggtcatgcaccccttgggcataatgccatgtaatggtccctcggttggccggaggcggtctcggccgaatcccatggcgttatacgtggcgaagtagaggatgttgagcccactacttccatctatgagcactttggacaatcgtatcatgccagcgatgggtttcatgataagcgggtatcagcctgtccggggaaggtgcttagggcggtcggaccggtcgaaagcaatggcatgttcagacattctgaggaaggttggggctattaatcaggcattgaatgcctcccatcactcaagtttccagtgtctcttccaagtgtagtggtcataccccccccccccccaatgaacagcacacaatcggtttttacgagaaaacggggtctcttctccttagctcttcgtccttttgaggctcagacccctcccgggcggcgtatcctagtttaggaacttactaagcaacctgcaatccttgtagatgtgtcgaaccgggtgtcggtggttcaggcacggggttttaaggagcttctcgaaagggtcggtggcctcctcagttggagccctccttctcc

SEQ ID NO: 20684 - DNA, 462 bp, Zea Mays
aaagatcttagcgctcggattggctcggacccggtcgacggtgagctcgtcgtacccacttggattgcggctggccgggatgatcctcaccggcgttagccgcttaacgatcatgtgccacgcatcttggaagcttagcacgtcgcagtgaacctgtgtggcaagcccgtccatcaccagaggacttgccacggtgaaagccacgaatcccttgcgccagtaaccttccttctcttcggccgctagcacgccattccaaaattaggagccaccgcccttggactctataaattgagcacaccactagctccattaggtaatcatgaagccagagtacccgctccagcctccgattagccaccatagctctctaattcctcttttcccccaaatcgggtttccgcgcctccgtgaacgccgcgccgtggccagccttctgcaggtccgttcacgccctcctcg

SEQ ID NO: 20685 - DNA, 555 bp, Zea Mays
atcctccgtgtgaagcaacttcgctgtggatttgagattcatagaagtgttcagtataactccaccttattctctattttaccgccaactaggccccacatgtcagatcttcattttctctttcttccttccattatccttctctcttcttcgacccatgcattatcttcctaccgagggagcgggtggcaatgcatgccgggcacgacggcgggtgcgaccatggttccgtggcgtcgttgtggtggctaatagtgcagtgcttcacagtgtcacaatggccgtgccgtcggcacgtttggccatctatacatatacatgggcccgtactccgccatccaatcaactgctggtcgtcggccgagtgccaggctgcccgattactcccgcgcgcgtccagactgccacgagctactgataggggcgctgcgaaagctcgatgcaattgcaacgcatgggcgcttgcagctcgtccacttgcggcgatcgactccgagcgggaagtggcggcgctgttccgcgacagtcagccgggccgagggagaatatgcatgt

SEQ ID NO: 20686 - DNA, 276 bp, Zea Mays
aaccacttcatctttggagccgattgatgggtaccacaaataccttcatgtacttcggccatggctaatatagcatcacttgggcccaagcatttaagcaggatgtcgtcgactgttcggcggtaaagttcatcactcattaaaacatacttgaaagttgtacgccgaatgttcttatccgtcttaacactgggattacgtaaataattaattatgggtgttctccaatcacttgcatcggcttcattatcagccgaatcaattagaagaactttc

SEQ ID NO: 20687 - DNA, 600 bp, Zea Mays
gtcgccaacccgttcctggccgtgtgcagacgacgtggttgggggcctgtttccataaaagctggtgagtatccactcacctagtccctcgcctccctcgcgttcttattcatttaacagtaattggggaggattgccgtagcgatttggggcctggcgagctcgtcggtgttcgcctgggcgcgggattagtttaccgccgtggggctcgcttgaccgcggcgtggtacgggaagaagaacggcgcggggctctgcggaactatctgggggatttcagggctcgggttagtcacgagcggggtcggcgtggtggcgttagcgccgaaccggagttagaagacgatgttgttgccgtcgatggtaaagtcaacggcccagatggttgcagcgtgataagcgtagccggatgggggcccggaaccgtagatcggctcacggacggtcttgatcagatttagtgcaccgtttcatgtgattttgcgcagaccgtagatccctggctatgcggatccgatgtaatcgcgcatgcccacgtcgtatgtgtgatcctggtggccgatggctaatcagacggccccaggcactccataccccttcg

SEQ ID NO: 20688 - DNA, 532 bp, Zea Mays
caaattatcaaaatttacacttatgttatgtgatgattgattgggacacctttaagaaatttatgagatcaaaataagcaagatattcaaggtcatttttaattagtcaataaatagttatgatgttacaagcctactcttcatatcttcaggtacattctcaaaccatccttgctccctgtcaggaataaaaagatggattgctatttattatttctttaatgttcctctagagaattggttgaaaatgacgtgtacattgggaaactttgtcatgcaccatatagcactttgcacggtccattagctcacgattcaaatacatgaatgggatccaattgcttgttggttagggaatcttgaggggttgtcggaattggtgttagcacttggcaaaataatggtgcagagttgggtttgcgttgcgtgtggtgctggtttacgctgcctagttcaaaataacaaacatgactagtccatttggtgcatgctgagcgagccatgctgaacctggttgatccctggaagctgc

SEQ ID NO: 20689 - DNA, 392 bp, Zea Mays
ccgtgactgataatttaaagagaggttatctgcctctccggctttgtgcacatttaggtggcgttagttggaggattagaggctgtattaacactgtattatgagtccgttgagaagtccccgtcttacgcgtccaccttcttgcgatataaaaagttcatcctaactaacttcaatattattgctatttttttccctttctttgcagctctctcttggtgcacacccacctgtaaaggtctagtgctcttttaaactcactgatgcccctgcatatgtgtaacgctgaagaaacgctattaggcacagctcacgagtcaaatcaaattcagtcatcccatcttggaagcattgtgaagttcgagtacacaggaaacagcatttcaagttca

SEQ ID NO: 20690 - DNA, 1066 bp, Zea Mays
ttcccatgtagctgcagaaactggctcgcccttctagcgcaccagctccttttgcacgccacgagccacttggtagcgcaccgcaagctctggagcaggcaccaacaccccattgtgcacctcgggcagcggaggaggaacgtctggtggcgcgcccacccattttttaagaggtcgacatggaagacatcatggagcttggcctgggccggtagttccagccgtacaactacctcattgatcatttctgagatgcggtatggactgaagaagcgaggctagagcttccccttcgacgcctgggacagagaagcaatcgactgattgcgcagccgcagcaggacccagtcacccacggcatatgtgactggtctgtgggacttgtcgtagtggcgcttctgcactgcttgagcttgttccaagtggttgtggacctcggccaggaactcctcgcgctctgccatcatcttggcgaccatagccaccttagtgtcgcccgcctcatatgatcggatggatggcgggtcgcggccgtagaccacctgaatggagtgtcgcagagtgaagactggtaggcagtgttgtaggtgtactcggcccacggcagtcaacaaagccactcgcgcaggcgatctccggtgaagcagcgcaagtacgtgccgatgacgcagttagcagcctccgtctagccatccaattgcggatggaatgccaagaaattgtgttgcctaatggccgttacgcgcatcagcttgctccagaaggtagacatgaagttgggatcccggtccgagacgatcgactggggcacgccatggaggcggacaatgtcggaaaagaatgtctgggccactgattcagcagtgtatgggtgagctaaggcaatgaaatgacaatacttgctgaagtgatccaccatagtgaggatgacggatttcccgcgaacacgtggtagtgcctcgatgaagtccatgccgatgtctgtccagacacccaacggaattggtagcggcagcaggaggccgcccaagtggaggtgctcggtcttgcatcgttgacaggtgga

SEQ ID NO: 20691 - DNA, 304 bp, Zea Mays
ctcgaaactacagtggctgttcaagcagccttgcctaccgggaatatggcaagtacgcacgcctgcatacctaaatgacaggccaatcttggaccgcatgatgatgctattgctatatatgcatggtactccgatctctgcgtgtatctcctttcaaccgtcggttccactgcacgcactcaactcaggctcttccacacgtcgcttcgtctgccggtgcgcggccttcgaccacatccagccgcccacctgtcgatcgcactgtcgtccgtccgcctgattgatggacgtaccaacaaatcgc

SEQ ID NO: 20692 - DNA, 891 bp, Zea Mays
ctagggtgttgaggcgatcttctctagctccacctggaacgatgctggtctagttctctccaccaatacagagaggaagatgtctgtacttcgtgttgtgcagctgctgccggtaggtgtggctgagagaccacagtgtttgcctagcagcgtcgttgaccgaagcagtgtaggtggatagcggcgttagagactcatgcgttgacagagtcatgaaccctctatcacctgcatccatcaccctgacatgaatgcgagtgatgtagtagcaagccctaggaggctcgtacactcgccatgtctcgtacaggggtcggacgtaggtttccaatgcgtgcagcacgtcttacagcaggttagggaagtgctctgtctcgaacattgaggtgtaatgttcagtgataggccataaccccacgtagtggtcctgctgttcttcattggattcttcgttgacgttctcctcatcatcttcttcgtcgtcgtcatcttcatcatcgtccccagagtcgtccgggtcgtcgcctccgggagcaggagcttgaacaactggtgccggcggtgctgaggttgatgatctagctgcgaaggctagtgattctgccaatggggtgggcgtaggcagaagttcctccgagctgtcctccaagatgactccacgctccactcgaatgcaagggagatccacaggaatttccacaactacctctgggtagacaggaacttgccatggcggagggatgaagttggtgttgatccgagtggtttgaatggtacggaccatctataagagaaaatgtcaacttagttgatgtttaaagaggtaaccttaataaaataattttgtaaggacaaaaatagcatgttttaataaactaggttttccatttc

SEQ ID NO: 20693 - DNA, 333 bp, Zea Mays
cccgttggccgagtccctagccttcgcagctgggtcatcaacgtcagcatcgtcggcaccagcctttcaagcacctgcacctggaggcgacgaccccgatgactccggagacagcgatgacgaggatgacgacgacgatgatggagaggatgagcacgtcaaccaggaagctgactacgcccagcaggaccacttcatggggattggtccagttgtcgaacattacacatcaatgttcgagacaggacacttccccaacctgctgcaagcagtgctgcacgagctaggagcctacgtccgccccctgtacgagacgaggcgagtgagagagcc

SEQ ID NO: 20694 - DNA, 361 bp, Zea Mays
gtttgaactggcctgcagagggctagccacagtgaagtgttcacggtggcgtggaaaacgtatttgggggaaacacaaaattgggaggctctagtggatgatccgaggcaagggcttgtgcgttggatgcgtaattacctagcagaactcacggggcagcaatttatagagtcctacggcggtggcgtctaattttgagaaggcacgttggcggccgaagagaggagaaatcactggcgcaagcgctatcgtggcttttatcggggcagtgtctcaggcgatgaacaagctacctaaggcggtctactgcgacgtggtaaggctttgaggcacgtagcctggccggataacagtgaactcc

SEQ ID NO: 20695 - DNA, 663 bp, Zea Mays
cttcctgtgatggttcgaggctatgtccctaagcatgtctggctagcgcttacagagttgagctatttcttctgacaactttgtggaaaagaattatcttggaccatgattgcagacttggaaagattgacacccgtgttactgtgtaagcttgagaagatatttccacccgacttcttcaatccaatgcaacattttattcttcatctcccatatgaggcatgaatggggggcgtgcagggacgttggtgctatccaatcgagagatgtctaaagactattcaaaataaatgtagaaataaatgcaaaatcgaggtttccattgcagaggcatacattctataggaggtgtcaaacttcacaacaacttactatggtgacaaactgccgagcgtgcataatccaccccctcgttacaatgatgatggaaatgaatcgaacctcagcatatttcgaggccaactcaaaagcgtaagtggttcgtccaccaagaccctgagacatgaagagtgccaccatatcatgctatatgtattgaccaactatgaagaggtgatgtcatacatggaacaatttcttcatgaattctggcgttgatcaagggaccgaactccacaggaatatgatacccttcttagaaagagtgcatgaaatggattgccc

SEQ ID NO: 20696 - DNA, 813 bp, Zea Mays
gggcgggacttcgttcacgtgtggccgagctcgccttcgctcagggatcctaggtatgcactcccgctcgatttgcgattacctagaagccacgtagcatcgatcgggctagactatagatgaccggagcccttagaattgctcgccggagtggatgttgaacgcggaaccgctgcgcctgtgggtagactgcctccgtcgcctcggacctccgattgaatgcacccccaggctagctattttctctggtccaatttggtgtaatcgacgtggggtttagggtcaccaggcgcgttttcgttctctcgccggcgtgccccgccgcgaggacttgcgtcgccgccgtggtcaggatcgagtgagagagagagaagtgcacgaccatagattttggagtttacggctgggattggatctgggaaaggatggctcgggaccgttggtggttagatgggggtcgtgatcatatctcgccttaatgaagtctgtgccgtcgatgtttgatcctacggcgtgcgttgcgtaccgattagagtgtcaacctaatctaatcctggccgcccagatcagaccgtgcggctacgatacaacgataccccttcggccgggtttcttgcataagagaccttgttctttattggaatcaacccgcagtcctgcgtagggcgaactgtgtcttggaaatatttacaacgtgacccctgcgcttctcagtttttatgcgctcggcccagagaattgagaatttaggaaattgatttttaactcaagaacaattctagaatcttgtaaaatgtatataaaattcatttt

SEQ ID NO: 20697 - DNA, 637 bp, Zea Mays
ggacttcgaccgtagaattttctaggtcgaagatgatgtgttgaaacggttcgttggggcgctttatgacaggatgtggggtcctcattgtcttggcactgtccgagagagggccgatcgagcattggtgcaggtttttttgactgaattgttttgttggcttcacagatgatgaatgaagaagttaacgatctcgccggtcttgagagctcgatgactcggatgggtggcgcggaggaggcaggagttgaagggcactcaacacctcaggctggttccggtgaagaccctacggcggcatgtactccggcgcaggggtgaagaaatgtgctaggaattttaggttttaggtgatttactttttgtgatactgaaggtcggttgctgcgcaggttccgacgtcctggcctgcgcaagcaaaccctgatgatgttgatactaatgttttgacggctgcaaatgcaatgtctcttaatggaaatgtgtctgaggggtctgagcttgggtcatggtcctaggacggggaggaatttgggagtcctttctcgtgggttgaggaatcttctgaggaggacttagattattttgctgcgctagatttggccgcgtcggagtatctgctacgatctgctcctcg

SEQ ID NO: 20698 - DNA, 1066 bp, Zea Mays
ctgcacaggccgacgacgacgacatccggtggcacagctggggatgccgacggtggctacgacgtgcggcggtgttgcatgtgcgacagggtcaagttcggctcctatggggcggcaggacaaggacaatgacgacgacggtggtggcagacaaggggtggtcagcatcatggctcaacgtttgtggtagggacaccttgcacaaaagccttggcgacgatgaagcctgtagatgccactttccctattgagggtgtcgtgcttattcccctctagcattgtctttcaaggctaaaaacccaatccactctttggacaagtgacggtgacgctattggcagtgtgctcttcctgaaggcgtcattgttggaaatccgccttcttggtacttggttcacatgtggaggtgggtcttgcggcatgaagttggagctgctgcttcaagggatgtggctcaacaacagggtgaaccttccactgcatgtgaggtttggcagccgcgggggtggggtgttgcttcgagataggaagtcgtaactactcttcatgactaattcatcagtctaatgttaatacatagaaaaatcattgacagtatcagatacctttgaggtaacaatctcagcagttgcaatcttcgcgattttccggaggaactcgctctcggcgtcagagtgatcgagagccctgactgcagatgccatgacaagaaaaaccccagccatgttgccaaaccgctgcattccacaaaacaaaaataattcaagcagacaggtaatcaaataaacgaacaagcatttttcatatcagaggaccatgaacgcacccgacgtccgccacgggagacggtggcgcagcagtcgaggatgagcatcgggttcctgcacccaacaagcaacgaatttcacggagccgcttcacacgggagtgaaatatactctaacaggatgatggaagggaacgggcgcacggaagaacggatccttacaacggcgcgatgtcgcggagggcagcgagcgcggcgtcacgggcgactggggagtcatcggcgagcgaggcgacgagc

SEQ ID NO: 20699 - DNA, 646 bp, Zea Mays
gttgtctaatcctttcctgcatattggtctctgccttttagctgtgaggacctccctttgcttctggagatggttagttttgatgcgtagggctcgcagtttaagctggtcttctgctaaaattcttaggtctttgccctcttgaaggatgtctccgtctccttcggttgggaggtatccaatgggagcaaacctcgacggggggtcgtcgtgtgggaggtatttgaagctgcttgtgtggacgttgccttccagggtaggcaggtcttcggtctgagggtgcttgttgttgactgcctcagtttcgttgttctcaaatgtggtgagcggggtgtcttctgcgagggttgctttgtctttcttatcaatgagggttgtcttcatagcctcgtctagggagcagctagctctggtggtcactttcttgggatccattgcaggtgttggacttcggagcacgaatggtgggcaccaaatgttggacctgcttgacatgtggttaggtgggcccgatcaatcagagacaagtggaactcagatgcaagacaaaacgttaggtagggaactataatgtctcattctatgtgccccgtcccactacgggacaagggtatttatagggccgttcagggataggtgacccaaa

SEQ ID NO: 20700 - DNA, 550 bp, Zea Mays
ccctagggaaggtagtgtgggcagggcttcctccttcaggtcagtctagcatccttggctcttgaaacactttcggatgttcttgacaggggcgagcttcttcagcctcctagcatagtccatcttcagggtccggtatgcctcacgagtgttggcttcctcgccttctgccatctcgagactgtcttaaagagcgaccttttcctccttcaattccttgatttgctgctctaggctttccacctaggagtttaggtgggtgcagtgggagaaaaggtcgtcaaagtggttgtcaagggtgtggagatatccggccatgtagattacggtagggtcatcttcattatgatctcttcctgacaaagcctggagtcttttcctccaagtaggggtatttttgttgctgggtggaaagtagtggaggggggtctcagagacttccctgttgtagttttggcatagctggtggatggctttttgggcagcattctggcaggtatctgggaagcggtggccagtagcggtgatctgaaagggagggtgattcggg

SEQ ID NO: 20701 - DNA, 442 bp, Zea Mays
cttcttcctgtgtagatgcctaccctgagaggtcatactacggtggacctgaacacatatgcccatactgccatgctgttttctgattccaagagcgtgttaaaaacgattcctgctccacctagaggaaaattgtgtacaacctttgctgcaaaggagggaaagtgaacctaaaaccatttgagcgtctgtcgcctttgcttgctaatcttttgagatttgatggaggtactcgctcgaggcgtttcttgaggcttatccgtttctacaattcattgtttggattcacctctttcggtgtagctattgacaaaacgataaataacgacactacaccttacattttcaaaattaatggggtggtgcaccataagattggcaccctacttccacaacgtgggacacaaccaaaatttgcccatctgtacacatatgacacgga

SEQ ID NO: 20702 - DNA, 515 bp, Zea Mays
caacacacgaggcggtagtcttccagccatacaccgaggttagtggatccgtcgtacttagagatgtttgctggcgcgcctaccttttgggggaactacgccttcctgatttctcgcccaaaagcgcgtagtatcgacctaggtgggttggggctacgctcgtgccatgttttgcacggctgctcaacttcctcctgctcccgacgcctgttgtcgaggatgcgtcgggcgtcgcagatatccccaaggcggtccttcatggggacacacgtactcacggatcatgagggttgtcctcccctgctctaagacgagaccatttttgggtcgtagctctcggtcccaagggggaactatcgatcaatctcggcttgctgcacatcggccctttccacgaagttatggaggtttcggtacatcattttgcctctggtttgctgagctctgggatggattagagaatcatggtgttgcgaggcactgtcgcaactttcagcaagctggtcacatacctt

SEQ ID NO: 20703 - DNA, 638 bp, Zea Mays
atcagctgcgcaaagatgtgacagaggtaatgagcatatggtagctgacggcgagcatggagaccatccaatattgtgtcctggatctcacaaattaggaagtcaaccacgtcgaactctaaatgtgagaccaaggcaccaagtagccattgctgaatgtgagtggtggcctctctgtatcccatcctgggtagtagtgtacgtctcatcagctcatattggaacttcgttgcagtagtgaagtcagcaggagatcgtcgcgacccatctgtgaaaggaggtctgaacagggctgcgacgtgagctgtagcgggtgcaactctgccgtgagggcgacgaggaggatccgaagtgccgtagcacagactgtgaagcctagtcgacgactctggaaatccaaaaagctaacggatctgactggcatgcaaagtgacatcctctcgctcgaaacggaatcacatccactgatggtcagggtcaatccatacggtagcatagaacactctgacccactcctcacctgccactcgcggtcaacagtgaaagcagtcctggaagataggtaagatgaccctctgaatcggaaccaacggctagcagaaaagcaggtaaatccagaagccggtgcgctcgcaaag

SEQ ID NO: 20704 - DNA, 412 bp, Zea Mays
ctggacagcgcgccaaataataaaaagctcggggtctaacctgtaaaaattccctagactcggtctctctcgagtgcggatcgcgggttgttttaaggattttagaggggctctttagcaaagctcgctcggtgaaagggtattacgagatctgggccgcaagatgatcaatcaatggtgtagattagatggatccaccaagaaatcctggccctcggatccctgatgggtggttcggatttaaaatgactagatcgaaccgcgcccgccagatccgaatcgaacgccacagattgacttggacgaaccggtagctagggtcaaatcttgaccgcccatccagatcaaacaaccagggcatcatcttcaccccccaactgtacacggcagcgccgccctttccacacccgcc

SEQ ID NO: 20705 - DNA, 423 bp, Zea Mays
ttataaacacatcctggtcttcattggctgagttggtgtcccatgggtttcctagtcccactgggcctgctcatcgaagatgatgtcccttgaaacatggacgcgctcggtgatggggtcgtaggcgtggtacaccttcatgccttcttcatagccgatgaagatcatcttccttcctcgatcctccagcttcttcaaatgaggtacagtgttgcggatgtagacgatgcaaccgaacgtcttgaggtggtgcactgccggcttcttgccgtgccacgcctcaaatggagtcatcccatatacactcttggttgggcacctgttcaaaacatacacaactgtttttaccgcctctccccaaaaccagccagggagtttctttgccttgagcatactcattgttgttgctataatagtcccatt

SEQ ID NO: 20706 - DNA, 347 bp, Zea Mays
tttaacaggtgcctgaatcacctcaagttttgtacaaaaattttagagtgtagatcaaggaaaatatctcgtactctgaccaaggtccgatatcaaggggaaaatgccaaaaatggccacccaatgtcaacacttttccacctgccaccagctagagctgtctgacatgtccaaagctcctactttataactggcagcacctgccctctcccttctcccaaacccatgccacctctcctccctccactatgttcaatgcagagagcagccatccatggctcagcagcagaccgacgctcctccctatcctccctagcgctcagtagcaggaagcatcgataaccttc

SEQ ID NO: 20707 - DNA, 372 bp, Zea Mays
cagccgtttagtatctatctccaaccatgcgctgatcacggaacagaactgcggccgttcgtaacagaatgcgtatcaacagtgcggacttgttccctgtccatataaggatggccgtgatccctcttgttccatcgagccgcttaggaagagaacaagacccgtcgccgagagcgccataccaggagccgatccctgtgagtagagagaaagtagtggcaaatgtcgcttgtgtctacggcaacattcgggtcctagaagttggcgttcgtctgtgtgcagcgtgtacatggatgggctcgggatccttctgggcacgggggcggcgtgcaccagaactttacgccatggcggagccaccacccatctgca

SEQ ID NO: 20708 - DNA, 510 bp, Zea Mays
aaccgtccatgaagttcgtcgtcctctcttcatcgcgtaggggcgtctggtgtgcggtttgggggcccgattggccgtatggctcatcactgccatgtcgccgccgcgacgccgcgggcagcgccgctcgggccgccgcgcgtttggggaggatggggtgcaaccgttgatgcggggattaacagtcgagatctgatctgggtaccggttcgcgacgatgcaaccgtggcagttcgatccggatctggcgcatggaaaacagtttggacattttaaatctgtgcggtcgagcgctgatccaacggccagtggtgcataccggttcggattgatctgtgtctaatctgggccgtccggtttctatcgtgtggcccaggatcgactataccccttcgccctggctttctttctaaagagcccctgcactttccagaaattggcgcgcagtccagagagtagtaaaattagagaattaattttggaagttgatttttaatacataaataattc

SEQ ID NO: 20709 - DNA, 499 bp, Zea Mays
gccacaccaccaaccccaaccattacctaaacactcagggccattaacttcaatgctcactatttgattagaaaatattcaactcgcgatattgatgtcattagataattgatagtggatgtacccaacatttgaccaatgaccctcgaatgtttaccttactcaataaagaaatggatgattaagagaagataacctttggggataattgaaggagcaaagtaaaatggttgagcaaagtggcaatctccaatagtaactcaatatcaaatgtcctcttggttgcatcacttagtttgaacttactatatgttggtcaattgtgtggtaatggctaccaatgcctattcaaggagaacgggaatgttgtatctagaaaggatgataaccgggtcactgcaacaatctatatttagtggacttcattcggatgatgcaaacttaaagacatgtctattcaccaaaacttcacttgggtggtttgggcatagaaggctag

SEQ ID NO: 20710 - DNA, 589 bp, Zea Mays
caccaatacaaattgattcggccggtggaaaggtcctaaccaatagaatatgcttgaatgtaagtgtggaaataaggggggtatagttccccgctaacctgatagtgatggcactcagggaatacatgttatcctagggataaattggctagataagtaccaagcagttatcggatgtgataagaggacggtgaagttggtgtacccattaggagatgaagtggtgactaagcttgtctcccctaagtcaagaaaagaaggttgccaccagatgactattgttagcaaggaggccgatccactcgaggcaatcaaggttgtgtcagaatttccggaggtgttccctaaagatttacaaggtatgccacctgagtggaaagttgagtttgccatagagcttattcctgacactgcccccatttccaaaagagcctacagggtatctggaccataattgatggagctcaaaaagcagatagatgagatgtcagagaaatgttacatcagaccaagtacctcatcttgggctgctcctgtcttgttcgtggagaagaaagatggcaccaagaggatgtgcatcgactacaga

SEQ ID NO: 20711 - DNA, 395 bp, Zea Mays
ctacagttaacaacttccttccccaaaacgtgctatgcgcagatagaaacaaagcgaaacggattctgggtcacttaccacaatgctcgcagaggggacgacgatccacgacgacaggcggaatctcgacggcggcggaatcctggcgagaaattcaccgagctctgccaccgcattcgtaattctggcggtagcagaaggttcgcgatgacccaacgatgatcggctacctcacatcactccacctcttcgtatgaatccctcacctctccctgtactttgctggcactggtggctgcggcagatctcccattccactctctctcattgcttggtgcatccgtatggttgatgcgggtgtcacacccggatttcaggggcaccaagacccgggc

SEQ ID NO: 20712 - DNA, 425 bp, Zea Mays
ctgtgctcgagccgtcccctcacccccgcctgcccgagccatcgcaatcggcgttagcgccattcttgccatcattgcgagctcgccggtgctcgccgtctcctccatccccctcccttcctcgagcgcctataaaaggacccgaccgagccccgtcttcaccacacagcttcggccacctccactgccttcttccccgagccattcgagcttgcgccgccgtgctcccttcatcgctccggtgagctccctttcccccctctagcgatcctctatccaattgaactatgccagaagctccgccacactctcacggtcacagggcgccacctccccccctctattgtggccggcaacctcaccggcggcataaccgccgtgggcacccgccatcgtgtcgcggaccggccgccataggtccccgc

SEQ ID NO: 20713 - DNA, 1273 bp, Zea Mays
cgaggaaggtgcacattctggatcttcttcctgcgctcaaccacttgccaaccaaactcgtcccgatgcagtgccacaggctgactctgcaccaccgaggacacaccgaccttctccttctccttcacagcctctggagctcttgagcttgtcgcggtatgagaaggagcctggattggggtaaggaggcgcctagagccagacacgagggcatctttaaaggagcaaggcgcccgggaagaaccaccagacgaggagtcatgatcagcgtcactccaacgttgtgtctttgaacgcccaccttgtcgagctcggtagctgaaaggtccttcgccttgagaggtacgcagggaggttgttgggggtggtcgccgagtccggagtggaggtcagcaagaagccttggctacggttgagaattgggaggtgaggggttggagatggccggaagtggaacatggtgggggggaggggggtggagaaaccatttgggccaccaatcgttcactgcgatctcaagccaagcaacaccatcgttgaaccaataatatgtgaatatgttatcaagcactgcaacaaggattgctatttccctaaaaaacaaacaaacaaggactgctatcctgctgcttttctcattccattctgaactgatattatcctaccacttttctctttccattctaacttcagtctctgataaccactgattgtttatcatcttttttatcattcatttttatacgcccaaatcttgttagccatttcttatgagatgggaatatcttttggtttacttgcagcttaattccatgatggatcttggaagcgatgttcaagttcgtgctgctggaggtctcctagcaatattagacaatgagagacttcttgacaccattgagcagatggaaggtggagcatccattgcgatcgattctgtggtacagatctcattttatcctctgatggagataaattgaacacactgatgtgttgagatttaattatatcttctgtcatgggctgggcttatggccccagatggcagtatgccagatcagatccgaccttatatactgctgctgccctggccggccgcccgtacccaacagattgcccatgacaactttcagtggcagtctagtttgtaatcaacaaaattatatacataatttatttcctactttcaaggatatagttactctcacgtgtgtatctctagatttatggtgtatatggtccgacgaagtgtatatagacggagtatatgatc

SEQ ID NO: 20714 - DNA, 390 bp, Zea Mays
agatggaagatcggaagcgcaagattggtggaccgcaagccgggagcagcagccgtccccgtttctcagacaacccaccctagctgttcaagtagagtcaccatcagagatatcagcatcagagtcagcgtccacatcaacagcaattccagagacagtcccctcagaagcaacaaccgaagtaccgcaagcacagtcaactaggaggaagtcagtaccagaggcagagcagtgaggcaccttgccttcttgccccagcaaccaagcaacaccagcacaaggaggagaccgaggatgcttccattgtggagagcaaggtcactgggcgatgcaatgcctgaagaaagcagctcaacaatagtcagttttcaacaccccagcaagacaagg

SEQ ID NO: 20715 - DNA, 562 bp, Zea Mays
ccacctacgtatgctacctggacttttgactttaagaggtccggtgctaccacgtgtccaggcttgtgacaaagggacccgggctcatcctagttctttccagaccccagctaggggtggtccggatctaccacacctacatacactcatggatggttgctccctgctcgggtgaagaccaatgctgccacgtgtcttatggtgcgtgacgtaagctattggggagaacttgatgtaagcctctggcagaagtgggccacctacgttaaaggctagtagagtgcgtggttgttcacaccagtgataggtggcacacacccaatgatgaatgtaggtggtgtgcgcagcccgcaaggcttgcaccgcatcagaagcccgcacgttaccaaggcaagaccattgactcaatgagccgcttgggagcccctcattatgagttctactgttcctcgcgttttatagaggcatgaagggacaggtggaggggacgagacgacactgtccgtattctcccaatgctcacctacgtcgcaacctatgttgtagcctttgcccacacgcg

SEQ ID NO: 20716 - DNA, 461 bp, Zea Mays
gatgaggctaactagattgaaagtgttcgttggcttgccggcagacatttctgtgtctaggttctcagcggttcttatggccagcagatcagagaacaaccaactactactactaagatgatacatcatcttgttctggtttcgaacaaacgtagaccgtgtcgcctcatcatagggagagtagaagtgtatatgatgatataatcgtagtgccttcatttgtcagggtaagcaaattcctcgaatgaaaggcatctacaggcttcctattgggagtctacctatgagcacgtcatagtcagtgaccaccgttggggatcgacatgttgaaagctactgcatgtacacaatcgaagcgtcattgtaacatccctgatgttacaagaactaaaacttgggcatgacatcatatccattaacatttcattatgtatgttacacctagagtgcatccactaggc

SEQ ID NO: 20717 - DNA, 616 bp, Zea Mays
caatcggtgggaattggaggaacatcgcagatttgttgttgcaaattgcatatagaatgatctgcttctaagactaacgaccattatccggatcaatatcaattgcataaaagaatgtaggatcctctatttgcttattcctcaaataattgcatagtgtttttgcatcattggattctaagtactttgtgcgctcacgcccaatctcattattgcaatccatctttgtaaatggcactttgtcggctcctccataaaactccttcatgaattcatacacctgggcaggcctcattccagcctcccgtatgtgcccaattagctttctatctgcttctataacacgtcgttgggaccttaggtttttcttcttatttggactagcaagataatgattgtgctccaatacaaccttttgcaccgaccaaatcccttctttactaacactgaactgaatacgagcaccgcatcctgtccttgtaacgcccttcgagggctcgacttttgcatatccttcacaactgcaaacgagatgtttctgatatacactaccatccgaccggtgccttgtcgtactctttctaatgctgaatccaagcacaccagcatagtcgtt

SEQ ID NO: 20718 - DNA, 462 bp, Zea Mays
ttcggtagtggatcgtgtttttagtttttactgtggttgaaggttgtcttggccctcatttcatggtggattggtggtgctggctggaaaataataggaagcaatttatgaaattagagtacccttcattttttaaagataatctgccttctcagaattcctttcgctttcattttacttcatggaagctataggatattagcaaaatgaacaccaaattatggagtgtatcctattcttacggcgacaggtactcaaatggttaaaccgcagtctgcagcccagttttcacttggatatgataaatttgaatggtcaaagattggaaaattactttccaatggtcaaagttgttcagctgacgctttattatttgtgcaataatgttgatagagcgacaaggacgagaagccatgtattttgtgtatttgcctcctgatgtaatttctacggatgtttctg

SEQ ID NO: 20719 - DNA, 356 bp, Zea Mays
gaaatagcagctgagttatattgggccgcgtcggccgttttggaaataacggccaagtgatgacatggcacgccagcgttttagaaataacagctgagtgatgactgggcacttttttagaaatggcgtctggtccgggaaaaccccatatgtactgcactgtcgcatgcctctgcattctgagccctagtcttgcttttctgcatccagaccttctttgctctcttgcgatattgcttccgctccgctcgccagcaagattgagatggcgcccaagtggaagactcagagttcatctgtcgcaatcattcctcccatcgatcccaacagccagttgccttttgcaggtaaccaca

SEQ ID NO: 20720 - DNA, 348 bp, Zea Mays
gacaatagtcgcttggcgacgggtgaagcaacacacgagatggcaaggcaagtacaattagtgtggcattagattgcgggctgtcggtgtcgtggatttcatagtgacgctcgccgcccggcgatgacttgcatagttccgtggcgagctttgtgatgcctctaaacctttagatatctaattccggaaggtgatgcggcgatgtgtgagaccgtattggtggtcgaacagttagatcattagtagagatggcaacggaaaaatctccgtctcgagtaggtctccatctccatcctcgcgaagaggcatttcttctcaatctccgttccccacggggataaatctctg

SEQ ID NO: 20721 - DNA, 634 bp, Zea Mays
cgtccatcggatcatccatggcccagaactaatcccctacctccctcgccgaagcacggtggcgccgtcctgaacgcgacggagcgacaccggcgaactccaatccggaaaacccgagcgccagactcaaattcgctcggcccccgcgagattgacgactcactgaactcaattccccatcaaattttggttgacctcgagtgtaggacccagtacacggtgtaccgcggcggcgccatggtcggccagtgctcccggggattcggctataccataccacaagtcgctagggaataacatggaggaagggaagacgaacacgatggggactcacttgtgactggccgaggtgcggtgatgcccgaccacggaagcacgcgagtacggcggagaaatcgagggagccacagggctcaatcccaaccagggcgactatgaatagctccctggcgaccacccgaagctccatggcccgagatgaacggctgtgaactaccttcccctctcaatttgtctttgcggcggcgatggacatcactggcggcgctactagggttctggcggcgagagagggcttgtgggctgggttctgcgaaggacggttgcagcacggatattatgcgacgcacgtcgg

SEQ ID NO: 20722 - DNA, 462 bp, Zea Mays
ctgaagtgtcacgacttagcacgctactatcttcaaaggattctatcatcaaggagttgcgcgcctcgaagaaacttgtcacacaggagttggaagtcgctcgtcacaacattaaggccttagaggatgaccgtgttgttatgaaagcaatgtgtgacaaagcgatggataaagctgttcgtgtcaggtgaatcctgatgaaaagacccggtgttgtggtgcctgaggatatcgttgctgacattctcgttgttcctgctggtgtaagcaaaccttcttcctctggtaatcccgctggcgaggtctcctacaagaatgctcctgcatggtgatttgcgtgatgaagacaaactttgatttgttcggataagaaacacttttcattgagttagtacttttatcaagatagtgtatcatagagttcatgtgtgcgtgatcgcgttatatttaaattgactgttc

SEQ ID NO: 20723 - DNA, 477 bp, Zea Mays
ttggaagaatagctaagtgggcctgcgagctaggagctcacgacattgagtttcggcctcacaccacaataaagacccaagcgctagttgacttcgtatcagagtggactaagcaacaactaccagataaccagataacccggagactgcagaagtatggcggatgtatttcgatggctcgctgaagctgcagggagcaggcgtagggatcctcttcattgcccctagaggtgaagaactcaaatatgctcttcagttgttattctcagcatccaataatgcagcagaatatgaagctctgatccatggattaaacattgtcatatcactgggcattaagaggttgatggtatacggagattcactggtggtcataagtcaggtaaataaagaatgggattgctcgaatgactctatgggaaagtactgcacagccgttcgaaaactggaagacaaatttgaagggctggaatttca

SEQ ID NO: 20724 - DNA, 361 bp, Zea Mays
ggtagcaccagtgtccgcaatccactcgggacccatcggcggagtcagagtgggagtctggaaggcagccagggcggtcgcgtcccaaccaaccagcccggacggtggagcagccggcggtgtgggccacgatgaagcggcaggcgtcgaggtccagggcgacggagaggcgaaggcgaaccccggcagcgaggtgaaccctggctgcgcaccagcgaacatggccgccgggggacgagcctcagaacctggcccctggaacggccacatggagatgcgtcgtgaccacgggtggtggaaagtgggccaaggcgcaccctgttggggtcccggcgtcgatgcgttgccacgggcaccaccg

SEQ ID NO: 20725 - DNA, 393 bp, Zea Mays
ctctcagctggtcgaacaaatcttctattctgggcaaggggtacttgttcttgattgtgacttcattcagagctcgataatcgatacacatccttctggtgccatctttcttctccacaaataggacaagggcggcccaaggcgaggtgcttggccggatgtgacctttctctgacagctcatcgatctgcttcttaagctcaaccaactctagtccagatactctgtaagctctcttaaagatgggggcggtgccaggaagaagctctatagcaaacttaactttccgctctggtggcatgcctggtaagtcctttgggaacacatctgggaactcggacacaaccttgataatctcaagtggatctgcttcactgctatcaacagccatct

SEQ ID NO: 20726 - DNA, 344 bp, Zea Mays
tatgaagctctatcgttgtagttgtgccacaccttaatttatatccgtcctctactgtgacaagagtcgctggttgccaccccattactatggaggaacatgttgttgctaagatctgggaagcacccaacattgaagagcaccaccggcgacagatagcatcacactgttgacagtgcagccacagccaatacggaggtctccaatggaaccaagaatactggagcaaagacatgcacaagagcagctaactttaccagccatgggaaacaaatttgggcagcagtgaagtactggtgatgctgatggagttgggagcagagagaaacgaggaagaaggaaac

SEQ ID NO: 20727 - DNA, 855 bp, Zea Mays
ttggtggccggtaccgctcttgtccgtggcagtgaggtcgccggagacagagcagacaaccaccaggggggtctggggtcaccgaagttggctggaactggtgaagagggtccggtgaactcactagcaggactctgggcgcgagaacgggaccggaggcgtgagaacggtggagggggcgctccaagtgggtcggggtaactccggcgaggaatcctggccgcggggagggggaatcgggcttgctaaggctcggactagctacggtgaggtaaggggaatgctatggaccgaagtaagagctctagatgaggctgaatcgatcgatcatcgcacgagcatggcgaaaaggagcggtcgaactccggtgagggcaaatcagctaaggcagggtagaattaagggaaaccgagcacgggagcgagtttctcacctcgggacagcgctcgggagggcttggcgtggcttctggcgggctggacggccgacacggcgggcgagaatcaccgacgagcataggaggtggcagtagagcgcgagagaggtcaagctttggcaaaatgaggcaggggacggagagcgggtgagggcggtgctcaaaaaggagctggggcacatgggtaggcgacgttgccggttttcttggcgtacacgcgaacgtgagtcagcggcggttgcagggaagacggggctaacaaggctggcccatggcggagagagagagtgcaaggtgaatggttcgtggcgctaacgggcggggcccacggaatagagagagcgggacgcgcgcgaggggagttggagccaacaggtcggccctaccgggcagagggagaaagggagggagagcgcgtg

SEQ ID NO: 20728 - DNA, 694 bp, Zea Mays
tgattttcgtagccactggatctgaagcgaacggtacagattagactcactattgtcgaattggtacgtgctcacggggggtcggattaaaggccaacggcctagatttaatgaatctgagactactcacacccctccgatacagatcctatggtcgcgttttactaccatgaatcgttattccgcttctaatgtaggccatcgatacaggatccaacggcccacgcggattctaaccgaatcgatatagcaaatccaatcatggccacacgatcccagatcgagggcccctagctcatcctctccaacacactgagcgcacggcggcgaacatcgccacggcggcgaggcattccggcgctacagtcctggtacactggctactatccaacctatggatcccctaaatagcaacagaccgatacgggaatcaaaaagcagggcagggttctcaccggagacctatgcagcaacgacaccacgaaggagagcgaaaccgaaggtgatccgccgcgcggaagagaaattcgtcacaaccagtgcacaatctctcccaccccatctatgagcaccccacaacaatcccagcgaatcacccggagccagcaatgcgacaatagcgacgacggcaaggtggaattttgttgacggccggtcgctggctttttccgcccacgacgagggaccagagaac

SEQ ID NO: 20729 - DNA, 679 bp, Zea Mays
gcctccacacataaacgagaaaggaacgccatgtgaagagatctctcaacgggatcatggccataatcgcgaagatttggagccaatccgcgcttgaacttgaccactctctgcgcagcctcgtgctcgacgctgtgcccaggcgctcgcccgtgcacaccccgagcaagtgtcagagccacccctcggccatgctcgcccgcgcccttaaagatcaccctcggatgcgccacacctcactcctcgcatacccccgctgaccagaccccgtccttagctccggcgagctctgcgcagcccgcccgagccacccgagcgccggccaccgcgaccagccttttctagagacccctagcctcacccgagcctctggatagcttccccgagaagccgtgaagcttctccaagcaaggattgaggccttgcctcaccggaacagcgagatcactgtcgccgaactttggccgctcgccaccgcacgtagaccgagctatcaggtgaaccattcttcaattcctcgcgcccatgcctttcctaacacctagtgaagttcactaaccgatttaattgaactctactgccctggataggccggagacctcgccgccgacgagctcccctgcctgtgcacgtggaccggcctaccccgaccatccccggcgacgatctgcacatcgac

SEQ ID NO: 20730 - DNA, 712 bp, Zea Mays
atccactgttgtgcggaagggtaggcgtgctagttcgatgagaggattgctgcgtagctgccgcccaaagcggagttggcattgctgcttgaagagcccccacgacaaggttcatcgtgctgaagcttggtgtaccatgttcgggcaatccctatcatgtgcgctgaccttcaaagaattgttcacatcgattgagccattggagggagtcttccttgtcatcaaataaggcaaatttgaggcgatggaagtgaggaactcctgcagttgaaggatgggggtgacactgatatatggttggggaggtggtggataatatggaatgggtgaaggtgaatgtggcatgggtagatgatggattgggaactgggtgctgatggctggtggcatgatggaggtgtaggcagcgacaaatgatgaggagatgggtggtgggatgggcacatcggttggcatcgaggtggggggtatgcctccataccctggcaagccataggagcagcttgccggaagggacgatgtcgatgatgcaggcggagtctccactgctgcaatgggtgaggacatggaggacatctgcgttgggaaagccccaagttggcgctggactttggaaagggcgtggtgatcgcctccaatgacaaggctgggcggcggacacgacactgtcgtcggcgttggaccccggtgttggggcgaaggctgaccgccc

SEQ ID NO: 20731 - DNA, 750 bp, Zea Mays
gcacaattgcggggctgagatctttccatttctccgtatcttgattcagcttcggccaccagaacctgcactcaaacttttgcctctttttgctacccacgccgagcacacaggaaacaagcaagcaagcagcctcctatccaaactgagacaaattaagtcaactgacaattcttcagttacctacaactgaacttacaccaccgaactaaacttgtatctcgactaccacctaatcccatgatttcaaatggtaacgtgggatcaactttaatgaactttgttcaccaactaaccctctaacaatgttccatggggaccttagtcttttaccccttgaatcatacacaaaacaactccaaaaatcgaaggaaaaactctaaaccaagctaacagtgaactgaatcagcacatcactggtcccttgcagacctccatgttcagaccctggtttctcacaattccatatgtcaataggtcaatcttccttaacaaaaattattcttcacttatagcccttcctacttggtataacacttcatggctggaaatgctcagaacaagagttgtggtgcactaaagttgagtaaaaataataaaatatcctgtcttagctaactgaacaaccccatactaactctgtcatggagttttgtagcacccttttctctcaaatttgtgtagtaccaagccaagcttccctaagtaaagttgttcagtaatatttggtctccaagtttactatagaaa

SEQ ID NO: 20732 - DNA, 336 bp, Zea Mays
cgccaggacctgccggtcgttgagcttctgctgcctcctattctcctgcgatccatgtcctctgaagatgacgttgacctccctgtcaacgcgtggcaatgctccgcccccttccccttcttgctgctgaggctgcctgggcttgtcgggccctcctcgtggtgggggaggtggtagaggctggaacggtcggtcgtgtccaacagagtgcttgaagtccctacagttccatagggtatggcgcatgtccttgtggtacgggcactgggcgttgaggatgtcatccagtgtccgttcacctccgcggggcgcacctcaggctcgagcgacgggtgg

SEQ ID NO: 20733 - DNA, 1313 bp, Zea Mays
tattaatggataattgatttgttgaattttctcataattgaaccatagctcgccactgcgttgaggtaatgtaccatcgtaaggtattgtcgggaaaaagattcctaggcccttggggctcaccggtcagagaaagcacatgaggtaagaacctccaaactaccggggaccatccgttaacgaggggtaggggaatcgtctacccaagaagcacccgtccccgaatagaccatgaggcatcgagcccgaggtcatgcatggcggagctacaaagggggctaggcgaaccgaaaggaaaccacccgagtaaattcctcgcctggcccgagactgacccgctataaacggtcgaccgcattaagtacatctgacactgagtcgtaatagagagccgatccgcctcccactcatgacctgcacaaccctttggtcagcagcgcattcatgacctacgagaccctcggcctgtggagcactcatgacttatcaagcctaggtctgagtgcatggaccatccactgggctcgctacacgatgagccacgtcgaggcctaggctatggagccacgtcgaggcctaggctatggaggccagaggtctgcatggcatagaggtagtaatgatggcaccgggtccctgcaccgtccacaccacccgttataataagcacaaacatggacgactagacgacaagacgcatacggataacgcgtcctcgccgtggtaagacacccacttttaccacgatataatggctccttcccaaaggagccactggccatgaacccccatgttggcctataaaaggaggaggtcagccatgaagacagggacatacccaagaggacacgagacagaagacactcgacagaaggcaaccactcatgctcgaagagacctgaagaccgaagcctagcgtaggactccagttacgtagtcttttggaccacccacacataagagacttgggagcccttcctccctcttttgtttgcttgtaacccctactacgagcatcgagcaataaaggtgccggtagcgagagtcgttgaagactagatgtagggatgttctgcccaaaccagtataaaccttgctcccaccgagcacactgtctggagcccagaacgcgcacatagaaatttacttatcggagcgaaggttcgaaacatcgatagttggcgcgcgaggtaggggccttgtgcgttctcgacgaactctctaggctacggatggctaataacgatagtggcgtagtttggacccatggaatgaccatccgttttgagagtattgacttcatcatcaacgat

SEQ ID NO: 20734 - DNA, 395 bp, Zea Mays
atctgactagcctattgcagtcaaaggagaaggggattgaaaaaagctcggaagggaagaaggctacttcgagaactggaggaaatgctgggggtcagaagaaacagcgaatgatggctgtaatgaaggctatccataagaccccgcccccagcctcggcggaaaaaattgttgcttctgccaatgttgaagctaacaccgatgccgacgctaatgagagtgcgcctgaagctgagaacagcggaggacccctcggaaccataatgtcagagattgacagaattatagctgatgtggttccttggaaggacatggctgaagtgaccactaatagggcttcgcccttgaaaatgaaagagtaggaaaggacttcttcggaggacatagagttggac

SEQ ID NO: 20735 - DNA, 359 bp, Zea Mays
acatgaccaatattgttgtacttgttctggacgtcagcttgtccagaattccagatcagacgtgatgtgatcagttgcagccgtgtcgaggtaccaattagtgtcgacatcatagtcatgagtgccacgagtgagcacaacaatagtcttggtgttggagtagcttttttcaaagcagtactagcaatctatggcaacatgccctactttgccacagacttggcagatcttgtcagtgcatcgggcttgattcgatgaggataaagacacaccttgatggctagtccaccaggaggcaccacaccctctgcctcgaccacggtcacaactgcggttgttgcctccatcctcgatcagca

SEQ ID NO: 20736 - DNA, 575 bp, Zea Mays
cggcgcaagaaacccgagactcaacactacagctgtatggacggcgggttgaatccctaattaccagggagctcatatgtgaaaagaaccagcgaagaggtatgcgcggatgacgaccgtccgatcaaaaatggacagccacgattagatgcacggtggatataaccctgattcccgagtcaccgtcggatccgagatcgacgcgaggaggtcgtcgacccaggatagcgtgtgggccgttcgattgggatctacgacccagatcttattaacgcgaaccggtatcctgattctaatctgaaccgtacattcacaaatcagtggccaggtcgcaccctcctcttcccggttgaacaccggcgacaaccagtgaagccgcggtggcgcgccatggctgggagaccccccgattgtatatggtgcgccattaaccgatacgctaggtgccaaataaagctaggacgacggcagatccaggagggggttggtactcacaaatggcttgaagacgaggctgtccacgaagcggggcggcttcacggcagacggtaaaggccggcgagcaattccggatt

SEQ ID NO: 20737 - DNA, 1560 bp, Zea Mays
tggagttgcgtcagaaagggacagtggatgaatacctaaaggagttcgaggtgattaggtatgcggcagctatccacaacccacagttggacgagaccatgttcgtcgcacatttcatcaagggtttgaagcaagaattacaagggcgtgtgcagtctcatgttccagctacggtggatagagcagcgtttctggcgcggattcaacaaaatgttttggaaaagcaaagacagaagtatctgaagtttggagggcagggtaaaatcaataactctgctgttcggcaagaaaataaggcagttctggcgggtcaagatctgtccaaggagaaactggtcagagagtaccgaagacagaacgggttgtgttttacttgcggggacaaattcgagccggggcatcaaaacaaatgtcctaagaaggtacaaatgcagttgaatgttctgtcaactgatgaactaaagatgactttgacagacaaagtgctggacagattggagcaggaggagctagtagcagaggagtgtttcaagttgtcgttgcatgcgatcagtggcactacggctgaagattgtatgggggtcagggcactgttgcagaaccaagtgttactgatactagtggactcaggaagtttggctagtttcattagccagactatggtggatcgagtaggattacccacacaacagtgtgcattggcgaaggttaaagtggcaaatggggagatcttgaaaagtgacagagtggtaaaatcgatggaatggtgggctaatggccacacctatagaaatgacatgagggtgctggagttaggagcttatgatgcaatattgggatatgattggttaagaagacatagtcctatgcaatgtgattgggaagggaagatcataagctttgaggataatggggaggaggttcagttgatgggaactgctggtcagcagggagaggtgttgggaatttctacggtgcaattggagaagatgataaagggtaatgatatttgggcttttgtagtattggagacagtcacagaagtggagcagttcaatgaaggagaattacagtttttactggaggaatataaagatgtgtttgatgctccaacatctttgcctccatcaagaccattcgatcatcatattcaactacttccagatgctataccggtgaactccaagccctatcgatattcaccattccacaaaactgaaatagagaagcaagtctctgagcttttgaaaagtggacttataattcccagtgtcagtccatttgcttcaccagtattgttggtgcaaaagaaagatgggtcatggcgattttgtgtggactacagaaaattgaacaatatgaccataaaaaacagatttccgatgccggtggtagaggagattttggatgaactagcagggactcaatacttctctagcatggacatgacagcgggatatcatcaagtaagaatgggggaaggtgaagagtacaagactgcgtttaaaactcatcaaggacattatcaatttagggtaatgccttttggtctcacaaacg

SEQ ID NO: 20738 - DNA, 400 bp, Zea Mays
gccggtaatgattcggctcgggtagcgcgagctacgacccagcccccgggggtgttgctggtggtgatccggctccgatgggcagtgcaggctgcaacccagcccccgagggtatccaagcgggctccccttctcatacctccatggatgttcacattgggtcttctcctccacgttccgatggcatggtaacagcgcatgcttcaaatgaggaagtcgccttagaggtcggcacgtcagatgctagagttctgatgcctgctggtggtgctgagttgattcctggcgatgctcttcaaattgccccggctgatattccttcatcgagccaccacctagcttctcgtgacttaggatttctgtcattcttctccgatcttcaggtaattcggcttttctg

SEQ ID NO: 20739 - DNA, 1126 bp, Zea Mays
caggccacgcaaatacatctttattgcggttcagacaagacatgagtctttcttcttccgcctcgatgtggtcctcgctgatcaagaccgtttgattgggggtggctgtgtctagagggactttttcacccctttgttgctctatagctgggcgttgatccttttttctttgattgggcgaaggctaccagggtcttcgtggtcagctatgaggcaatgcacattgcgctggctgggaacaaactctctatgattttagcgacctgctggtctctgtatatggtgattacaccctggggtccagggatcttcatgcacaggtataatccatgtatagttgcttcaaggttattgatgaatccttgccccatgatggcgttgtatggataaaccatattgactatgttgtaggtgatctgcttgcttcttgcgtttggcgcagtgctgagtgataatggtagttcaattttgccgagtggaaatgttcattttcaacctgctatagaggggttgcctgctagcttgagtaggctatgccttatgcccatatggtcgaaggcatgtaggaagatgatatctgcttggctgccgttatcaacgagtacttcgtgcagatcccaccctgccactctgcaatttttcaccagtgcatctccatggggcgcactatggagattgacatcctttgcatcgaaggtaagcggcacatgggaccgcttcgtttgaacgatgggcccggtgagggctacatggtttaccctttggtagtgatctttcttttgtcgttttgtttcgaactcagagctagacccttcagagatcatgtggattactcccctgaagggttgagaagcgaattcttcttgctttggtagtggtgggggaggtggtaggggttggtttggatgttgaggtgatggaggcggtagcgctaggatttcttggtgttgaaggcgctgttgttgcggatataggttgtggttttgctgctatgggtaatagtggtgttcgttttggaattgatgatgtttgtattgatggagatggtaggtgtgggcgacgactctttggttgtcagctagtagggtcctggctattgggggtctctttccgccgaaggtcctca

SEQ ID NO: 20740 - DNA, 422 bp, Zea Mays
catgcgcttacttcccaattcatgaacacataacgtgtattgacccgactcaagatatagaggaagtgatgactactttggcatgtcaccacctctctatataagccaaaacaatttctactatcgactaagagttctaagtattaaacacattattaatttccacgcgcaaataaacctcaacttaacactagtgacaccgatggatttttactaaactcatcaggcgcataacctcgtctcgcatacaaccatatggtggcgtgcacccaagacacttcaatcaatgtggcgcgaccactaatatatgaactccgacactcatgtattaataattcatccttcacgcaaattagcattgtctaaactactcgtcacattaacaattatatcccctatataatcacgaatcccatcacatt

SEQ ID NO: 20741 - DNA, 667 bp, Zea Mays
cccagcatagccatgcttgctacaccctacacagtggaagcatggaatgaaagtcaccatcccaagggttaacagcaatatatgcgtacgtacgtagtgtgtatagctgaacgtacgtgcatggtaggcgtagacacacatgcaactactatacacgagcgggaggtgccaggcaaaggcagcgatcgtcatggtcggcggcggcaccagaacactcacatgtacgtacagatcaattccatcgtatcttacaggaaataacattgccgatgcatctctcagatcaaatacgaacacgtttaagttcctagctagctcttcctcctaccccacccatggcgtacctcaacctcgtccatggcaagaagaaacactaacttatattagttgctgctacctctaccgcgcgctagcccagtttggctagccagccggttacgccttctacatcgcggcctgccactgctcctcctccgctgcccgtgcttgctgctgttcgtcgtcgtcgcacgccggctcgttcaggtccgccaacggccggcacatacaggtcgcctgctgctgcttaatcagatccctcctcccagattggaggggactagctaggagataaacgaactaagttttcccttaatcactttggatccgggagggaatttcagtctcc

SEQ ID NO: 20742 - DNA, 544 bp, Zea Mays
ctgcacctagagctatctagttcatgtgagttccaaggggagatcgggtctggcttggaagatatggtggcgccaagtctggtctgtctgcactgttcatctcgtgacaaaacatatgccaaaccatgtcaaacaaccctggtttggtttcaaaatttttaggggtgtgccttgggtagtttggcttctttttattattttgaccctaaggatttggcgccagcaacttaatgaacatctccaatctttggaagtgggctaatttttaacttagagaaaaattggattgctctagggtgctctccacttgggtgcttgatttggggtttttgtgggatcttttggtaatacctcccttactatatttggtagatgtattaatgtacttcaactttggtaaagggttcaagtcatggattggtcatttgcatagttttccccttaatccaatgcttgggggtctaatggctcaagagggggaactagggttttagaatctttttcaaaggtgaagatacatgaaaagctagggtattcctcccat

SEQ ID NO: 20743 - DNA, 537 bp, Zea Mays
tatccacaatgacccaaatagaatcgtggttttgggaggtgttgggcaaacccacaataaaatccatgcaaatatcctcccattgccaagatggtatcggaagaggctgtaaggtacctgctaccttcaaatgactagctttgattctttggcaagtgtcgcattcaaatacatacttagcactttccctcttcattctggtccaccaatacaaggatctgagatcatgatacatcttgttactaccggggtgcatggaaaaattggaaagatgagcttcatccaatattttctgcctgagttttggattcttaggaacaaccaatcggtcttcaaaccatagaactcccttgctgtcctgacgaaagcatttgtacttatccaccctttgttcgagtatctccttaatgacttgaacacccttgtcaccaatctgtgccacgattatttgctcatgtaaagtgggctccactgagatataactcaaggtaactgaggaaacaacttctaggttcagcttgtataactcgtcacaca

SEQ ID NO: 20744 - DNA, 388 bp, Zea Mays
agacaacattccccctcgtctctacatcaatccaggaggagcccagggaggagctcgttgtccctgccaaaggatcgttcctcggcgtcgatgaagcttcaccggctctccctcctttcccctcagtgagaaacctccgcccccttctctgtttcgtaaccggtgttgtgatgccctctgctcagtgacaaactccccgcccgtccctcaccggatcataagaacgctctaatcaacttcactagggtcagatttcatcgtaccccaagcttttccataaatccccctttccttctccattttctctcttcccaggacctttcttcttcctcgcatgcgcacatggcgaccatggccggacctcctccctgtgctcactccacacagc

SEQ ID NO: 20745 - DNA, 661 bp, Zea Mays
tatttctctgtcttgtgagtggtgtgcactggcaggaaatgagcggtcttggtcaatctatccacaataacccaaatagaatcatggtgccggaaggtattgggcaatcctacgatgaaatcaatgcaaatgtcctcccatttccaagatggtatgggaaggggttgcaaagggcctgctgccttcaaatgactggccttgattctctggtaggtgtcacactcagatacatacttggcaatttctctcttcaatctggtccaccagtataaggatctgagatcatgatacatcttattgctgcccgggtgcatggagaattttgaaaggtgagcctcatccaatatcttctttctgagctcagggttcttgggaacaaccagtcggtctccataccatagaatttccttgctgtcctgacggaagcatttgtatttttctgccttctgcttgatcatttccttaattacctgaacacccttgtcttcaatctgtgccctgactatttgctcttgtaatgtgggctccaccgagatataatttaaatcacctgaagaaaccacttccaggttcagctttcacaactcatcacacagggtggtgactcttgcatccatgctcatacaattgcactgggctttcctgtttaaggcatctgcca

SEQ ID NO: 20746 - DNA, 420 bp, Zea Mays
gcactataaatccgtcgcgcccctgcttccgccctctgcctgaccgtgcaccgtggtgaaactgagcgaaccgaggagggagagagagaagatgccgcaagggagaaaaggttgggaggtgctcgtgaggctgccattgaatcgagcttagaagccccgtcgcgtcctgaggatagtatttgggctcggtggaggaccatggcgccgacaatgtctcgtcgggggtagcggctatctccggtccgcaagaactcggcgacggaattccctgcttcactgctgaaggtaacatgccttccctgaagttcgcgcgcctgcgctctgtgtatcatcatttgggaggggagttagggcaatggatccctgggtcacttcgcgccggctttggcgccgctggggtggacgttgtgtgccactgct

SEQ ID NO: 20747 - DNA, 329 bp, Zea Mays
tacgcttctattccccgctgaggcagtgacccaatgctgccatgtggcccactgctcgtgacgtaagccagcgggtggagcctgacgtaaggcctctgggccgcgcgtcctctgtatttattgcggataaggcgcgccgcctgtcaaactggcaggtgatgtgttgcctcagcatttaatgagccctgtcactccactggcaggcgatgtgccgcctcagcattaaatgtgccctgtccactccgctgacgaacggcgaccaggccatcttacaagcggcgtgcctatccattccattggcaggcaatacgctcatgctgccgcatgcg

SEQ ID NO: 20748 - DNA, 517 bp, Zea Mays
atggagctcgcggtcagacggcccggaatccctctggtcggtcccgacccgcgataaatccacaagcatgggagccgacaagtgatgatgatggtggaaaggatgatgagattgaccttccctctgcccacgctcctattatccgagggttggttctccaccgggcggaggcccatcattctggcaatgagccagttaaggattttactgccagcgggggttctgcacttctccaggacatccgctttcagaatcctgctttatgtattcgtgatgccaggattgatgggaatcggttctggactcttcatcatgtcgatttctacaactcagtaattcttcccaagaaacatcagcccattctgcatcagcggtacatcaactgggaaggctgtgaagctattggagatccggagatgacacaggctttgagggcctgtgagagaaagaaaatgaagaatataatgaccttccaatatgattggaatgatgaggtcattgctcagttttattccac

SEQ ID NO: 20749 - DNA, 366 bp, Zea Mays
gcggttcatcttggaggcgatggcggatcaggagcgcggcgcgaaggaggattgggggcggatgatggagacgttggaagcagtgtgtgcgcggctgaaggatgtggagcgcgcacagcaacagttgatggtacgctcagaattggcggccacggtggctgagcgggtagcggccgagcgagtccagatgagccagaagatggaggaaacagagaagttggtggaacaactccgactggaaaacaggagcaaagaacttggagaaacgccaggagcagctgtggaaggggagcaacaccatcagccaccagttcctccattcaacaggccacgacaggaaaggagggaaccactaggaggttttca

SEQ ID NO: 20750 - DNA, 697 bp, Zea Mays
gcgtggaacgagttggtcggggagcttcgcctcggctcggcaattgattccacggcagcggcatcgggttgggagcgtccggcgccggcgaatttctcaccagagtgcgtccgcggcggagaacatcacctcttcgtggccaaggcactacgggtcgcaattgtcggtgagctgctgtccgaactcttccctttagcttgtgcatcgtgtagcgccgattgaattcgagtttaggtcacgctagcgttgtatcgtcgtgtgccggcaatggtgccgcggcggcgctcggatttctgtcgcccgccgccggtgaacgagggtgtagggtagaagccgtgctggctgttgatccgttaacggacggccggattagaatcgggcgattactcctgggcgatttgattaggaccgttggatcggatcggacgatcgacacgtgcattggacatcattaaatcgtaaacgtagatccaggatctgagggcccagagtgaataccggttcgtttgaacagacttctaatcctcatcgtcggatgttgatcggacgactgttagcgcgagataccccttcggcttgcgctttgcaaataggaccctctggttaaatgaaataaacccgtcgtccatcctcggggtttctgggtctgggaaagtcttttgggaaagcccctgaccttttcagaaattgacgccca

SEQ ID NO: 20751 - DNA, 413 bp, Zea Mays
aggcagagaagtataagtgcttccgtcaggacagcaagggaattttatggtttggagaccgattggttgttctcaaggaccctgaactcagaaagaagatcctagatgaagctcacctttccaaattctccatgcaccctggtagcaacaagatgtaccatggtctcagatctttatattggtggaccagaatgaaaagggaaattgccaagtacatatccgaatgtgacacttgccagagaattaaggctagtcatttgaaagcagccggccctttacaatcccttcccataccatcttggaaatgggaagacatttgcatggactttatagtgaaattgcccaatacatccaggcaccatgaatctatttgggttattgtggacagattgaccaagaccgctcatttctta

SEQ ID NO: 20752 - DNA, 863 bp, Zea Mays
tccgcgcgcgcttagatacgccgggtcgcttccatgtggaccatccctgtcagaatcgtcctcaactacttcgcggggagctcggcggggcttgcggtgccacaactactctgagcctggcgcaattccgagccctcccgagtttaaaacctagcgccgctgttccttatcccttcctctccttccttttccccaattccgcgaccgccaccattgagcggcagcattccgcacggggataactcacgtcgccggggttttgtgtctgcgtcgccgttgcggtcacaattgttggcctgtgcgctcctatccggtctccgggggcgtacgtggtctcggctggcgcgattggggcatagtgcgccggcaattgcttgccgtacttctgctccgctgcagacccgccttctccgtggactgccatcctcgccgccccacctccggtaggatgtcacccaccttgtccgcaatgttctccactgcatgtaggttctttcgggtgggttgttggggctctggtgcgtgatttgcacgagcaccggcgaggttccgccgcgggagctcgcgccaccgttcccggtcggccggattgtgaggagaaccctcggtgctgtccgatcctctttggatggctaggattagaagatgtgtagccgttcgattaattagatcgagtccgttgatcgggtaacggatggacgagagcagatcaacgcatggaggattcacggccgcggatctgtgatccaatggaacacattgcataccggttcagtagagaatggagtctaatcatggtcatccactttagatcgtgcggccaggattaaaggataccccttcggccgctcgttttgtaaaag

SEQ ID NO: 20753 - DNA, 635 bp, Zea Mays
cttctggcctaatagtcacagcctcatcagccttcacaataccaagttccttcaaaatacgtttcttgccctgtgtggccggtggaggagtaggcagcctctccacacctgcaccagcgacccttctactgcgtcggggtatcacctcagtgactgaagccttgccctgtcgcggccttctgactggcgccctcagaatcccaccagctggtctggtcagcttatcgatgaactcatttgcacccgaaggggggggaggaggggacggggacgcgccaagcaactgactgggttggctatccttcttcctcctctgtcgaaagtaagtaatgatggggcctctccgagataggcgactcgacgttcgcgcatccaccaaggctgacatctgccctcccatattgacagtggcccgagacggagatcccaggggtgacccctgaattgcctgctccttctcacaaccacccaaagagcaacaatctgccggagccctcaagggtgaagagggggaagatggaactggcaggggggagtgaactgggcaaccaccggacagccccgacgccccagcctccaccatgcagtcctgctcatgactcctgccgaaaccgtccacattatcttcagacgcc

SEQ ID NO: 20754 - DNA, 647 bp, Zea Mays
ggtgaatttttgaggtgggagtcacaacgaaagcatatttagggttacaagtgcaagcaaaaaggcatgacagatatagcaactgaccgctcaattctagactatgaacctattattatgtcgtaactcggattttcaactggatgagtaaaactaccaagaaccgatggatagaaacacagaaacaagggcaagggaaagcaatcagacaagtcttcaaacacaaacatatatatagggagagtaagttaatttttacataaacgaccaattcattatgaactggaccaaaagatagccacgccacccaactactgccactatatcaagctacctaagcttgtggcgatccgccaccattgccaccgtcgtcgccgtcgttgccaccatcaccgctgccgaccttgccattgccaccactgtcgtttccacccttgccactgccacctctgttttctccgcccttgtcgctgtcgccgccaccgctgatgaccttatcgtccttgcccccctccttgccaccatcgtacctgtcctcgtcctcctcctcctccatggactcctcctcatccttggagtcatctgagtcatccaagtcatcgatccctgcttgctcgatgtcctggatgtaggctctctccaccaca

SEQ ID NO: 20755 - DNA, 422 bp, Zea Mays
cggtaaaggaggtgactatcatgacatcgctcggcgtgggtggcttgatgggacataaaatggtccgtccaccgtatcgtgagcaagtggcgtgatgggacgatttatctgtcctgcctatttttggcatctcccctaccatgtgccccctagtgctctgttcgaggtgatgtggaacctgcaacatgaacagtttttcgcatgaggcccaaggtggctgcgggcttagaacaacagatcccccctgtgccgcccacttaggggcctatccttttggcgtcgttctagctccttatgcatgcatataaagagtgaaggtgcttggggtcggttatgctcactatattattgtgcccagacatatgtctcttcctactattgtgccttcctcctctttcatgtttgtctcgcttgcttcttgc

SEQ ID NO: 20756 - DNA, 546 bp, Zea Mays
aagtccgtattcgtcggctacttttggatgcaaaaccgaaatcctttgttccgctcgctagttacccggaggatccggagttggaacagttcctagaaatggagcaattgcaccgtctaaatgaatgcctagttgcttcatctaggaacataggtccacatacgcacggagtggaggatctccatggaggccggttctgggctcttggatatgattcagactctgagttggaggaagaggaatccagtgtggtacctgtggctgtggaggcaccgggttttgccgatcccaaaccatcgttttcgtcggggatttcggagacatctgtttcagtaagtaaagatcacttcatgaatgtgccttctccgtgtcttatcaaaaaggcaagggaggatcggcgtccatggcaaggtccactgcctaaaccgaggagatctcctatgattacgttcgggaatgctctgagcaaggccagagtgttttcgaagaaatcgtactcttggtctgatgctcgaagttcaggccccaggcgctccccgtgttttt

SEQ ID NO: 20757 - DNA, 348 bp, Zea Mays
aagcattgtatgaatatgttcccaggcactttggtgttcaggtcccgaactcttcttctactgacgcgacatctccaccagaccaaacaacatctgttactgcagtagcatctccaccgggccaaataacgtttgaagcatcaagcgggtaagcacagctctgagcgtacattccaaatggggaatttggtattcgtcaagctccaaccgtatgtccagacgtctctagtctcccatgctaaccagaagttatgtttttgctactttgggtcctaccgtgtgttgtcccagattggtgccactacatacaagttgtacttaccggattcctcagcagttcaccccgtc

SEQ ID NO: 20758 - DNA, 578 bp, Zea Mays
catgaagtggtagtagggttttgcggacagaaggtggctatatagtatctcctgagtacgcgcggcagctttgattgattcgtactggaccaggtctgcggtccgcctgtctctttgctacacgaacgaaaacgttcctctggccggattataaaagttccagctgcatctgcaggtgcggtgccgccgtgcgccgtgagcggcgaaaaggtagctgtagaatgtagtaaccttccaccatgtccgtttaataatgaattccgtagccctaccagccaagataagcagaacgatggaaccgtacaaagagcgtggtatttatgtgctgctccatacttaaaaaaaagtccatacaacatgcccacgaactatctgcatgccgacctaaaacatgaatatgcctttaggctttagccttgcggagttgtggatccgtggatgagtttgagtactcgtgcaccgagactgtcgccatcctccagatccgctcgcgtttagatgctgtcaaggaagttgtggagggtgggggagatcccgtcacaatcaggtcgctttacgaccaagcaagccaacagttc

SEQ ID NO: 20759 - DNA, 523 bp, Zea Mays
tacgtggcgaacatggtcatgggcaccacaaaggtgcagaggcaccggaggacaaccgtccacggcgcggcggcttgactttactcaggcgagcaatcatgcccagccgagaacagagaaaggacaaattgcgggtggggaaagttggttaccttgaggggagattctgggacccttgaacagcgacagggacacggtgagggcttgggtcaacggcggtggctctctggatgcgcggggaagctccggtgagcacgggtagagagaaccagaggttgagagagcaaattgaggcatgtcccgagttgcagacaccgaggcgaaactcaccgaggcaatgggcacggcgaggcctgaacggcagaggcagaacgggcgcgcggacacagtgaacggtggaggtccttcgagcttggggaagagacagcgcacgagcaagggcgggctgggagctatctgcgagtggaggaaatggcagagtgggcgggagggaggtttgagtaggggtcgggcgcatgggtag

SEQ ID NO: 20760 - DNA, 966 bp, Zea Mays
ctccccgcctaatccccgccacacatctggcaaccgacgacagaagccctatcttccccccatcggtacccaggcacggcggaagagggtgatgtcacgacggcgctttcgtcgagataggtggcctggcggtaaggtcttcactcctacagaactatccggacccacgcgaagaggagagcaaggcgaatcgatctaagggtaactcaccgtggaataagtagcaggtcgctatgccgacgatgaagggcggtccgaggcaatttcttgaaattcggtgagcaattgccggcactccggccaattcccccgtcagaggaggtcaccaggatgcgtggttggcgcgaccgattcttcccatactatatttaggtggacaacgacgctgcacactgattccatgcacggtggcgcccacccccgcgctggtcgtcgacgtgatgctctgcagagtcgttttggtgccccggttcgaggaggaaggtggtcgccagggcttgcttttatagcccggaggcgttgacgagttggtcatgtcggcccccaaggatctcgcggataccgttgagctctaaactcgacgttggtttaatcttggacacagggtaggagacgaccttcgacagcgcgggcccgtgctccagagaaagaggtagcggcatgcgtagctggtcactgaccaataagatcgaccagccagcgacggcgtgcgacaacgctacatggccccacacgtcagtcgttagatgccaggcgcacgagtaattatggagaaggaagggaagccacgcgcgcatgggtggccgtcaagcggaccccgcaagttagtgtgaggtccagaacggaaaaacgcgtgtaagtagtgtgggctggcggaatggtgagccggatgagccgaggggagaggaaatcggcccatgcgtggttctcttttttttctttgtctttttattctgttttgaattt

SEQ ID NO: 20761 - DNA, 491 bp, Zea Mays
cgaaagggtatcggcccatatggaccgctcgatcagatccggtggcatagattagatttgaaccgttacgcacgccagtccacaagatcgaagatcaaaggtctcagtttaatgaaacacagattttaatccgggccaagggatcagagatccacggctcagatcgagtccatccaaacattgctgaacatttaatcgtggccatcagatcatccatcgatgactcgggtgctgctccccctattctcttccccctgatgaaccaccgacggcggggtccgccaccgtggtggccgccattgccggccaacagccccaaccgcactcggtcgctagatctgatcccgatgatgctacgtgtagaggaggtcaaggtgaacctagaggaatatttctcaccagcaatggtgtagtggagatctcggcccacggtgaggtgcggtttttccaacgtgcgtgacggcagcgagcaatccatcgaccaccagggc

SEQ ID NO: 20762 - DNA, 886 bp, Zea Mays
ctagaatccttccaccacagccatggtgccatcacgacacaataattgattgccactgattccagcaaggttctaataaatcttgtagatgcaacctcgctttgcctgccgccgccagtcttccgcctccgccacacacaaatgtccagtttctttgctgtagctgtagctttggtgctctcatctctcatccatggaaccacgatggccacagcgagcagcgaagagagcttcttccagaagtgcccagcgtccaggtgcagcgaaggagggccagagatccggttcccgttccgccttgcgaccagccctctgtcatgcggtgcgcccggcatggagctggtgtgctccaaagcagacaccgtcctggttcacccaaaccttggcttgtgtaaggtaactgccatctggtatggcggcagcactataaccatcgtcccactcgcagtcgcagcagaacccaagtgccctttccagaagatcatctccaccaatctatcaaccgatgtgtatagaccttatggggatagggcaaccttagtgagctgttcagcagagttcatagtaccaagccatccggccagccttgctggtcccatctcttgccttaccaacgctagccgccggttcgcttacttggtgccgtcttttcgaccaatggatttccttcccttggactgcacggttctttcgaatagcatctcggtaccttaccctgcttctgtcaacgcgggcttcaacggaactgcaagaggagccatcgcatttggcgagacaatgttagaatggagagttcctaacattaccgatgtctgccgagactgcgaagctgaaggaaggctctgtggatttagctccgagagtaggcaagcattctgtaagagta

SEQ ID NO: 20763 - DNA, 1217 bp, Zea Mays
gttaagacaatcaaattagaaccaacaagtcgacttgcaaattttattcaagtcatttagtgcactaaaattactacaaccaattaacaacacattctccacgataatcacccaacaatttacattttaaattagtcattacatgagcactactactttttacccgcgaccgtaaccatacacatttagaccacaacaagcaattcaccgtgattacgagcttaaccaagtcatctaacaattcggctaactagagcaacaatataggccgctatacatcacacacgtcggctagtctattattatcgaaatccgagacacaacattgtatataacaatcacttaacgcaatcgactcctgcttaacacgagttggctaatgacgtgactatttcccaattaccaacatacaccacctttcgccatttttggataacctgcgcgacacacagctattgtaatacatctcaacttcattcaaccccatcagtagagcactagcacatttcagaaaatttcctgagacttacgatgacaaggcatcgatcttatcatgcacatcaaagcatcacaagcgtgtttacggaaccaatcggttaacttgatcgacacactacccatgttctttgcctttcaaaatttatcgcacaataggaatcatccccatttgccaatgacaccaacaatacctactgatctattattcaccacatcaacatagttacacgccgcacactagtttctaacatgcttcctgcataacccgtaattcaattactcactaacaataaatcacgcacggcaactaccacatcaaccgatttatttatttggaacaccgcctgcctagcgtaccactagtaccccacattttgactcaagctcaataatacagcctttattcgattatacaacaacgacctaagcgtcgtgttacccaatgcatacatctttcctcgttgtgagtataaccatattacggcatatacccgcacacctcaatcaaatatcttacgccaccaccactataatacaccacggcacacacgcacatacgtgtccccacgttacgcacaaggcatcaacagcatagtgactctaacaggattaatcatactcctcattcgcctcgactatcccaatcatcgatcacatgcataaaacaatacacttttcacgtagacacctattgatgcattccccaacacataatccgc

SEQ ID NO: 20764 - DNA, 468 bp, Zea Mays
caaggccaacaacgctggctttaatcggacccccccccccccccgtcccctcgaaacagatggcggcagctgcatcgtacacgtacgcatgggccagcacaaaaccaatgcggacacgtccgctccgcgccatgcatgagggaattgcagcactgcaccacctgctgcgtgcatgcgagctagtagtagtggtcctcctctacctcttggctttttgctcacccgtctctactactccctcactttccttcgattctagtagcgcggtacagtactcccctatgtatgttgtgtgaattgtgatgatgctccttcaccatatatatgcaacttgccatattattcactctctctacataaaactatatgtgcatgcgttctcaactgcctgtctgtccccactcccatgcacattttctcacacaaatctctcgatcactttggaagccaatcatatgggcataaaac

SEQ ID NO: 20765 - DNA, 400 bp, Zea Mays
gtcgtttgtgggctcgacggcaaggattgaccattggggcagcggagattgctcaccagaaccactgcgacgccgcggagccatgttccatcgtgggtgattgtttttgcgcctgaatccacggtaaggaccttcttatttgcttaggggcatctccaatgcggttatgcagcattcgggggtgagatttacacttgggggatggttgccggtgcgggctggtcatggcgccgccgtggggtgagatacgttgccgacgccggtgtcgcctcgggtggaggacacatgaagcattgatcttgcaattgatggctaggaatagattgtcaagtactggttcgtctaagtgatcgacaaccattggatgttgagctgacgtacgagattaggaatgcttaca

SEQ ID NO: 20766 - DNA, 634 bp, Zea Mays
caaaatcccatgacaactccatacagcaaagataccataagccataaaatcgtgaatagaccacaaaaatgcagctcttaggttgaacttctgtttcttgtaacaatcgtacgcctcgactccttcccataaaattttcaattcttcaatcaggggtctcatcatcatatcgatctttgttccaggatgattcggactaggtattacatgacacaagaaaataaattcatatttcatgcaaagagctggtggaaggttgtatggaacagtaaagacgggctagcatgagtaggacgttgcagttagattgaaaggtgagaaaccatctattgccaaaccgaagcggacattccgcacttcatcagcaaagctagaatcaaaggcatctagtgccttccatgcatctgtatcagctgggtgcgccatgacatctggattatcacgtaccccttctctgtgccacctcatgtgtctggctgtattcttggagatgaacaaacgtttcaaccgaggtataagaggcatgtaacgaagctgcttacgtgcaatcttcgtcggcacggtcaaaccatcgtcgttttgaacctctaggaatctacattcaccacatacagtacacttcttctcactcgcg

SEQ ID NO: 20767 - DNA, 339 bp, Zea Mays
gccttcggtccacctagctccacctcgcgccagcccaattcctacacacgcgcccgcgctgccatctggtcccaccagtcaacctcacacacgcgcacttaactcggcccaacaactcctttacactcgcgcggcccaagctctcaccgcgcgcgctcaccgctgacaaccgggccccactgcccagcctcccttcacgcgcgcctgcttttctgttctcctcactgactggagggcccgcgtggcaggttcatttgctctacgctgtggccgacatgtggggtcgtgtggtcggattctccttcaacagaatcgccgcactctcagggcgaccggcgt

SEQ ID NO: 20768 - DNA, 558 bp, Zea Mays
ctttgggctcgaattgaaaaaaggtacaacgaacagaggggccagtacccttgtagactgaacagagcacttagcagcagatgggacaagattagagcagatgtgagtaagttctctggctactacgcaagagttttaagagagaaccaaagtggcttaactgatgacgataaggtaaggcaaatcatatagagtttaaatcatgttaattatttagtagtgtatacttgtgattacatttgtctaattcatctaatatttctgcagacttcaaaggcggcaaccttgtttgcacacgaggaacagaaaccattccattatatgcattgctggcatcaactgaagggtgaaccgaaatgggagagtatctgtcaaggacattccttccgaggcttaaatgcaaaatctattggatcttcaggtaatccatctgttgaggcacatgaaactgatagtggttctgctggtttgacaggaaaacggccgagaggtcgtgattacagtaaatctgagagaaagaaaggtgcatcttcctcttctacagaatacttaagccgt

SEQ ID NO: 20769 - DNA, 481 bp, Zea Mays
tataattttgttagtacaatttatttatcttgactttgctaacttatttttctcattatatttgcagagattggatgtggcgtaaactatttggccgatgaggcgcatgcaagatatgttcaggataaaatggcgatggttgagctgatggaggaggaggaggacgacacatctagattgagtgagattatcgctctcgcagaggcaggattacatggagaagacgaggacgacacatcaaggttgagtgagctcatcgcactagctgaggcaggattacatgctcaagaggaagaggacgagtttatgtctcaggccgctgaagaggtagaggcggcttattacaagcagaagtctgatgaggctgaggctgaggatgagctattctcccaagctgtagatgaagcagaagccaattattacaagagaactgttgacaagtgtgatgcaggacaatgcagcaagtggaatgaggttgtcg

SEQ ID NO: 20770 - DNA, 294 bp, Zea Mays
ccctccccctctctgcatcgcaagtgccctcccttttgtagtccaagggggcacgttgcaagggagctaggcctcgataggtgggcgcaggagttactataacacgaagtgtgaggcatgaggtagagctggcggtgctagatgttctgggcgtgtatctcctcttggtcgtcgtgcaggctcttggcatcctatcatctttccccatctaatcggaacacaagtgtagaccttagcgtaagttgcagcgtggcctaatacaatgtcatgcgtagaggtgtatggatggtgtcg

SEQ ID NO: 20771 - DNA, 546 bp, Zea Mays
gtttaatgaccatgatctaatgcaaattaattagatcttaactagtctaatctagtcatatccaacctaatctagattttatctaatctattatgatctaatctaaagtaagttacttaatgctagtacaaaagataaggccatacccctcatgcacttaaaactacactagtgccttaaaccaactcagtcacatgcatgaggtctaacccaaccaatagagttatgatgaattgcataatctatctatccccacctaacatccaacaagattttggatctacatcatgcagtccatctcacccatatctatcttaaccatatcctccaacttcgatgatatacacgaaccccgaagcaatgagaccaagactagagaagaaaagatcaacctcgacaaggaaggataaaacagtcaaagtgaatctcgagatgaatcaagacttaaacattgctggtgaagtctttttcttgtcataatcattcttacctcaacctgtccagcttataccctacataataggtaactagatacctaggctctcc

SEQ ID NO: 20772 - DNA, 621 bp, Zea Mays
cccggggtctaacctgcaaacactcccagactcagtttcactctgatgcggaccgcgggtttatttctaaaatcttaaggggttcttatgtgaaagtgcacggtctaagcgttatcgggtgactgcagccgttggatctgggtttgacgcttaggattagatctcatccctccccatgcggtacgccacaatagccgcaggatcccgcatcaatggttcagatttaaaatacgagcgcgcaacaggaatcgtccgatcacgatcggacgcgtcatcgcgccgttggccgaaccgttaacctgcttctaatcgtgaccgttgcataaaggatcaacggtacgcgctacaatggccgcgcccgcccaactccgtcgccggagcttgtttcccccgcggcggcgccatggttggttagccctaatccccgacatcacgcgcgaagcttcaatctgagaagtcctacacggtgctctataccagggaaacacgatggttggttactcaccctgcaattcgccgcagtaaactctggtcatggtgagcggcgaaccaacgatcccagctggacaccgctgtgaaattgggccgcttctccgcacctgctgcgccggtgcaccgccg

SEQ ID NO: 20773 - DNA, 342 bp, Zea Mays
gttgtgccctctcggcatttgcaaggtctaaattttgctaaccacattggcatcagtcagcgaactcttttctgtttaagtagcatagattttgtttcttaaaagggtgctaagttagcacatttggagtattcagtcacattgcaatgattgacttggtagaaagatttgcatgctgtctttgataaaatgaaatgttgaaagtctttgttgggcagtagtcgggagaagtaattagatgcttgacatttatgtgatttcttacggtgggttagaggaaatagtcttttagggaagtgaactgaagtgttataccgtagagtgacctgattacacaaaatc

SEQ ID NO: 20774 - DNA, 851 bp, Zea Mays
actcaaagaccggcgccctaccttagccgagaccgaattcaagatctaatgagcgtttcccctcactcaatttcacgaacggctacccaatttgttctggccacggcgacagcgggcatcgtggacagacaaccgtgttcccggtgatctaagggatcctatttcaatcaagttggtcggggagtatcaggggcacacaagaacactaaaacgagagggcagagggcatgagcagacctagatcgagttggccgcggtgaggatactttcacggtggcggaaacttagtttgggggaagtgagcaattcatggtctctggtggataattggaggcaagcgtgggtgcgttggctttgtgataacatggtgcaatagacccgaccatcaatttataggatcgctaagcggtggccgatgaatttggatttaagacgcgcggcggtcggatgggtgggaggtcactggtgctcgggttagtggctttcaccgtggcagtacaccggcgatcactgtgcatgcgagacgtgattcacggcgtcatggtctaatgctttagcacgtggcgcacgacgttaatcggccaacgacggcgaggtctatcctgatcgatcgatgagcaagtggtacggggagcttagccgcgaccagacccaagtttatcctggcgccaagttcattacccgctcaccgttatccacaagtcacatcgcacgaatcacggcgaccgacgtgaatcgcggtgcaacggtcatcagcggcgaagttcactgaacctgacccgatcaggttactgtaccatggcacagtctacttagttgacctgacagaccaacattgaactcgattttct

SEQ ID NO: 20775 - DNA, 320 bp, Zea Mays
cttctaggtattttgttttcaaggaaagaagccaggtgtttacaccacttggcaagaatacaatgatcaagttttggcgtatccaaaagctatgcatcgcaagtacatttcttatgaatatgcaattcatgattttaactcagctatcaactcagtgcctctttctatcttttacttccttagctccaaagcaaaatgaaggtggtgcatctggtttttgttgaaaaatgtagccaaagttatgctttgtacaatggtttatgtaatgtggatgaagttaaatggttgtagggactgttagtgcactagctatgcgtgtt

SEQ ID NO: 20776 - DNA, 813 bp, Zea Mays
gcacttctatctcttcacagctcgtagtccacgatagcgaacggcggggaaccgagctctggtgagcttgtaccggccggatcctgcaatgatcggtgctcccgtgcggcagacaccaaattggacccctcttaatcatttcccctcactcaatttcaccaatgaggctctacatcaactggttcacagagacagcgtgaacaataggatgagtgaacgtgttcccggtgatctagggcttcctagcttaatcggatgggtcagcgagtatcagcagcgagtaagggtgctgaaacatgaggacagcgaacatgaacggacctgaaactcgttggccacggcgaggtcacaccgcttggtgttcttggttgatttgggggaaatcccaaattggggagctctggtggacgatctgaggtgagggttggtttactggttgcacaactacttagcggagcaggcgggggcagcaatctataggctcccaccacggtggtttccaatttcgcgaagatgcgctggctgccggaggggaaggaggttactggcgcgcaagcttagtggctttcaccgtggcagctctccgtcgatcaccgggcatgcaagacgtgattcactgcgacgtggtacaacgcttgagcacgtggcgcacagtggtaagtggccaacgacggcgaggtctatcccggctgatcgacgagcaagtgggtatggtgaaactcatccgcgaccgagcccgagcctatctggtgccaagatctttactccgccgtgattatcccctcaccagagagcacgaattgtggcgatggc

SEQ ID NO: 20777 - DNA, 642 bp, Zea Mays
tctttaattttcataattggctcaagtcataattttaaacttttcattccctttttcttattttcttgaattttgctcatggggctcacttagggttcttaattagggttgcacatttttatcttttcaaagactcaattgttttgatcatgttacttttaagtatatacttggtgaattctttattacttaagttgttttgatgctcatgcttactttggttcacataaaatgatggttcttggtttggcatttgagaaaaaccctgagtgacactggggtgtcacaggtcggggcaagaatatctcaccggcggccgccatggctcagtacttccgtcgtggtgtcactcgcgcctaaattctaccacattgtgctcctttgttacgtggtcgccatgcactaacgtcgagccttgtgaccgcggatagctagctaggtcgccacccctttaaattgcgccatgaaccaccgtgaagtcttcattgtcttccggtgtgatcagtagacgccaaaattcgcggtgtctccccttctttgccccaaattggtagtgcatagtgaattagtagtaccttacggctgtatagccctagcgtgactgtccgtttccacctgaattcatcgcgacgcccatttccc

SEQ ID NO: 20778 - DNA, 766 bp, Zea Mays
cactacttaagctcctgagttcgaatcccagtggaaacgaatttcagaccagtgtttacaagtcgtccgactaatcgcgattagtcggtctggtcgcctggaagagggcgattaggaggacgacgcgattagggtttctagtcgtccgactagtcgtcgacctgggcgattagtcgtctggtcgaacacttcctggtcgtttttggtcgttgcaattttggtactgggcttcactctggtttttggcccatctacagtagcccgttcctccaaaaaccctcccagccgccagaaacccgccataacccttcccagccgctagaaaccctactcctctcctctgtcctctctggtttctgccgacgtctctgctccagcctccaagtgctccaaccgtccagtactccagtgctcctacgtctgtcagctagtcaagaattgaagatgagctcgtcatctgaaggtagcacctgctctcccttctctgattatctcccagtctcccttccctttccctctattacctctgcagcgtccggaagatagcagtcatctggtatctcccagtaggcagtagcccaatacccagtagttaccgtgcatctctgtttgtgtgtttgtgttgtctgttcagattttaatggtggctgtggacgtgctagtctgctactaattatgcctatattattgcagaaatgcagtgtttatatagttatatacatatgcatatgtccttaaatctataggacgactaacggacgaccag

SEQ ID NO: 20779 - DNA, 302 bp, Zea Mays
attaaagcttacctcgacctgggaggaaacttgccttaacggtgaaggtgttttatgtgctaaagagcttaaagctcagccttgtgatgatgatgaggtcaccttattaaaggtgggaagtctccttgagtttcttttgatattgagggggggatgcattagtagtgtccttgagtttctttttgccttaaggtggagaatgcattagtagcgttgatagtgcttatcatgatcttattgttgattctttggtgataaagcattagttgtgttaatattgctgatattgtgtagttgttgat

SEQ ID NO: 20780 - DNA, 783 bp, Zea Mays
gacggggcagatccggagccattgtagcgcatcctgccctagaatgatgggcatgtacgccatcatgatgtcctccgttgctccagcagcccgagcggtggtagtgtagacagccggccaaccccgggtcctgcatgggttcgtatttgtcgatgttagatactttgaaattgggaggccattggatggctcgaagacgacgggtgagcccggagatcccacacgtatcctcctgtcaatgatcacgccgtcgatcccagggaggggagcgagtgttaggtcacctcgaccgtccccggactggactgttagtggaggctgctgctaattcaatcctggtcgtgcggctgtgtgtcgttacaccatgatcgcggtcgtattcctcccggtaccttatttcattctcatgccgatgattgcatgaagaactgatgttgctccgtgcgcctcgtcggctgttgatggcatgacgtagatcgtttggtgggtgggcgagaggtagaagatgattggccgtctgagtaagcacccaccgatagccctccgcgtctagggttcgcgggaggccgtcgactatctacgctaggacccctccaactttgctcggcgtgttcaatgctcgggcaaagtcagggtacatgttttaggcaaggagcgaattttcccatcgaagcctagcatcttgctcatctagctgccgctcgcattccagagcttgacgacagtctcggcggcgggagttgcgccgttctcgatgtgttctttcatcaggagtctccccca

SEQ ID NO: 20781 - DNA, 747 bp, Zea Mays
gtctgcaggatggccctaacgtcgcctgccagcggagtggacaggacacattaaatgctgagggggcacatcgcctgtcagcagggtgggcaggcggcgcgtcctcttcgcaataaatgcagagtcagcgcggcttagaggccttatgtcaggctccgcccgctggcttatgtcacgggctacaagccacgcggcagcagtgggtctccgcctgagcggggagcgcaagcgcataggataaggcctgacacgtgtcagtaccggacccttgcttatgctagggtatcccctgtcccgggacctcgttgtgtcccggaccttactcggaggtatctggaccccatccaagggacccggcatgcttacttgggagtcccggaccgtaatcgggggttcaggttgtgcgtacaggggtctggtgctttcttgcggaggtccggtccaactgatacatcctaggatgtatcaccttttctcgccacgtggtgccccttgagccgtccacgcggtggggacgggtgctgtttaccgtgcggctagagatcgtcgtacgggcaccgcatctccatactgtagcaaggggtacccctgattcagggtaccgactgtggcccccgggcccgcctcaggggcggttacgagcctgtaggtggggccaaagtttgactgattggctcgctgcttctgcgcgcccgtttgatgcaattactgtcggtccgcccttggtcacgctgactgccacgcctg

SEQ ID NO: 20782 - DNA, 416 bp, Zea Mays
cattgctgccgtggtcgagaggtacgccagggaggggagaagcccgcgcctggacccggccgcagccgagagcttccaacttcaccactcccacttcagccttgagagtaagccaccaccattacgcttgattttagtaagaagtgtcatacgaacgtttcggtgcttgtgcttgtattttggatgttagcgtgcgataggaaccattctggcttgatcaaattggcgaaccattccggatttctcgaaatcgaactgcagagtaaggcaaccttagcttactgttttcctgtgatccacgtttagttattcttcatgtcgttttgactcagaaaccattcccgaaaggccgaaatggaattgctatttgtccagtgggttgatttgtattttaactactgtctggctgattattt

SEQ ID NO: 20783 - DNA, 604 bp, Zea Mays
tgggtgtacccatgttgagccttcttgaagaatccaatcatgcccagcccccagcatgcaaaggagcgggttatcaggatcgtttgcaactgctgagctggtaggtgctgctgcttagatatgaattggcatgctttgcatctctgcactggatcagtcatgtctttctttactttcagccaacagaaacctgctctgaaggccttccctactaaggttcttgatgttgcatgtattctacattatcctgcatggatttcttccagctgatgctttcccacagctgaatggatgcatttcatgaggactcctgctatccctctcctatacaacaatcctcctatgtaacataatgagctgaccgccttgcaatacgctcagcaacaaccttgtcgtctggttcctcctcattttttgatgtatttgataattggctccctctagtcctttaggtctgatctgcctgatccactgccttatattctttggcaggccctggtgtggtgctcggctatcatatctcctggacaaagacgttgggtggaacctgcggccggctggaccccagctttgacagtgcatctgctgctacattgcaatccct

SEQ ID NO: 20784 - DNA, 625 bp, Zea Mays
gcggaccgaccctagagatcgcgttccggatgattaatggaatcgaagctaaaattgaagcttgggaaggctttgcgggttcaccaggaactaggtacatgattgagtttaggccgaatgaggatagagaagcggatcgacagagagggcgcatacggcggcgttctacggagcaacggagcgttttggtggtgggactttagcaaactttgattggttggcaccaagagcaataggaggctaaggacatactagaatgagagacaattgagtgagtactaacccgaagagggctggccacggagaggtcctcacgacggtgctaggaacagggtggaatagatttgtggtctatctgagttctccggtggaattaagccgattactcaagcacttgggtgtgcggtgtggtgaagaagttgtgcctgggctcaatttataggccaatggccatagatggatgagattcactgagctgtaaacgcgctggcgagctcacccgcgcgggtagagccacgacgaactccatgtgaccgccgattaaccgggcagcgccacgtcgtggaagatctttaccgcggccacagacccatccccagccgcggtggcgatcttatccccagcg

SEQ ID NO: 20785 - DNA, 645 bp, Zea Mays
caaacacatctaccacaataatcaaacccagtatatgtgtgtatatcgatgcacacttcacacaataatttgcattttaacttagacaccacatgatcactactacttttcatccgcgaccataaccatgcgcatttagaccaaaacaagcaaatcaccgtgattacgagcttaaccaaagccatctaacaagtcggctaaccaaaggaacgacatagcccgctatacaacatacacgtcggcttgcctattattatcgcaatctgatacacaacatactacaacatttttataaacatacatattcacatgtatattcacacatcgaccaattcatatgaaccgtaaaccaccaatctccaactcgcaaccatcatgcgcttacttcccaaatcatgaacacatacatgtttatcatatgaacagagcatttcaataattatcccaaaacaactaactccattacacaacttgtatcacgaacctacttgattacttgaagcgtctactcgaaatcgtgagcacaaccatacactatatgcgaagcataatttaacgaacgcataacgcattgactcgacttataaacatagaggaagcgatgactactttggcatgtcaccacctctctatttaagccaaaac

SEQ ID NO: 20786 - DNA, 478 bp, Zea Mays
aggatctagtgctcgattgaggatagttactatagtcaatttgtagctggttggttgagcttcaactttgttagagacggattagtaagtattcacatgaaaatttgagatctaggctctgcaaagtggtctgtcaggatgactaaatgagaaactgatggtacagtatcgaaatatctgaggttcagttcatctcgccgctggcgaccacacgctcggattcgcaccagacgctacgattcgtgctcaacggagtactgatagttgcttggggtagtaaatatcgccgtgtggatgaacttgagccactgtttcactccagccgccgtgtccgcctgacttatggccaattcgaatgaactcaccagagttagccacctatcgaccatgcgccacgtgccttggtgtcttaccacgtcgcagtagctcgtattacacacgtccagtgatcgccggtgagctcaccacggtgaaagcc

SEQ ID NO: 20787 - DNA, 273 bp, Zea Mays
cactggtatataaattgtgacattatggtgttgcgatttcctgctgcctcagttgttatgcaggtaaaatattttaaatcctttgttctgaagcactatccgattagttttgaggaaagagagtgttgcaatgcctgtataggtatcaagtgtcagtgtacagatgtccactatttgccctcctgtttctgcatcaccgattcataatgtattcaatcttaaatctagctaggacatggattaatattgtttagtgataatggtatgcttggc

SEQ ID NO: 20788 - DNA, 357 bp, Zea Mays
cttcaggcaccctgagacatttcttcagctgagatacatgaaaaacatcatgaatatccgcgagatgatccggtaactccaattgatatgcaacttctcccactcgctttaagattaaaaagggtccaataaagcgaggggacaactttcctttgaccttgaatcttctcataccccggagtggtgacaccttcaaatagacataatcaccctccttaaactcaagtagtcttctccgggtatcagcataacttttctgcctggactgtgcaattctcaaattctccctgatctgttggacttgttcctctgcttcctgtataatctcaggtccaaacaactgcctttcaccagttt

SEQ ID NO: 20789 - DNA, 306 bp, Zea Mays
tgtcatgcttgtcagttaggtcgccatgttcggctcccattccctacctcctcttctagggcagcagacatttttgatctgatacactgtgatgtatggacatcccctgtaatcaacatttttggctataagtactatttactcatactccatgatttctctcattatttgtggacttttcctcttcgtcagaaattggacacttttcccaccctgtctcatttcttcgcttgggtctccactcagttcggtagcaccatccgaagcatccagtgtgacaacgaccgcgagttctataacaatgcg

SEQ ID NO: 20790 - DNA, 464 bp, Zea Mays
gacaatacaaagttgcactagacaaaaaggaacaatgaggcagacacgttgagggatatacctagcacaattatgatagtatggacgtacatgtacatatgtatggggctcgtgtgcgcacatgcatatatgcatctgcatatggaatgcagcgagactgagggaagaacaggcgggggggaaagaggaaaacaaaatctgcacattgtaaattgaagaccagggtggtacagaatgcataatctattgtccgaagagaatgcggcgaggttttctacttttgcttttccttggcagacatcagacagatcacacatgcctgcatttcagtccccagaatcgtagaccagagaagaaccatctttgtaggttttatttagcccagaaactcatcaccgtccagctaaaaaaccaaggcaaactcagttgaagaattggtattctgctccaaaaaaggaaagttg

SEQ ID NO: 20791 - DNA, 317 bp, Zea Mays
gtgatggggtgaactttgagctcgattttgaatgtgattcggtgactatttgatggtaagcattgtggcaaagttgaagatggattataggtgtataactttgatgcagaaagttgacttagccaccacataaaagttggagaaaattaaccctaaaaatggactgacagactgtctgatgaagccggccatggtacagtgccccgatggatcagaccgccagctaagctcgccgtcgttgatcgccgtccggattcgtgcacggtatgggagggataacgccggggaaaagggtgattcatacgtggcgacatctc

SEQ ID NO: 20792 - DNA, 368 bp, Zea Mays
ttcagctcctcatgtccttgtacaacaagcaccgctcccaatcccaggagaagaagccagacacggcttccgatccaggtggtgaggaagacagcgaggccaggctagagtcggcgccggaagacaagaagccggcgtcagcagagcaggaagagcagaagccagcggcgaagaagaaaccgagccggaagtacagcgatggcgctgcacggaagttgaaggacgacggcgaaatgggcaagggccgccgtgatgaaatccaagtggggaaggctataccacagctggaaggggagcgccctatgcggaagaagctccagaaggcgatcaagctggttcagctcctcatgtccttgtacaacaagcac

SEQ ID NO: 20793 - DNA, 473 bp, Zea Mays
gccggtatgtagtacctcctctgcatcgcccatattccaattactttttacaccgagtaattcgacgtggtcgtcgggcttcgcggcgtggtgctctggtgggccattgccgtcgctcatgggcgcgccgctgcgagcgtggtgtgcgcggccgagcttggctgctggaggatgaagatgatcgcgccatcgtcgatcgtatgttgaacggttcggatttggtctagccatcggatgtggttgggtgaatctgagccatcggttgcgtgtcgggcggctgtgatcgtgctctagtctatatgaagggaccggggaccgttcgatccacagcggacggtagatattagaagataacgtttcgatacatcgccaacctaatctgggccgtgcgacgtggatccaacgactctgggtgcttcataccccttcgcgcatgtcaagttgcaaaagaacccctggaacctttataaatc

SEQ ID NO: 20794 - DNA, 585 bp, Zea Mays
cgtggataagggtcagccctcgccggtgataagaatgccacggcggtcgggatgggctggcggccgcggtaaatatcctcggcaatgtggcagcaaatcactgaggtggcaggctccggttaaacggcggccaccgtgccatcacctggttctgtcgcgcggtgagctcgcctgcgcaatctaaagtccgcggtcctcatccaattctggccgttggcctataaattgcgcccgggttccacttctttatcacatcccgcacctccgcgatcgagcactcggctcaatttcaccgaagaacccacaaatccctctctcctctgttcttgctccgccgtgaagaactccttcgtggccagcgctcctcgggtcagtaattatcaaattgctccctgtttcagttagtctttgatctcttattgctcttggatgcggcaaattgaagtttggccgaagcccatcaccggaacgcacccgtgcgatgtaaaacgccgccatgacaccctttccgtcgccccacctttctgctcgtgcctagcccaaaacttagcatgtgcgtcatctctggtgaacccaggaaccttt

SEQ ID NO: 20795 - DNA, 459 bp, Zea Mays
cgaggaagtgggagcagtggaagcaggtgtggtggaggctgtaggtgttgcgagggtggtggtaggcattggagtggcggaaggtggcgtggtagtagtggctagagcagaggggtctaatttggctagagtggagcgtgcccgagacgagaggcgacaaacatgaaaggttatctagtttgagccaatccttaactgagctccctgctctgctctctctcagttactgctactgctctagtagctctgtctaattttttcttcttctttcctccttgtcctatcggaatgggcgagggcgatcctgatcatcgccccctctcgtaggggtgacattctttgtcctcaccatactgattgctaaaactgcccacacactactgatatgttgcacaagaattagagaagataagcaagagcagcaccatagtagaaaagaagagagataagaaagatttg

SEQ ID NO: 20796 - DNA, 781 bp, Zea Mays
tgttgacatggcactagtcatcaacaatcaggactctaagccataataatctgatgtattatctagtagatcaatcaacaacaaccatgttcttattcatttaaatgtggaagtttctcatgcgcattgcggtctcatccacgaccaagaagctcccatggacaacaacgttggcttaatgctacaccagattgagcatgaccctgacctggtttttgaggaacttgcccttgaatggggattcctggctctggaagaggctagggaaagaaataacataactcatgtcttatgggggccatattttccccatctgtcaatgcaagtaagtctgtttaggttcctatggactgggcacccttcttcactggaaagttcctttcaccccgagtttcttttcttgggtcacaaacttcctagggtcaaaggctaggcctttcttctccacgctaagaaatgatgacaagatcttgagttttgctctgtcaaagacatgcctttataagtcagatagcttcctcggtgatggtaaatatatggatgacgatactcctagtcatgtcctgcctttggaagactcattgcgggggaaaagaaaatcatcttacattggtggactctaatttgaggagccttaggatcaaaggattgtagtctattttaaaaggagcaactgcattagcagaagatgcatgtcttgcaaccctaaccttcttcactatcaacagatctcatcaggaatctcagcacttaattctacaaaaatggatgaatccactct

SEQ ID NO: 20797 - DNA, 596 bp, Zea Mays
cgctacatgaaggtgcacacaaatcgagcaccgttgaaccccttatgcttcagcgtagtagccgccttaaaaagatgctccaccttgctcttgaactgtgcctccgcgtcgtagtgccacttcttcgtcaagatcgcctctagaccggtgaaaggcggggcgctgccagccacgttctgacgtaaaaccactcatttttgtatcgcatggaggagggaagcgggatcttgaagtactccaccttttgaccggcgcagagttgaatgttggcagaaccaacgtataaccggtcgccatggcccggagtcactcgtgcgctaaagtaccaccacaacttctagtaggggttgatccccaagaacgcctcgcatagtgtgacatagctcgctatgtggaggacggtgttagggtggacattctggatctccagctagtggtattggaggatctctcgcatgaagggatgcaggagtaggctgaacccacgttcgtagaaggacgcaagcacgaccacctcatcattccttagacgtgatacctcaccctcgccctctaatctccactgcaaaatctcttttgtgggcatgaaccttttc

SEQ ID NO: 20798 - DNA, 707 bp, Zea Mays
aacagagcaatcggcttaagttggtgacgacttaagacggtgcgacatgctcacgctaacttggcttagggtgaccactataccctactaacggagcaatcggcttaagtcagtgacgacttaagacggtgcgacatgctcacgctaactcggcttagggtgaccactataccctactaacagagcaatcggtttaagttggcaacgacttaagacggtgcgatatgctaacgctaacttggcctagggtgaccactataccctactaacggagcaatcggcttaagtcggcgacgacttaagacggtgcgacatgctcacgctaactcggcttagggtgaccactataccctactaacggagcaattggcttaagtcagtgacgacttaagacggtgcgacatgctcacgctaactcggcttagggtgaccactataccctactaacgtagcaatcggcttaagtcggtgacgacttaagacggtgcgacatgctcacgctaactcgacttaggctgaccactataacctactaacggaacaatcggctcaagtcggcaatcacttaagtcggcgcgatatgatcacatctacccatcttaggcgaccactatgccttaccagccaggcgatcgacttaagtcgaaaaaagcctcaaaaccagcacgacacatttactttcacaatttttcagggtgactgttatc

SEQ ID NO: 20799 - DNA, 599 bp, Zea Mays
ctcagcacttcagccgtttcaatgcgcttggggtgatgtgttaaaaccttaacttttttcgacctcggcgtgctagaagtcactgaagcaccaatctttcttttctttccttgctttcgtgaaggataacagtaatctagatatacaaatccgatgacatcaaatactctattcagcctccttttgtctcaagccccgaaggccgttgtcataacatcatctttagctttcgattaggcaccaagcaattcatcactggttgcttcaatggcatctagccaacatcattcggctcatcaaactagctcctgtatttgaacgtgtacttcaggtagattaaaccgccttggctagacccagcagcagcctcctttggcatctcccacccacttgtgagtggccacactctataagcaatgtgctcctgaactaagtcccttgtgcctatgtaagtacatactgtattaaaagcagcctggcatgcttgtatatcattcccaagggcagtggatggcctcctaatgccgaagcgagaccatataggacgttgaataatccccttaatatcctctctttcaaccaggtcatttttcatgtag

SEQ ID NO: 20800 - DNA, 745 bp, Zea Mays
acggccacttacgtactcaacaacacatgcagacatataataatctataaataaatgtaggaaacaaataatgtataaatacttcacaaattaataaaattaccatcatctcctacatgcagtgctttatacaattgagtttcagaaacgagggctacctcactcgcacatcatattttggatatcgaattctccatcgcaagctacatccactttcatagactcttttatcagtgctgaaattccagatccaacgaccgatcctcttggatattgtttagtggcagaacatatgatgcatggtccatgtggagcattgaacccaaattctccatgtatgaaaaataatagatgctcaaagaggtatccaaaagaattccatgaagaaactaacttggatgaacaaggatttgctacatacagacgaagaaacaatggacgctatgttatgaaaggcggttacaaattggataataggtgggtagtgccatataatcagattctgttgaagacttaccaagcccacatcaacattgaatggtgcaataaaactatctttgtaaaatatcttttcaagtatgtaacaaaaggtccagattatagcaaagtatatttgcagagagtaagaaatggcgaagacataccttacgacgaagaaactaatacaagaaacgaggtcaaagaatatttggatactcgctatctatgtgataaggattcctgttggcgtgtgcttggatatgag

SEQ ID NO: 20801 - DNA, 1163 bp, Zea Mays
ttgagatgtgcccaacttttttctggctccaggattgcaactgctgtgatagtctactcaacttatctgcaaaacgttggagagggcatgtagcttcatccgactgagaccatgaacttgccacctcatctatgaagccatcgagcaccaaaggacagtgatccgagatcaaagaagcagtgctttgcaataaacagtccagaaagatgtcctcccattcactggtatacaagaccctgtccagccgaaccaaggtcggggaagaccgtttattcgaccatgtaaagcgcctccctaacatcagtaattccataagctgaagctcattaataagcctccgaaaccgacacttcatagctctatccagattaccattatttttatcttctgcccggcttataagattgaagtcaccccctatcacccaaggtccctggcacatagaacgcaccaaacggagttcttgtaaaaacaaaagcttcttatcatccagatgtggaccatacactcccagtaagccaccagggtgaggcattgtgttgatcaaactgtcataaacctcattatggtttgcagtgtgctcactcagaattttgccctgtggcttttgcatcctatacaatcagcaaattcatgttgcagattgtcctgtttctgttaaccaagacttgtgcgcctgggattattagcgccacttctttgtgatgcgctagtaacatctgggcagagggaactcacagtagggtcaaatatgagaaatgctcgccaatgaattatttctttatctatatccatcaggaacaggtatgcgaccatgtaattgtcaggctatttcatggcaggtatgctgtactatcgtttcttttttttggtgaaggtgctgctttatgtcaaaattgatagttgtcaaataaagaaactttctgattgagtgctgacggactgatgccattctctctctgaaagcttgtgggttacattgttgctttgccgaataatggtcaacctaataggggggcactcagtgctgttgttgatctgggatcagattctaaatgcggggaaaagctctagcaatggttatcccaatccccagaactagctactaataggcacatgtttggatccttttcaatggtacctcactcagtatcttgtgtatg

SEQ ID NO: 20802 - DNA, 309 bp, Zea Mays
gtgatgcttgcagtttgtgaagatttactccaaaccatagtcactgaaaacagggtcgaaggcatagaaccaagacccaggaacatcatccccgacctgggtacacggggttattttcaaccttgccgtgtgtaaacctctcacaagttacaagtagcgaaccacgttcctgaccccattgacccagaaactgtgactacatctcaaacattgttccagacattaattctggatggtaatttatgagttatgactgctaataaccaattcttttgcctaataacttgccacaaatatttgaaaaacaac

SEQ ID NO: 20803 - DNA, 550 bp, Zea Mays
cgctcatagcagggtcccgggattccaggacagagtatacccaagccttagacaaggcctaggcgccttagacaaggcccaagcaggggtccggtgccgacacgtgttcggaccttatcatatacacttctgctccccgcctaggcggagacccgatgctgccacatggcctactgcacgtgacgtaagccaacggatggagcttggcgtaagcctctgggctacaccgcccctgcatttattgcggataagacgagcgcctgtccattccagtgacaggtggcgctcttggtccacgttgcgtgggctgcgctattactcatcattactcgcacgttaccaagaaaacggtcgccgcctatcaatactgcatggactgcggccatcatggcgcccggtgattactcaggtgttattagtattaattatccacatgatgtattctttccattatgtccctgggccagcatgtcggggctcagcatccttgtatgtgcctcccttaaactataaaagggaaggcacacaacgttacaggacaggttcacac

SEQ ID NO: 20804 - DNA, 602 bp, Zea Mays
aactaatcctagccgcccatcacaggatctaaggccattgcttctcttccctactgagcaggaagcaaggcggcggatcaaggtccgcacggtggcacagcggcgatgcggcggcctagtgctccgaatctcaattaaatgagccctgacctcacaaaatatgcagcgatcacaggggtaccgacaatttgactatggtagttgattggggaaactgcacatacgctgaacatcaactcgccggtaacccacaccgacgaccccaaatcatggcgctagaccatggtctcggttacgggcatgccatagatgtagaaggacataaggcgaaacgcaatacgcaatgctcaccagggtttgcggcgtgaggatccctccactccgacgagcacgacgcatgcggtcggcggcggcacagcacccggcggagcaatttcctcccaagcgatgatggctgaggtggtagaaaggaggggagaatcacgggagtcggagggacccaggtatcccggtcgagcgcatacttatcccatcgcaaggaacgactggcgagtctaccgggcgagcggcaatggcggctcggtttgttaccgagaagcaag

SEQ ID NO: 20805 - DNA, 781 bp, Zea Mays
gagggaattaggagagaggagctcaccgcgggctcgacggacagcagcaaccgctcaccgagatcaacctagggcaaggggagaggtggagagaggtggaagagagggagagggaggttgctacgccacggtgggcctgagccggggcacgcgcgcctgggctggggttggccgcgagccgtgctgactcccttctactcgcgctcgccacgatgattcgtgctcggcttagttagataacgccgaggggtaagaaaatatcgcgtcgcggttgaactccgaccactattttactcccgccgccgtacccgagtatgccacgaccactttggataggttcctcggagttagccacctcgcggccttgtgccacgtgcctcgacatttaccacgtcgcagtcgctcgcgttatgcatgtctggtgatcgccggtgaactcgccacggtgaaagccactaatctcttgcgctagtgacctcttccttctccggccaccaccgcgccatcccaaattcacaggccaccgcccccggagcctataaattgagtgtgtcgtagggtccgtaaggtagtcaagcacccaatccaccaagccgtgcctccaattgctcacccacgagccccaatttcatatttcccccaattcggttcaaaacgccgcgccttgtgacctcgccgtggtcaacgtgctccaggtccgctcatgccccctgctcttttgtttcagtatccttgtgtgtccctgatgctccctgacctagctgattaaactagaacccct

SEQ ID NO: 20806 - DNA, 310 bp, Zea Mays
gtaacatgatgcttatcgggacaccgacgccacgccaccgaggccgaacggcagggagatcggtcggcgtcggggggcaagcgccggtgtcgttgtcgtttgcccggggcgctcagcttttgggtgagcagggggcgctgaacgcgtgatggccgcgccatgtctccgtgactgcaaaaggggcggcgcggcatgacgtggacgacgagttgatggatgaatctgcttggtccccgagaaagcgacgatccgccaatcgccacagctccggcgcaacgcaatcgtcttccacccacagaaccaccccccc

SEQ ID NO: 20807 - DNA, 302 bp, Zea Mays
ggcgatgtggttatgctgaatgaagaaggaacagtgcgggagtgaacgctcctacccgaaggggagtagtttgggccgacgtccttggccaaggcaatggtccagacataaggtacagtgtgcccaaaggcagtggtccagaagcaaggtatggcgtcaaaaacagtgttcgctgttggtgatgaagagcacaaaaagtttgatgaagaccaagtgcatcctggtggtgcgcaagaggtgcaacacaattatcgatgtacatggagcgacaatgtagatgcattgttgtatgccaaccatgg

SEQ ID NO: 20808 - DNA, 675 bp, Zea Mays
gggatgtttgcaccaccgtgtgctgccgtgcacggcaggagtgactggtgccgggcgactgggagcctgtggtgtggaggaagcagcttctccctccaccgcaaaatctaccgaagtctcggcgcggtgctctacgatctgcaccatcatgattgggcaagaaatcaagcgaaaacctaatgcctaggccccctacctggcgcgccaaatgtcggagagtagatctccggccgggtggcgtagtgcacccgccctaagtcctgagatgaggagaggcttaggcatttcgcttgattgatggagagaaggggcagtacacaagaacacatgaggatttagagtggtttgggccgccagagcgtaataccctactctactgtgagatgtattgcttgagggcttgtatgagctagcgagtctgagattgcgtgtgtgtgtaacgttgcatgcctccccttttatagctgaaggggggcatgcacaaagggactgggccccgacatgtgggcccagggacataaagaatatagtgcttggatcctttaatatctgttgtcgagtccatcctcttgcgccctgacgcccaagatctgcgtatccttggtgtacaggggaagcttctggcggaagagaagatgagtatagcgcgccgctcagcataggcatactgttcac

SEQ ID NO: 20809 - DNA, 502 bp, Zea Mays
tggtaacccaacataatcttgttgtagctaacttccgttttaagatccgtttacaacggaataagcataacaaggtcactagaacaaagtggtggaagcttaaaggggatgtggcataaactttcgaggagagagttatcaaggagggcccttgggcagaagagggagacacaaacatcatgtggaggaagatggcgacatgcatccgaaagatagcttcagaagattttgggttgagtcaaggaaacaaaagggaagttaaagacacttggtggtggaatgaagatgtccaaaaggctatcaaggagaagaaagattgctacaaatgcttacatcatgacaagtgttcagacaacatagagaagtacatgatagcgaagaagtctgcaaagcgagcggttagtagagcccggggtcaagcctatgacgacctttatcaacggttggacacaaagcagggagaaaaggatatctataggatggccaagattcgtgaaaggaa

SEQ ID NO: 20810 - DNA, 492 bp, Zea Mays
ctgatattatgccccaatggtgattccagccaggggttgaggggtaggggcaaatgacctgtgcgactataccgataactactccatccgttctaatttatgctataaccaaagcaaaagtagatccaatctactaggcaaatcacctagatgcaaaccatcatgataaaaatatgtgcatgaacgactttggtttcattgaagggaaatgggtacaatcaagataacatgcgagtagaagatcatggatcattaccagtagatgtgcagcacagcgaaaaaaacgtgacgatgcagtggaagtcgtcgtacgtcctcacttaccaccaacacgttaatctatgctcctatttgttgctgatcaacaccgcagtagcgtctccatggtaaccacacttgcgcaataaaacactacaacatcaatgtgctagcaccacgcacgcaacggaggaaagacagcggcttgggtgttctcaaccttagggagagagg

SEQ ID NO: 20811 - DNA, 537 bp, Zea Mays
atcgttgtggtactggcgcccagaggttgtggcgtctaaaggcccaaggtattgttgtggatgcggtacactggtcatccttcggctaccggcgccgtgacatggaagtctcagcctgctgttgcacggtgaggtcaatgaggcctcgaatttcttggtgagttcttcgttcgctccgagtttccacctcagagtgtttgtccaggagtaccacagtggctacgatgttctggctcacccgatggaaccgtggttcgctggccccatcataggtcagacggcggcaaacactagttgttgtgtcatgagtctgccaaccaccccggtgtaaccgccccgtcctccatcgcgacaacccccatctcctagtcatgggaccttggctactctaggaagagcttggtcttagtggcggtttttgggaaggcgggtcgagccgaggtagggtagatgtggtggcatgcattgtggtacgagtagggttccccttgggatgcttcacgagcagggagtggtcctttagtgggttggccacaa

SEQ ID NO: 20812 - DNA, 1424 bp, Zea Mays
cgagagagagagaacaggaagaccaatgtgatggcatgcttcttaccggcggtgagtatggcgacgaggctgtccactgtgctccgcggctccgcggcggaggtcaatgatccggcgagcaattctgagacttccggttgctacccctccttggcgcgaccactattactgcctcgaggatgtagtgaagctcctaggccggatcctatgcgctgaacggtagcagagacatgcttctatgacgatggaccctctcctctccggatggtggtggcagctacaaggacttctcgttgttcgtgcaagacgggggttcatgagggggaaaggttgcggcgcatagcctttatactctgggtcagggagcgctcggatagattgaggtggttttgtgcagcttgaaccgaatcaccctggatacgtgctttctgttcgtaacgacccgaggaagaagcttctggcgacatgaccccacgtgccagtgaaacggaacatggcgtggttgggagacactggtgaaaggatcccacatggtagtggacgaggtcgtacgaatggtgacgttccgaagggtcccacagatacaaccagagtgtatgcgaggtggtatggtggagttgggttggcttagcgcggtgaagtagtgggccgagaaaagaaaattagcacaggtatgatttttcatgttttctttttattttatgtttgctatttccttatgaatttctattcaaatccatgatttcaaaaccattttaaacttcaaactcaaaatcaaatgctcaaaccaaagtaccagtaggcagtggcggacacaggacaaaatttcaggtggggcgataacgtaggagacaaatcaatatactagatcatttgataaaaatagttccatgataataacacggagattaagtgataatatgagtagtgttctaaaataacatgaacaccgaaactttattttggccaccctaaaggagagttggagagaacaaaggggtggactggcggagactcgacgttagggcgaagtggacgcatcaacacgtcggggtggagagtcagctactccaccgcaaaatgatgacggtgaggcgacaataggcgtgggatagcgagggcaggcgatgatgcgacggtagatggcgacgacgaggcaaaaggcggtggcagcaagcgacagccattgtcgcgttgcgacggcacgatgagacccttgtgagagagtgagggcgggtggtgctgtgatgccaaggtggaatcccactaatagcctacccatccgccggtgcggactaaaaggcaaagtagctgtactgcgtgcaggataccgacatggtgatgagcaccacgactcgggtggggtgtgggctgagtagtgaagtgaagcaccgagaaaaagttagatcaaagtctagttttca

SEQ ID NO: 20813 - DNA, 612 bp, Zea Mays
gcaaggtacaacggcatctcgacagcaggtcacagttggtgattggggtatatgtggatgatttgataatcactggcaccaattgtgaagatatcaagcggttcaagcaggagatggcagctgttttcaagatgacagaccttggtttgcttcggtattatctgggtactgaagtaaagcaaagcaaagagggaatttcactcagccaaggagcatatgcagcacagatactggaaagaaatgggatgaaagagtgcaattcgtgtcaaacacccatggagacaaggttgaagctgagcaagttaagcacagaacccctggtggatgctactgcatacaggagtatggtagggagtctgagatacttggtcaatactcgaccagaccttgcatttgctgttggttatgtcagtcgatttctggaggagccacgcaaggatcatatgatggctgtgaaacatttcctgcgatatgtgaaggggaccaagaattggggtctgtggtttggtaggaataaaggaaaggaggctggactgatcgggtacattgatagtgattatgctggggatattgatggcagaaggagcacgactggagtagtcttcttcctta

SEQ ID NO: 20814 - DNA, 473 bp, Zea Mays
gtattatgtgcaagatcatataagttcaatatatgaatttcctttgcatatgtaagaaaaacattgtttgaatcatgctgcactatagatagaatcactgagtattgtactattttttcacggttgatttcattttactttcattcctttccaattcaactattaacataacagaaataacaattcagtggaatgaattatgctggaaagaagagggccttttttcatgtcttttgaagtagtttatcactattctgttattagtttcacactggtatttttcatggtctaattcactaacggttttggcataatattgataaagaaagcgatttgatacaggtaaagctagctttcttctttttctccctgctccttctcgtctcttcaatatatataagtattcataagtctcttgtgagcgatcaacgaccattcatgtgtgatagtaattctatacttctgttcatttt

SEQ ID NO: 20815 - DNA, 361 bp, Zea Mays
gagagctcctcctcggcggcggcggcggcggcgcagtgacggcgggagttgatgcttcgcagccgcatctggtgatccgttcgtcgccctttgtgttgtgctcttccaaatccacggccattccattcttttggcgggtgctgtaccattccattctttttttctctctctcttgtgttaagaagattccgtgttacgaaattgtaacacagtgtcacgtggagacggtggtccgtccgatgctcatggcagcagttgctcactccttgccgatgagatgagagtgtcagcgcatgaagacaagcaattaacattcggtgctgctttgctctgttgcttcttcagcttcggatcagatgcc

SEQ ID NO: 20816 - DNA, 421 bp, Zea Mays
cttttatagctcaagggttggaccttacagaggatatctgttttctacgagagagataggatcctctaggttgtcgtgtgggctctccgtagggtcgtgtgtagccttacttcggtatggcgtatcgtctcgctcgttcgtcatacgaacccctgtagttagtccgtcgctgacaccttcgtagtagtgcgtggtgggtcccgtgggtcagtcccatggtgcggttgtgtgtggcgtggctctgtctgtcgtcataggcctgcgtcaaccgctggtgtgcgtttgcatacaccctggtatggtttatctgttgcgttctttcgggcatgcgggtcactgtagagactttagcgttgaggcccttacgaccggggttgattagccccatgagtcagtgagggtatatccatggacacatggg

SEQ ID NO: 20817 - DNA, 540 bp, Zea Mays
gaaaagatcttcaccatggatgagaccgtgagctggcccccgtacccacttgccctgcagccggtccaggtgacctcgccggagtctgccgcctgccactcggatgccacgtgcttcgaagccttaccatgtcgtggtaacccgtcataggaagcctgtccatcgcctgaagcattgcttcggtgaaagccacgatagtgttcaccggtgactcacccctttctccggtcgccagctctcttctccaaaatttggagccaccgctctcggaggctataaattgagtgcaccattagctccgctaggttgttacgaagccagagccccatccctcgcctccgatcatccaccacagcaccctaatttaggatttcccccaactcagttctctgcgccaccgtgtgacgccgcgtcgtggacgccatctccaggtccgctctcgccctccttaccctcatttcagcacccttgcacgctagggatgcttgtcagctcaaccaattgagctagaccgcgcttaatcgccgggaacgcctcggg

SEQ ID NO: 20818 - DNA, 653 bp, Zea Mays
gttgaagtacttggagaaggagaaagtagagcatcccattcaattgttcagcccagttccataacaacccaaaagagaaggctctcagctgaagcaagacaaaacaatcaacacacattgaagtcttctaagtcaattgcatccatgcttcacaaagcacctgaagatgtggttcgtgagaggcatagcaaggtcaacactcaaactacattgcagcgaaagagcaaggaggagaaggaaagaacatatatgtatgttgttgattttatttatgagtgtggcttacaacctaatgtcatcaactcaagggcctttgagatcatgcttgaggtggttgggcaatatggtcctgggtatgtgaaaccttcatatcatgatgttagggtgtcgttgcttgagaaggcaaagaagagtgtagatgagataaaaaaagactcatgagttggcttggactgaatttggttgcacacttatgtctgatggttggacagataggaggggttggcacttgatcaatttccttgtcaatagtccagctgcacatttttcttggagtctgtcaatgcctcaagtgagacagcagatgctcagatgttagttgcactactgtagaaaagaattgatgccattggtagagacaagatagtacagat

SEQ ID NO: 20819 - DNA, 803 bp, Zea Mays
aattttaccattggctgcccaaaggcctctggccacggagaccgtgcggacaacccaatgatcaacacgttcccggggattggggatggtctagttcgattgggcgggtgggtgagcatcaccagcatacaaagatgctaaaacgagaacaaagaggacatgatcagacctgtggagggctggccacggcgagctcggttctgcggtggcagaaacttgatttgggggaagactaaaattcaagctctctgatgaacgattgctagcgattttcggtggctgggtgggtgatgaccttgcagggctggcgggggcttcaatttatagggctcaacggcggtggccgggaatttcagtggggacacgcggtggtcggaggaggaagaagagtattggcgcagtggcttggtgtccagcgtcgtggcaattgctccggcgatcaacggggagccactaaggcttacggcgatgtggtggaaagttagagccacgcggcggacaacggcgacggcttaacggcggtgagaatccttatccgagggcggtgagtaatgggagaggtaccgcggctagccggagtggcgtccagctcaccgacggtgaagattctcttacctcgcgatgttatccatctgccacaagcgcgaatccttacgttggtgacacgaatcgcggcgggactcatcgatgatgagcggaactgtcgcgctggcgttctgatcttcatcaggcactgtaccatgggatgctccattcagttaacctgacagccatagtatagggccagatttcttccgaatttc

SEQ ID NO: 20820 - DNA, 1485 bp, Zea Mays
tcggcaccgaccgtacctagaaagtccacggtgatctttgccgtcggagaacctgccagtagccttgtggttagggtactccctgccgtacggcgggaagttggccttcacaacggtcaccaggtagttgttgtttcctgtgtccacgattgaatctccaaacgcgagcaaggctggcaccttaggcccactaggcaccaccataggtggagatggagacggaggaggaggaggagcggccgcatactgaggaggtagaagaggagttggaagaggtgcacccaaacgcggaggagggctacgaggactaggaaatacggcacgaacttgaggaggaggagcaagaataggagtgcgagggggagctcctagtcgaggcggaggaaaaagtggagacggaagtggtgctcctaactttggtggagaaagtggagggatagatggtggagcaccctttcgagagggtggtagaataggagtccgagggggctgctgaacaggaggagatggaagaggtacccctaatcgtggtgcgggaattagaaggagcggaaggtggaatgcccttctgaggaggaggaataacaggagatcgaataggtacccctaaactgtggtggaggaggtggagtgcccttccgagctgaaggaacaggaggggatgggaggggtgcccctaaccgtggtgccacaagtggaggagtagaaggtggaacacccttgagaggcggtcgaggaagaataggacctctagagggatcctccaactgaggagtaggagcaacaggggtaggaaggggagctcccaactgtggaggacgaacaggaggaggtgcgggagatggagcacctactcgaggagacggaagaacaggagtacgagggggtgctccgagccgtggaggacgaggaacacgggcaggagaaggtgcccccaaccatggacgtggaagaggagtcgttgtaggcggagtgcgtggtggcctaggggaaggaagaggaagaggaagaggaggagtgcgagtaggggccccaagacctggaggacgaggagtcggagagggtgcaagaagtggctgcggaggaagaggtagaggagtgggacgtggagctatgtcaacaacaccggctatgataatgccacgagctaggacaagcgatacagtgatcgagaggtggtatagcaatgagagggcagtgaacgccatgcttttggaaagagaagctaggcgtgtggtggagtgtgatcgatgtcgggcacacacactgttgcaaatatatatagtgttggtcacctcatatccaccaagtgacttcgtcttctaaataaatggcagtcagtcagatccgcgcatgcatgcaaagaccaaacgggagactcggatccatgtttatagcaatcccacaactctgacagtgatgcgaagcattcggtcctcaatataggttgagaggccaatgttaggcggtggcgatacatactct

SEQ ID NO: 20821 - DNA, 622 bp, Zea Mays
cctagggccacgagtcagagaaaatatagcgaagagcttacccaggtaaatccactcccagatgacccttgcgcaccgagccagggggtcaggcgagacagaggcaggtggacgggtcggacgaatcgctagggaaccactcgagtgggttccacgcatcctcttgccatatgtaccacgcacgttgcattaacgacgtatgatagcaaaacgcgacacgggtaaaagctagtctggtcccactcatgacccatgggccctagtcctaagccccactcatgatctagaggtcctagacctgagtcctctgcctatgaagccccacaagacgacgaaaggagatcaatggttaggctacaaagactgaaagttagcatgagaagaagcggataggaagagtaatgatgatgctcggacttccgtcgctagcacgctcccccaacagtcccaaaaacacaatagaagacccacatgggaatggatatcgacgtatgtcaaggtcttactgggggtgaaccgctctattttaccttatgtagcgctctcttcttggagaagctatctgtaaccgcccctccttgatctataaaaggggagggtcggtctcaaaggagaaggtccc

SEQ ID NO: 20822 - DNA, 606 bp, Zea Mays
cttttcccctaacctaatttcatctatggctaactaatgagctctagccacgacgaccgcgggtggtgctaagggttgatcgcgttcccggcgattaagggggacttagttcaattgggttggccggtgagcatcacaggtacacgagagcattcaaacgagggagcaatcggtatgaactaacctgagctgagctagccgcagcgaggtgtgtttcacggtggcggagaccgaaattgggggaagttggaaattggttagctcggatgaacgatcacgggtgggagtggatgcgttggcttcgcaatgacctagcgcaactgcccgggtgctcaatttatagaaagagcgagcggtggccgggaattttacgaaggacgcgcgacagtcggaggtggaagaaagcactggcgcacgtgaatccgtggctaacggcgtggcaacctccccggcgacgataggacggccctaggaagtcacggcgatgcggtggcgaggttggtacacgcggtggacaacggcgagggcacgacgacggtgagtagctttatccacggcggtgagcaaggggaggagtatcgcggctgaccggggtggcttctagct

SEQ ID NO: 20823 - DNA, 579 bp, Zea Mays
gatcaggtaattatccttgatccccaacatacgagatgcaaggaggtagtcttccagccatacgttggggttggtggatccgtcgtatttagagatgtttgctggtgcacgtacctttggggggaactacgcctttcggatctcatgcccgaaggctcgcagtcctggtccaggtgggatggggctgcattcgcgccttcttttgagtggctgctcaacttcttcctgctcctgacgcctattgtcgaggatgcatcgggtgtcatagatgcttctgaggtggtccttcatggggacacacgtcctcgtggatcaagaggattgtgccccctactccaagacaagaccgtttgtgggtcgtagctttccgtcctgagcgggaagtaccgatcgatcttggcctactgcacgggggccctctccacaaagttgcggaggttttagtacatcgccttcgcctctggcttgccctactccgagatggattggagcatcatggctggtgcgcgccatgttttgcgcgggattgaggaaattgtgtgccatcgctggtctcagtgagctagtcacatacattcc

SEQ ID NO: 20824 - DNA, 541 bp, Zea Mays
atggaggtgactgctgcagaaaacccagtcctcgaggatggtgttggcagttacctagcaccaaagggtgtcgtcggtagtgatccggctctggtgggtagcacgagctgcaacccagcccccgagggtgttgccggtagtgatccggctctggtgggtggcgcgagctgcaacccagccccgagggtgtccaagtgagctctccttcccacacctccatggatgtccatgtcgggtcgtctccaccacgatctgatggggtgatggcgatgcatgcttcttcggcttcgagcaaacaagtcaccttggaagtcggcgagccagatgcgagaagtctggcatccgctagtggggctgagccaacccctgacaacgttcttcaaattgttctggtttatcttccttcgtcaagctatgacgtagcttctcctgacttggggttaccatcattcctctccaatcttcaggtaagtcagctcttgcattctatcgttcttcttggtaaattatcttccctatactcatttgtcttcgatcacag

SEQ ID NO: 20825 - DNA, 527 bp, Zea Mays
ccagagcagcagtagcagccatattgtctgagcaagaagatgatatggtgacaagagcgcagcgagatcgtagcgactggagctgcagaagcagaagacgattgacaagtatggcaatgccaactcgccaaggaattaggaaaagaaaactaaacaaccgggggtgttatgttactgttactgtcagtttcacagagtggcgagttggcagaggtaggcagcagacggacatgcaggcatggggaagaagagttgtgtgcggcgcgcggtggcggcactagcactagcactagtggtgcaggctgacacgcggggacagctgcaagcatctcgaccgaaccatccatctctctagaacacccggagaagaagaggacagccagtcaccgcttcagtgcgcgcggcgcgtccccttcccgcccttggctcccgccacgtcgtcgtcgagacctcgtcccccgtttgactgcaccactcactccccatcgcagaggccagcgcctcctataaatcccgttccgaatcca

SEQ ID NO: 20826 - DNA, 503 bp, Zea Mays
cttcggaatatctgaaggtcgaatcctgagctgatgataacctgacctcagatctatcttggagaacacgctggctcctctcaactggtcgaacagatcttctattctgggccaggggtacttgttcttgattgtgacctcattcagagctcgataatcgatacacatccttctggtgccatctttctttctccacaaataggacaggggcggcccaaggcgaggtgcttggccggatgtatcctttctctgacagctcattgatctgcttcttgagctcaaccaactctggtctagatactttgtaagctctcttaaagatgggggcggttccaggaagaagctctatggcaaactcaactttccgctctagtggcatacctggtaggtccttcggaaacacatctgggaactcagacacaactttgataatctcaagtgggtctgcttcactgctatcaacagccatctgataacaacttcctttctttggctcaggcggg

SEQ ID NO: 20827 - DNA, 362 bp, Zea Mays
gtaccacgcagaggaactgggggagggagcttggagagggacagccgcgggagttgagggagaaggaagctccctggaggagctgctcgcaggagaggccggcgcggtggaggagaccagaggggagaagacacggctgggataaataccagagaaattgcgtgcgtgaagaggatcagaacgacggctgacggctgtaaaatatcctagatggatgaggattagggagagagcggctggacgccaggaagaaggtacgctcggtgtgcagaggaagaaggaggctggagggaaagctccgcgcgctggggataagaaacaagttcagcggtgtgattttttttcccaggcggatgaccgcg

SEQ ID NO: 20828 - DNA, 503 bp, Zea Mays
gagggaagctagaacatcaatcaaagaggctcgagctaacctgcagaaggctggccacgatgcggtagttcacggtgtgcggaaaaccaatttgggggaaaagagaaattggagctctctggtggctaatcggaggtaggagcgggtgcactggcttcgtgattacctaatggagcttatggcacgcttaatttatagggcccgagggcgatggctcttgaatttggaatggcgcgctggcggctggagaaaggggtggtcactggcgcagggttaccgtggcacttcaccttggcaagactaccggcgatgaccggacacgctagggtgagtcactgcgaggaagtactgcgtttaggcacgtggcactcgagcggcaggcggctaactccggcgaggttatctggaccggccgtgagacaagcggacacggcggccgaggcggaacattgtctcaagctcatcctcagcgcccgatttttcaccgaggatcattatccgtg

SEQ ID NO: 20829 - DNA, 357 bp, Zea Mays
gcgaagttgaaccatttgacgaagttctaactggcaggggagatttttgtgcatgcgtaggggctcagggggatgtatcactgctagaaaaagctagttgtgaacatgctaaggatgtaattcaaccaaacttctcagtttcagtgactggcatcaaagagccttcagccgaagctactgcccttagtgggaagttctattctaaagtgtggatgaacaacggcagagaaatagcagacgaagccatcaggcgaaatgaagaagagtctcatcttgcctcaaaagaagcaaggaaagctgaaggggccgctgggcacaaaagacgtacaggtacgtttgtcatattttagcttcgaa

SEQ ID NO: 20830 - DNA, 757 bp, Zea Mays
ctcggccagggatgtagcgattcgcccgcctgcccttgcggaatccgcgacaccatgaatcctgagcaccgtgagccgcaacaaaatgaccgcaacaatcgtgagcttcgaaacaaactccgaaccccactccgtgatcccctctggccggattccgccgcgacactagaaatcacgaggattatgactccccaaccagccgaagccgtgtatagcttggtgccgtaggcgcatggatgggggtgcggggagatgtgattgccgctgccgccattgatctgcccatatgtgatcctccagcctcgacaggtggtactggggcagcgagggatcccaccacacatatatgtggcctcgttgtgctcgattgagggttggagcgcttctaatttctcgccggaattggtgcttcaccctggaaccgcatacagccgtgggccggactttctgcgccgccatcatcggtgagaacctctcctccgatctcgcccttatctctgctccctgttgcatccttcgattgggatttgtcacatcgagtcgctgcgccgctccctacgacgagggcgcgaccgcgtgtgccctgcgccgtcgcgcgtctccagcagaggaggaagacgagtagagatgagctgagagccgtgagcgaccctatccgtgggatgcacgatcgacgcgggtgatgaaggcggtctcaggcctttggatcagtaacggatggtcccgattagaagaagataacggtttggttaggttt

SEQ ID NO: 20831 - DNA, 565 bp, Zea Mays
ggcgccctgatggcagttcgcgatggtacagtatccccaaacggatctgatcggccgtggcagaaaaatctcaccgccggcgacctctctgcgccaaaattagtgccgccgccgtcctgatttgagtgcggaatggagtggataacgtcggggaggggtaactcgtacgtggcaccatctcctgagctcggccggagttactcaccggcggccgccgtgactcagtgaattctgccgcggtggcgctcatgccgtagttctccctcactgtaccttctaccgacgtggttggcatgcgctagtgatgttgtccgtggccgtgtggtgatcgccggaccgccacgactataaatagccattgggttcacggcgaagggtgatcatcgcaaacacagtgactagatcgaagtcaaattcgcaccgccccctccaccttctcccaaatcgtttgcgcacggtgaaagcacagcttcttacggcccagtagcctcaatccccaaaaccaatttcaaccagagccaccgcgacgccgttttcccccaaattggtctgccgcatcgcaaag

SEQ ID NO: 20832 - DNA, 384 bp, Zea Mays
attttatacaagttatttcgcgcgttagaattatcgtacacaatcgacaaacacattcaccacaataatcaaacccggtataaatgtgtatatcgattgcgcccttcacacactaatttgtatttttacttagacatcacatgaacattactacttttcatccgcgaccataaccatatgcatttagactacaataagcaaatcatcgtgactacgagcttaatcaaagtcatctaacaagttggttaactagagcaacgacatagcccgatatacaatacacacgtcggcttgcctattattatcgcaatctgagacacaacatacactacaacatttttataaacatatgtatttacgcgtatattcgcacttcgaccaaat

SEQ ID NO: 20833 - DNA, 912 bp, Zea Mays
gggccagcaggtaaattatcctagactcagccgacagtgacactagactgcgggttcatttctgtaaagctcagggtttctttcgcaaagtcatcggccgaaggggtattaaggatttcagaccgcccgatcaagaatggacgtgctagattagatcaggcaagttctgaacctgcattcatttctggtcgccggatcagagatccacggctcccagacacgatcgccctcgatctcactcatgtcgtacgattgaaatccaacggtccgaatcctatctaatcgaaccggtatgtggcatctaatccgtgccgttcacgggcagatcaacggctctgatactctctcctacctccaggttgcgcggacggcggcgcgcacccaaggcgacggaagcccaccggcgaacgcgtccaacggtgagtccccgaccgattcatgcacccaaatcggttttcatggacactcgactaccacgagtcacatggatcactcccaatcacgaaccgttgcgcccaggtccctgcccacggcaaagcatcgaatcacggcggcatcactacggcggcgagaaatcagcccacccaaggctctgattcggtcgggtgagaaggagcaaatcattccatgcgacattgcgaagctacttggtccgatttctgaccccgaacggcatctaccatggatttcgcccacggcggcaaggctcgccaggcgccccaaatctcaccggatcaatgctatgcatagagaagcatcggacgaactcggtgggggtgtttcttaccagaaatcgacgcgcagatcaccacggcgatgggagcggcggcccggtagcagcacagagtccacggatccacggtgccgcccgactaccgacgaggaatccccgcgcccgagaacgctcccagc

SEQ ID NO: 20834 - DNA, 685 bp, Zea Mays
aagggagcggtccgcgcacccagctcctggtacgcgtccacaaactatgaatgcatccgctcgacctccgtgcgcgtcgaggcctccattttgtccaggcggtcgcgcaggccaccgagcctcgtctccatctcctggacgcgttggcgggcgagactgccctctgcccacgcaagtttggcctcagcttgtgcaacctgcgccttagcataggatctgtttgcgtccctcctctcctatgccaactggagcctgagatcctccttctcggcctcctcagccgccaacctctccaacagcctgtggctcctattttccgcagctgacttgtcccgagcagcatccacatgctgcgctcgatcctgccctcgagtcgttgcctctcggcagtgaactccgaagtcagggcgcccgacgcaacatggtcggtgaaggcggccgcctgccacgaaaaaaccatcagattcgcaaccacataaaaacaacgaacaaacaaagtccaagacgacttacatgcttcagctgctcggatgcatgcctcagttgctgggacacagagcccgccacgtatttagcagcggcgaccgatgaaatctcgccgctggtgcagaacttggaccatgagtcatgcaaagtacccttcgctccaaccgccatcgtaggcaaagtggctaccaccgaacct

SEQ ID NO: 20835 - DNA, 675 bp, Zea Mays
tccagtacacggtgataaccacatcacactgtagttggtgtgatatcacaagacttacaacccctcgcggtacaactattacaatgatgtgtgtaagtatcaaggggtaagaggtgtatattcctgacttctagtcactagaaaaaacatagagcaagcaccaatgataatggtctaactaaactaagcacctcgcaaatcatatatgctaatcatcaagtgatttcttaagcacttggatgtctagagctactagagatgagtgtcatctctcttgggatgttccttctctcacacctctaaaatgattgcttagggtcctatttatagtcgtaggttgatagctagtcgttgaaaagctgactcattcatcaatgtaccatcagaccatcacttaagatatgatgctccctgattgctccatgtgtattagccatttgattcttccccttatagccaaacgactagttgagcttttagtccgatgatccctagtccaacgctctttagactatagtttccacgatttgacaccctgcacatagctccccaagagctctcaagcactataggttatgtccgacaacctccattggagtatacttcgaggtccgacgtattccattctttaaccctgataaatagaccatgtttcgatggtaatgtctagcgccc

SEQ ID NO: 20836 - DNA, 374 bp, Zea Mays
gtgggtttgctggcgaccttatctatttcagctgtacactgtaccatggtgaacaccccattcagagcgactgacagagcacaatggagcttcattttctcccaaattcctgtggtaacgtgatccacattctgcaacaaatttgtagagcaatataccatctacaaatttgttatgggaatcatacccaaacttgcattggatcatgtttaaatccaagtccaaagttagctcgatttcactgaagttctgaatttcagaattccaccagcctgacagtccaactttgggctcaattatctctaaatttttcttaacaactgagctcacactctttagcaaagttgttctcctataattgggctacaattttg

SEQ ID NO: 20837 - DNA, 501 bp, Zea Mays
ctgagtttgcgatggcacactggccgcgagcatagagctggacgagcagcagccaccgcgggagcacacgagagcaaggacgacgacgagtcagcggcggccatgtgtagatgagagcagggtcgacggcgatcatgtgcgcaggtaccgttgataacaagtatggtggtggtggggaggcctagacatcagcttcgatcttcactagcgagctctagccttgcaggatggaacgatgggagggattgccatgccgcaggagattggaggctacacgaagcgagaggaagaagaggaatagacaacaaactgcttcatgtatttgggttgtattttggtttgctctgtagtggagatatttagaagccttgtttttttaaagaaattatttttatgtacataacacacaatttgcaacttgtaaatgaatattaaaaaatagtgattacaaaaatattcgtacatgtaccataatttataatctgtgtaatttgacccggt

SEQ ID NO: 20838 - DNA, 482 bp, Zea Mays
gccaagtacttatatcagctcatgagacggacgctactgccccggatgggttatagggaggctaccactcatatccaactctggctacttggagccctgatctcacatttagagtttgatgttgttgacttccttatatgtgagatcgaggccacgatattggatggtcttcgtgcccagcgacagctgccatatgctcactatctctgccacatcttcgcacagctgatccggccaccgcagttctagggcactcttgaggcctctcacctcctctttggctcctaccatccagcccctgaggacccagtgctagtacctgatccagtgatcgacactcaggtagaggatacaactttccatcagttcgagactcagggcacaacggttcctgatgatgatgatgatgattttgggattccgcctccgcctcctgtgcctccacgctctcatgaccatgaggtcgagagttcctgtgctgc

SEQ ID NO: 20839 - DNA, 1011 bp, Zea Mays
gaaggaggcccacctgtaagcgacagcagagggagcctgaaccataaacgcgggggatacacccaggatgcattcgcgaacttattggggaaagagccaaaaggccgtttgcacttctgcccggaaagaccaaatatttgtgaattttttcctgggagagaaaggtcccaaaaatgacgggggcccgtcgccgctgggtctgcagagccattaagaccggggacagaatcctgcccaaaattcctcgggcactgttccaaaatcttcttgggccgccaaatcaacttccgcggggcccaaggggaaacgcgagaggtcctcaatgatggccgaaatccggagctagcaacgcggccgattctataatttgaataattttgaaattgcggacgaacaacatatccttgatcaatggcggggcgaagtgggaaggaaatccgatcgaaaaccgagtgtcgctgcttcaatcttaaggaagaacgtccgggccttaccgccctacccaaaggaacgaagtttgcacctgtcagagctggctttcgaacaatattagcgaacgagaccggtgaagaacggcgatgagaaatcagtttccaagactttgattcttcctctgaataacgatgccattcaatgatccagtttggaccgccagaattccaaaggtgcagatacgctttgaacgcggagcaggagtaagagcgtaaccgataaactgcgaaaccaacgttcttgcaagaaagcgaaaaacgaaagacccgatccgaaaggtgcgagaccctaaataaatccgcctcgccaccaattaaagattgaagaagaagccccacagactctgagcacagtcgcaaggagcatctgccaaaggagacgactaaaaaaactcgtggcgatcgaagttacccgggaggaggttgatcgggcggttaaacttgctggaaatccaatcccgaaagcgaagaccgttggagaaattcaaagccgagcaacccaagccaacctgatgacccc

SEQ ID NO: 20840 - DNA, 776 bp, Zea Mays
gattgatgggatcgaggagcgggaacacgttacaatacaggaacaagattgttctcgcgttccaggaataaaacaaacgttcccagaacgaggaacgtggacaagttccacgttcttggcttctaagatctgaagtaccatgcaaacttaaaactactaaaaccacacaatgtcaacttggataaaaaaaacttcctgcggaaacaaaacaagattatgtgtgtggtcaagactcaagagtatcactctcaatttttattaacctatgcaagttttattttcctatttctagaattgtggctccatttgggttctaattttatgaaaccagtttctccatgatatggtaaaggagtgatatggcccagccgaacagggtatattttaggaaacagtagattaggaaagtaatcagctgcggcttatttagcagcaagtatccctcaattgtaatggtagtattagttaccttattgagcattatactgctccctagtttctatgtttaggaacaaggatttggaataaaggagagaggggcggcagagagaaaagggacgttattgttccaccaattcagcagcaggcgttgccgacgataaacggtcggtggttccgccaaccattaccataggtcgtcagcgagcccttccggtgccgccccagcctactagatctgagctgtggccgggaactcgttcctataatcgggaacacccatatcaactggtatcggattcaggcgagtcctcctccatggcttccgctgaagatcg

SEQ ID NO: 20841 - DNA, 711 bp, Zea Mays
cagacactacacagctccaaaactgcactaaaaatattgatttcagactttcagttctgaataaactaagtcaccaacaacctgataatccaactttggcaaagtttttctccactttttgtataggatcattccaaacacacttgaagaaagttgttccccaacatatgatcttcaattcctctatataaacctcagtccaaaaccttatagaacaaccacaaaagggctccaaacttggcaccatacaacaaatttcagatttcagaactgaaccaaattcagttacaggaatgcctagcagctgatctttgggggcatttttatccactttttatgtgggaacaagccaaagtcacttaaagaaacttgttcaccatcatatgggcttcaacttctctataaataccatagcacaaaacattatagaacagccacaaataggcttcaaaactgctatcaaaacactgaaattcagtttcagttactgtttccaatctgaaaattcagaaatacagcagcaccacttagaaccactctttttcctgggttccaaatgtttataggggcaagttgcttaataaagtttatactcctatagttcctctacaagtttgatatagtaaccattaaccaaaacctcttggattccaaactacaatagcccaaagtttgctccaattgctgaaattcagaatctgaatttcacta

SEQ ID NO: 20842 - DNA, 439 bp, Zea Mays
aatttgagcaggagcgcgaggacttcaaggaggacatccggaaggtgtctgaccgagaggaagaggtgacccaaaaggagaaaagtttggccaggaaggaggtacgcttagaccaaagggaggaggctatcacagcgctccatgataagctgaaagcttataatacggtgctggagaaacagcgggacaagcaggctgcgactgaggtgaagctgcagaagctgcagcaggaactcaccgacaaggcccgtgacattgcccgcgccgaggaaagcctcaaggcgatggaagcttctctggcgaaatgggaaactgatctcgcctggcaggaggaggacctcgcctttagggaggagatgtgggcaaggcggaacaagctgctggatgagcttgagctcgaagcggaggagagaagggagcgtttggagggaaaagtgcg

SEQ ID NO: 20843 - DNA, 329 bp, Zea Mays
ttcaccatcttggtacctgacctactagaactaccagttcagttactcctgcccctacactatctgctattacttctcagtcctccactaagggactaccatccaatttaggtatcaacccatggattcttgactagtgctttttttcatatgacacctaattgtacacatctttcttccatttgccctcctattcctctcactgttcaaactcctgatggctcacctcttttggttatttgatgtggtattatttcatcctcttcttttcatgttcctagcgtttcttaagtctgcaagttgaccatgcaacttatttctgttggcta

SEQ ID NO: 20844 - DNA, 688 bp, Zea Mays
cttatttcttgtaactcgagtcaatgtatcaagaatcttgataggatactccatgtaagtcaaattatcctgaacactgagttcctccattggtaattgttacttagggacacggagacacctcttaagttgagacacatggaatacattatgcacatcagatagattatcaggtagctcgagttgataggccatctctccaactcgcctaaaaactctaaagggtccaataaagagaggggacaatttgcccctaactttgaatctcctcattccacgaagtggtgacaccttgaggtacacatgatctccttcctcaaattccagtggtcttcttctattatcagcatagcttttttatctggtctgagctaccctcaaattctcttgaattatacagacttgttcttctgcttcttgtataagttcaggcccaaagatctatcttcctcaagtctggtcctaaaatagaggagttctgcatttcctgccatacagagcctcgaacggtgacctcttcagactggcctggtaactatcattatatgagaacttagcataaggtagactcttgtcccaactactaccatgctgaagggcacaagctctcaacatgtcctccaatacttgattagtctttttagtgtgtccatcagtctgaggtaggccgaactaaaattcaacttcg

SEQ ID NO: 20845 - DNA, 532 bp, Zea Mays
ctaagggtgcagccggacaagcacaataagtgcgtcaatcgaagttttttactaaaaagacactccgtgcaaaagtcgcctaagggtgcagccggataggcacaataagtgcgtcaatcgacactccgcgcaaaagtcgcccaagggtgcagccggattagcacaagtgcgcgaaaacgaccaacatgccatattacaacataagttgcagttacatacacttagcgagggcacctcatactacatcggctcaaccttcgggatgatgcccgcttccctataattgaacaacattattttcaattcctcaccctcaaaaagattccacagatccacctcaccaatgctcgtcccaatcgacaaagacaatagctctcgtttaccaaaccggtctactcgaagactgtcccgctccatccccatccgacggcgcctaccactccgtgaaacctcgcccacactatgcttcgacaccaccctttgtcgtcggcacttggtcctcgcactaggaagaccagccacctcgccaacc

SEQ ID NO: 20846 - DNA, 969 bp, Zea Mays
cagtaggcctgggcctaatgggccttaacacgtaggatgtcggacaatcctccccaaccttctgttcccccagcgacgagccccatccctgtgacctctagggcagcagctgccacaagcacgtcgcccgctgcgcccgtgtcacaggactccttcattgtgttccagcagcaggtgttggactcccagacattgatcatcaaccacctgtcggcgttgaccgcccggttggggcaatcgaggtgcaatccgcgtcggcctcgtccatgattgatccttcatcatcgtcccacgtcttcccctcgactgcgcaagattaacctatggccctcccgactatgggggcatccaaaccgcacccgatgcgacgtcctccctgtcacttagaggtcaagtaaccctttctatataaggagaaggattatatcaattgaaggtaagcagaagattagaaagaaatcctttctctcttgccgacagtgggcaaagccctgcgaccgacctccccagcgccccatccttaatcgttgcgccacgtccccaataggatctgcaatcctatgaacccaccaaatccggatccctaacagtctcactggggcatgcccccaaaataaattttgttgcatcctcacgtgatgccacgatgggtcagaacaggatgcttgtcatctatggagccctgtgtgactaacaacctcactagggatgttgtcaagctgtgtgtagttgtaggtcttgatatgagtgtgtgtgcacatgttcagatactacaactgtacccaattagaaggtatcaaaaaatggttcactgcaacctcatctatagatagttcaattatagataactaaaattaaatatctctgatatttagtattatccctattcaaaattgtaagccatttaagctatgtcccaagtatatcattttgggatccttcaattttggctcatatattcaccaaaaa

SEQ ID NO: 20847 - DNA, 650 bp, Zea Mays
ttttatcccttttattcaatgattggactggggacactattctgtgaaagaccaggggctatttcgtatatttctccaagactcatacccaccccgcgcgtggatggcgggttgaataagaaaaacaacacggtctctttagaaattatccaccgccgaaggggtaccttcagatatgagccattcgattgatatctgatggcccagattagactagaaccgagacacatcggcaaccctcaaatcttgatccatcggttcagatcatacattgaactgtatgcactgataaccggacatcatcagatctatagtcccaatgcattgagcacatgcatacaagttgacccaaccctagccgttggtggctagatcgacagacaagggttgtcttcctcctcaatccaagccgagtggcgacgcaaccagagccacggcggtagctcgccggcgtgcgcaggacccccgcccaggcgtccccaactcacaacagaagatgctacacgacaccgaggacagagcgacacgaattagggtgtacttacccaaaacggtggagtcagcgaggttgtccgcggaccagacggatctacgacggtatgggtacaacggtgaggaattaccaccgtcagcacggtaataaggcctta

SEQ ID NO: 20848 - DNA, 544 bp, Zea Mays
agagttcaagcccattgcttctctaacttcagctaaagcagtggaattcatactagacataatatttaggatcgggataccgaacaacatcataaccgacctaggatccaattttactagctcgaagttctttgatttctgcgatcaaaaatgcatccagatcaaatatgcatcagtggcacacccaagagccaacaggcaggtagaaagagccaacggaatgatactggaagcacttagaaagaaagtcttcgacaagaatgaaaagttcgcaggaaagtggattagagagttgtcatatgttgtctggagcctgagaactcaacctagccgagctctgcatggaaacactcctttctttatggtctatggttcggaggcagtgctacccgctgatctcaagtttggggcaccgagattaatctttgaaaacataacagaagctaaggctactagactggaggatgttgatatactagaagaagaatgattgaatacagtaattcagtcagcccggtatcagcaaactctgagacgctatcat

SEQ ID NO: 20849 - DNA, 533 bp, Zea Mays
gggggtgatggggggttcgaccgagaagaaaaccgatcgctggagttcgacggcgattctccgccggtgacccggttcctggcggtcggggaggtggcaaagcacggtggggatagggggtcgtggtggaggggtcaatttggccggtgggggcttagaacggtcggtctgcggtgaggtggcgggcgcccgcggcggtgaggtggccagtgatgcccacgggtgtaataggtgaagggaaagagtgcgccgtgttcgtgatggagcagtgaaccttgtgagccaaaccaattgaactctaggctaccagagaagggagggagggctcaccggagcggagaaagagggtggcgcgctggctcgattgagctagggaaagggaagagaggtggctgaagctggtgtgaaggaagctggagctcgggcggtccctttaataggcggccggggaggggagaggagaggtggcgagcaccgacgacgcttgtcgcggcggcgatgatggtgcatagtggtggcgacgggatggctcg

SEQ ID NO: 20850 - DNA, 392 bp, Zea Mays
gtaacttattgtttgatatattattacacatcaaatataccattatgatagttgcttctccagatgaaccacattttcatatttctattctcggggacatatcgtgtgcaatcactcatatctgtgcaatcgtgcaatcatccaatatgagacgttcaatctatatctgacggtagctatttcaggggggtttggcaaatttcaacggtgtgtgaggtgaaagaatataaatataacggcagttaccattggatacatatttaatgtttcagattcgttgattgcacaatgcacatgatattttaccattaaatgtagatagtaaaatgtagatagtaccgttatctagacaggttgagtagtgtctttctacagtcaacaagaaggcagag

SEQ ID NO: 20851 - DNA, 813 bp, Zea Mays
gcgttgtgccgatggagcggaggaacggcaaccgcagtgccctaggattcgacgggtgaagtgcagtggcctgcgccagagctccgcgggtccagcaactttctctctccctcacgattcttattatggcggtgtttgtggccaactctaggcgaggggaatagaggcgatggagggggagatctggtacacagcttttatcgcccacgctttatggggccagagaagtccgtgcgtggagtcgtggtcaccaaagtccgcggttctcgtgcggcgggtatggcgcgaggaaatcggtgtccgagcggaacacgacgcgacatgcgcggagtagagatcgcgcgcgtggagatcgattgatttggttggagtccgccatgtttgggagctgggaggagatcccgccccagtttgttctgcggacatggggtgcgttcgattcgagcagggagatagagctgacgaagatggcccgcgtgcaagtggctggcgcgaggtaatcagcggctggccaaaggggcccacatgtcagcgctaaggtgacccaaattagcccagtgtaccgttttaagggaaagatgggccagcgcgggagaaatggggaattgggccgactggcaggccagttctgcggaagatgggccagcatgaggggaaaatggcccaaggcgccaaatggggtcttctcctttttatttatttctgtttgcattttctccactaaatttcaaactcttgtatttgaattcaaacttgtttgtgagttcatacacatgttgaattcccacataaggttctagtatacaaaattat

SEQ ID NO: 20852 - DNA, 495 bp, Zea Mays
tcttcatcttctcgtcccacctccctcctcttgtgttgctccaccttttaccccagccgtacccccaacattcagtttctccaccggcacatcatccccccatgctccaaccactaccaccacctccatcattcggcatcatcatcttggtcacattggcctgacgtcatgtccaagctctccagtagctccgatatattttgtagcagggtcccctctaagcacctttgtcatgcctaaaaactcaactgtcactctcgtcttctttctctacttccacgtcccgggctgctcaggcctttgatcttgtccactatgatctctggacttctcctgtctttagcctctcttgttccaaatactaactggtcatttttatttaacataaattggacaggttctattgcagagataggaagcgaagggtacttcgaccaggtatcagagtcgaggtctttgtccaggaactgccgaaggcattgaagcaaatggatc

SEQ ID NO: 20853 - DNA, 278 bp, Zea Mays
caggggcttgttcagcttaaggaagacgaatttcgggaactgactcatgatggaagatctgtcagtgaatatgtgcacaagttcacggagttagcacgctacgcgccagatgacgtcagtaccgagggcaagaagatggcccgtttcctgaagggactcaggccagaactcaagacaattctggctagccaagacttcctcagtttctctcacctttccaacaaggccatgcaggttgaaagggcaaaggaggaagaaaaagggcatcccaaaagaaa

SEQ ID NO: 20854 - DNA, 797 bp, Zea Mays
atttattcattttatcacgccactggactgggcctcaattaccagaaaggttagggactcctgtgtaagaatctaaagacacagcgaatagcactctctggatggcgggttgatttattactttacaggggctcatgtgcaaaaaggcctgggcgaaggggtacaggaggacatcagccgcacgatccagaatcgagggctaggattagatttctttctaaacgaaacggtacgcaatatcagccacacgatcatggatccgcgatccagatcagatcgcacgaagggataagtcatggctaaatctcggccactcgtgcacagatctacggtcacccagtgacttccccccaaatctaatcggggacgttgcacaacgatccaacggtcacggttttctctcttacctccggtcaaagccacggtgatggcgcacacggcacggcggcgccatggccggggtctctcaatccccactctctgtgtttaaactccgatctagatgcggaaatacgtagagaataacggtaaggagtcgttgagggattactcacagcgattcacgcgacgccaatacccttcccacggcgcgtcgcagttgcttgacacccggtatagacgctggccaacccgaccgtcgagggagcttggcgcgaccgacccgagcaccgctgcgatctcacaaaactctaggctagaattccaggcttgggcaccgtcgaagtagtaacgacggcggacaaccagctggtccatggcggctcaccgttttccccccgatctcttcctctccccgg

SEQ ID NO: 20855 - DNA, 354 bp, Zea Mays
tgtgtccgtgttcgagtcttgttgctggtttaggtcgtgtcgtaatcgtagttcaaccgctccatcgatgttatttgtttctgccgctagcccatccaccttacccagattacaagtcgagacaccacattactcgatttgcccttgctagccgccttgtgtgaattctcgccacgctagccctagattaggttgcaagccgcattgcattgtagcccctccttgtttcatcatctggcgcttacctattgcttataccagggaggtttgtgcccctgtgttctatagccgccgctacggttcctaccaatttgtgcccttgaaaaccataacttgaggtaccttccataaaac

SEQ ID NO: 20856 - DNA, 1262 bp, Zea Mays
ctgaaattaagtatattccaaggacattagattttctatgtcatcttagactgctaaatctttcactaacacgaattacagagcttccagagtccattgagtacctaacaaatctacaattcttgggtcttcgatactgcaattggctacataaccttccaaatggaataggtaaactgcaatatttgcgatatctggatcttcgaggaaccaaattgcatcaggtcctaccaagtttggtcaacctgaagcagctctccacgctacatggtttcgtagtaaaccgtagacccaagcgtgaggatgatccaactgggtggcctttggaagacctaaaatctctagaagcattgagaagcctgcagattctgaagttggaaagagtctcagatcctttgagggtgcaagaagccatgctggaaacgaagtcacacctcaaggaacttgaactatgttggagcaatgatgatagacagtccgaagtacaagaagaaaatgctggaacacttaagaacgtatctgattccctttctcctccacactgcttggaatctctcaaaatagtgagctattacggaaaagttttccctgattggctacctaatctctcaaacctccagcgccttgttcttactgattgcaaattctgtgagcatcttcccaacctgggccagctaaccgaactcaagttcctgactataacagcctgttccaagttagttacaatcaagcaagagcaaacaggtcaggcgtttccaaggctagagcagctgcaccttcgagacatgcccaatcttgaatcatggataggattttcacctggtgatatgccttcccttgtgaaattccgtctggagaattgtcctaagctgtgtaacctgccatctggcatcaagcactcgaaattcctgacaagcatgcaactacaccatattgatagcctgcgaatcattgaggacttgcctgcgctcaaagaattggttatccaagcctgcaatgaacttcaaaaaatctcaaatattccattgcttgaagttttgatagtccttggttgctcgcggttgaaggatgtcactgaagtccaccttagtcatgcccgcattgtagatagagacataagagaacttccagattgggttgctactaatgcatacatgctgcagacattcactatagttggcagagcagaactgcttcaaagattacttcccaaccatgaagactgggaaatcatccgtcacataagcaaagtttatgcaaac

SEQ ID NO: 20857 - DNA, 574 bp, Zea Mays
atctgttgttgctcgcccgggtcgatgacaggctaacaatgttgttaggcatcatcatcggacatcgggatatggataggaggatccgagacatgaggagcgtgactacatgaggatctacactgaactaaacaagagcttagcggctcccatcttgagaaacatgatggacgtgtccatcttgcgaaacacgatggagatccccttgcatggaccacaaagataacattaaatagtacaattttcgtgcgttgcgacggtacataaattattcaataaaatgatattgcacaccaattacataaaaatgaataaatatctgataatttctgtcaataaccaatgcattgttactcccaactttacatcggctatttaaacttatctcactatttaattttatatggtttattttgataagattaggtgccaacgagggagggaagggacagcgacagcacaactcgggaggagggaggtgtctctaagtggcccgatggaggtgttgcgtgggctgctcgagctaattgtgtcggtccaaagagccaaacttgttgtccatgcaagacaaaca

SEQ ID NO: 20858 - DNA, 485 bp, Zea Mays
ccagggtctattttgaagttttaccccgctgaagggtaccgttggattccggccattggatccaacgccgagggtccgaattagatcagaatttaaacgaaccggtacgggatatggtctgctagatcataatccaagggttggcaagggcgtccagatcggtatgcaccctcagccaatagatctagatccgatggttgaatctacatggcgcaaaagcatacactagatgtgatcatacgcgttcttctgggtttcgacgactctagattttattaaacctgatctgatcaaccccgttggctcgttcatcaacgaacacggttcaataccgcgaagagttccctagaatcaaatcctagccttacatccactgatcgagggttctcaacaggttacacccggaactaatcccatctgcgcaatcccaatcggacaacgcgagatcatcgttccccccaaccagcactggcggcaccgccacg

SEQ ID NO: 20859 - DNA, 682 bp, Zea Mays
tcatgaaatcagtttgttggtcagcggagggtcttgatgcatcagatagggaagagttctataaactcaaggcaaatgaaattgttgatatggtagtggacaaatatataactagatgttaatatgttattgccggtgtttaaaatagcgggctaacccatttatccccggctttctccagcggctacaaaaggatatatcgggatatatctgcagctaaatgttttagcggttttcactagacagtagacacttagacagatcctcccatgatcatgcctatcccaaattccacgaacagcctcgacggcccgatcctagttcccagacctcacactagccgctgattgcaacaagcaaagcagcccaaaatacatttatctcacaactagccgctgattccacaaacatccaagtcattgatctcacaactcacattctcacctacaatttaaaatgcacctcgaacaaaaacagctagccgctgattgcaacaagcaaagcagcccaaaatacatttaccattcacaaatgtaaacagctagcaaaacattcaccagaaataatatgcacctaccagaagtccagaacatccacctacctcactgtagcacgcacattcagtcagccattcagcaagcaaatcagctagccgctgattgcaacaagcaaagcagctagc

SEQ ID NO: 20860 - DNA, 742 bp, Zea Mays
caaggagtcctttggttcaagaaccgtctgtgtgtaccaaaaggggaggcacgagaagtcctacttgataaagctcacaactcaccctactccatcaacccaggaaccaccaagatgtacctagacctcaaaaccagatactggtggagagggatgaagaaagagatagcacggtatgtggcccgatgtgacacttcccaacgaacgaaagccgagcaccagaagcctgcaggcctattgcaaccccttccagtgcccgaatggaagtgggaggagataggcatggattttgtaaccgggctaccccagacgcaaaaagggaacgactctatctgggtaataatagaccgtcttaccaaggtagcccacttcatcccagtgaaaactacctttggaggagccacccttgcacggatttatcttaaagagatagtcagactccatggcatcccaaggaagatagtgtcagacaaaggaacccaattcacctccaaattttggatgagccttcagaaagctatgggcaccaagctagattttagcaccgcctaccacccccagacagatggtcagacagaaagggtcaacaaggtcctcgaagatttattaagagcctatgtgttaacgttcgatagaagctgggagtccagtttgccttatgcagagttctcgtataacaacaaccatcaggccagtatcaagatgtcaccgttcgaagcattgtatggacgaaaatgccaaa

SEQ ID NO: 20861 - DNA, 642 bp, Zea Mays
aagagatttgccgtccttgaagcgcagcatgagggatgccttggaagctataaaagcttcgattccctctttgggaattaccttgttcctgtcataccaacgaacgatttctttcatcaggccgggaccaaatgatgaacaagaatggctatttgtaacgaacagaatgactactaaattttgcaatttcctttaagagcgcgacctgatacagcattactaagctatcaacggaagataacacgaagaccaagttttgtgtgtggtgttgtacgtaggccccctaacttgcaagatctcaaaaggtaaagattatcctgcacagttgcagatctaagtagtgaaaaagtttttgcattatggggagcatatgtcagtgtgtgttagctttctttttttttcccttctagtgcgaatttgtcaagacatattttccatgaatctatttatcactcaaaaaaacgttcggctgccatcacctacacagaatagttgagatgcagaacatggacttaggccttagggcctagggagttctaacgtgcatttgaagttcgaaattagaaagttcaccacatagaggttccagattggaaattgaagtcatggctttgataatgttcctcccactttctttaaaat

SEQ ID NO: 20862 - DNA, 578 bp, Zea Mays
gcaagttacccggtgccaacataccggaaaaggtggcccggggcctggatggaggaatggttttacgtgaagaatgacttgaaggcaagagaagatattaaggatgttattatgcgccccatttggtcccacttcggcctccgaaggccgaaggttgaaattgacgaagccgccgaagcatgtcagaaggcatttggtactctctgcttctttattggtacaagagatttggttcaagagcacatagcatacaaagtatggccgcttatacagagctgggaaatgccgaaggagaccatcaccgaatctagtgaaggtgaactggttcggctgaagtacgcattcagatacggagataaattcgatgaaccaaacgatgactggctaaaatgcatcgaagttaccagtgatgaactgcttggatcatattccaaggcggaagacaatgcactatccacaacctttggaggtcggggaaaaaagagattgaatagagtttttgatgccattggttttgtctaccctgactaccgctatccactgcgaggtcagagaaagaagaggaaaactgctgcttc

SEQ ID NO: 20863 - DNA, 942 bp, Zea Mays
cacgagaacactaaaacgagagggcagagggtatgagcggacctaagatgagcagaccacgacgaggcctctttctcggtggcggaaagcaggtttgggggaaatgagaaattagcgagctctagtggatgattcgaggcacgatttgcttcactggttgcacacctacctagcggagcaggcggggtcggcaatttataggctcccacaacgatggccggtgaatttgagagagacgcgcggcggccggagaaagaagaaggttactggcgctcgaggttagtggctttcaccgtggcagccctccagcgatcaccgggcatgcacgatgtgattcacagcgacatggtcaagtgctttagtacgtggcgcacgacggtaagtggccaatagcggcgaggtctatccgaccgatcgacgagcaagtggatacgacgagcttagctgtgaccgagctcgtgttgattaggtgccaagatctttactcgcccacagttatccgcaagtcacagcgcacgaatcacagcggccggcgtgaaacgtggcgcgacggtcaccggcggcgaagtctctgagctggcgatccaatccggtcactataccatcgcgaagttcattcagtcggcctgatagaccaagtttggggcgaattttctcccaattttccatggcaactaaactaatgctctgcaacaaagttgtagcctaatgattcagctacaaacttactatagcaaccatagccaaactctcacaagatcatggttgaattccagtccaaagattactcaatcacaatgtcagtgtgaattcagacttaaggcagtctgacagttcgactttgggcacatttttctccaatttttttcatgtgaccatggtttaatccctatagcaaagttgttctccttttataggtctacaaacttgatgtgttgacct

SEQ ID NO: 20864 - DNA, 840 bp, Zea Mays
gtactgggatgaaccttgaagttcccagaacactgcagatagtagacaaacaagcacttgtaacgacgaacgacgaacgactaagctgagtggtccagcagaatcgcagcaattgaaggcccctggctgctgccgtgattctcggccaccaaacaaattggttgtgcagatacaccatgacgcattgaggacaaaagaacgaagaagtgctagacattgcaaaagactagggcccccgcagagcgtgccagaccgcatgtcttaaacctgcgccgtaggcccctgtggtggaaggattccgcagaggtccatcagcgcttgcagcaccaaggacgacagtggacccttgaagaggttgatgtaggtctccagcgtggcacttgcagtagcctgatcagacggatggccttccttaggcagcaagcccaggcgctttagcaggacctggcgtgcgcgttcctggatgttcccacgcggccatgcgatcgccgccagccgcatgctcttgcgagtcggcctagcagcttgcttcttctttgtcttcaggtttggtggcgcttgatggagctcctggagcagtggtggtgcaacagggcaggtgtggttgctgatgaaggacgccacggtggtagtggccggctcccctagctctggctctgggaaaacagttgtagcctgctgagcggtctccatgccggtgacaagagttgtctctgaacccacagctacccccagcgctgcatccatcgtgatggtggcaggcaaatgttgccccggttctggtggggcagaacgggcgcgcctgcggtagacccggccaggcagaaagcgtcgctctgc

SEQ ID NO: 20865 - DNA, 495 bp, Zea Mays
atccgaagcagtaccctgacccctatcttggtcgcccccttgagatcaacggtccgaaagatccttcttcaacctcccgtgcacaggcagtggtgtgggctggcaacgacggcgccatggccgtagccacccagacccgagcaggggaccaccgactatgcttctcgtcgagctaccagcgaggaagacgaaggctagacagatacgagtgctcttaccactttctgtcgtgcaggcgacctcagaccattatgagctgcggatccagggtgagggaaaactccgatgagaaattcccgtccacccacggcatcacgagttctgattcaacttcaattatcatcctcacatgctggtgacgctacttgaccggaatcccgaccctgaacgccatccaccattggattcgcccatggtggcaagctttctttctccatcgatctgtttccctgggttatggtgcttcctatccgatagagaggaaggggggcagcc

SEQ ID NO: 20866 - DNA, 705 bp, Zea Mays
ccgacacacaagcagctgagaggtacgttgatgctacggtcgtcaatccaggatgtgactccatgtacagggggttcagggcatgccatctggcttgacctgcagccaggaaggtggatgttggtgttggtgtatcgctcagcagatacacaacaagagtaatcattaaatttgggctagatcgtgtggatcagcctgtgttggttgaaccgatcggctccttgagccgacgatcatttctgtaatgtgtcgtctactatcataacaatcaatgtaatcatatattgaaagtgattgataaggaaagtaagtctacctaaagcatgcttaagttcattgttatctctagagcgatctagactacgtgcataactcagaagggagtcgtgggtcagaggaccatcgttattacccagaacattaatcagatcttgggccagataaacaataaaccatatataagaacatcccagatacaatctactacatgtaccatactgataaacctagaaacatctgccactaaaaactactaaccgcacgtgtgaacatggatcatgatctccaaagaagtccaactaaagtaaacaatgagcctaagcatataagacaggatgccagatgcatatcggacatccgagttaccgtgtgcaaatgtgcagctagcatgttgtggaatatggcaacctattaaggaatatgcaa

SEQ ID NO: 20867 - DNA, 285 bp, Zea Mays
acccagtatgcctattgttggtatggcggcagatgggctagggttttactcttctcatttcgccaagccattatccaacaaacctaaacacagttttattggcttggttaaaatcattgagggtttgatcacggccgaggatctggagaaggatttcggttttcactttccttggggccgcacttggaaagctactaagtgtcattctggcttcctcatgcaattcccctctcaagagaggttggatgaaatgattaatttccctaaattgaaaatgaaattgtc

SEQ ID NO: 20868 - DNA, 340 bp, Zea Mays
ctcctagtaggggttataagtgggcgagagagggctaccaagtctcttatacgtggtgaggcctaagaactacgaatctggtgttctctaccgagctgagccttagacgtcgcggttgtatgctccttggcttcggccccttttataggctaaggtggtggtcggttaccggctccttcacaggggaaggagctactgtgtgtggtaaaataggtcgttctacctaggtaactcgtgcttgtcggcatgtgtctcgatcgtctaagcttctctggtcgtgctctttattatcggctgcgcatgggcggcgaggagctccaacatcatcattactgtcttt

SEQ ID NO: 20869 - DNA, 2933 bp, Zea Mays
tgagcgccgccgtccccggcacgtacgtgcttcccctcccgacccctgtggaaactctcgcgctttggggatctgtgagtaaattgctgcgagcttcgtcatcgtcgctcggctgacatactgttgcgtgctccgggataatggtgcagcgtgctggggacgctgctcaagaacaagctgatccccgaccccttctacgggctgaacaaccaggccatcatcgacatcgccgacgccgggagggagtactacaccttttggttcttcaccacgttccagtgtgccctggtacgcagaactgcaccagttctccggatatttgttagtcatgttttcctgtaacgaagaatgcattatcaatccttactgtctcctccggttaaaaagggattgcctaacctttttgctgtaggcagtttttgattcagcatagttgtactgcattgttactgcgccaatgaatgtggctgctccctcaggcctcagcaggcagcaagcactttaagctgtcttctgctgaactgaactgtacaaactgatacacttctcttgttgtgtttcccatagtttattttcccttttggcagaataatatgtttatagcaagtataatttgggactaaaggtgaactttatgctggggtggagagagaagggaagtgggctgttgaagcacattaatcaagaaatcttgtgagagaagaaagtgggccatgtattaatgatgaagtatattcttactgatctactatatggatgggctgatagatgggctatatatttacataaagccagcagtggactgtattattaacttttttaagagtagagacgactatcacattatgtgtgtaggtagggtagagtactctagtgacctagcagtacaatataaaatatgtctttagcttacttcaactcaaatcaaatccgtgcaacctaaggacacatgttcagttgacaaacttttcattcacttctgcttggacggaagccttttggaagtgacgttgcagttgcagccatggtagcatagctgtttacttttttccttgatctcttcagttaatgctaaataatgagactgctcttaattgttgtaaaacatgatttcttgactttaaggactgacattttgtacatttccgcacatgtacttgttatggtgctaaacgacttaacatatcaatatcttcttggtacgtccatctttagtcaggaaatcagcatgcgactttaaacttccggggaataaactactcagctgaaatgtatttaaatgggcacaaggaggtactaccaaaaggaatgttccgaaggcacaacattgatattactgatatcctccatcctgatggtaacaatctgcttgctgtccttgttcatcctcctgatcaccctggcaaaattcctcctcaggggggccagggtggtgatcatgaggttagtctcatatccttcaggttggttttatgtagatttatcctttcgcatatgatttgcaatcgtggataatggagtgtcccatcctattgtattgtgcagatttggattgtcttttgcttctttttttagcaaagctcaaacaagacttgtgttgcttagttgccaatgtgttttccctcggatggtactacacttcaggagatacatagtatcaccttacttgaattgtaatatatacttttatctgagatgctacctgcatcaaatgtgctgaaagcataggtaaaacacacaatggcttgcacatactctgttttggaggccacattccgttgtttgtattctgatgagcagtagcagatccacaggaaattaatacatatttagccaataaaataagaagttggtcctattagaagaggcccagctgctatgtcaattttggatctgcccttgctgggcagtttgggacatgctttactatttgaagtacattttgggaagtatatattgcagtttaaagtgcaactgctaattgcaatatttatttggtctcgtaactactatttaaaaaggaatattgttagttaaagggactactgatgcacaactacaaatgtcaatgtggtcatttcagattggaaaagatgttgctacacaatatgttgaaggatgggattggatgtgcccaataaggtagttgatgatttctgtgtgataaagctacattcttcattagttgatctttggcctcctaagatgtatcacatgttttgagttcccaaactattcagtaactaagttcagaaaccctatactgaagactgctgcaatatctgaatcttttctaacctttcaagtaatctttgacaaataattagaactaattaccaacttttgtttctcttgcacttatggtaaccagtcaaagtagtgtatttgtttttacttattttgcaacagcaaggttttttctttatttcctgttttcattctgttctactatttgcaacatcaacgcctttctgacatatctatttttctggcatcttagggatcgaaatactggtatctgggatgaggtatcaatttccatatctggggtgagtccatgaatccttgttcccttctaatactactttatccatcttttgtcattgtggcatcaccattgatacacgaagaggaggtgcacagagaagaaataactcattgactttaatctttttagaccaaggaccaaacagtccagcttatattgaaagcttaacatgagtatttctggggttaccagcttacaagcattcacataacatccatagaaaagaaacaaccaagcacctcaaacaaaaatccctgaacatgaagataacctatagaccgtgcctggaggtaatcgaacgtctaaactgaccactacagaccaccctgcctaggcgcatttcaccaacttgaaagtccgtccttcatcttctacagcatctccc

SEQ ID NO: 20870 - DNA, 575 bp, Zea Mays
ccggcgagccacgggcctaatcctcgaatcaaaggggtgttctgcgcaaaggacgacgaaacgaactactaggatgtgaaactcaccgaagtagatgacgcacttgggctgtccacgacacaccgatttttccacggaggagcactacgccggtgagaaattcacgacggacccgatccaatcttggttcgagaaggccacggacaggtgcggttgactccggcgacgccacacaaccgcaattcggcgacagagctcaagcacagcagagattctaccgacgacggccgctcggtggtactcactttcgctcagcatcgctcccgacctcacgctacggtggtaatcgcgactataggagaaagaggggaagatagacgagctcggggtcgtggcaccgctttatagccaggggagcgtggattagggagaatctgctgcggccagcaaggacgatcatgacggagaaaacggagcccgattcgcgcgcttggttcaacggacttcaatctgttggtaggagatcgagctgacaggcgggatttgctgtgccgagcgcgatttcagcggggttc

SEQ ID NO: 20871 - DNA, 650 bp, Zea Mays
caccaattttggtatagaaaatttagatttctttgatggtcgaggatcccttaatggctgtggagaaggtggatctcttactggtggcgtagacaatgggtcaccaagaggatgaggaggagaaggtgatggagccctggattgcaatgcttgtggccgagacgatgggtcagaaagaggatgagcagaagcatgtgaagtttgaggtgcagatggatgtacaataggaactacaatttgagaaggcagagacgattaggctggggacgacgatggcagtggtggatcaaccaattcaacatcccttcgaggccaaaggatgaaattcttgacagcttgtccaggtgtctcaataccttcgggcctagggatgtctagcatgtcgtccttggattcttgaatgaccatcattacttctaccctgcaatactcttctggaatgtcgcttctatggaacttgcgacctaggatcgcaaggcctatggctactttcttcgtacgattattgttaatatcatatcttaaaactagtgtgcatgccacaggcattgtgatgtcatcaactagatagcagaccttatttcccgtttatgcaacaaatcttagaacggtcgtacaatcggtggaagatggcggttgagctgctggaa

SEQ ID NO: 20872 - DNA, 760 bp, Zea Mays
tgggaggttccgtcacagtgtccccgtcaaagccatccggcttgctgcggattccacctagaccactcgcattgcgggtgatctggacgagaaataggaactcacgctcgtcaacttcctccaggcaaataccgacgtgttcgcatgggagccgtcgcagatgcctgggatccccatggaggtgattcagcaccatctgaagatcaaccccgacgccaggccggtgagccagaagcctcgcagatagtttgttgagcggcaggacttaatccgaaaggaggtccagaagctgctggacgctggcttcatcgatgaggttcatcacccaatatggctggccaacccagtcatcgtccccaaggcgaatgggaagcttcggatgtgcatcgactacaccagcctgaataaggcctgtcccaaggacccgtatccactgccacgtatagaccaaatcgtggattctacctccgggtgtgacctattgtcattcttagacgcttactctggtttccatcaaatctagatgtctagggaagataggaagcataccgcttttgtaacagtggacgagctttactactatgttgttatgtcgtacggtctgaaaaacgccttgcctacatttgtgcgggcgatgagtaagactttcggggacctgattagggacaaagtggaagtctacgtcgatgacatcgtggtcaagactaagagagggtcgaccctagtggaatacttaaccctggtctttgacaagctgcgg

SEQ ID NO: 20873 - DNA, 845 bp, Zea Mays
gttggacccattagcgcccgttacggtcgttaacggctacaaatgtcgatgagcatttctggccattggacacaagttatgtttgacgacagtcgttggacataaggctatttccaacctattagggccgaggggcaactgccatcgaaaataagccaaaagtcgtcggaaatagcttatttcgacgatataggccttatttctgatggttttggcccttggaaaatttcttttttactgttgtgcaggacaccattcttctccaagtctagtcctgcgccaagcaccttaccattcttctccaagtcatgctagagtacgtcgactcctcacccattgagccacttgcttcctacaatgcgtcgatgcttccttgccctgcttccttggcatgcagtcctcgccgagctcatccacgacgccaccgtggagtctttaaccatcgcagcccctccgccgtggctgctcctgacttcgttagtgccatcggctccccgtccattctccacgccaggttgtgcgccctcaccttgaagccccgatgtcgtcttcagttgcgttcttctccagcttgagctcccttctcgtcgtgacgttctcgtgctacgttggtagtgcaccacttgctcgacaaaacgggtggccggtctcctcgacttctctgtggtgctcggccacgccatggtcatgaatgacccgagtcctccatcctgtcgtgcactgtcaattgccatcggagaggaaaacccgtaatatgtggagaagaagcatggtccagtgcgacatctgtcgggtactcgacgaaaggctcgaaccggacatcgttgtcaatcttgcggttccaa

SEQ ID NO: 20874 - DNA, 1646 bp, Zea Mays
acattgaaaatgagaggcaaaatgtccttcggtcttaacccttgcacccacgcatcattccaaaaggacacctttgtcccgtctcccaccgaaatcgaagtcgctgctgcgaagagctgtcgttcttttgtcgtgcaagggagttcaaaggccgtccagaacctagttgatgaagcccaatcttgccacaaccaacgcaaacgcaaggcccttgcaaatttggttaaatgaaggatacccaagcctccacactcttttagccttgcggaacggatccaatttaccttgcatttacctcccgtaatttgtgcacacccagcccaaaggaattttttccttctcgaatcaattaaattcaatatttccttaggagcccgtaaagcagagagaaggtagattgcttgggaggtaatgactgacttaactaaagtcagtctgccagccatagagaggtttttcccattccagccattgagcttgttcgaaattttgtcaattaagaactgaaattcgctcttcttcagtccggatgatgagagcgggaggcccaggtattttaaggggaaggtagcccttctggctggcatattccttagggccgcgttgaggtcaataccttgacaacagataggcacaactgtggacttatggaagtttgtcaacagccctgacgcctcaccaaatagcccgagcagctttagtattgtctcgacctcctctttttttggtgcaataaacaaggccgcatcatcaacgtacaatgagagacaaggcaaggcgagcggcccctaattttgctgagaagtcccgtctctattgccaagtctaaaattttctgcaatgggtcaatggcaagcacaaataacaatggtgagagtgggtctccatgtctaagtcctcgaccatgagacaaggggggattcgggatccgttaacaaagacccttgaggtggatgttgagaggatggctgcaatccaatctctccaccaagaagggaagcctagatgttgaagcagcgagagaaggtattcccatcggaccgaatcaaaggctttcgcaatgtccaatttgaggaagagcgagggtatgttcatgcgttggtagcgcctcactgcactacgcacggccataaaattatcctgaatagtccgtttcttgatgaacgcgctttggcatggtgagacgatttcatgcatatgtggcgctaatcggagagcaagagtcttgatgatgattttgacaaaggagtgaatgaggctaatcggaatgctcctcaccgagtcaaaacttaatgatggtgtatctgaagagagtgatgggtgtttttttgtaggagatgtggccattttcatgtttgtaccattctattagaaacactgtacagtggcaccgtgacatctattgagtgtattgcagctatcaagcaatctgtgtcgccttccatagcacctcgctctgcctccacacattcggtatgtaatttattgtttcagaccattactcaaaacatcagccgctgtaacatatctcaaaaacaaaccaaattggtgctatagacaagttaatttgtgttaccccttgaaaattaagaatcctcccacacaggtgcggaacacagagcttgtgctgccgagcttcagcccag

SEQ ID NO: 20875 - DNA, 469 bp, Zea Mays
aagttttattggtgaggtagggagaaactagtggcctttggtatatgatagctattgtagtagtggccagtggggagagggggcccatcgagcacgatctgtagtgtaataaatgccagagcagacgagtcagctgaaaggagcccagcacggcaacacctgcagctgctattgccactgtcagccggccaagtcccagtcataactcccaagtcccaacccaatcatggcgtcgtccgtccaccaactggaggagcacgacgaggcgggagaggagcacgatcgccatggcatccagctgatcacctctccgctgcgtaatgctcccctttcccagctctccgtttcctcgttgcggtggcaagtggaccgcactaccgctccgtttgctttattcccgttccttgtcatgcagtgcaaccgtcgtcgcggcgcccgcatggctcggcggaggaaaaggaggctgaag

SEQ ID NO: 20876 - DNA, 824 bp, Zea Mays
caaatatttctagaatcagacttcactgctaggactgtgggttggatcaattaaaatccgagggatcttttgaataactcgctggccgaaggggtattgtgggatccagcgccgtccgattacaactggcggcacagattagatcagcatatttacgaatcggtatccgtttgtgaccgttcgatcccggatctaaggccaagaattaataacaacctctcagttctcacccatccgatcccgatcgaatgaccctcgcgcacatggccgaatcgttacttggtttctaatctcggccatccaacgacggatcaatggtcgagaacgtgcgcaccaacccaacggcgaagcacggcggcgtcggcaagatccgcggcggtgaccatggctggcgctcccaacccatgtattccggcccctatacctaattctgaactgcgctacacgaagaggagagtagtgcaaagagtacggaggtgattctacctcggatttgcaacgatggcggcacgtccacgaggttctgcggtccgcggatctccggtgagaaatccccaaaaccctagtggtgtctagctcgagtagagggcacagacgtcttccccgcgccctggtgattctccctggtggtgcaccaaagatacaacgtcggcacaacaggaatttctctgatggtggcgatcttctcccaaatgagatcggcgatggctaggtggtgtgagagtctggtgacgcgagcgcttaggaactgggcactgcaaagaacggtcgcggcgtggggtttatctccccgtttaattgttcacgatatgcgcgcgagatcc

SEQ ID NO: 20877 - DNA, 339 bp, Zea Mays
tgatcatccccttcacaggatcatccccttcacagtgggctttggaactaggtgaatatcccccatggcaaatgggatgtgctgggcccatgttgtacattagtgttgctgtccatttttttcctagtcagtgtgaaatttgtatttttgttttgggatggtagtgcaagttgattgaaaggtaagtctacatttgttgaaatggtgggaatgaaatctttcatgtttactcataccaaggattacaacgagtaaaaaacatggttgctccatgcgctaccgattgcgctacatacaaaggaggactttgaacaacaacaatgtgcattttaaaactag

SEQ ID NO: 20878 - DNA, 355 bp, Zea Mays
ttgtggagagctaggatatgccgaaggagaccaccgccgattccagtgagggtggtctggtccgattgaagtataccttcagatttagggagaagtttgatgagccagacgatgactggctgaagtgtattgaagctactagtgatgagctactcggggcatactccaaggccgaagataatgctttgtccgcagtttttgggggtcggggcaagaaaagattaaacagggtatttgatgtgattggcttcatataccctgattaccaatacccgctacgagggcaagggaaaaagagaaaggctgccgcttcaggcaccctggctgagccgaagagcaaaaaggtgaaggttct

SEQ ID NO: 20879 - DNA, 704 bp, Zea Mays
gcgcgagtttggagatgcgccgtgggaggaaagccgactacctcgacatcccactcaaggacagcatcaaaggatggcgcctggagtggtttatcatggagaaccatgggaattccctccccccacggtcagggagacagccagatgttcgtactctgagctggaccgagtcccccatagacctggaggtggctgaggcaggggctctacttgctgaggttggattgttgaaagagaggggtttgactgcagaagctgtggtcgccgatttcattttcaagaacattcatccattaaaggacagagcatacccggcttatctgtatcgaggcctcgctgattcgacccgggttaccaatagaagaattcctgctgtggatttggtcagccggctcgagatgatactcagagccaaggtgccgaacatcggtgctcctgctgcatactcagcctggaatctgcctccttccaaggcttgtaccaattttgtgtcaaatcctcccgttggtgatagcggtttgggccttagagtgcgaccctctcctgaagaggttagtgctttagttgcctcacttggtgaaatccctgacgacgagaggcaggttcatttcgaggtgcctttgaatccaagtgatgcagagataagtgccatgctggatatgttggctgaagattcctctgatgcagctcctgctgaaacactg

SEQ ID NO: 20880 - DNA, 398 bp, Zea Mays
ggtgaatctggtcgctggccggaccggccgtcgtgtcccgccgcggtcagtcgcgttggcatcaccggagctcaccgttctccggccatgccacatgcttaggaatgttgccacgtcacaatgaactgtaatatggagtctgtccatcgccggaggctttgccacagtgaaagccatgatagcgctcacgccagtaacttcctcctctccggtcgccagctcttcccttccaaattcggagccaccgctcaaagcctctataaattgatgccccagactcctccgctaggttgttacacgcccaatgcaccagccctcgcctccgatcagccactgtagtgcatcaatttgggatttcctccaattcggttctccgtaccgccgtgagccaccgcgcc

SEQ ID NO: 20881 - DNA, 415 bp, Zea Mays
gtgatatataaatgttgtcgtgagtacatgttgcacctggatagctcttccagctcgagtcatcaagtcggccctccaattaggtaagaggtccgcaagcctatcaattagtggttgcagctgctccttgcttaacttcctgagagagaggtaacccgagatatttgagaggaagtgtttcaactttgcaaggaaaaatctgggtcaccatttccatgtccaccggagagcagtgaatgggagccacactgcttttctgtgcgttgggttttagccccgaggcgtccccaaacaactccaatatcatggttaccaagtgcagatcactagcagccggtctcaagaacatcaccacatcatcagcataaagcgatatttggtgctgaatggaacgagttgaaaggggttggagcag

SEQ ID NO: 20882 - DNA, 376 bp, Zea Mays
ccagccgaacagggcaaggactggcgctcccgagcatttcccctaaattaatttctggattggagccctacagtgctctgcccacggtgatagcggcaacaacggaccactaagtgcgttcccgatgatctaaggcagctcggttcaattgggcgggtcgatgagcatcacagttacataaggacactcaaacgagggagtagaaggtttgaactgacctcaattgcactggccacggcgagggtgttcttgcggtgggatgaaccgatttggggaaaactcgaaattcgtgagctctggcaaacgattgagggtgggagcgggtgctttggtttcgtgatgacatagcgcagctgacccggccttcaatttatag

SEQ ID NO: 20883 - DNA, 697 bp, Zea Mays
caaaattctaggtgggcgataccgtgagagaaattactaaattagaccactcgataaaagtagctttatgataataacgtgaaggttagatgataatactatgagtgttttaaaatgacatgattactgaaaaaaatggttgccttagaggatagctagagagagaaagcggcgggccatggggagcgcactggggcggagcggacacatcggcgtgttgccatgataagtcgataagaccagccctcccatcgcaagatggtgacgatgaggcgacaacttgaagggggtagcgagggcaggcagtggcaagcaacaaccattgccgcattgtgacggcgtggtgggaccccaataagatagcgagggtaggtggtgccatggtgccaaggcatgatcctactgacagcctgcccgcacatcggtgcgggctaggaggcaaagtggtggcgttgtgtgggatccctgcgacgcgacaagctgacaaggagtcaaggtggaacatgcagctggcggactaggtcgcccactaaccaaccagtcaataaccgaaggagcgagtgagccacgagtggattagctgctatgggaggaaatcaaacaactcatgtgaggagtgccggagtgggccgaggagtggagcgccgagaaaagttaagaaaagttaaatcaaaagtagattttcattaaatttatc

SEQ ID NO: 20884 - DNA, 716 bp, Zea Mays
tcaggacgccaactcagagatctcactgtcggcgagccgtgcgttcagattcgcgctcggatcagttcgatagcaccgggggtaagaaaatatcacgccgtggatacactccgaccactaatttactccgaccaccgtacccgcgcagaccacggttgatttggatgggttcgccggagatagccacttcgcgaccctgcgccacgtgccttggcacgttaacctcaccgttgtgactcacgttagcccgtacggtggtcaccggggggcttgccatggtaatagccaccaatcgcgcacgccagtaaccttctttctctccggcccgccagcacatcttcacgaaattggacgccaccgctgtgggagcctataaattgccgaccccacctgctccgctaagtagttgtgcaaccagtgaagcaacccgtgccttgaatcatccactaaagctccccaatttgggatttcccccaaacctgctttgtgccaccgtgaaagagacctcgtcgtggctagctcaccttaggtctgctcataccctctgctcttttgtttcaacgtccttgtgtgcccctgatgctccccgaccccgccaattaagctaggaccccttagatcgccgggaacatgttggtttggccgttgatcacacagtcaccgtggacagagcatgttagagcgtcgttagtgaaattagttgaggggaaacgctt

SEQ ID NO: 20885 - DNA, 645 bp, Zea Mays
actcgcattttcactggtgatagatcgggaccggggggcctccccacaacttgtactctaggatcacataagcaatcccttgaccctcccccatccgcgctcatatcatgccataccgagtagccggccaccttaggagccccatcattgtgtgcgtagtgagaaccaccgccaccgccgccatgggaacccgcatctggggttgctcgggtcaaaagggttggccggaggggcttcacagagatctagggagttggtcgtcatcacgaagaaggcattcctcggcgggtgaacccggaattcctcgacggatttcattcaccgccgcgaagacgcccccttgtcgtggcacggctcctccatatcgccattgccggtaataagccctcccatgtgtccgccgtaccctcgatttgggttagcacctgtccaacgacgcgtaggatcacgtatgcgccggattgaggggctcgtcggcgtgcgccgccgcatgggcattacacgccgttggcctgagcattggaggtaatagatgacctgattgccgttgattcctaatatgcggcttagattaaatcctaaggataccggttcggtgggggtggccagcgtcgttcgattcagatccgatgggcatgagttgag

SEQ ID NO: 20886 - DNA, 556 bp, Zea Mays
gtctgccctcattggtctgcaagaattatctctaacaaacttcgatcagactttgtgctgatgtgcccgatgccgggttggggtcacctcgtgcagcgtcccacgcctcatcgaccttagagcgcggtcttgagggtcaggaggttggtctggattgccctgctcccacggaagtgactgagggtccttcagccttagaggtggctgttgcagaggactcgaccctcaaggatggtgttggtgcttacccagcccccgagggtgttgccggggatgatccggctcggatgggtagcgcgagctatgacccagcccccgagagtgtccgagtgggttctccctcccacacttccatggatgttcacgtagggtcttctcctccacattctggttgcatggcgatagcccaagccttgggtcaaggagtcgctttagaggccagcgcacctgatgacagagttctggcttctgctgatgacactgaattggttcccactgatgcgttgtgagttgttccgattggtgatccttcgtcaagccatcaattgacttccca

SEQ ID NO: 20887 - DNA, 548 bp, Zea Mays
gcgaaatatatgtctatgttggttgttgctctattcatgcattctccagttaatacatagtttatggccatttcatcatgggatgcttcttgcatttcttcttgcatttccctactgcttcttgttgcgggagcgagttcctttagtttttcatcgcctttgtgtgcgcacatgtttgggttggcggtttcttcaacgggaaggttcaagtccagaattcttttcttcatgtgttccttcctggtgccaggtctcatctggctccccttcttgctttgggacattttcgtgactggctgtggtaagtcctctcgccctcttttcccgggacgtctccaagtacttggggtttgagaagccagagttcctgtccttttgttatgaggcctcttaacatgatcggatataccttcaatttttctttggtatttcaaccctctggtgcattccgtgcgagaacatgcgacttaaccatgctcttcaaatcacaaaaatggtcaggcagttcatttgctaagttttgcaaatcgattatcttttgaacttct

SEQ ID NO: 20888 - DNA, 498 bp, Zea Mays
aatgcgcagacttagtcaagcgatccactaccacccatatagcatctctgccccgaggagaacgaggtaaacccaccacaaaatccatggtgatatgctcccatttccactctggaatttccaatggcttcagtaaacctacaggccgcttatgctcggccttcacgcgctgacatacttcacaggcggccacatacttataaacgtcaaccttcatccgcttccacgagaagttttgcttcagatctcggtacatcttggtttcgccagggtgaacggtgtaaggcgttttatgagcttctctcaatatatccatcttcacctctgatttatgaggctcacaaaggcgacccctgaaacgaaccaaatcattctcatcgatggagaactcccggggtttaccatcgccaaccctctttcgagcttcctgcaataaacgatcttgctgctgagcggcacgcactctgtcacacccgggttttaggggtccaaagcccg

SEQ ID NO: 20889 - DNA, 491 bp, Zea Mays
gtgcaacatgctcacgcttactcgacttagggtgaccactataccctactaacggagcaatcggcttaagtcggcaatgacttaagacggtgcaacatgctcacgcttactcaacttagggtgaccactataccctactaacggagcaatcggcttaagtcggcaatgacttaagacggtgtaacatgctcactcttactcaacttagggtgaccactataccctactaacggagcaatcgacttaagtcggcaatgacttaagacggtgcaacatgctcacacttactcgacttagggtgaccactataccctactaacggagcaatcgacttaagtcggcaatgacttaagacggtgcaacatgctcacgcttactgaacttagggtgaccactataccctactaacgaagcaatcggctcaagtcggcaatgacttaagacggtgcaacatgctcacgcttactcgacttagggtgaccactataccc

SEQ ID NO: 20890 - DNA, 498 bp, Zea Mays
cggaggcgagggctggtgcactggacacgtaacaaccaaacggagctcactagggcatcaatttatagagtctatcagcggtggcgcccaattttgagaagatgcgctggcggccaaggaaaggggatgagtcaccacggcgatctaccgtggcattcactgagacactgcttccggcgatggacaggctacctattatggtctaatgcgacgtggtaacaccacagattatgtggcgcatgagcggcaagcggccaacactggcgagggtcatttcgtccggtcgcagagcaagtgggtacggtgaacaatccagtgaccgggtccaagcttatcctggtgccaagatcttttactccctgcggttatccactttgcgccgagcacgaatcgtggcggccgacgcgaatccaagcgaggggatcaccggcggcaaggtttagtgaacccacgatcttcttcagactactgtaccatcaaagtctttcattagagcgc

SEQ ID NO: 20891 - DNA, 356 bp, Zea Mays
gcgaactcgaccatgggcgcaaaaccggcacgggggcaccagagggcgcagaacacaacgaggtgggctaacggcggcgtgaatcaactccggtgaggaattgcgtgggcactggggctatacttggcgaaataaaggcatgggaaggttgctcacctcgagtgcgaactccgggacgcttggggaacgacgggggtgtggtggagcctcgggtcgacggtggtgggctccggctgcgcaagaaacgctccggtgagcgcggaccgggcaaatcagagaggggaagggcaaaccaaagggcgtcccgagtagctgacggcgaggtggaactcaccgctgcaacggacggagcgagg

SEQ ID NO: 20892 - DNA, 825 bp, Zea Mays
gcggttgagtggggggtaggggcgctgtggacgggaggttgcagttgctgcgtcgtgtggggaaggaaggtgaccatggcgcggagggcgtcaccttcgtgtcgtaggacgatgggtggtggcagatgcgtaggatctgcgccaccgagctcttcagagtgcctggcgttagctcttacaacaccttgcgggaggacgagctgggctgcctcctccgtgctgtcgccgcggccgcggccgaggggatgtcgacggatgtcgtgtggtggttaggtggcgatcgtccttgatgagcaggagcacgagcaggaaggcgagcaggagcgtgaagacgttttcatcccccgacaccgttgcccccgctctctggtcccggcatccttcgccttccgctccgccgccaccgagatatatgaggttgggaagaggtacatactgggggctcatgacgattgcggatccggccaaggatgacggtggtggttggggctcgcgacgattgcggatccggccaaggatgacgggggtgctgggggctcgcgacgattgcggatccggccaaggatgacaagggcgaatgacggctaggtagcgcgggttgattaaaagggaagcgagggtttttttacaaaatattgacgcacgacgaccatcaaaactggtgctttaagtatagtatagacttaacgatgtcttgattgttgattctgtataggacgaaattccgtgtgcccaaaccaatcagtggagcatggccgggcgattttttttcatcccctaaccctacatgactatatacatgaaccaaacatcaggttcttcaaa

SEQ ID NO: 20893 - DNA, 446 bp, Zea Mays
ctcctcatagtattgctatcaagaatcaaacttcatcagtagttcagtacaggtcatacttcagcataatataaagaccggatgtgatcaacaaaaggacccatctttattacatgcagcagaaatccatgccatacctgtcagcatggtccacagcaagaaagcaggaaaaatcattcatgcacgcccgcaataccatcttgtctcgggcacactagatctgaccgcacatgcacagtgcacttgtccaaacgagaaacggcttgcgtttagctcgagcctaaattccaggatttctacactaatgatcagaactttcccataatttcagtgcatgcatcccaatcctgtgcattcccccgttccagaacctcgagcgcgccacgaaatctcgcctaccgaagaccaaggtgagcaccatgaatgcactaaccagcaaccacgca

SEQ ID NO: 20894 - DNA, 570 bp, Zea Mays
aaggcatgtcagaacaattcacaacccaaaccaaagtgaagacaaaaacaaccatacccaagggcaacagaatcactcccaatcaacagggactcagcagagttccttcagaccaccagctccaagaggtgaaagggaggaagaagctttggagggagatacaacactcaaccgagaagattgttctgcttattttgtggagaagataaggggcacacaacaagaacctaccaagtcacaattcaaaagcagaaggaaattgccgaagctgaggcaagacataatcaaccgaagcaggtcctccatactgttgcgtattattctccatacatcccagagtatgtccacaaataacagccaatccagcagctttcagctttagttgcttcggcaagccactgtccggccagatgggtcctgcctcaaccacccacatcagcaccaacttcgtcatacaaccagcaacatccaagtcaaatccaggatcagccacaacgcgatgcaagggagcagtccgaaggtcgatcagtcaacagtactgttccggaatccaaacatatctactgaagc

SEQ ID NO: 20895 - DNA, 572 bp, Zea Mays
ccgaggcgttcccggcgattaagcacggtctagctcaattggtcaagctgacaagcattcctagcgtgcatgggtgctgaaacgagggtgaggagggtgagagcggacctggagacggtggtccacagtgcggtgactcacggcggtgcggagaaccgatttgggggaatcccaaattggggagctacggtggatgatcggaggcgagggctgggtctctagcttcataacaacttagcgaagcagactggggcattaatttatagaagctttgagcggcggttctgaatttggaagaggaacgctggcggtcggagagaagggtgagtcactggtgcgagctaccatggcggtcactggttaacgagctacggcggttacagctgagtccttgcggcttgccacaacgaggtgaatcaactacggcatggcgcagtcgtggtgaacggcgatttccatggcgacgaccatctggccatgtcgcggcgcaagtgggtatggtgatagggcagccacagtgccccgacttcatccctgacgcgagatcttttaccctacgtagttatccgcgt

SEQ ID NO: 20896 - DNA, 794 bp, Zea Mays
caagtgaagttggaggagtcctggcgcagatcgccgatggccttccacgaaccccagacgcggagggttatcggcaggtgcttactcaggtgccaatcatctgctacctctcgcccacccaccgaacgatctgtgtcatgccatcaacagccgacgggacgcacagagcaacatcagtgcttcgtgcgatcgccgacacgagaatgaaataaggcatcgagaggaatacgaccgagatcttggtgtaccggcacacagccgcgcaacccagattgagtcaacagcagcctctaccaacagcccagtctgaggacgatcgaggtaacctaatactcgctcccctccccaggatcgacgccatgatcatcgacaagaggatacatgcggggtctctacgctcaccccttgcctccgagccatccaatggcctcccaatttcaaagtctccaacgtcaacatatatgaacccaagaaggacctagggggttggttggccatctacacaactgccgctcgggctactgcagcaaagaaggacgtcatgacagcatacttgcccatcattctagggcaggacacactacaatggctccggcatctacctcgacactgcatcgacgattggggagattttagtcaccggtttatcgcaaacttctagtccctctccgaataacggcacatccataggatctcaaatccattaggcgacagaatgatgaaactcttcattcgttcctcaaaaggtttcaaacaatgaggaaccgtatccctgaggtcgctgaggtggctat

SEQ ID NO: 20897 - DNA, 771 bp, Zea Mays
gtatagtgttgctcgttgtattggtgtcagaaatgtgttatagagggtgcaagtgtgagaactagaggatgaggttggcagaatgctcctagctctccttgttcgtgtttggccaccccattttatagttcaagggtgcaaccttttacaaagtgttgggcggtctgaagcatatcgggacttgttttctataggagttttctgtatgtagcttccctgatgttgacatccaatacatgcgtaaacatatgcccggtatggtgagttgctctgccacgtcccatttgttggctaatgtagggtcttctaatagtggagctccatagcgggtgtcggttggccccatgttgtagtgccggggcattaggggccatacgcattgttgccatcccattgatggagacccatcagcactaacccgatgtgacattgtgtcagcgagggtgcattaggtggcgacgtgccttagcgtggctagcgtgggacaatagtgtctgcctcgttttcatactaggagggtacaatcgtacaggcgtgcgcctgtcaggcgcctgacgaggggtcatggaactggggtccatagatgtactggtccttaccacatgccctcacgtctctatcttgcctagttgctcggtggagagttgcttggcctgtccgcttcgcagagttcctcagtggaggcttgctcgattggcttcacctctatggccttctacctaattgggccgccatgagtaatgggactactttggggtaccatattcatgg

SEQ ID NO: 20898 - DNA, 567 bp, Zea Mays
ctttgttatagattgattaacatgttgtcacatacaaattagaaaatgaagctctccaaatcatactgtcagaacttctgatgaggattaccatggtacagtgaccagaaagatctccggtgtcgtgagctcaacgccggtgatctgccgccacaattcacgcccgcctaggagatccgtgctgcgggaggagtagataacgtcggggcgggaatccagtcactggccagaccggccgtcgtgtcccaccgtggtcagtcgcgctggcatcaccggagctcgtcatttttctggccgtgacacgtaataaccactccttcgcatcgtatgggtcgtggcaagctaccggttatcgatcgcaggccagtttcctcttgtgcaccacggtgatcaagccactgtgaaatatcctagccagataatcgtgatctcaatcccaaaattcttgtccagttcgatcggggcctataaattgaggatgccctctgctacgcttcttagttacgcgtccaacccatccccagctagctcctatcatgcaccaccacgccccaatttcgcatttcc

SEQ ID NO: 20899 - DNA, 281 bp, Zea Mays
gccgaagttgttatgatattgttcttttccagtcaccttcatctagtaagataactcgtgaatgttgtagaagcacttagcatccgactccagtccctgactcctcatggcccatataaaaaccaccactttgataagagcttcgggggtaagttgatgaaggaatatctcaaatgtcttcaaatcctcaaccaacatcttgtggagcggaaagcgaagcccagctttcttgaagctcttgaaaactactacctcattagcttcgagaaggggaacgatgc

SEQ ID NO: 20900 - DNA, 419 bp, Zea Mays
gctaatgatgagcctcgtgggctctcgctcacggctacgaacatcaagaatgtttcgagcgagaggtggatggtacccctgacattgtgctttggttgtcggaccaatagagcatgctcctctagtcgccccgtggtcttgtgctgggtggcgatgtgcccacatcgacaagacatgcatctctcgcactattattttgtgatggggcagagcaacccctagatttcctgctaggtcttgcattcatgtggggttactagttctagaagcctatcgaagaacgcccccatgacaggtatgttttggctagcatggaggaagcgcaaagagtcgtcatcgccctataggatctgcttatgagtgtcgcatgccatggcgtgtgcgtgtctaccattgcctcgaagctgtgcaagttgttg

SEQ ID NO: 20901 - DNA, 516 bp, Zea Mays
cagatacccccaattgttgaaaggcgagatcgagcgccagtgtgaagacatgttgcagcaaggcatcattcgggagtgcacatcggcctactcttccgcagcgttacttgtgaagaaagttgatgaatcctggcatttctgcattgactatcgggccctcaataccaaaatagtcaaggacaagtttcccatcctggtggtcaacgaactcttggatgagttacacggtgcctgtttcttcacaaagttggacctccacagtggatatcaccaagtatgcatgcaccagatgatattgaaaagacagtgttctgcactcatcgaggccacttcgagtttctagtcatgcccttcggcctcaccaacgcatcgtccacattttaggccctcatgaatgatgtcctgaaacccttcatccggaagtttgtcctggtcttcttcgatgatattttggtattcagctcttcctgggtagcccacttacataatgccagggaagtatttacagcactccga

SEQ ID NO: 20902 - DNA, 600 bp, Zea Mays
gaggttacgaccctcaaagtttttccggtgctcacacgccctctccagagagactcggcatcctcgcccgcacgcctacggttgagctctgcccgcagatcgtcaaccttctccggagagatttgagcatcctcgcccacacgctggcggttgagttctgcccgcaggtcgttagtccatgcacccctcactgagggtgagcgcacagatgctgatgcctcacgttgacgccagaatgaccgaggcctgggcctggccgagccagaatgtgccatgccaaggagacggtcaacatctttgcgccactgtctcatggcccccggcgaggccgtggaacttggggggttgcgcaacaactccctggctgcagataatgctccaggagcagcccttgacggagccctggatgtctgcacatgcgtgtgctgctgtgcagcgtgcatagcagcagcaccggttgcagggcggttggagcttcgtggcatggaagatgctgcctcatcctccatcaggaagtcctcgggaatcaagtcatggtgctcgatgatttgaaccatcgtgtcgagcaagaagacaggcgaaaaacctaaagccaagtcc

SEQ ID NO: 20903 - DNA, 598 bp, Zea Mays
gaattttgatgagtatatgacaaatggcaggtgtgcagcatggttggagaacagaacaagggagacatgattcgataaggtgaggtggtgtcatgcatcaccgtcttttttttgacagtcaatagggaggaagatgctcatagagcttgttctcgaatccgcgtgtgggctaaaaatgcacatatacacgtttttgtttaaagaaatttggttgggtttagggaagatttgagaaagcaacaaagaacagaaaggaagcaaaatgggatgaagaaatgtcctggttcaaggtggagatcagtaagtgccagactcaaaagtttaatgccatcaatgatgccaaagatccataaacacagcagcgggttgaacaagttcaaaatgaaagtttatgtgctgccaggctgcttcgttaaaggtaggagcagtggagggagctcataattctattaatagaaaataaggataagaaaacagttctaacagacatgttgtaaattagataaagaacaactttgatggtattaaaaagtagtgcattgttctattggtatataactcaattgtttttcagtaacaggaaaccaaattttccacg

SEQ ID NO: 20904 - DNA, 295 bp, Zea Mays
ggcaaattccctccaaaaggagaaagaatgaaaagaaggcaagaagttgaaagctagttgcagtttgtgtacagatacagatagactggtgatactcgacaggaacataaacagaagcaaacacgccattacaccatcaaaggcaactttgactagcgagtcacatacagttgcaattagagtggtagactagattgttcgaaacccgaaaccaaacacactgagtggactaaggctatctccagcagctctcatatctcattccctatcacaactcatatttcaaactacaccc

SEQ ID NO: 20905 - DNA, 3000 bp, Zea Mays
ataccttgttgactgcctcctggaagttttcttcgttctgattttgaaactgcaggagcctgagttatcatagtggcagttgtttcttcaatacttgttgcgcccaggcccagaacatggctccccacgggaattgaaatggcagaaggcatataatttccaggattcttctgtccttcagaaacagaagcattggtaatcttcgcacttaaagaagcagctccctgttgctctaccgatgaaatacacactgttgtggtcggcgttgctgacatctctaacttctttatgtcctctgcctgcttcaatccagtaagtcgggcacgacgttcacttgcagctgatgcagaattacttctggtgcgtggttctcgagttgaccctttcctcctcctgcttgatgccctatttggagcagcactgtcaacctcagaaggtagtgcagtagcatccttgcctgaattctggggcaaggaagcagatggttcaaactgggcagttcctggtttatgatcaatagcaggatttgcagtgtccgtctgtaactgagtagcaaagattctagaacacactgccaaatggtccttccctgtcatgtgttgttcttggttttgggaatcaacagaaacaggtgcattaaggtgcaaatcaactggtttatcatcttcagcagagttggcagatgtggcaagagttatcatagaattagtacaggtgtcaaaaccactaggaagagtgtcttcattgatggggacagctataggtgtgcttggttgagaatcatatccagacttctcatacaatggtgagttaatatttggtagttcattggatgtactttgaattgaactgacatctctttccttcgttattcctgatttttcatttgggatcacagcagaaccaatatcatcaacggcaacagaggtgttgtagtaagatcttttcatagctgatctttgtctagtgctgactccagtatcctcgctactagatgttttctttctgcggcgacgtgaagcagtttgcttctcaacaggcttatcggccaccgcaacatgtgctattttcattagttcttcagaagccacgagcatagaaggtgcagatgccacttgaactaatccaatgttttccttaagagtatttggtgtcagggtgacagtgttgtctgatgttgtcacagtcccagcacatatatcttttgccacaggtgttgtaacagtagcacctttatctccctcattaacaggaggagcacccttaccactatctggtaacaatgtatccaacttaactgtcacaaaatccttctggattcctgccagtgccacagcagtgccttgtgatgagacctgagaatatgaaggaacataactagtgtctgctacaccactaacagttgaaaaggttgggttaagactaacatcatctacaccagatgaagatagagattttggttttcggcctcgcctacgaggtgtttctcctgcttggcatttcctgcccctagctgattgatgcggtggtgcagaaactgctacattatgaacactctgtaatggtgtaccaatttcattcggcacagatccttccaaaacagaaacagaactggaaaccttggtatcagtactgaactcttgtttcttggtatcagctggtggaatagaatgtatattaacatctgaaacagctgaattgattgcagtagctggtgcatcagagtggatggtacttgctggtgtagcagaactaccgtcctgtgtggttcctgtgtcttgtttgacagcatcagtcagaccagcagtaggagatacaaaaacatctgaccttttaggtctacctctccgccgtttggctggtggagagtcaccgacagttggggatgcctccatcttcgtttgttctggttcttttgaactctccacaagaatttcagtcttaatgcctttattaagaatatccaaatccttcgacatgccaccaggttgggatgattcaggagaatcagcttgacaaagtttttcaaattcttcttcagtccattggtcttcataagagcgaacctatatgggtattcacgaattagcaaagttcattagactacaattggaagatacattaaaagacactgtgcaactgacctcacgggctcgtttaccccttccatagtgctgtgtatcaaggcccccaagttcacccttcttcctcacattcacatttactgttttcacatttgatggctcataaagtttcatagcatggcagaagggcttcagatcatcatcagttacaagacgagaaggcaatactccagggtctagcccactagttgaaccatcctgaaccaccttttgccaagctgcctgtgaagacacaacaatattacaagatggaaaacgtagaagatttagctgaaagcaacttgcataaattcagcataccatttcttcttctctcctttgcttgtcaatagattcgaatatgtcaatctcagcttcgctgcagtacagcaagtgaagcaatgttatgtaaatacagacattcatgatctcgagcaatcaggtcttacctccgagctagaatgtcattcagagcatcatcatctaacactggagctgcttcttcctttttagactcacgtaggagtgattcaagatactctcttcgatcttcagcactgaaatggcactccattgtataaattagtgagggtgaagatgggacctatgggtgctaaattattctagacaatagaaggatttaccttgtgttattgtcaaaaaaaccagcagttatactctgattagcaacacctaatttgtgttctgctgaagccctgacttgctcttcaacagttcggacctttcattaaaatagtctaaaagttaaaaaaataatggcaagaaacttttcatcacaagttcacaactagaaggtattaattttggttaaaccaagcaaaatttcttgagatattccggtcataacaaaactcac

SEQ ID NO: 20906 - DNA, 667 bp, Zea Mays
tgggtagaagcacataatcttccaattactaccatgtcaaccccccattcaaattaattcagccggtggtagaattcgagccgataacatttgcttcaatgtaagtgtggaaataaggggatagcgtttcccgctaacctcatagtaatgggtactcagggaatagatgtcatcctagggatgaactagctagataagtatcaggcagttatcagttttgataagaggacaatcaagttgatgaccccactaggagaggaagtggtgaccgagttagttccgcctgagttaaagaagggaagttgttatcagatggctgttggtagcagtgaagcagatccacctgagattatcaaggttgtgtccgagtttctagatgtgtttccaaaggatctaccaggtatgccaccagagcgaaaagttgagtttgccatagagcttcttcctggcaccgcacccatctttaagagagcttacagagtatctggaccagagttggttgagcttaagaagcagattgatgagctgtcagagaaaggttacatctggccaagaacctcgccttgggccgcccctgtcttattcatggagaagaaagatggcactagaaggatgtgtatcgattatcgagctctgaatgaggtcacgatcaagaacaagtacccct

SEQ ID NO: 20907 - DNA, 421 bp, Zea Mays
gcaaaagattggacatgtgacctcacagttagctttagcaagggagattattcacatgcttgaagtagcccaagatttcaggcttttgtcccctttggaggattggctgagatgtggactgaaaaagcactccttagcccttgcctcatttaagcgcaccattgcacgttctagatcaagaatcaactggctcaaagagggagatgctaacaccaagctattccatatgcacgccagatatagaaagaactttatggcaaaattggtctttggagataatgtgtttactgatcatgctgacaaagccatgctggtggataatttctacagaagcctgttgggaacaagatcggatagaactgtcactattaatcttaactacctggggctgccctctcataatttggaggatctggactta

SEQ ID NO: 20908 - DNA, 416 bp, Zea Mays
atcggtgggggatttgatcgcggagaggtaactttggacgtggcaccatcccacgaactcagtcgtgcgtggccggagatatcccaccggcagtcgccatggctcggtcactttcgccgcggtgtcacccatgcctcgatttccccttactgtgcctcttctatacgtggttgccatccgtgaacaaagccttccacggtcgccgatcgttagccggaccgccgtggctataaatagcaccatgggtcacgacgaggtattcacatctccaccagtgagttcagttgaagcccaaattcatggaatcctctccacctctcccaaaattggtagtgcacggtgaaaccgtagtcctttacggccgtgtagccttaatctcacctcccaattccacccagaaccgtcgcggcaccatt

SEQ ID NO: 20909 - DNA, 434 bp, Zea Mays
agccaattaaggcctagatacagagcaacgaggaagccaagaaagtgcctttggacacatcggtacccaaccaaacggtcttaatcagcgaagacctaagcaaagcggaagaaggcaaattgctatcatgcctgaatcgcaataaggatatcttcgcatggtcaaccctaaacctcgttggcgtcagccgcacagtcatcgagcacagtctgaacaccaacacttcgatactccccaaaaaacagagactacaaaatgtcagatgagaagaccgaagcagcaaaagccgaggttcaatggctgttggaggtcaaattcatcgagccaatcgactacccaacctggctcgtcaatgtagtcatgatcaagagtagtaggcaattttgatctagttcagtgtgatgtttgggcatcccccgttctcagcatttctg

SEQ ID NO: 20910 - DNA, 625 bp, Zea Mays
ctatagctcggcaatttggccgccgccgtttatctctccgccagtcgtcgtggtccgcgctgctcggccctcaaagtttgctgtagagcgtatggtcgagtccgctgtaccctaaatgccgtatatctgtagtttagtggggggaaaagccatggaggaaccgagatggccatcaccggccatcccccgccgcgttcgggggagtagcgccatcgcacgtggactcgggtggggaagatgggctactgtcgtccgatccattttgggcggccatgatcacgccaacctatctgtgtggctaggttgattcgggtccgtccgatcgtaatcgggagaactcggggctgatcgcttgtacattaaacctgggccgtagatctcacatcctgcgctcgtcatcgcgtaccggttcggatagacatgatctaatccctaccacccgcgcgaaatctgacggccaggaaccgaccgtaccccttcgcctggcatttatctaaagagaccctagattattaacaaatcaacacgcagtccaccctgtactattctctgtgtctaggaatttttacctaggcgcccctgtcttttctggttattgaggcccagtccagagaattagagaaat

SEQ ID NO: 20911 - DNA, 520 bp, Zea Mays
caccagtaggaggatttgacacaaaactgatgaaggccttggaaggaggcagattccaggctgagtatgcaacaggagcaccgatattagacaccttgcctctgagtatcatctcaagccggctcaccagatccacaacaggaatccttctgttggtaacccgggttgaatcagcaaggcctcgatacagataagctagatacgctctgtcttttagtggctgaatgttcttgaacacaaaatcggcaaccacagcctcggcagtcagaccactctccttcaacaatccaacctcgacaagcagagccccggcctcagctacctccaggtctgtgggggattcaatccagcttggagtgcaaacatctggctgtctccctgaccgaggggggagggagttcccgtgattctccacgataaaccattccaggcgccatcctttgatgttgtccttgagtgggatgtcgaggtactcggttttcctcccacggcgcatctccaaactcgcaccccccacgag

SEQ ID NO: 20912 - DNA, 520 bp, Zea Mays
ccttgtaacgtcgtgtgccctcccttttataacttgaggggggcacgtacaaggatattgagccccgacatgtgggcccatgaacaaaacggagggaatacattatagaagtaactaacgcgagtacgcctgagcaatctccaggcgtgctgatgtccgcagctgcttccttggtgacgtgcgagtaatgatgagcgtagtgcacgcggcagcatgggcgtactgcctgctagtggaatagacaggcacgctgcctgcagaatggactggtcgctgcctgcccgtggaatggacaggtctcattaaatgcggaggcggcacatcgcctgccagtggaatggacagggctcattaaattccgaggcggcacatcgcctgccagtggaatggacaggaggcgtgccttgtccgcaataaatggagaggctgtgcagcccagaggccttacgtcaggctccgcccgttggcttacgtcacgtgtaccatgccacatggcagcatcggggctccgcctaagcag

SEQ ID NO: 20913 - DNA, 273 bp, Zea Mays
tgttgtggccttatcatccgaatctctggatctttcattgattctgccccgttatctggttatctgctataacccgttctcaagtatcgaatgatgatcttgcctaaatctctcatttctggtcattctcatacccccttctctgaggatcatgacactaattttatcaacttatctctaaacagcatatccatgtggattaatggatgtcgttgttatctttgtatctctcatgtctctataagcttatcaatctcgatctcatggttggtt

SEQ ID NO: 20914 - DNA, 658 bp, Zea Mays
tgtggttgatcttctgatccggaaacttggtgaactgtttgtataattttgcataatttatcttctcgtcggccttgcagagatgctatgtaatcttaggaatggattggttgtcccagcgcaatggcatcataggatgtgcagataagaccgtccttctcaccaaccatcaagggaaatcagtttgttgtcaagctcgtccaacagctaaagatccgatggtgttcagtctggcagcagaaagcatgtttgtggttgaagaatttatggatgtatttctagaggaattacagggatgtcccctgtcggggaaatgatccccggtcccaaggtcccgccagtcaaagagtgcacagaggaaagagcccctggtcattggggctcgtaagttagttgggagaagcggatgcgtcaaccctaaaagaacatgcccccgtcgaaccccgccagcaccgagcccggggtcgggcgggcgaaacctgataggggaggtcgagcgtgtcagaagggaaccactcgagtggatcacacgcccggccccagactgacctgtcataaataaccgactgcatttaaccacggcgggcaccaagccacagaacgaacaccaatctgcttcctactcatgacctacgaaccccttgggtcgcatagcact

SEQ ID NO: 20915 - DNA, 792 bp, Zea Mays
gtgggctcacgaccgtttgattagaaacaggcggcttagaacaacgccgtgaatcactgaacttgtatctaacaacgtgtgttggatcggggatcaatggtcaagattgtaatcgacgatcacccctcagatctagcctcaacggcatggatctaatccgtacgaatggaactcaacatttaatcggggcgctttctccccaaatcctgattccggccacacgcgcacggcgacgcattacccacatggcggtgccatcgccggcgttcctcagtctacgtctctagctctcggtcttcgcccggaacactactaaacgaagagaataacgttgtgaatgtgttggcgaggtccttaccggaatccgagtggtgtcccgccttgtccgcggtgctcggcggaagtgctgcgatgacaaggaattccggtgtcaatcgtgcaccccctactccaaattccgcacgataactccacggggcccgatgaacaatgttgcacaccctccggatcaccaatcaccggcatcgaggagaacaacgctgcgtaaggtcaaccggtctgcccgagcgactaatggcagtgcacagaaatttgctggggatagactcggggttttggtagtgcttgcgcgtggtcgagacgacccccgtcatataggctttgcccggttggttgggtttccccggtgagaagcgcgcgtggcgagttcgccgatcgttacggtgcgtggttggccagttcacggggagaggacctgacgactgggccccacattgcagtggcttacgtgcg

SEQ ID NO: 20916 - DNA, 568 bp, Zea Mays
cccaacaataaaaaggggggctcactgcagccctagtcgcaccccgaagaccttttctccgaaagcggtgcccagaccaagcgaaggaatggacgtgacttcactgagccctgaaggcctttcctccgacggcgatgcctgatccaaacgaaggcaaggatgtggcttcgcagaaccaagagtgcgacacacgagcggagacctcgtcaggctacaaagaaacccggggcttcgccccgctatcatcctggcccacttgtaagcccccttgcgggatagattttgttgtacacccagattacaatactccattcgttgtaatgactccattgaggggagtattctgggaatgtagcaggtaactagggtataacagtacttatggacccactaccccctcctggttacctataaatacccctaccctatacacgatgggacacacataacaagacactacagttctctgcctactatctcattgtgcacctaaaccatcttgtctcccaagtgtgggcccacctgaccacgtgtcagcatagttccaacactttccctcaaatttctc

SEQ ID NO: 20917 - DNA, 395 bp, Zea Mays
tacgaggggggcagtgcgcactactggagggttgcagttcagtcggaggtggctggcgctgcccacggctgcaagcagaacgacggcggccatggacgggagctcgcaagaatgggagggacaacgctgggagcgtggagaaggaatggagaacattggggagtgctctggcgccgtttatatagatgggggaggcagagaagggtcagacaggaaggggcaatggcaggtgcgagctctgctcattggtgggcgtgggcggctgcctgccagagcaccagtctgcacagcgacagaagaaggcacgcattggacgaacgtttttggcattttctgtttggattcggacccggatcactgcagaagatttgttccttgatgtatactctacaaat

SEQ ID NO: 20918 - DNA, 476 bp, Zea Mays
cttttgcaagaacacaaagaatggggctgtggtgtttctcacttctctcaaatcactcttgctcacaaagagacactcagtgtggcgtggctgtttaggattggcatgaggctttacatggctggatgggttagaactctctcccttacttgggttgggggtctcactcaattttattttgtctgattcctctcttttcttgcgagccatatctgaagtatgtatctcctctggagataatggaacaagaaccaccttcttgtcattgtgaatgaaagtgtatttgttagaccgtccaaaatgcactgagtccacatcaaattgccagggccgaccaagcagcaaatggcatgcttgcatggggacaacatcacaatccacctctccatgataatcaccaatggaaaatgacaaatcaatcatggctgaaaccttaactgtcctagaattatttagccattgcgtatggtccagat

SEQ ID NO: 20919 - DNA, 376 bp, Zea Mays
gtcacgaagtgataggcgtcatggtgaggtagagggtggtcgtcttcgagtggacgggactgccaaacgggaattgttgtcttcgtcggctggggcgagtgtaggtgagggtgagttgcgaaatctttttgagggtgagggattgaagataatgttgttcaactatagggagatgggtatcatcccgaagttgagccgttgtaatgtgtgatgccctcgctgtgtgtaactatgatttgtatgatgaggctgcgtgccttcgttgatccggccgcgcccgtaggcggcttgtgtccgggtgtttctggggaaatctttgattttccacgtttatttagaccggctgcacccgtaggcgtattttgcgtggagtctt

SEQ ID NO: 20920 - DNA, 628 bp, Zea Mays
gtggttgatgttaatttggaaccaaacttgacttattcagaacatcccattcgagttttggatcagaaggacagaattactcgaaagaggactctcaagttttttaaggtacagtggaaccaacacactgaagaagaagctacgtgggagactcgagacttctagagaaacattttcctaagttcttagcctcctgtaatctttagagtttatgtaatctgttgtaaagttagaacaaacccccacaccactccctgctctgtaagataaattaggaaataaagttgtgacacgtttcctttttcattacttaccctagggccttaaatcttgggacaagattcttttatggggggtaggatgtaacacccctggtgttacaagaactaaaactcgggcatgacatcatatgcattgacatttcattatgtatgttacacctagagtgcatccactaggctaaaacttcaaaacaagttgtgatgtgatgatttgaagtgatccttaaccctaggatagggtacctcaccaagggatagaggtatgtgggtgtgtgtgacataataattgaagtatgatctcaaaagattagtggagatgttcaagagagactaaatttggaaagtta

SEQ ID NO: 20921 - DNA, 427 bp, Zea Mays
gtgggtcgaaggatggagtcttcaactacggcgacctcgaccactttgtcgccaattgcctcaataagggcaagtctgaggctgacccacgtgaccaccattgcagtcacgtgcaagggaaagcgggagtacaccttcgacaagcacaagtctgagagaggattcgacaaggaggcactcaagaagaagtaccttcagaaggccaagatcaaggagtgtgtcttcctcgcttcccttagcgacgttgaccacgactccgacgacgcatcatcttcctttagtgacgaggagactcacaagcgagtcaaggataagctgaacgaactcttcttcctcaccaacatcgcaggtggtttttgcaccatggcgtttggtgatgatgcagtgggcggccacgaccaggacatcggcgacggctctgcttctg

SEQ ID NO: 20922 - DNA, 1574 bp, Zea Mays
tagcctccagcccactaccgtggaaaaataaaatacatataatatttggcacacagatgaactacctttacaaattgcaatcagagcaaaaaccctgaccccctgtacaatatgtgattaggcattcattatgttcacttcttcaaccacataattgctgtctggtgcgtattcctcgtcatacgatttcactcgtattgttgttgaaaggcatccttattagtaatccttggtactgctaaggttaataaacagtgtaatgttttactagttactaccgttttagatgaaaatatttggctgcttgtgtcctgttatggctgcagatgatatgttggtcttggatgtattgaatagcctggtgaatgcaccctctaaaatgtcagaactagagattaatattccttcaggtcagcttctgtcactgctcgctgttcattttttttccacattatatgttagccatgttgataatttcttatgtgtctcttcttatgtattgatccaggttcgcttggaaaaactgactctgtgttaagggaggaaggccaccctaccattgatctgtctaaacaagggaagccagttcgtaaatccagtgcttccaagactaggaagaaaaaacataagaagatattaggtgcagaggtaagttttttttttaaaaaaaaataataaatcgaaccttgttttatgtactacctctgtccccaaaaagatacaattataggtttgatcagtcaaactaactcaagtttgactgagtttatggaaaatggtactaacatttaagactccatatatgtatattataaaaatctgttccatggcaaatcctatcgatacttcattagtatgataagcattaataatattttatataaatttagtcaaacttaagatattttggctgagcactactctagaatcacatcctatttgggacagaggtgcccgctaaatgtttctcctctgttaaatgttgatctcttcagatagtcttatgatactcactcccattctcactcattctttttgtgccacaggtgcctgctgaagcacaaaaaaaatgtgacgataatttagtcctgccggaaacactgagggttggtatcactgatgattcttccttgtgtactgactctggaagagcgaggacaccggaagcatctgaagatatttctgctgaagtccccaatacacaaacagaagccaagcctgaatttataatgtctggaaggaccaggttgaaatctcagatgcattgcaaaacaaagcctatgtcgtgcaatgaaggttcagataattttcaggtagtttatgccacctattatcaatactgtaagtagaggtatgtcctgctcttagacttcttatcctaaaatgttgactatgttcaggcaaagaagttgctgcactgtttgtcatctgaaccacttcgtagatggtgcacatatgagtggttctacagtgcagttgattatccatggttttcaaataatgagtttgtgcactacttagatcatgcaaaattgagtcatctttcaaggttgactagatcagaatggagcgcg

SEQ ID NO: 20923 - DNA, 276 bp, Zea Mays
cgaccgccgcgcgtccttcttcaaattcccggccaccgtctaagccgcctataaattgagccctcccctagctgcgcaacatcattgcgcacccccacacctagtattgctcccagccgatcaccagcaagctccaattttgtattcccctcaaatcagtcgaagaacaccgtgaaaccaagttcaatgtggccagagcaaaacacttgatcattagtgaaattaagttaggggaaaggcttgggatggattcaattaggtgttagtcgctcggag

SEQ ID NO: 20924 - DNA, 782 bp, Zea Mays
ggtggcctagaactaaggaggccagatcagctgcacaaagatatgacagaggtagtgacgtacgacagctgacggtgagcacggagaccatccaacgttgtatcctcaatctcacagatcagaaaatcaaccacatcaaactccgagtgagagatcaaggcaccaagtagccagagctgaatatgcgtggtggcctccctatatcccatcctaggtagcaaagtctgcctcatcaactcatagagaaacttcactgctggagtgaagtcggctggagaacgccgtgacccatctatgaatggaggtctaaacagggcagcgacatgagttgtggctggagcaactccgccgtgagggtgacggggaggatctgacatgccatagcacaagctatggagcctcgtcgatgactcaggaaatccaaacaactctctgatctgggtagcatgcaaaatcacatcctcgcgctcaaacctgtaccttagccactgatgatctggatctatccataccgtggcataaaatactctgacccactcctcaatgtatctaccatcgaaggttagaagagagagtaaccctagcagataggagagatgaccctctaactcggcaccgtctattgacagaaaggcaggaagatccaaaagccggtgtgccctctaggcaatctgagcagacaactgcgccatgaagaacgactcgtgagtcctagtgctgaagagtggcacaactgttgggtccctctaagctggcaaccaagaatccacgggtacgtgtct

SEQ ID NO: 20925 - DNA, 711 bp, Zea Mays
ctattgaatgttggatttattttgcttcagatatggacagtccttgatgaaatgttcggactttccacagttgaagcacccactagaaaaacagggaagggcagggaaacgagtactagggcacttggctgattgttaggagcgggcagtagtgggacgaataaagacggactgcttgaatggatatgaaggtgggcaaggcgaagaacgattttgattaaaaggtcgaatcaccaacctggttctctttttaggcccttgatttgacctttcacctccatacccctttgattttccatgtcccacattcttggcttccactgccagtgctgtactaacaactctgctataggtaaggtccagacatgttgccattttccgctgaagcctgtcattgagccccctcataaaacaattctttttcttcaagtcagtatccacctggtcaatggtatgctaagagaggtggttgaatttgttgagatactgcatcaccgtatctcctccttgcttcaatcggataaactcttctagtttcatctgaagcactccctccggaacataatgctcccggaatgctagcttgaactcctccctggtaatctgatgtccaacaggctgaattgctgaaaaatttgcgaatcaggtactggcaggccctcttagctggtgagctgtgaacatgggcttttgcatctccgtgcatcgtat

SEQ ID NO: 20926 - DNA, 293 bp, Zea Mays
cttggatcatattccaaggcagaagataatgcattgtccacagcctttggaagtcgaggaaaaaagagattgaacagagtttttgacgctattggcttcgtctatcccgactaccgttacccgctgcgggggcaagggaagaaaaggaaggctactgctgtggccgcctcggccgaacctgtgccgaaggctacaagcaaaaagatgaaggtacttacccaccgaccacgttatattgaaccggccgtggtgcctgagtttggcggggaggcttcttcagctgttgaaccaag

SEQ ID NO: 20927 - DNA, 302 bp, Zea Mays
gggcccacgggtgcgagtggctttaccccgtggtagaacgttcagttttaccactgcctgatgacaccttcttaaggaagccactgttggtcgaccccctcagcctataaaaggaggaggtcagtctccatacatgggaggacatacatacaagaagacgaccagacggacaactagacgcaaaaaacaacgaatcgacgggaggaaggatgacgaaccgacgaggacctagaggccggagcctcatcgccaagacaagacttagttaggattccactatgtagctcttgccaccacctcca

SEQ ID NO: 20928 - DNA, 416 bp, Zea Mays
atgattatgaagtttgttttcgggatatggaagtcatcccctgggttgcgtaagcgtgagtaagctgcaccggcttgagccaccactgactttagccgatagctccgttagtagggtatagtggttaccctgggttaagtaagcgtgagcatgttgcaccgccttaagtcatttgccgacttaagtcgattgctccgtttgtagggcatagtggtcaccccgagttaagtaagcgtgagcatgtcgcaccgtcttaagtcgttgccgacttaagtcgattgctccgtttgtagggcatagtggtcaccccgagttaagtaagcgtgagcatgttgcaccgccttaagtcgtttgccgacttaagtcgattgctccgtttgtagggcatagtggtcaccccgagttaagtaagcgtg

SEQ ID NO: 20929 - DNA, 698 bp, Zea Mays
tgcgtcgcgtggctcaacccttccaccgcgtcgctgtaactcgctactgctgtcaaatcaacgccggtgaggttgccacggcgtaggacactaattcgcgtgcgccagtgttcttctccacctccgaccgccgcgcgtcttgctcgaaattcacggccaccacccgctagcactataaattgacccctccctgaactccgtagggtagtaagctgtccagccaccacgaattagccgcagtcgttcactggaatccgcgaatttggaattctccccaaaacccactctccgccaccgtgaagaacaacccgccgcggccaacgcaaatcagggtcaatcctgtcgttgtttgtgttgttcgtacattcttgtatgaccacgatgctcactgccccacttaattgaattatctcgccaccaatcgccgggaacacaaccgtatagccgccatgatcacggccaccgtggccagagctacgtagttggtctttgttgcaattaggttgggggaaatggtcagggtagccccgatttcatgtctgcctttcggagaacccagtcgttgccccgttcggccggtacaggtgctcgccggagcacggtcgcgcgtgaacggcgtcggggacatcaccatgcaaaaggatagaagatgggggttcttagtgcaaatagtcagtgacttggttaaacagtgaaag

SEQ ID NO: 20930 - DNA, 536 bp, Zea Mays
ggcaaagtactatctcaagtgtaaattgtctaggtttatggagatagactctagtgatggacagaagaggcagctcgacattcccttgacaatcctaaggcaccttccattcataccaaggatctagcgtttatacatgaccgaggaatctgcaaaacagatgacatggcacaaaaatggaaaatgatacaatcctgacaagatggtgcacacatccgatggtgaagcatggaaacactttgatgccattcaccgtgagaaagccaaagaggctcgtaatgtacgtgttgcactggccacagatgggttcaatccctatggaatgagcgctgccccgtacacatgttggctcgtgtttgttatcccaatcaatctcccccccggtgtgtgcattcaaaggtagaatatattcgtgtcgttgataattcccggacacccggggaataaaatgggtgtgtacatggagcctttgatcgatgaattggtacgtgcttgggaggaaggggtatggacgtatgaccgagctacaaagacaa

SEQ ID NO: 20931 - DNA, 341 bp, Zea Mays
gagcttaatacggttaactcaaactctatgcttaagctgttaattgttttggtgtttattcattgacccaaggttgaattattgtgagacactaatcccatgttcatctcaagtgaaataagttgtagaggtccttaatcatcattggtgaatcaagcaaaggaccttgattgtgcatctgactctccaaaggacggtgcatgatcaaaaggagccctcaattagtgacaactggtgatctcatggcaattcaggaaaaggcaaaggtatggagaatggaactatgcaatttcattgaatatcttgaagttccattgattgtgatcacaactatgttcttt

SEQ ID NO: 20932 - DNA, 551 bp, Zea Mays
agggcacccttgaggcctcacgcctcgtttttggatcctaccgtcctgcgcctgagattcctgtgccagcttctgctcctgtttttgactcttaggccgaggatgcagctcttcgacagtttgccactcagggtacagcagctgatgatgatgatgattttggggttcctcctccgcctccgcctcctctgcctccatgctcacatgatcatgaggctgggagttctagtgttgcccctgctcctcctcaggctatggaccctgctcttgcttcgattctggctcacctggcggccgagcaggcccggttatccgagaggatgctctcgatgtttcagaacatgcaggacaggcaggatgcacttcagcagcagctacttcaggatcgggctgagagtagggcattcatggctcttatgcttcagaagtctggtgtctcagtacctccggttcagtccgctcctcctcctccgcttcacgctccagttgtgccatcgattttgtcaggaccccctgttggtacttctccgctccggccggtcactttggcg

SEQ ID NO: 20933 - DNA, 752 bp, Zea Mays
cctccatgttgtttggcctcaaaaacgcaggagcgacttaccaaagggctatccaaacatgcttagccaatcactggggcaagcgagtagaggcctatgttgattatgtagtcatcaagacagaagactcggataacttcatccaagatttgcaacaggtcttcaacagcttaaggcgctaccgatggaaactgaactcggagaagtgcgtgttcggagtaccagttggaaagctacttgggtttatcgtcagccatcaaggaatagagacaaatctagaaaaaaattgaagccattatgaggatggagccaccgcgatcacagaagaaagtacaaaggctcactggatgcatggcagcgttgagcagattcatatcaaggctgggtgagaaagggatgccattctataaattgctcaaaaaggtggataaattccagtgaaccacagaagctcaagaagccctggaagcactaaaaagttcctgaccacaccactagtactcaagccaccacgccaagctacatttgatcagccgactgaagacctgctgctatatatctcttgcatgactcacgtagtaagcacagcgttagtagtcaagcgggcggaagaaggatgtgcgtatccagtacagcatctggtttactttatcaccgaagtcctcggtccctcgaagataaggtatccacaggttcacaagctattatacgcagtacttctaactgctcgtaagctctggcactactttgac

SEQ ID NO: 20934 - DNA, 506 bp, Zea Mays
ccagttcgcgctgctcatccacgcggcccagctcgggaacatgcacgctggcatgcgggcccaccccgtcatccacccacgtgcgcccacttctttcgccagagtcgcaagttgatatcggggggcccacccgtcagcgtcttccctcacgcaaccataattacacacaccgagttcaccgcagatggggagatttcgatcccggggcagttggccgagctcctaacctagaggagtatttacacgaccccctcggatccctccttcttcctcgaccaccatcccggacccaagaacctgttgccgccataacgcatcaagctttgtcgcgggcagagtaggaggaagagcctacgccggcgtcgaagctcgggtagcgtgtctgggagattggtcgtactgtgtgggagggttcccattgcttttctcatggagatcgttggtgtaacgccgcaatttctcgtcgacgactgcatctccgccgtgaagccactcgcgccgtggcc

SEQ ID NO: 20935 - DNA, 744 bp, Zea Mays
cgagcacagccggcgagtatgccccatggatcccagcatccccgtggccatggatcgacggtgacaaaagcgaagatgaaccatccacggcgcagagaggcgtggttgacagtccaaactccaatgaggttctagctatattgatgatccctcatgagccaaaaaccccattcatacgtggtgcagaattgtagatcggacaatcatcttaacccgaagtagacaccaaggagcacttctagcacgattatcttcctggcggctccaagctttctctcccatctcctcagcccgagtcccctagcttccgctctcttggtgttcatggggggtaggcatggtggccagggaggtgttcgcggcgaatgttctttttatatccagaacgcgaggccgaggtaggaaaacgggggagggcgttgaggtagaggcgagatccacgggtggtaggtcagcgaagtcagttgggaaaatgagccacgacacggcggattcggtcagccgttcctcaaatcacgtgtggcggcggagatctcggtcatggctgttgcggaggtgcgggatgacacgcgggtcccagcagcagtggcgtgcgcgagatgaacgcgactgacagacgaggtcccatattccagtgaccaggtctgaccgcgcataggagtgtcatagacaggccggtcccacataacagggtcgcggcacgcagaggctagtgggccacgcggacgagggagcgaggtgggc

SEQ ID NO: 20936 - DNA, 494 bp, Zea Mays
ccgggagggtatatccctcggaatcggggtgcgctgcgcgccggaagtccgggaatctctcaccggagcgggagcacagccgttcgtccgcaccacagcgcctatcgatcagtgtgagttgtccgcgcctgtaagaattgctcccttctattcatcatcaatttagttacgcttagaacctcgggttcgggaatttggtgcgatattgcctgggattgcgttcctccggcgatggtccgccgcgtgtggggggcggcgccgccgcgtttggctgagggatagtgagtagcgccacgggccgtcagatgatctcttgacggtcttgatcaaaccagagccataccggttgggtggaatactcgcagcccctggatcgtgatcctgcggctcgggatggaatcgctcgtgattaagtgcccatcgcagaccagattgcgtaccggttcgatgtcgtcccaatgtgatctgggccctccacatctaatcgggcggcc

SEQ ID NO: 20937 - DNA, 728 bp, Zea Mays
attacgtacttctactaaatattcatatttgataatattcatctcctgttagaaaccataaagcaatagcaaaaaggactctagaacaaatactttacacaaggtatgtatgttttattgtctgaatagaacaaaactatatccaatcatacttttagaacttcaaaggagcatattctgatgttcaataacaaacatgaaacatgcctttaagttctgcagcgcacatgacttcaggggaactaaacaccccttcagtttcaccctagtgattcgttctttctaactaaaaatcatttgttttattgggaaacatgcttgtgtgttgcaatagaaccaaatatatattagaacagattcggactctacaggcgcgagttcttttttagcttgtgtatactcatgagtcctgatcatatataactgacctacaagatctctttaggtattttaaccggccaaatgatcttatgtctttcctctgaattaattctacttgaattatcttattgccacctcttctttttattaaagacatgagagccgcagtattttgtttattatttaaaaaaacaaaaacatctgctgagttggaaagccgaatttctctcacacgtgaccattgattttatgcatttcggattacaacagtgtgaaatgtgctcgatgtgaattcttttaaataccacaaagtacatgccgctagctgctgataggactactccatt

SEQ ID NO: 20938 - DNA, 916 bp, Zea Mays
ccggcgcctagcttaagactaaaccaaatccatgaccaagggagtatttcccccaacataattgcactaatgatcaagtggtgtgctctggccacggtgaccgtgagcatcacggcaataccgtcgtgttcccggcgaccagaggactcctagcgcaattgtgtgggttgtcgagtatcaccggcgtgcagagaggctagaacaggaacaaagagggcataagcagacctgtggagggctggccgcggtggtgtgtggttcacggcagcggagaatcgatttgggggaaacaagaaattcggacactctggtgatcgattgctagcaatttctggtgattgggtagttgatgatcttgcggaactggtggagggctcaatttatagagagagcaagcggtggtgatcaattcggccgagccgtgctggcggtcagagatgaagaagaagcttggcgcagtgatttcgtgtccaccatcgtggcagcctccccggcgatgatgggacagaggtagggagccacggcgacgcggtggaaaggcaaagccatgtggcgcaaggccgggagacggtggttcaccggcgagcatatcagctcaagccgcggggtagaggggaagtacggggggaatcatcggagtggaggccagctcaccggcggcgacgatttacacaccccgcaatgttatccatctgccccgagcgcgaatccttacgccggcgacacgaatcacggcgagggaacaatcgtcgacggcgaactgttctgaatctaaatagttactgtaccatgagcttctttcattcagtcgacctgacagtcacagtttaggcttgattttctcacaaacttatatggcaacatactccatgctctgcagcaaaattggagagctatataccatctataatttgac

SEQ ID NO: 20939 - DNA, 399 bp, Zea Mays
gggcaacatccatgtcaccgagagggagcacggtgtcaggaggagaagagccagccctcatccgatacaaggggatagctcgcgccataagagcactaccgccgctagagataggatccaatgacgcccgcacctgagacacctttctcctggagtatgagcacacctgcgaggtaattagtgatcctaccatttatgaccaggcgaagcatctcggatccagctgagaggagccacatatggaacctccaggacaaagcctagaagcctgatcccggcatggtcccttggcctgcatttcgcaaataaaatcattgctaatgccaacttttatctgacaatgagagtagaacaaagatatattcatgtgacctcccgttgcaaagacggatactcgcg

SEQ ID NO: 20940 - DNA, 377 bp, Zea Mays
cgccgagatcggtgagcagcgccgccgttctgctcgggtatattggggagagatgggcgtgaccgttgatcctgggtcgacgactgcgattagatggaggatatcccccttcgcttgtacaatctgggtcgcgggatcattgatctagggtcaggatgagagttcgacgtggtgaatcgtggaccatggatcctggatccagtggccttcatttgctaccagttcacagttatgaatcaatttatctggcgcgctggtttctaatcgtgcggctcacaacagacgataccccttcgcggctgaacaatttacaaaagagcccccggtctattttagatttaacccgccgtcccacgcactatgggctgtgtcttggg

SEQ ID NO: 20941 - DNA, 682 bp, Zea Mays
tgcttgtgtcatatcatttcctgttacttccttgtttaatttagttctgtagttacttacatctttttttttgtacggcaatgcggtcgtacctcctctcagataagacaatatagcaatcatctttcgagtaggtatgttgttgtggttcaatgttcgtataactcctttttccatttcagtcatgtatttatgtccgctaaacatgttgttgctgtcggctggtctgagatcatgattgtgttccaagtctaacctatcgatcacccacttctgttgatgttcttttataaccatgactactctgcagtctgttttaacctagacatttgtattcctttttggccctttctcgcacccctgatgttctatgcaattatcttgttcctgctgatcagcttttttgtttttccatgcttgttacatttcagctccacctttgtaacctcattgtttctttttttgttggaagttctgaaagtgtgggtgattgctggtttaaaaccagccaaaaacccatagaagaataagaagtgctctgcatctcccctggtcttaaattccatcccaacttgaggtgtatatttgctgtctattggtgcattgtttccttctaatgcagctatctgctcactcataatgaaggcatcgatctgatcctctgttaactcttcttcacttc

SEQ ID NO: 20942 - DNA, 1053 bp, Zea Mays
ctattgtaagggctggtggagagaacaacgtccctgcccccgaggaaaacgaagttgtgatttaccgaagcttcttcaaagctgggctttggttcccactgagtaggtttgtagtttaagtgctgaaaacctaccaaatctcccttcatcagatgacccccgaagccatattgaggatgggagtcttcgtctgggcaataagaagccaagggatagagccaagcgcgaagtgtttctacagcatgcacgaacttctgtatgagacgaaggccatgggtaaagaacagtatcacaacaacttcggttgttatggatttatcgcccatcccaacgcaagccacctagtgccaacatttcgaaagagatggctcggaactttaatggaagaatggttttatgtgaagaacgacttgacagcgagggaggacatcaaggaggttagcatgcaccccatatggtcccgcttcggtctccgaaagccgaatgttgaaattgatgacgccgccgaagcgtgtcagaaggcgtttggtactgtctgcttgttcattgctacaagagatttaattcaagagcatatagcattcagagtatggccgcttgtagagagttgggaaatgccgaaggagaccatcaccaagtctaccgaaggtgaactggtccggctgaagtatacattcaggtatggggataagtttgatgagccaaatgatgactggctaaaatgcattgaggctacaagtgatgaactgcttggatcatattccaaggctgaagataatgcattatccacagccttcggaagtcagggaaagaagagattgaacggagtttttgatgccattggcttcgtctacctcgactaccgctacccgctgcggggacaggggaagaagagaaaagttgatgctttggccgccccagctgagcctatgccgaaggatgcgggcaaaaagatgaaggtacttacccaccagtcgcgttacattgaaccgactgtgatacctgatcttggcgaagggacctcctcatctgccaagacaaaggaaaccgttc

SEQ ID NO: 20943 - DNA, 662 bp, Zea Mays
ccgtggacacgcccatgtcgcgcgtttcccggccactcccccacgcgcccgacctctttctggagctcgcactcactcgctcactcccttcgctcagttatgccccggcagaccccccccccgatcctctctctcgcaccacgcgcacacccgtggagctccgctgtggtccgacgtctgttccatggctatcgtcgactcttgtcacgttcgttgccccggtgagctccgcctcctcaccagcaacatgagacaccctctggtttgcccccaacccctctatttctctcggttcacactcaccggatctttaccgtgcagcccaaaggctaccaccatcaacccgaggcttcgtcgtgtccctgccaccgttcaagcgccccagagccctctctcaaggtaacctagctccccatgcctctaatttcccattccctgcccctatgagtgtgtaatcgctcgctggagttgatgtgcgccgctgtcgggccactccgccgcagaccgtgccctctggtgcctctacggcagtgttgtgcccacgactgagtccgccgtgtcaccccgtgctcgtttgagccatttcctagtgccctagaacctcaccgtggccgtatcctcgcctccaatgaaacttcgccacggagtaggtcggtgccgcc

SEQ ID NO: 20944 - DNA, 559 bp, Zea Mays
cggcatcagtggtttatgacttggctttcgactacgctaccgatctttgcatcgagcttgatgtcgtatatctcggtgccgagctggctaagccttgtcatctttccctttctctccttcatctctccccctctctcctttctttcgtgagctcgttcagaggcctcatccccatccctcattggcagtgacggagccaaacacaaatggaagcctgggcacctcctccccgtcggcgatgcctgacggcgctggctatgaggacgacccatagtacgttgtccatccagtgaatctggggatggtacggtcgttgagttagcggcacacactacgtcgctcattgaggaagagacacacgagcgacgcgccgactgatatgttgcacatgaagagtgactcgaccatgagcctcgccgctcatgccaccaagtacgcaccactccgtcacctagcttgcgcgtgggtcccatgctctgtgtccgtgtttccaatcttcccacattgatgccacaatgggcaacaaaggcaacctgatatcattaccatcttgctcgcc

SEQ ID NO: 20945 - DNA, 372 bp, Zea Mays
ggtggaggaggcggccgatgcggcggcgagtactggcagttggagacgcaacctgctggatctgctcctccgaatgagccggcgaactccctcggcggcagattcccccaaatgcaggtgaatgacagcggagaactcgacctcgacggcggaggtaccttgcgtggaggtggagtagctttctgtccgtgtgtgcctggaagtgcgagagtcgtcgccgatccgttagcgtcatccttgttcggcggcagggaggagttctgtgcatccttcgacctaggggctaaaggtatgaagctttgtggtgacagtgaattggttgtgcagttacttgcttagttcttgcttctatttaactgcatgagattagag

SEQ ID NO: 20946 - DNA, 625 bp, Zea Mays
gagagagctagaaacgccaccatgcggatcttcttcgagcgctgattgctcgggttcgggtgggggatctgtggtgttcatcggtgctcaccagggtggagctcgcggcatggctgccattgccgctgggcataggaattggtccggcctatgcctcaatcgcaggtaagtgcacgttcctgctattcgcctccctccacttcgtgtagggtctgtccagagtaggaaccgggcgccaaaaccggacggtggcggctcgtcggcgtgtgtgccaccgcgggatgcgcaccgccgccgcgtctagctttgggggaaggaagcaacggctagttcgttggattcaggatgtagggatgggattagatctggggaaggaatcactgtgggtcgttgatcgacttatgatcgggccagattaaaccaggggataacgtttcggtccaaggaatcctgtacattagatcgcgatcatgcggtttacgtcgttcgcgggttcataatgcgcttagtctaatctgagccatcaggcgttgatccaacggttcatataggtccttaccctttcgccgtggcaattttactaaagagacctcgtagaacccgataaacaacccgcagtccacac

SEQ ID NO: 20947 - DNA, 529 bp, Zea Mays
gctcaacatcgcccaatgctctgaccaggagaaggttctttatgcttctagtggtctgacaggtcctgctgctgactggtgggattattatgttgctgcccatgacgctgctgacactattacttgggcggaattcacaactcagttcagaaactaccacattcccactggattgatgaagatcaagaaggagtttctatcattgaagcaaggcaacatgtctatcagcgagtaccgtgacaaattcatccagatgttaagatatgctcctgatgaggtggtagatgatgaaaggaagcaagagcactttacagaaggactcaacgggctcctacagtatgcactggttgctcacacatttccatcatttcagagcctgctggataaggctcttgctattgaacacaagcgtgttcaattgggagatttgaagaggaaggccattacccaggggcagggtagcagtagtgttcgtcctcgctacgttccgcaccagggtacaccaactcgtccaggaggaggaccacgc

SEQ ID NO: 20948 - DNA, 371 bp, Zea Mays
gtcaaaaactgaagaagtaacaaagatgccagggattttaagtccttcaacagaagcaacagcgctgaaggcagaaaagagttctgccacaactcctaagagaagtaggatggtaaatgtattagatattttagaaacaaccgactccataagtcccgctcccacagggaaggttgccgaagctgacaaaacgcaacccaaagctgatactaagcaaatagaagttgaaactacaataacccaggctgaaaccgaggcaaggcccatagtgcctactgagacgaagcttgccaccaccgagcagaaggccgaaggaataactccagatattaatatagcttttgagaagagtgtggccaaaggggccgaat

SEQ ID NO: 20949 - DNA, 867 bp, Zea Mays
aataaatggaaaagtcagggggctgtttaacaaataacccgagactcagagcactgttgctctggacggcgggttgtttccacgaaaacaggaggtctcttttgcaaaagatacccacgaaggggtacggtgcaatctgagccgttggattagacacgggcgtgccagattaaacctaagcctatgcgaaccggtacccacagtgagcgttggatcggggatcaacggttagaatttcatgatatgcgatctacacccgtccatcagatctaatttgaacggtcccgatgcaattcagacgaataggcccaacttctaatcgtagtcgtccacgcagcgatcagcggttcccaatcgctggccgtgcccagtgcgcccgaggcggcgccgccctgtccccgcgctacagatagaggcgccatgcccgcatggcggcggatcacaccggtgacatggtacggccgcacccaccgagactatacctaggtctgatagcgtctaatcgaagcggaggttaaagcgtattcatggatgcactacataccgccactgatgccgatgaagtacccagtcacggaagaaggggatccgcggaggattctggtcgacggcgagaaattgacgttgctccacagccacacgacccaattgcttggcacatacggcttccccaggcgaagacaatactccaaaagccaactccgagagcagagaccccccccagcgacggctatccctggcggtggcgcgaatctctctctctctcaccggcgaggctctcagtaggcgatggcggctaggtttttggaacatggcgagcacggccgagggcccttccccaagttttatatgcgccaggaaaagcca

SEQ ID NO: 20950 - DNA, 414 bp, Zea Mays
aaagaaaacaaggacaaaccgtcgcaggaagggacggagaacatcgttcatgagcgcctggaatgttgctggtgcgttgcaaagcccgaacgccatcactaggaactcgtacaggccgtcgtgtgtacgaaacgccgttttgtgcacgtcctccggcctcatgcgcacctggtggtacccggaacgcaggttcatcttggagaagaaccgagcaccatgaagctcgtccaacagctcgtcgaccaccaggattgggaaggcgtccttgatggtgaccgcgtttagcgcgcggtagtcgacacagaaccgccacgacccgtcgggcttcttcacgaggaggaccggcgacgagaacggcgaatcgctgcgacggacgatcccctgctcgatcatggcggcgcactggcgttccag

SEQ ID NO: 20951 - DNA, 511 bp, Zea Mays
agacgacatgccacatgatttctagtttatgtatcatgtgtttcagacttatatattacatggttaaaacttcagtgaacatgtatgatcatttatgtgtggtcaagactcaagactatgtattgtgtatttgtgtggttgagacttgtatgtggatgtgaatgaacaatcgtgttttaatacttatgtattgtgtgttaaaatttgagtggacatgtataagtgtatggccaattatatgtggacaagattatgttttgtgtacttttgtgaatgagacttgtttgtggttgtgaatgaacaattgtgtggttaggatttgtttattgtgagcttttccgattacaattaccgcttcccgatcaattccgagctattttgctcggatttatctgtttttgatataccggaatttaccggtcgttatccgtttccgactttcccgtttaccgattccggccgaataaaaaattatgcgggtgaaaacggagagagtttttttccgatcgtt

SEQ ID NO: 20952 - DNA, 367 bp, Zea Mays
aaatagataggggagagagaagaggacgccaccatcgacctgcattttcgtcactggtgaaccctctgtgccatgccttggtgcatcaccatgtctcgtggatgaagtctatggctgtgccatggggggattggcgacaagggcccctgaatacctcaccggtgttatctctccaccgtcaagccgcagacctccatagatcagcccatcacaattccaatcactggtaagtcggctacttgcatgctcaccatgtcatcctcagtgcgtgtagcggcttcggtttgggctgggctatcgagttggctcggagccgagctccggcgggttcgccaccgccttgtttctggcaccgccaccgtttctg

SEQ ID NO: 20953 - DNA, 530 bp, Zea Mays
cgcccggtcgaacgcggataacgatcctcggtgaaaaatccggcgctgaggatgagcttgagacactgttccgccccggccgccgtgtccgcttgtctcacggccggtccagataacctcgccggagttagctgcctaccgctcagatgccacgtgcctaaacgcaatacttcgtcgcagtgactcgccttagcttgttcggtcatcgcctatggtcttgccacggtgaagtgccacgataaccatgtaccagtaactcttcccctctccggtcgccagcgtgccattccaaattgaagagccaccgccctcgggccctataaattaagtgtgccatcagctccgttaggtaatcacaaagccagagcacccgctcctacctccgattagccaccagagagctccaatttctctctctccccaaattggttttccgcatgccgtgaaccaccgcgtcgtagccagcccattgcaggttagctcgagcctctttaattgaagttctagcttccatcatgtcccctgttgct

SEQ ID NO: 20954 - DNA, 514 bp, Zea Mays
gcaggatctggatccactaccgctccagattttgctcgacacacgtttccttcccttccccttggtcgtttgggtgggtgcaagtgcaatgcagacccgagtctcccgatgtcacccgcaccgcaggtgtccccttgtccccttccgaacgtcgtgtagctccgcctcaccaggaacgagacatatggcaggaggagaggcatccaagggatggaatccgaacagaacgaccgggcgatagcgaccggggctttatcatagtggccaatggagcattttttttttctccccgtagataatcatcgtaatgatagtagtggtaattgcgatggaaggagcccgtgctgatgagcgcggtagggcagggtggattttgtcctgtcaccggtggcagccagcgtgtgtcgacgaccaccaaacagaccagacccatggcatcacgagagtaaacgggcgttgaatccacttgcacacgcttgacatttggagcaccaatggtttcttagtgctttac

SEQ ID NO: 20955 - DNA, 925 bp, Zea Mays
attcatattaggtcaccacatcaaaattgtaacctgattatagaagaacaactttgcttaaggtggtaagctcacttgttaagaaaaatccagagataggtaagcccaaagttggactgtcaggctggtggaattctgaaattcagaacttcagtgaaacagagctaactttggacttggatttaagcatgatccagtgcaagtttgggtatgattcccataacaaatttgtagatggtatattactctacaaatttgctgcagagtgtggatcacgttgccatagaaaatctggagaaaaagagttttgaagttgctctgtcaggcatgtagcaagaaactgaaactgaacttcttatggtacagtaactgaagaagaatctcaggtttctttcccccgccatcgatcactcctccaccgcgattcgtgccaccggtgttaggactcgcgctcggggtgggtggataaggacgtgcggtgaaagattcttgccggcggtgagctggaggtcattccggtgactcaccgtggctttcttatccactgtgcagctgggcagataacttcgccggtgcaccgccaccttccggccttgtgccacgtgtcctaaccgcgccacagcatcgccatgacatcctttagcctctccgttgatcgtcggaatgactgccacggtaaaagccacgttgtgtggccaccagtgactcgcccttcgtctcggctaccggtctctctgcgcaaaattggacgccaccgcttagcttctctataaattgaagccactgcaagctccgtagggtagtcaagtaccccgacacccagtattgcccccaattgatcgtcaacgagcttgaatttcacaatttccccaaatccggtttgcgccaccgcaagaacaccctcaccgcggccagccgaactcag

SEQ ID NO: 20956 - DNA, 610 bp, Zea Mays
gggaactgtaaattggagctctctggtggacaatccgagacacggacgggtgcgctaggtgcgtgattacttaacagagctcactggggcagtaatttataggttccatcggccgtggtggctaattttgagaagacatgcggtggccggagagaggggagatcactggcgcaaggaattcgtggcttttaccgtggcaagttcttagacgacagatgggctatgtattgtgatcaattgcgacgtggtaagattactaacggtgtggcatgactgcgaggaatggcggtacgacggtgatggtcgcgcggccacgtcaccggtaagtggatgagcgacagagcgtccactatgctccaagttcatccacgacgaggtctttttacccagggatcgttatctgcgtttaacggggcgtgaatcgtggcgcctgtgcgaatctgagcgcaaggtcaccggcggcgaggtgcactacacctactgatctttgtcaggcactgtaccattgggactccattcagagcgcctgatagagctaaatgaagcgccttattctccaatttatgtttgacaacatgatcttctgcctgcagagaaattgttgccctac

SEQ ID NO: 20957 - DNA, 655 bp, Zea Mays
aaagaacaaaaggaaaacaacacaaaaggcagaacaagaccaagggtctagatggctaaggacccagccacattcaaagccctagctagatccaaggcccttagcaccagccataacccaacaaactgattcatcaaggaaacttctctgaatccttctcagtgaaggggaatccccatcaaagaccaccttattacgataaagccaaatacaccacgcccctaagatgatgacactgttaagcccctttcttgtgcttttgggcacatgacactccacatgtttccaccactctgtgaaggaaggagcatcaacagccggcgtgagatgacccaaaccaaaaggggataacaagttgtgccagaactgacgagcaaagatgcaggagattaggaggtgttggattgtttcttgatcttggtcacataaagggcacaccaccgggtgaggaagacctctcttttctaatctgtcagcagtccaacatctattattaatagccaaccaaagaaagaatttgcattttggtggagcccaggttttccaaagtctttttcacggttcaaaaggagctgaaccagcaaacaagctttgataacatgatttagaagagaaaactcctgaaataacatgtctccatctatgttgatccggg

SEQ ID NO: 20958 - DNA, 400 bp, Zea Mays
gaatctaaaggtatatttcaattgaactagtccaccttcgctggattcagcagtagtctccttcggcatctcccagctgtccacatgtggccatactctgtaggctatgtgctgttgaattatgtctcttgtgccaatgaaagcacagacattgctaaaagccttctaacacgcttcggcatcacttccagtaaccactttcggccttcaaaggccgaagcgagaccagatggggcactggataatttccttaatatcctccctctcaatcagattattcttaacataaaaccattcctccatccaggccccgtgccatctttttcggtatgtcggaaccggatagcttgcattagagcgagcaatgaatccgtaacaaccgaagttgttgtgatactgc

SEQ ID NO: 20959 - DNA, 416 bp, Zea Mays
gaaaacacatatccacttgtggaatatatctcatcaacataagatatccaatttgcatcacaataaccctccagtactgttgggtacccggtataatggatgcctaaactcatagtaccttttagatagcgcagaactctctcgagagcatgccagtaatcatctcctgtatttgaaacaaaccggctaagtttgctcacaacaaatgagatgtcagacctcgtagcgctagctaagtacatgagtgaaccaattatttgagaatatctcaattgatccctagatatccttagatttttcctcaaaagtttactaggatcatatggtgttggagcaggttcacattcgctataaccaaagcgactcaaaaacttttcaacataatgggattgcaccagtgtgatcccaccattgcc

SEQ ID NO: 20960 - DNA, 285 bp, Zea Mays
ggtcgagttcaagcgcggattggctctaaatctttgagattttggccataatcccgttgagagatctcttcctctcaggtccccttgtcgtttttgtgtggaggctagcaggtttggttgactggattaggagatagagagggaagaaatctggtttgtctcactgccgcacacaggaagaagatctctggtttgacgtgtccgaggcacgcgtcccaatgccatcttctggcaggcgacagaggggttagttaggcacgtttttgttaatggggtcattaggat

SEQ ID NO: 20961 - DNA, 496 bp, Zea Mays
tggcagtctacctgggagaaagccgaaactatccaaaccatccttctttccaagtcacttttaccggataccgctttccagatacttgccagaatgttgcccgaatagccatccgacaactatgccagaactacaacaaggtgatctttgaaaccccccttcgctactttccacctagcaacaagaatacccccacctggaggaaaagacttcaggccctgtcaggaggagatcctattgaggatgatcccaccatcgtctacatggctggataccttcacacccttgataaccaatatgatgacctcaccctccactgcacccacctaacctcccgggtggaaagcctggagcaaaaagtcagggaactttcaagggaaaaggtgtcccttcaagagagcctcgcaatagcagaaggcgaggaaaccaatacctgtgaggcctaccgcaccctaaagatggactatgacaagaaactgaagaagctcgcccccgc

SEQ ID NO: 20962 - DNA, 990 bp, Zea Mays
gccggatcttacatcagcgtgacctcagcaatgacgtcaacatgcaagcaaaccagggtgcgtgcattggtattcttggatcactggcacgtgggcccctggcgggtcgtctccttcccgatgccgctggctggtaacatactcctttcctggcggtgggctgggcgcgtgtgactccgctggtcctccgtgatttgcgcagagctttgaaacggatcggctgggtatataaataggggcctcacgcactagtcccatcggctcggccctcgaccacagtaaaggatcaggcgcaggcaggaaaatagagagagagcgaagagaggagaagatttggccgccgcggttgcaaccctgcgcatgcgccgctcgggcttcagtcgcatggtctgggcgacccgctggggtacatagatgacgtctgtggcacttgagcgaggagaagactctcggtggaggccgaattgctcaccggttcgtggacatcaccgtcgggccgcatctcaccatgggggcaggttctccattgctccaccgtcggtaaaatactcctagaattattctgggttgattccgcttcgcgtttttgctacttcgattggggttcggtcgtcggggtgttggtttcacgggcatcggtgagctatcggggcggagctcttcttccgccgccctgtcgtgcagtcgggagcaggaagaagcatggagtccattgatctagtgatcaacggtggctataggaagatgaagtggatgaaccaggaccgttagatggtgatccagcgcgcggaacccgtgatcgaatctgggcggtcgatgttaaatcgtgcggtcgatgctggataccgattcgggttggagacaatctaatctaggccgcgggctttagatccaatggcctgaattcgcagatacccgttcggccatgacatttgctaaagagcccccggggaatggtcaaactaacccgccatctatgctggttcaaac

SEQ ID NO: 20963 - DNA, 413 bp, Zea Mays
agggtaagctgagggagcaacgcaatagagcaacggatgcaacttccttcctctaggcgacagcgagcgcttttcccccctttcccccacacctcggcctccctctatttttcgtggacgagctctccacgcggatgatttcttcggcgactgggatgaggacgaggcaaccagggtgctaggatttttactccggagcgcggacgcgagatgcggaggaggttgttacgcggcgcgtgaggtggttacgatagaggagacgggtccgacgggatggtcccaccactcagcgccccgtgaatgcgtgcgtgaccaaagaggtgaggggcagacaggtggggaccacacggcattgactttacataaaagcaaaggagaggggacgaagtgtgccggcggggtgcaaattcctt

SEQ ID NO: 20964 - DNA, 629 bp, Zea Mays
tatgaaattcttacactaaaaatgcatgtgctattcttgcttgagaataacagaatctatttatcttatactttttcataggttgctgctgtcaaaccaaatcatgtgcctatataagttgcgcttatggattatgcgttcgagtataaattgcacctgcattctggtatgtcgttgcttattttggtaatttatcatcctcttatttctctttgtgttcattatgtgcgctctcatttctgcttctatgaccctacaggttctcgatggtgttcagtaaggatttgttcatcagcaatgatgtgttttaagtttctcttctcttgtatgtccacgtgcatcgactcaggtatccatttcacttgattgtgctcctgcctgctctttttggcgaagataggtgccttggaatgcctttacaaaatgcatttccatggtctttccatgttctcatttgtttcatgcctacaagtgccttgtctgtatactgtttcacgctgatttgttgagcaacctgtctttgtatagccagccatctttcaatgagttgcgagtggatgctcatgtcattctcccaattttccttgttgaattttaccatgcctctgtattacagttatttatacatt

SEQ ID NO: 20965 - DNA, 1030 bp, Zea Mays
atccttttcccttttggtttcctctcccctctctcttactcggacaggaactcagtacagttggccctgttggattgcaatgttggatcgtgttcgccggacaacctaccagcaggggcgagaatcatcgtgatcatgtaaagcaagatatagttatatgcactgttaagagctagcaaaccatgtcggttgggtccatcgggcaagaaataaagttgtttttggcgcggcgcctctcgtgcttcaattcttcttcaggttccaatataatgtttggaaaagcagaaacttggagtgcatgcacaaccttttgccaccttttttgatgctttggcatgtgaacatcatctatgtgcagctaggttgcaggcgtaatttagttcgttccccaaatcgtagagactttagtttgcaagccgaaacagatttttatatatcacctcgcgctcgtttattgttttccgattgtttcgttgcagccggtaggtatagtactgggatgcatgatgattgatggaagaacgcacttgaatatcatttcgacattatctgagagaaaaacgatcctgcagcaggacgatactgccgacgtgaactgcacacccaactagctagaataaaaattgcatgtaaaagggtggtggttctccgttcttgtatatagaagagagatatgggtacaacgtatgcatatgctgcatgcaccatccccacccagttcacggccgagcgaatgatgtgatagctgttatgtttaatgcactctaactggaataatacaattagaaaaaggcgtaaacgcatgattgctgcgaaattaaactatgatcgatttggtgcgtagaatagtctgcaaataaacaaatgtatagggtttgtatagaatcgaagaataattaaatataatatatggaacaaaccgatggacatcacagcggagagtggagggggccccagccatggccgatcaaggcacatgactgctagcaaggatcgtttagatgagatacttgattaatttagaattaaa

SEQ ID NO: 20966 - DNA, 419 bp, Zea Mays
acttggtacccaatggatgtgtatgtcgtcttgtccgcagagcagtttcttaagctgataggacgcaatgatacgtgtgagtagttcaattattgaactctgatgctgtgttacgctatgttttgcaagaagcgtgtcgtttcttggaagtttaaatgacccttgatggcttacgactgttcgttgtatggacgaaagacgaaagggcacccttctgagccaaccgtctggtatgtacttcttcactcgtctttgcttcactttcttgctatcactttctccacctgaaaactctaatggctggaagcaagagcggcaagggcagcgagaaatgcaagagaggcaaaggtggtaagaggaagtggcctccaacctcgccgttagaggacttcgacgactctgagtactcggaggtaaaa

SEQ ID NO: 20967 - DNA, 726 bp, Zea Mays
cctgtagttgaacaccattatcctcaattcatctccctcaaaaatattccgcagctccccttcacctacactcgccccagtcggcgaggacaacaattctcgtttaccagtcccgtccacaagaagacgaccactctccatctcactacgatgatgcctaccacttcgcgacaattcgctcactctacgtttcgccaccgcccttcgccgcctatacccagtactcacacccaggagcccctcggaaccctccacgcgcggcgaaggctccgctgcaaccacatctaacgctgcaaaataatccaagtcctcatctgaagactcctccgtccacgcaatcgaactcccagaatcatcagactcaaaacacttagacacagagccaaacaaatcatcattggcagccacagtcgaagccaccacaaacatagtattgtcagtagcggttgcgtgcgcaggcccaaacctcagaacctgcgcagcaaccgaggttcagtatcacacagacaaaatttacaaactcctcaacacctattcagccacctgtgaaggcccgaccaaggtcgtggggtcttcggcagccggctcggccaccgccttcaaggcgtcctcgcccgtcggcgcggggtcttcgctggctccagttggcactgtcagtgcaggggtcgacgaggggccctcgccggcataagacggcagcgccggatccgcctccgcagcctcggg

SEQ ID NO: 20968 - DNA, 555 bp, Zea Mays
gtcgtctatcagtcggttgccaaacacttcatcaccatgggccgataagattggcacgtcataatcagctatgttggcaccactgttagcaacgtgtttgctagtttcctcgaaagcaacgtgaggagttgttcatgtggagctgtgtagtgcgggttgccaagggcttctttaagtccacgatgtatgtcatcggtaaagtagatccaatatttgtcgagcagagcacgaacattgcaaacaggacaatgaacgacaatggtaatgaacagctgacgaagctgagacgccgaggcagagactaccgcctcatcaaatagaaggttccactcattgtcaccttcgagcaaaccacgggcttcgcacgcctccctaaacgtttcgtacacagtattttggaaggtccttatatcaacgaagctcgttgcgcccgaaacaaacatcaagagcatgcgtagatagtatagctccccagctgttgggtgcacgtagtacatgcacccaatcttggcagacgacaaccaacttctacgccaacatctaatagaaacgtcc

SEQ ID NO: 20969 - DNA, 581 bp, Zea Mays
gttcgccttcttcgcactcgaagaccagcgcgccagctgtatgacttgtgggaccgggcccccgtgtcataggatggataccccggtgtgcatcgggggagacttatcgcgacgtttcgaggtgggagcgggggagtctgcctttaaagaggggttcatccctcgtgtagcagccatgccttgcttctctcccactcgcggcgtcctctcacctccgagctctctgcgcccctttgccttcaaggtttctgctttgtgtcaccatagtttaccatggccttgtaagttcatctcgagcatgcccagactgagtgggtgctcgacatggtataccgcctgcttggatgggatgcgtcggtgttcggcggaaggatttgcgccagcgccctccaccccggtgaacttgccgctcgagagttcgtgccttttgtcctccctaacgggttggtgctaccggtcttgtgtttcctctactggaggtgcgcggccttgtgggagcggcgctcttccaccggtgcttggcttcaaggatgttcatcagcctcgcggtggtggagagcgagctgagccgcggctctgcc

SEQ ID NO: 20970 - DNA, 1182 bp, Zea Mays
ggatggacgagaaaaaggacgatttggattgaaggaatgaatcactagccttagccgctttttggatccctgagaggatccctcacctccttcacgtccatacctttttgtcttcccttgccccgagttcttcgcctccaccgagattgttgtactcacgaccctattgaaagtgaaatctaaacaggtggccattttccgctgcagcatatcattgagacctctcatgaaacatctcttcttctttaagtctgtattgacttgttctatggcatattgagagagatggttgaacttagcaaggtactgcatcacagagtcaccaccttgcttcaggcggacaaactcttccaacttcatttgtagaacaccatctggaatataatgctccctgaatgcttgcttgaactctgcccatgtaataagatgaccttcaagctgaatggctatgaagtttgaccactaggtactagcgggacctcgtagttgttgagcagcaaataggggcttttgagtttccatgcatcggatcagtccgaacttctattccatcacacgaatacattcatccgccttcaggggttcttctgctttaacgaaaacagagggacgagttttcgagaattccatgtaagtagtgtctctgggggcttgaatttggcctctacctcctttgctggtgaatctagtttcctgccatctcctagagaaaccgggtattattagcagtggcattaagcaaagcagcaatggtctctgccaaagtgggaggtataggtggtgggattggagtttcatccccactaccccaagtagtcccagccccatcctgaccacgagtccttgtcggcatctggagaagaaaacatacttgattattacacagtacaattacacagcctttattacattattccaagcttgtccaaattatacatactcaacccatacaactcattttccttatttagactacataaggaaacaaacctactactacaataatctagtcctccacatccttggttgttctagatccgctgctagcttcgggagggtgattattcgtgcgttcataggaggaggggctctgtcgctctgaagatgtccaacttcccataaggtcctccttcatctgctcctgatgcaccaactcccatctctgcaacttctggtggcacg

SEQ ID NO: 20971 - DNA, 391 bp, Zea Mays
tcgatttgagatcaatgccaccatcctcccaaaagcacgatatggtataccccgtagtgcaccgtcggcaccaaacaccgacagctggcgcaccatgtagggggtgcaacgtcgattcacaaaagctccatgcccatcatcttcaacatcgtcttcaacttcgccaccgggggtcttccactccgaacccctctcatacgttgctggccgaaggggcgctctgcaccgcatagcgaacatggagaaggacgccctgagttcccacatcgccacctccatggaaaggaggccaccaccgagatctgggacagcccgagtgacggtcgtgactaaacctcggttggtaacggctcaacccacgctgacacatcatcggaccctagggccccga

SEQ ID NO: 20972 - DNA, 499 bp, Zea Mays
cccaaccatctaccgaccaggtgtgcagaccgcatcggaccctttttggcttactgtacctaactgcttacgccaaattattatacgagttatgctgatatgtgtatcagtttatgcaagtatagtctacgcacgatccgggtatccgggcccacgagaagattgtgctcccgcaatctatgcagtcgtactagtccccacacaaatattggtattgcgatgttatatgtttcagtttacgaaacagtaatgcacgtgtcggtctatgggccatcgcgtagatttcgtcccacatattacgtgtatcgagcccacgatcccacccacgagcttgcagttatctagctcacctcacccgcaacgcacgtggcagtggaaccctagacatacccgccactgtcgccttcatcttctccaccgcagagagtccggaaatcgactagtcctcattcttctccacacaccggcagtcctccaccgccatcgcattcattctctc

SEQ ID NO: 20973 - DNA, 749 bp, Zea Mays
agcaaagtaatcctcacaatgtgactgccacaatttaggattttcgccatcaaacccaagaaatggcatcttaggaagattgcaagagaccctgagtacgaatccaaagcagttcccccaaaaacatcatgtgtactggactaaaaattctgagggaaaaaactaggaccagtgttcataccattgtgcgggagtaagccgtgagtatagggatacccagggccttcctcccggcggtggtaagcatgacgatgtccgcgtggcgcgtcgacgttcatccgaggagcagtcggatgcgccatcggcggaatgtatggaaccgatgcatccggtcgacgcggaggagatgcgtagtgcggacgcccccagggttcggacatacgcgcgacctccgcacgaagagactccacgttggcttgggcgacgcccacagagtggtcgacgtatggcctccaagactctagaaccgccttagccgattcaaggttggccacacgcccggataaggcctcatcgacgtcatcaatgcgctcccacgtcagagattggaattcccccacatgagtctccacctgatgcgacaacgaccgagccatgtctgcgcgaacagcagggacctccacctcctgcggcttggtcgccaaggtgccgatagaagcgatgttgcccgccactgtcttctcaagcgtctcccaatggcggtcttgcgcgtcgaggcggtcacagatctgcttcagcagccgagcttg

SEQ ID NO: 20974 - DNA, 714 bp, Zea Mays
cttttctcttttctatgagcgcggccttgggttccccttgcatccgttcgttctggggatcctgttctactacaggtcggagctgcaaaacctccacccaaacaccatccttcagatagcgtgcttcatcacgctatgcaagtcttacctcatcatggccccctggaagctctggaagaaccttttcagcgtgcgggtgagcctaggccggggtggccagtcattcgccggctccttcaatgtccagctctgtggatcgcgcatggtgtcgaacctatccattccctttccttcctcggtgtgcggttatgagggcgagtggttctatgttcggaacctagggggagcgcgcctgcgttcatcagttgcaccccaattgcccaggcccattggacttatggtacagaggagtttaggtcgaagatcgactatatgctgaccgccatcgccaagcagcgtgggcgggggccttatcggcgagaggctcgtctgcatcttcgagcaacgttgccttcatccacttgtggccctccagcgtcatgtggcagttcatcggcgcaggtgactctgatcgccactccacgtgatcttggcgaaggaggaggtggtggcgcgcgtcctcgccgtcacagtgaatataatgtcagatttcatgggcgagagtggtcccctacctttcaaccaggtgaggttgagtgacctggtgagtcttac

SEQ ID NO: 20975 - DNA, 856 bp, Zea Mays
ctcacgtcactctatggcaagtcgggccatgcatcttcctcgtcaccctcctccctccctctccctctctagctcatgtatatattatatttcttccttccatcaactccaatgaccagcactaacctatgcctttctcgccttctttcgccatcacttcctctctccttcgtccttgtccctgtcgtttctctctcttggccagcatcgacgacgactccatcctgcacctcccatctctggcccttttcttcgcctctccgtcccactccagcgagctgctttctcctcccaaaatataatccgatccacatgaacaataagcaccaccatcagcaagcaagcaagcagcaggataaattaacttaggagtacgtacgtgagagagaaattaaaagaaaccccaagcgcagagagagagagcgcgcgcgcgcggcagcttcagccttcagctatagctgcccttttcgtctctcctccccacatcccagaaaccattctttactcccctccaagaaaacaagcaccacacaaaccctaaagaaattcagcgcacgcagcaagcgcgcctctcatcctctccttcctcgccgtctactattttcatcatcaccgccaccacttcctctctcgcgccgccaattattaatattatcggtactgttgtgtagccattatttttactttcgcttatttgctactatactccttactgacatataattagttcttctcctaccctagaaagatggcaggcctggatttgggcacaagctcctacctgcaccaccaccaccaccagtccctgcacctccaccacgaagacggcggcggccgcgcggggggctctgacgat

SEQ ID NO: 20976 - DNA, 490 bp, Zea Mays
cagatgaacgtctgtgatttaaaatgcccccgatcacaccgcgtacgactgatctggatcggacggttagcagtcgcccaagccgaacgggtgagcaacttctaatctacaccgtgcatttagatctaacggcagaggcttcttctcccccctaacgcagacggcgaggacatccctagaatcacacggcggtgcccccgccggacttccgggtttcgacgccctactgcctgatcgaccacccccgagagtgctacactatgtgtggagtaccgcgaatcgcctggtagtgcacccgcccgagatcaagatacagaatcccgcgcccacgtagaccagcgcaccacggcggaggtcctgctccgtcgagcaatggccggcgaatgaacacctatcaatgagttgattcgggtgcgaacgaatgaggagtactaggggtaggctcaggagaggactcacgatgaccggtgcggtgaaagtggatctccac

SEQ ID NO: 20977 - DNA, 397 bp, Zea Mays
ggtgtatctggtggcagaggacaaggtcataaaggtcacaccacggaacgtgcacacggccaagccagcatcggaggttttcttcagccacaatgcgacgtcttcagggaggtccgaggagatcattggcctggccgtcagtggcagctactcgtctctcttcctcaccatcagaaaccggggactcttcgccttctcgctccgaggcgagctccaatggagcgctgggcctgcgcttgatttcttcggttaccgtcttggctgcaagagaaacgtctccggctgctatttcgattcggctcctgttgttgatcagtgcgagggggtgctctatgtaaggtccataccagttgcatacataattgttctgtccactttctgtgctagctcattgtgc

SEQ ID NO: 20978 - DNA, 464 bp, Zea Mays
tggcggataccgaggcccggcgaacttgttcagagcaagacaacgtgttggagctcaattatctgacttggaaagtatcagtggctcaccagaattgcggtacatgcacgaattcagaaggtggaagcacgggagagccaatcgatgtgaaggatgtcctcggcggcgctctacaatgatgacatgatgttctcaatgcttcgatgcaagagcgttcaatcgaccgacaccgtgagcaactaggggtcccaaaggtactagaacaggaaggagagagacatgaactaaccagaggaggtctagccatggctaggtttaatgccgcggagctggtgactgtgttcggggaaatccagtgaatgggagctatggtggacgttaggaggtggttgagggtgaactgagcacataactgaggggtggagcagggagaactttcaatttaaaggagtcgatcacacatg

SEQ ID NO: 20979 - DNA, 300 bp, Zea Mays
ctcaagggagtactgataattgctcaaggtagtaaatatcgccgtatggatgaacttgaaccactgtttcactccggccgccgtgtccgcctgactcacggccgattcggatgaactcaccggagttagccacctatcggccatgcgccacatgccttggtgtcttaccacatcgcagtagctcgtattacacatgtccggtgatcaccagtgagctcgccatggtcaaagccaccaatctcttgcgacagtgctctcctctctctccgaccgccaccgcgccatctcaaattcacgggc

SEQ ID NO: 20980 - DNA, 787 bp, Zea Mays
ttcacaattgatctagctggcagagatgtcacaacgttcatttgtgatgtggaggctgaggcatgtaaaattattgggaaatatgtgaagaaaatagagttgccaaagagcatcgatattcaaggttgcaacattcagatcaatcgatgttttgagctaaatcatctagaatatgggccatattctgaggctatgaaagaagatgtggaggagacttcaatgaagtggaggtggaataataaggagcggtggttgtgaaaggtggtgggacaaggaggggacttcaaagtgaaaggtgggggtgcctaagtcgagaataaaggaaaaggctcaaattcggtaggccgagccggtggggttgttaagtggggaggcatctggctcggtggaggaaaccatgggttttatcaaggacttggctgccacttgcatagcactaaaccagaccatgatggtggccgagctcaagggtgcaatagtgtgggcggtagaagataccgagggtgagtgtcctaggggtgaaagggtttctaggaccaccgcaggcgaagacattttaacgtctaggctaccgtagtcttttaatgtgttcccttatgttagtaacattggggatgttatgtcagctactatggagaagatatggaaggctatggtgaagagggtggcccctttgcacaccttatgggcctgacgaagctgatgcaggtgaaactggtgaagacagaggcatccaccaaggcggaggttggagtcgtcgtgtgtgtctgcttcacgtgtatccccc

SEQ ID NO: 20981 - DNA, 692 bp, Zea Mays
gagagcctgtggttcgtcgtcgtcgacgaccttaagatgacccatcatctcttcgatcgtcattgtggagaggtctagcagagactcgatcgagcgagcgatttgcttgtacttatcaaggatgcaacagaaaagcttctcgatggctctctcatcgtaggtgtcgtcgccaaattgcaccatcttctgcaacatagtgtggaagcggagagcaaagtcatcaacatcctcacctggcttgaaggccaggttcccccctccttgcgaagtgcatgcagtgtggtcttgcgggcacggtcgccgctgatgcgggtcacagcgatggtgtcctaggcctccttagcagtccgtttctgggaaagcgaaaactgcatctcgggagggactgcagcaatgagggcatccaacgcccatcgatcctcatagtaatcggcgtcgccgtactgaattacttctcacatgtggcgaacttggaaccgtaccttcatcaccgcggcccactcgacgtagttggtcttggtgagggtaggccacccaccaccgggactgatgtccttgacaattgcatggaccttgcggtggccatggtattgatccggggaggaagagccgcaccgcctgtagaggccacgatatccgttgacccgaccgccgccaccgagagcactgccgcgcgttcacgtccgtttggg

SEQ ID NO: 20982 - DNA, 555 bp, Zea Mays
gccagttcagttaaacgaggaagattagtgacgttgggaaatatctgaaaaaaatatccgcgtcgctatggaatccggatgcgtccaaacaaataggagatagagatggccagggcgggatagctttgagccgattcaccgtcttgcggattaggccgggggagggacaagaatatctcacttgcgtgcaccgtggcttgtgtgctcctctcgcggtgtcacctgcgcccaaattctaccacactatgcttccttgttatgtggtctccatgcactagcatcgtaccttagtgattgcgggtagccagccttgtcaccatccctttaaattgagccatgaaccaccatggggcattcactgtcttccggtgtggtcagtagaagccaaaattcacggtgtcctcacttccttgccccaaattggtagtgcacggtgaacttgttgtcccttatggttgtatagctccagcgtgactgcctatttacgacggagttcaccacgacgtccatcgctcccgtcggaccctgcaatgcgtgctcacctccgcgtccccg

SEQ ID NO: 20983 - DNA, 621 bp, Zea Mays
ctgctcggtgggaccaccccgtcagcatcgttgcacgctcacgtgcacccactctcactggctcacaggccctgcccgtcagacccgtcccctcccctgcaaccaccacgcccatggcgtgcgctcatgcccccacgacccacccacgtcgcctaagcgccgaggtgaagaccccgtgccccccttagctcgcccctgcctctcattcactctctcccagccctcacactcactcagcccacagcgccgccccctctgttggtccgtcgttccaccatcctcgctgggcctctaccatcgtctcggccacggtgagcttcgccggagccttgtgcaccgggaatccacagtggtttcccctctcattgatccctctgccaggtccgcactcaacctctcccctacacaagtcggagttcgccgccgccacgatttctccttgtccggccaaccggagtcccctcgcgccgtgccaagccactccgagcgtcgtctctaggtaagtgaccttcccctaaccttattctgcaccgattccatctcaccatgggtaattttggctcaccggagtggcctctggtcagcccgaggccccctccgcctgtctcagccccgttccag

SEQ ID NO: 20984 - DNA, 1068 bp, Zea Mays
ctctaaagcgactccttgaccaaaggcttgggctaccaccatgcaaccagaatgtggaggagaccctacgtgaacatccatggaagtacaagagggagaacccgctcggacaacctcgggggttgggtcatagtttgcgctacccattcgagccggatcatctccggcaacaccctcgggggctgggtcgcagtttgcgttacccatccgagccgagtcacccccagcgacaccctcggaggccgggtgagcgccaacaccatccttgagggccgagttctctgcagcagccacctctaaggctgaaggtccctcagtcacttccatgggagcaggacaatccaagtcagcttcctgaccctcaagaccgtgctccaaggtcgatgaggcgcgggacgctgcctgggatgaccccaacccggcgtcgaacacatcagcacaaacatccatcgcgtcaccatccgccggttctgataacagatcctctggaaccatatcttcaagagtttgatcaaagttcgccagagacaattcttgtagaccaatgagggcagacaaagcaggagaaggaactccactactttccccactggctacgtagcgccgactgttcttccgaatcagagggatttcatcttcttcttcctcctcattttcatcagcaacacggacaacacacccattggggtcagcgtcagatgggtcacacccattggggtcagcgtcggtaaattcaggcatgggcacttcctcagcagcaggagccgaaggaccagcatcctgatcaaagctagacactcgccgaagacgtctctttttctttttctgcccatcggcaggagaagcaggttgattggctcggcaagggcgttttgggcgaacactgacagacctctgaatatccaaggccttactagcttctgggagaggcgccaccatcaatgttccagcaggagcggcatcagaagaatcctcggctaacatatcaagcatagcacttatctctgcatcactgggatccaaaggcacctcaaagtgaacctgccgttcatcatcaggaatttctcc

SEQ ID NO: 20985 - DNA, 1062 bp, Zea Mays
cgaaggggtacgctagggtcggagccgttggatcagagcccaacgatccagattagatcgggaaaccctaatattcatcaagcatacagaaccgtgggatctacgatagatggctctgatttgatgaacggcgcgatcacatggaaccgtccatcactggatctacggctgttgcttaatggggcgatggggtatatactaatctgatctcagccggttgctacccatccaacgaccacgacattgtcttcctcccaagaccacgtccgcggcaggcggcagcgcgtggtccgcgtggtggcgccatggccaaacacccaggcacatgcccacgcagctagcacttcgattcgacaagagctacacaccgcgggttttgggtcgagtccacggggcatggttctactagagattaggttccaaaccaggcggtcgtacctaatctgcggcggcaccgtgctcccatggcgacgagtacgccgacgcaacagccatttcccaccccactaccccaatatacgatctggaagctaatacacgttgctaggagcattacgaaacaaggagaactctcacctgggcaagcagagtgacagcagcgcccgaccacggtgtacgacgacatggcggtgagggagaactccgatccgcaattaaccattcacacgccgaatcaccaagcctgaagaccccacgaaccggcccccggagtcgccgtccatcccaataccacgcgcacgaagaagatccgcaccgccggtctctaactctctttccgtctacggttcccgttggtggtggctgggttctcggctagatggataagggagcgggagcggctgggttatataggggcggggcgattcaatcggccgagaatctcggcaatttagttgaggagcccccggattcggtgatcacgcacgatcgttatgagctcaccgagcagagcgtgcatggaaagggggaatcaccaggattccgcgcaggtcgttggggaggaagacgacgctgtccacgcgggtccacccgtcatcgccacagcacgaagtagcccacgcg

SEQ ID NO: 20986 - DNA, 526 bp, Zea Mays
tgtaaacctacacatgctggaaggtaacgcaaggggtatgatggaagatcaagttgttctagacacaacctagaacctcgtcgtaagcccacattgcgggacccgctaggtaccgcaacattgacaccgaacaagctacaatggcccgtatggagagcggacatgacaaaacgccagattgggagtacgacagcgcacgccccatagacaatgccagggggactagagcggcccaggggcaacaagctaaaggacccctgattagaatacgagtcccaactgtaaattcctcccttgagcaataaaagggcggaacattcttccttctacacacaagcacacttgctgtaacacgctcctgagcaatacaaggatcaacactacactagactagggcctcgtcctgaacctgtataaccttggtgtctcagttcccagctcagatcctcatgatccagtattcagagtgagtccacgcttgcatcgccaccgaactcaaatctattgtcccctcggtttccgaaac

SEQ ID NO: 20987 - DNA, 697 bp, Zea Mays
cgcggggcttagagatcgccctaagacgagcaatcgaaaacatgcttatgcttaatcgagtagtcgcgagcgtgccgtgccgatttaagtcactaccgacttaaaccgaccgctccgttggtagggtctagtggtcaccctgagttaagtaaacgtgagcatgtcacaccgccttaagccttcgctgactaaagtcgattgctccgttagtagggcatagtggtcaccctgggttaagtaagcgtgagcatgtcacaccgccctaagtcattgctgacttaagccaattgctccgttaatagggcatagtggtcaccctgggttaagtaagcgtgagcatgtcacattgtcacaccgccttaagtcattgccgacttaagtcgattgctccgttaatatggcatagtggtcaccctgggttaagtaagcgtgcagaaaacaattcaagtgcctttgagaatgaagtcattttattgatggtgtatctcccaattacagaatacaatgccgtcccaatagcttttgaaatctagctaggggtaaaacttcctgagatgctctatattccatgagttccctatttccgtgccatccatttgagtaagacgatatgatccaggccgagtgacttctgttactatgaatggtccttcccatagtggcgacaatttatgccgtccttcccccgttagaattc

SEQ ID NO: 20988 - DNA, 525 bp, Zea Mays
atttgggatctaagaaatctactatatagcaataaaatgtgcaaccatgccacactatatctttgatgcgacattattggctcgatgatcagtggaaaactgttgttgtaggtgatgaccttctcaaggggagcaattcctgagtggtttgatggttgttagactgagaatgtgtgttaggttgaagatacaacacatagatcatcaaccagtgtcgcatggaagccaggtgccacgtgtcgcataggattttctttctatcgccacacctagtacaactttcatatgactggctacatgtggttatgtcaatgagattgctacacaaatcctaccagttcaaccatacacattatagattttgcttgacatattgtggcccctttgattcttgagacctcctagccctaatgaaagaaacaacactctctgcagtctattcgcgtgcgcgcacacacataggtacaaacttcctccctctccctctattttctttttctttcagccacagtaccatgtgtcatg

SEQ ID NO: 20989 - DNA, 332 bp, Zea Mays
ccctcccccgttagaattcggtggaggacgagatctcctactgcgaaggatcgatgtcgcatggtcttatcgtgatagcgcctcagagtttgctgatactgtgctgattgaattaccatgttcagccgttcttcttcgagtacatcaacatcctccagcctagtagcctcggcttctgctatgttttcaaagatcaaccttggcgccccaaatttgagatcagcaggtagtactgcctctgaaccatagaccatgaagaaaggagtatttccatgcagagctcgactgggttgagttcttaggctccaaacaacatagggcaactcccttat

SEQ ID NO: 20990 - DNA, 443 bp, Zea Mays
cccatccctccccggcgcgatcgccgccgagcacccctcgcctcgtcgcctcgccattaatgctcgccagcccctctgcgacaaccccgccactgtgcccgagccgtcccctcatcctcagcctgcccgagccatctcgtcgccgtttgctccatgcccgccatcatggaagctcgtcggagctcaccgtcccctccatccctctccccctcccgggcgcctataaaagggacagccgagcccgagccctccacaccagccccggccccctcctccacacctccccgagctcaattgagctagcagcgccgccgtgcttccctccaccgctccggtaagcttccctctccctccctggcgaccttccgtccaattaaatagtgccaagagttccgccacacttccacgttcacgacacgccaccttccccactctatctcggc

SEQ ID NO: 20991 - DNA, 597 bp, Zea Mays
ccggaatggaaatgggaagaaatcagtatggatttcatagttagattaccccatactcatgacggctatgattccatatgggttatagttgacaggttgactaaagtggcacactttatacctgtgaagacaacttactcgggagcccagttagcagagttatacatgtcgaggattgtttgtttacatggagtaccgaagaagatcgtatcgaacctatgaactcaatttacctcgcacttttggaaaagactacatgagtacatggataccaagctaaactttagttcagcttaccatccacaaacggatgggcaaacagaaagaacaagccaagtattggaagatatgctaagagcttgcgctctaaagcatggtagaagttgggataaaagtttgccttatgcagaattctcatacaacaatagttaccaggcaagtctaaaaatagtatcgttcaaagccctttgtgaccgaaagtgtagaaccccgctttattggaatcagaccggagaaacccaagtatttggtccagaaattctccaagaagcagaaaaacaagtacagattatcagagagaatttgaagacggcacag

SEQ ID NO: 20992 - DNA, 387 bp, Zea Mays
agcgagatgaatgaattgaaggtgttgctgttgctcttttgaaggaattgggtggtgtttgtcttggaagctgtgcgtgtgtatagtgtgctggcggcttcttcgtccgacttaaacgctactcgttttatttcaagttgaaggtgtggtccgatcactctggattaccacgcagctttaggccccatcgattactttggattggtccctgcgttctttttccttcatttctgcaagatacctcgcgtaccccggtggctagatccaatacgacagtgtggagctccgaatatatatgtttccttctcgaataaattctccaaaagaatttatgcttcaaaagcatcaccaagaaatttagcacctaaattctagaataaattctag

SEQ ID NO: 20993 - DNA, 479 bp, Zea Mays
tggcatatccattggaaaattaccaaacttaggaaaggctgcattggggcaaacatgttgtaacgctttgctcagcctactcattataaccctagcccatgggaatttccttccacctaaataaattgggtcataatggtagtccttccattcggtgccaccaagttgtataccatacagattcgaatctaaaatgtgtatacaccgatggtgtagattgatcacatacaatgtccagtgtcccctactaagcataggtaccaatatctgttgatgagaaaagtaaatataggttacatgttgctgttacaatgtcatgataattaaaagggacagttaatatgctaatgaaactgggaacaaaatgttaatgagacctaccgacttgcatttatccagatttaccaaaggaggcaatgtgttgtgcaagcaattctgtaacacattttgatcaaacggctgaggattcttgctgtgac

SEQ ID NO: 20994 - DNA, 598 bp, Zea Mays
gtcagctgggtggaccgcgtcggtcatggcggttgcaactatccgcgcgagaacgacggcacgtccagaggatagttcacggacgtggctgactcgatggcagcggggacccgcaagtcagcgcgacacacccgcgaggcgaggggagttgcgccaaggaagtagcagggaggcgcggagtttcgttacggagcccgcgatctcggcggggaagatggatctgacgaaacgggtccgcaagtcggtgaccagaggtgagtctgcgtaaggctaggaatgcgcctgccacgagggccccgccagtaagtgacccagcgcgcggagaacaagtccgacccacagggtccaccagtcatagacgccagggaacgcacatatgaactaatccggcccagtggcccacacgccatggacacgggcagagacagtatgcaccgagcggctggccgatgggaccacagtgtcggcgccaccgcgtgaaagtgagccaggtcgcgcgtgcaggtaaggtgggccgcctggtgggaattggcccaataacagtttcccattttctttcctttttcttttatatttctcctttcccttttctaatttt

SEQ ID NO: 20995 - DNA, 327 bp, Zea Mays
gtggagataggctctagtcgagttggccctatcttctaatcctggccaatgataacgcgatctacagttcataggttgtcttccaccaccgatagctgagcgcagcagatctcgctccagcggcggccgcccccaacggcggagaccatcaccggtgctcccgtccaatcgagtaccagagctccacttccccctacggtttgtgctatgcagagcggaccaacaagtgaaccaaagggtccagaatatcaccagggttcatgccaaggagaccttcaaccatggtgcaacggctcggtgatgaacactggattgaaggaattccgc

SEQ ID NO: 20996 - DNA, 617 bp, Zea Mays
attcaatgggcaaatactgcgcagctgtgcgaaaactagaagacaagtacgaaggattggagttccatcacatggaatgggatcgcactgcagcagcagatgtgttgtcaaagctaggatccactcaggcccaggctccacctgggatcttcgtccaagaaatatcacagctgatcttcctcgtggaccaggtggaagaatgcaacaccttgagttagccagaggcagatcccaacgactggagagagcctatcatcaggtacataaagaataaagaagagtcggatgacaaggccacgacagaacacatcgtgaggcagttagcccactacaacatcatagggggcttgctgtacatgagaggtgcaggaggagtcttcatgaattgcatccactcggccactgggagacaattgttagatgaaatccatgtcgggcagtgtggggtgcatgctgcatcaaggactctggtgggaaaggctttcagatccagtttttactggcccattgcgaagagtgacgctaccgagttagtccagaagtgtgaagcgtgccaattcgtgtcaaagcaacaacacttgcccgcgcagcagctgcagaccattcctgtaacctgg

SEQ ID NO: 20997 - DNA, 526 bp, Zea Mays
cggcgaccttgaccgccgctaggtgttggaaggacaccgacagtgtagacgtcccgctgtctccacatagggtagacaccaactttctcttcttggaaatgactttcctcgcgcacggcgtgagggtggagaagcgaggagcactacgatgagtcgatgacacaaaaagtggtatcaggtgtcatgatgagagaaaggtgggggagcagaagcttgcagagttcaccgctaggcacacacgtagtgtcaaaccttcgtttcctaattggtgcctcgcccgagttgcttcctggctgaggctggccgcagcggatagcgctgagcagccccctccccttcgtagtggctacaactcccttccctgaccctgcagcgttgccccctacacgccactctaaagctatccgcagcggtctcgcctaaatttctccccctatatcacttttttgcgtcacatcgttaacatttcatcctctacatttcttcctcccgcaacggtttcccctaaattcttcccctatactcc

SEQ ID NO: 20998 - DNA, 1059 bp, Zea Mays
caagacctcaactgagcagacagatagctcagaacattctaaaaatacaagaattagcaaatgagtcttttgtcaacaaaagtaaagcagggaacaggtcagctcacctgaaggatagaaaggaacaagggaaatcccaaagccagaggcgccaacgtgctatcgaacggtggggtactagcagaagccatattgagagcagactcgagccccaaaggaggattaaagctcgcacccaaggcaacacttagtgggacctcagctccgatagcatgcagcggattcctagcgcccgaatcactgacctctaaagtgatcggccaacaagagaagtaggaagacttgtcaacactggctcctcagactgaactagtggcgatctgacatgaatttccatagacaaagccgaggaggagcagagctcggcaccctcagaggctgggtcatcctcaaaagcaccctcgagggccgggtcatcctcagcaccacccttgggggctgaagcatcctcaattgtgcccacaggaaccaggtgacccttacatgtaacattaggaaccaaggtgtttccatgaattaggccaccttcaaaggtttaagaagcatgggaaactatccgggttatttcttgcctgactagattactagctgagggggtgtcatctatgacctctgcaaggatggcagcactctcagtttcaggaagctccaataaaaaatcttcagggataatctcctccggtgcatgatcaatggcagacatcgtcaacctctaaagattaaccagccctgacagagcctgaattgagacatcatcgttgtttttgctacggcaattcttacgaatcaaagggaaaacttcctcttcatcctcgtcagacacatgtccaccgactctagtgccaccacagctctcaatatcatcctcgaggttggcactcgctgggccaccaccaaggactagtgcagtaaagtcagcccccagctccaagccagataaatgccgaagtcttccctttttttcttcccctcgacagacacggctgggtaacccgttcg

SEQ ID NO: 20999 - DNA, 518 bp, Zea Mays
aaatatcccagggtttagtccccctcaccgtcggtgatccgcgcgtccggatttgcgcccgttgccgtgattcatgccaggcacgctgtggatatccacgaggaggtaaaagatctcacggggaggcagatagggtcgcaggggaagcttatcaccgtgcatgtagccgttgcgacgtggccggaccaccggtgtcgtcgtggacactccggcgacctcaattatgccacgccgtgactcttcactacgcggtagtaaccatggcacacttaggcttaccctctctgaatcactgcaccggtgaacgccacgattgcgccaccagtgatcttcttcctctttgaccgccagcgcgccattccaaaattggaggccaccgctcttgaacactataaattaagtacaccgctagctccgttagataatcatgaagccagagcccccgctcctgcctccgattagccaccataactctctaatttctctttctccccaaatatgtttaccgccaccgtgaa

SEQ ID NO: 21000 - DNA, 528 bp, Zea Mays
gcagccagggctagtcgtcattctacaacccatagactcgaaccatcttcatgtggctaggtcaggctcgagtgcctctcgtcctttggcaccaactctcctgactgagtcccctacgacccaccatcatcgccttcctacaacatgcctccatacggcatgccctcgatgacccaggctccgccccagctctcgccttcgaggagccccaccatgactccctgttccccgctcgctggaggctaggacccagcctccctcacaaccacatatagcaccatggtgttggctcaactctcccttgactaggtcatcaactctagtgcctcctacaacaccacccccacaacaggcatgctatctcgctatcacccacctcattcctcccacctcacctcaatcatcgttggaaatggttccactctatcggtcacctcagtagctgcctcggttctccctggaccattctatctcaatgacgttctcatagcccctcatatcacccacaatctcctttctgtccgtcgg

SEQ ID NO: 21001 - DNA, 667 bp, Zea Mays
gcggggtggagacacaactatggcaaggacatgagcttcaggtggattccttccttcaatttgagcttcgagggctgcaatccttgcatgtgtgtcttcaagttcttcatgtacccttgagagatccagggtagcactgtccaggtcagtgttaagacctaccaccacgcctacaagggtgttgaggcgatcttctctagcttcacctggaacaacacttgtctggctctcacgacgcgaacgtaggggatggtgtctgtacatcgtgtcgtgcagctgctaccgttgagggaccacagagctctccgagcagcattgctgaccgaaacagtgtaggtggatagcagcgtcagagactcatgagatgatagagtcctgaaacctctatctcctgcatctaacactctggtatgcacacgagtgatgtagtaacaaacccgagggggctcagacacccgccttgtgtcatagagaggtcgaacgtagattcctagtgcatgcagtacatcttgcagcaagtttggaaagtgtcccgtctcaaacatggaagtgtagtgttctacgataggccgcaatccaacgaagttgtcttcttgttcattgttgacatcctcaatgttgtcattgttttcatcatcatcatcttcttcttcttcttcgtcatcat

SEQ ID NO: 21002 - DNA, 281 bp, Zea Mays
cggaggccgcattgcttcaatcgccttgattttctctgggtttgcctcaatgccccggtacgaaatcaggaaccccagcaacttccctgcagagacactaaagacgcacttgtccgggttcagctttgtgcgggttgcccgcagcctgtcgaagaccagggccaagtcttccactagggtcgaccctctcttggtcttgactacgatgtcatcgacgtatacttccaccttgtccctgatcaggtccccgaaagtcttactcatcgcccgcacaaatgttg

SEQ ID NO: 21003 - DNA, 518 bp, Zea Mays
gtgtatgtctactgtacctggctacacggcgggaggacatcgggggaggtttccagattatgccacaaaatccggggttcgctggttaagccacaaagccatgcatcgtaccgggacgctcgtgcggcaggcattggctgaagatggaaattccggcgatcgcgatacgatttcggatggtcatgcggtgacatcgtgaggatcacatcgcggagatggagggatcgcggacatcgcggaatttaccatggaagattagacataattagaatttacgctcctacgttaaatttatttagcgtagggggttatgtgtaaaaggtagagccacccttggggttataaatatgtggcacctagggttgagatggttaaggcctttttgctacagtgtcgcgattactattcatgggtgtgaacagtaacggcgttgctacaacaacagggaaccacctttctcccattttgtctagcctagggtttcaaatcatagcgagagatttttagttgatctctcc

SEQ ID NO: 21004 - DNA, 662 bp, Zea Mays
gagaaattgatcgctggctgtcgaacaggactgggcgggatttgttgaccttcacgtggcaccaggcgcatagcagaaggcgtgcccaggcggctgagtgacctgggagggcgagatttctcgccggggttagatttccgccgagcggtcgctgcgcgatgcgggcagctccaccaacgcatcgaccttgggtaagtgctcctccagctgattccttttacccctggaacctgtaggaccttgcggtagtgtgtgagcatcgtgtgtctgccgaccattgctcaccagagatcctttattagtagaccgccgtaactcgagtattgccttgttctcctcaacgttgcgagcaatatgcacgtactgggtttcgcatgatccctcccatcgattaggaccgatagtagattggttgaagcaccaccctgaggtttggcctcgccggcaatggcgtcaccgtggtgacaagcggcgctgccgcgctcagcgccgggttggtcggggaaaaaaatacctggccatggatctaccaacggacgaccctgattagacataggttaccggttcggggaggttgatcctgggcattggtgttagatcgtgtgatctgcattgtttcggccagcattaaatcgggtccgtccatctctgatcgagcggtc

SEQ ID NO: 21005 - DNA, 738 bp, Zea Mays
atatcagttgccgccaaaggattgatgtcacgaccatacccggggcgagcacctggaagctcggggcatttttgtggtttcctccttcaccctccgacttcgtgcagtccagtggtcacctatcttcaaggtctctaacagcgaccaaatacaaggccaagcaagacctaggtggctgtatggccatttaagctatggttgcctaggctgccggggtgatggagcacgtcgtgatggcatatctcccgatcgtgctgaggcaaggcgcgctccagtggctttgttatcttcattgccactgcgtcgacaactgagccgacttctgcaattggttcatcgctaatttctaaccactctccgacctacatacgcagtcgtgggacctcaaacctataagatgcaagaacaatgagtccctttgcttgttcctcatgtatttctaatcgatgaggaatcgcatccccgacatccgtgaatcggctgtgatcgaggacttctatctagggtgtcgtgatgaggtcttcgtatgagttatacttcaaaaggctctgatgacctccgaagaaatttttcatgatgccgtcacctacatcaccaccaacgagtgggcctgtgacctcattaaccagccgagacccgggtgcccaaagaaggaagggaacccacaacaagacaagtgctgagacaagaggtcaaggaagaagtccatgccataggaccatcattggcttgggcgcg

SEQ ID NO: 21006 - DNA, 710 bp, Zea Mays
acaatccacctctccatgataatcaccaatggaaaatgacaaacgaatcatggctgaaaccttaactgtcccagaattattcagccattgcatatggtacggatgtggatggcgacgtggctgcaaaccaagcttctcaacaagcaaagcactaacaatattattgaagctcccaccatctatgatgaaacggcacacttggccttgcactttgcatcgggactgaaataaattatggtgttgtccttgttcagctgcaacaaactgagtggaaagaactctcctaaccaccaaacaaggagatggtgtattcattgtacaaggctcgaaatcaggaaaatcaggaagcaactcatcaaaatcagcactagtaatctcgtcagaagatggagaaataacatcttgtaacatgtcattgtgagcaaaagttggaataggttgaatcgctaaacaattcagaccaagctcaaatgtaccatcctccgctgaatactcacaagtgtcaagattaaaatctgcaaatacattggtaaactcgtcctcctcttcactttgtgaatcataagaaccgtcagaaagggcaataatagtatgacgattgggacatttagcttgtttatgcccatgaccaccacacttaaaacactcaatcttgcttgtcttgcgttgggtggctgcagtagaagaagtgggtttatttgaactcacag

SEQ ID NO: 21007 - DNA, 371 bp, Zea Mays
cgacaggtgtagaacagggcttgcaatctgccataccagcccgatccagaatatccagcatatattgacgttgcgaaaggaagaggcctccatctcgtcgttgaacttgcatccccagaaagtgatgtaggtcacccaaatctttcatagcaaactccaactgtaaggcctgaatgatgtgtcgaaggagaacagtagaggatgctgtgagtataatgtcgtcgacatagagtaacaaataagatgtgtcagttcctctatggtagacaaacagagatgtgtcactcttgacctcgatgaatcccagggagagcagatgagtggcaaaccgactatgccaggcacgtggtgcttgtttcagtccgtagagg

SEQ ID NO: 21008 - DNA, 454 bp, Zea Mays
cttaatgaaggctagaacatcaagtaaggatgcttgaactaacctgcagagagctagccacgacgaggtgtttacagtggcgcggaaatccaatttgggggaaacccgaattaaggcgctatggtggacgatcaggcgcgagagtgggtgctttgggttcttgatgagaaggaaaagcaagggaggtgctcaatttatagaggtcggccatggttattccgaatttgggaggagagttgagcacgactgtgacaagacattgcactagcggccccgccgtggcgcctgccggtgcaacgacttcagatatggcaagtctgggcgtgccacgattactactacgtggtaaagggatacggcgtggcataattgaggtcgccggagtaccacgacgacaccggcggtccggccacgtcgcacggctacatgcgcaattgataagcttcacctcgcg

SEQ ID NO: 21009 - DNA, 295 bp, Zea Mays
atggcgtggtagtgaaatgcttaatgccatgctcatcacagtactccttgaagtcaatagaattaaactcaccacctctgtcactgcgaaatgccctgagtctgccacctgactcagtttcagctagcgccttcaccttcttgaaacaactgaaagcttcatcttttgttgccagaagttgtatccacatatatctactatgatcatccactataagcatgaaataactcttacctcctggtgtcttgggcctaatctgtccacagagatctgtgtgaaacaggtccaaattctt

SEQ ID NO: 21010 - DNA, 441 bp, Zea Mays
gtgaccatgaagcaccacttcctccacctccaccattcacacctgagcagttcttcgcataatttcttggagctcagaggaacatggagaacttgcagcggaacatggaggcagaacttcgcaacattgctaacaacactcgccatggacagcctcaggaagctcatggagttgaccagtatagcagcttcaaggatttcatggataccaggtcgtcgatatttaaggaagcagcagaacccttggaggcagatgaatggatcaacacgatggaacagaagttccgtctgttgatactttcagatgatctcaagacagaatatgcagcgcaccaattgcaaggacctgtagggatttggtggtcccattaccgcgccacttaccctgaaaatgctcccattgcttggtaccaattcaccgcagctttcagagggaattaca

SEQ ID NO: 21011 - DNA, 281 bp, Zea Mays
ctgtatttattactacgcacatatgaatacgatacggagcggtatgaacatactcgatcggagccaagcaaagagaatcatggtttgtagacacagaaaggtgggtacgtggtggttgggtggatatttcggtttcctaactaattctcaacgcagcccaagcaagcaacctcctcctgctactactacacacataacacgcaccgctccacaagtaaacctttcccgatctgcccaaactgccatccccagccgcccccgccctgacagatcacgtaatc

SEQ ID NO: 21012 - DNA, 764 bp, Zea Mays
ggggaatccggacctgagactggcatgcacttacggaggaggggacgacacagacctcgacgacgaacttgaacggtggaatgtgtagtcggggatgttcgtcgcactcgaccgccgcaggcccttgcttcgcgccacctcgttgtgttattcctcgtccgccaggcgacgctcaacggagccgaccaagacttctttctccaaggacaactccgcctctgctttgttcggaaggaattcgtgttcgtctgcgcgtcgaatggaagcgatgcagacctttcacttggtgcgcgcgagtggtggtgtgatcgtgaagccgaccgtggggagtgaacagtgtccccccccccatttgtcgtgagagagaggagtccctctgcgtaggggcgcggtggagggcgatgctgcaggaggaaggggcactataggccctaaactatgaactgtaatagagtagagggagagaagaggaaggcgctgcggatggtctaatgcatgcggcacgactgcacgagtacgcgcatcagcccagccatgcatgcatctctctcgcttgtcgcgtctgcactgcctgcaactgggctacatgggccacagaggttagtgcccgaggcttttgtgatgccaggttgagggaggccgggtggaggcggatcaagaggataatggtgtcatctcgtccctacaacgatctcgtcgccgcatgctacgataagacaatcacatgcgacgcgagacgagctacctgttggcgccgatctggg

SEQ ID NO: 21013 - DNA, 401 bp, Zea Mays
gtggatcgtgcataaggagggaatcgggcgcgctgatccacggtgtggagtgaatccttcgccggagttacgtctccgccgcgttttcgccgtgcgccgcgactttgctcaaccatcgtccgtttctggtgagtaaaccctgtgccatactcactctggcccagtggtagtctagcacctagtgtattagggttttgcgcactggagccatggatctaccttgtccggcgaggcctccgccgtgcactgggcgccgcctccaccgtgtgtgcgtcgggttggggtagccgcgcttctaccgtagatttcgagttcgatggcctagattagaattcgcgtgactattcagcaggttgatccgcgccatcaggtgatgatcggacgggcgcgtgtaggccttg

SEQ ID NO: 21014 - DNA, 945 bp, Zea Mays
cgcaccggacgacactccaaagtcagatcctgctgcacagcaattggttccatctcaatctgatggtccggatcccgcaagaacttcctcaacatagagatatgaaaaaccgggtgtacccctgccatggaatccgacagcagtaagcgataagctaggctgcccactcgggccaagatagtgaacggtctaatgtacctcgggctgagctttctagagacaccgaaccgaacaactcctttagtaggtgataccctgagaaggacttggtcacccactgcaaattccaaatcctgcctcctcacatcagcataactcttctgacggctctgagctgccaaaatattctgacgaatttcccgaacctttttagaagtctgctgaacccaatcaggaccaaccagggatctctctcccaaagtctcccagcacagaggggagatacaccgcctgccatacaaagcctcaaatggtgccatcttgatgctagcctggtagctgttgttataagcaaactttgccaatgcaagatgatcctcccagctacccttccatgacagaacacaagcacgcaacatatcttccaaggtttggatcgttcgctctgactgaccatcagtctgagggtgaaaagcgacactaagtgaaagcttggtgcccaatgcactatgaagactatcccagaatttggatacaaatttggagtctcgatcagaaacaatggacttaggtaccccgtgaagcctgactacttccttcatatacaagggaaccaaatttgaagctgaatttgtggtcttcatgggaataaaatgtgcagacttagtcaagcgatccactaccacccatatagcatctctgccccgaggggaacaaggtagacccaccacaaaatccatggtgatatgctcccatttccactctggaatttctaatggcttcagt

SEQ ID NO: 21015 - DNA, 1007 bp, Zea Mays
aggaagataagaaaacttttgtgacaactgcggtaaggaaacatgaggtttgtatacttagcatcttatatctacacttgccattgaccattagtgaacatatttatattagagttttctatatcatttcataggcggtagatacatcaatttgcatggaaatttgagccctcccaccaattgagacactaactttttttattgccactgcaagcatatgctagtattacaactaactattgcaatatattagagcgatatgcaggagaatcacaatggcacaaaaaatattgtagtatcatctgaaatgcaagtagtaccttgcagcatgaaagagatagtatcaagtgacatgaaagaagaggtatgcaacctttgaaaacaggcaaatagatgtcattttggtgtttgcaattctaatcagaatatcataaatgtatatacttttgtttctattttcaggatcattcctctccaggttttcttgcagagaacttatttgctgacttgggctttacatgttcatctaatgcagctggtaaaatatgtttcaattcactttatttctaaacgttagtaatgtatttggtagtattctaaattgccttcactttcagataaaacaactgaggaaaatccagccaccgttctccaatcttctccgaagataagcgaccaattgagaaagatatcaaattcactgaagcttcttaattctatggcacctagtatagtaaaacagaaaacagatatagttcgtccacaatcctttgacttagttgaagcagaaccaaaaactcctgaggtcaacttaaaactttggcatgctcaagatgcacaagaatcacttaaggctcgtagcacagggattaaggtaactattttgaactcattacatacactttttattgtatcattagctttggtaataaattgtttactctttttctctacaaatgcagaaatctctagctaaggagtgtttgttgtttctaaacagcgctaat

SEQ ID NO: 21016 - DNA, 516 bp, Zea Mays
gtaggctgcaacccaaaagcaagcaggaataattgaaaacatatttaggagtagtgtcgcactgtcactcgccatcagctcgtggatgaggtcgacgggtcaagggagtggacaacggagcaactcgccgacttggggaggaagtcgggctcacgcctgccccatcgcactgtcatcatgccgatgccaagcccacgtcgctgctcatgtctcacgtaactgcaaaaacctagctctggttggcgctcgccactagagagctagggcaccgattaatggccttaggcgtgttacagggtcgacgcagattcatgggcttctagagtttatctggcccaagagtagggctcaggctctggtggccataggcctagctccgcccctgcaaacaagttcatgttgatggaaaggagaatggtaaagaagactgatatagaccatggatggtaaacacttggtaacatcgacaagcaagtgtatatgagactgatatagaccatgttcaccaagtcaata

SEQ ID NO: 21017 - DNA, 839 bp, Zea Mays
ccatattcaaatttgaaagaaatagaaaactgaaaatgagaataaggaaaagaattggcgaacgggccaaatgggccgaattctcacctgccagcctagttttcttccctttttggcccactaactccaccactgcgtggttgtggcgctactggtgcgcgggcccactgcccagtctcaagtggcgcgctctggtgcctattctagatgtcatgtgggactcagcccctacccaccgtcgcgtttctatggaggacatgtggcccccaggcgtcaggtctatccccaacccccaggtcggtagcaactaaagaccgagttcttttcccctcggtgtgcaacagaatcgtgtggtggtcgatgggcttctaccgcggtcttcgcaggccacgcgctagggtcccgctggatgcgccggcttctgcgtagccaccatcgaaggtccaactacctccgcacataaacagttgcgccaccacactcccagaatttctcccccacagcagtactaggtgcagagaacccccttcctccactcgacgtccagccatggcgcacgtcacacaagtctacttcatgttcgagctcctccatggacgcagggatcttccgcggttcagggagttttatggccgaaggcttctgctgtgtcaccacgggtcaaacagcgagggaaaacgcagagagagagagagaggagggagatggagccggatgtcgctgccgcgtcccacacggagagatccagaagaagatggagcttcggtgccgctagtgtcgtgggccgcgccgtgcgggagcgggaactgctttgccatggccgaggaacttcaccgggc

SEQ ID NO: 21018 - DNA, 512 bp, Zea Mays
gccggccgaaccgcaatacggccagcccgagccccatatttcccctcgataggtgtaattcaggcaatagagggtttgcgagactagtggggaggttcttaccacggtttgggtagcagtcgatggcggacacggtggagcgcggtccgcggcggggaatagaatttcggcgagaaatcaaaagcgctccaaccctcaatcgagcacgacgataagccaaacgggttagaaagacaccggtgatcacatccatggactatgcaaggcatctgctcccttcctcctcgaattcaacagcgacgacatcctttctctctctgcgctcttccttctttgtcgccggtggtgcccggtctttcttgttgcgtaggcagatcaaaggaggtgaggcgatagtcgaagggggtcgcgggatcagtttatatagtcgaaaccccggacccggccaggggatcggcggagtttgttggagtccgccatgtttgggagctgggaggggattctgttcaggc

SEQ ID NO: 21019 - DNA, 462 bp, Zea Mays
tttctattctcttttcctggatttttctatttactagactgggcctcaatttccagagaagccaggggcaacggagcaaaaatttcctagacacagagcgctactgtgtggactgcgaatttattattaaattgtccagggactcttcagtaagattccagagccgaaagggtatccagtgatgctggctgcaggatcctttatctatggcatggaataaaacctatcaattacacacctgcgttaaacctgatccgtccgattttcaatctacgacagtgatttgctagaatacctacgctcactcctagccacccgatctaaatcccatggaccggattagccacgcgaagagttgtcctctgatcaatccgtagccgcaagatgatgatcgaacggccccctacccttcttcaaccacacgacgcaaggccgagctggcgttcaccccggcaaaccagc

SEQ ID NO: 21020 - DNA, 354 bp, Zea Mays
agtgtaccgcgtcggacacatgcgacatggtcgtgcatggcgcgtgtagaggcagtgaggtcatgcgtggcacaagcggagtcggtgggaccacgcgtggcgcaggtggggatcgacggggccgcgcatggcgtaggtggcaacactggtaaaggtagaggcagcacggttgcgcatggcgtaggcgaggacgacggggccgcgtgtggcgtaggcagaggtgatgcggtcgtgtggggcgcaggcgacatggccatgtgtggcgtgaaagagggcaacagatgaggaacattgacacaatcgacatcaaggtcgggaggtgaggagctagcaatgtggaaaacgtcctcatca

SEQ ID NO: 21021 - DNA, 397 bp, Zea Mays
attagaacagggtcagcacacgcatcgatagttggcgcacctctagatcgtgccaaatcaatgttgagctagatgtgcggaggtgccatcactgttggcgcggtggattcggtggggcgcctcacacggatatgaacatgcggcgacgcgcccctagggttggattacgcggatccgacttcgcctcacggtgcacctaggatttcaccctagagacgcttgacgatgatgtggagaagagagacgaaggcaatgggtgacaaggtatgtggtatgaggtgagacaatgaagtttttttctctcgctttttccacgcttgcgagatcatgtatagtgagggaggaggtactggactatagatcgtcaaatgggtcgtgcctgatggatcgacccgaa

SEQ ID NO: 21022 - DNA, 422 bp, Zea Mays
cgccctatgaattgtgatatagtgttgtggtggaggatgcatcaaatgatggggaagctaccttagttgtgcaaactacttttaagaactccatttttcttactaccatcaaagacggtccttctcattctatggttgaggataatacagaacctgttttggtagaggacacaccagttgatgatgaagctaccttggtagtgcatggtccttctctttctatggttgaggataatatagaaccttgactggtagaggatcctccgatagatatagtgtcttcttcatccacaagagctagaaaggatgaggaccttgcatgcccgcctttagctcccccctcaccatcaactacgacagttaggcgttggtgtaagtcctataatatctcgtcgcttcatcgaagtgctcgtcttgcacaa

SEQ ID NO: 21023 - DNA, 475 bp, Zea Mays
ggagtggtgcgctgggtgcgtagcaagagggcagagtagggagggcactcaatttatagtgatcgaccacaggtgccatgaatttgagcaaagttgagctcacgatggtgaatggatgagtcactaggactcattcaccgtggcgctcgatagggtaatgtctcggggcagtaattggttgtcctccatgacataccgtgacgtggaaacgtcctctagtacatggcatgatcgcgctcggccgagcgtgaagcaagtgggtacggtggctagcgcacgaactcatccacgactgcaatatttttcaccctcggtaatatccacaccgagtcgtgcacgaatcttcacggtgagctcagatcacggcatgggatctcaccagtggtaggattcacttgatccttgatcttttgtagatactgttcacgcctgaacatcattccagtcgactgatagtgcaatttgaaggcatttt

SEQ ID NO: 21024 - DNA, 502 bp, Zea Mays
actttttggctcactgtaccacctgcttacgtcaaatattattacgtgttatgctcatttgtgcatcagtttatacacttttggtatgcacatgtttcgggcatccgggcccacgagaagattgtgttcctgcaatctgggcagccgtactagtcccacacaaaatattgatatattacgatgtattatgttttcgtttacgaaacagtaatccacgtgtcggtctatggaccttcacgttgatttcgcccagcagattacgtgtatcgggcccacgaatccacacacgagcacacagtttttcagctcacctcacccgaaatgctcgcggcggccgaaccctagcattatcgccgccgtctgcttcttctccaccgtggcggctgaaccctagagattctacccgccgtcgccttcaccttctccactgcatagaccgagacgccatcgccttgttcttcttcacaggagagggacccggaatcgtggagaccgagccgcc

SEQ ID NO: 21025 - DNA, 341 bp, Zea Mays
aaagagggcccacataaaaaataacagaagctccagacatcaaaattaaccattttaagcaacaaagagtcatcgactccatcagagttaattatatcaaacaggaaataaaccttgattccaccagagttagtttcagtaaatgcaaagagcgccacatgcgcaccaactccaaccgttaaccaacaaaataatcgccaaccagtgtacagaaaacacctttcggcccaaaagggggaggccaaagccttacaaccccgccgatgtattagattcatcatcattgtcatcattgaagtgagggtcccccacctgttcatcagaggattcgggttcatcat

SEQ ID NO: 21026 - DNA, 413 bp, Zea Mays
cttcagcatggacgcaacaattgggatcaacctctggaagggcctctactggcacttcatcacaagcaggagcagaaggacctgcatcctggtccaagcatgacagtcgttgaagccgcctcttcttcttcttcttttcctcaacaggcacggtcgggcggctaacttggcaaggacgctttgggcgaacaccctcaggctttcgagtctccactgctttgtcaagctcttgtccagccgtaatagccatcagctcagcatgggtcgagtcagaagattccccaactaagatactaagcacagcatccatctctgaatcatctgggatagttggcatctcaaagtgaatttgcttctcatcattgggaagattccaaagagtagcaatcagagcctcaatgtcctcaggagag

SEQ ID NO: 21027 - DNA, 767 bp, Zea Mays
gagacccgttccctaggttccgagccgttttggctttgctccgagtctcaccagtgccgcaggggagagagagagaggaagcagcgccgccggatggtttcgtgtacaccgccgtcgcgtccatgatttcggccctgtgggtctctccgtgcgttggggattgaaccggggagttccctgttgtagattggcgtcggagcccttgaatttcgtcgccgtggtgcgaactccaccgcacgtccgccaaactcagtggggcggttcgtccaatgcctgaatcaaggtaagaaaccctcatctagttcgtcttgttggttacatcgtgtagctctgttcaatttgacagaggtcggggagttagcaggatcggtctgcgccggcgtgatgctcaccgccatggagatcggagtgccgctagctgtgcgctattggtagaagaaaaccctcgtccgctgatctaaccaccaatggctaggattaggtcgagttgtatccctccgcgcgatgcatcgtgaccatagatctagtgatgaccggctctgggtgcatacagttccatgtgggatctagcccgttggatcaagatcgagtgtgcaggtttccatctcaatattttaaatcccgagcgttgttatttgatcgggcggctggggtggcgtaccggttgggggccaacctgatctaatcagagctcttggatttaaatccgacggcccagcaatacccataccccttcgccatggcagaattacgtatgaaacccctcg

SEQ ID NO: 21028 - DNA, 1225 bp, Zea Mays
tttcgagcgatcaaaaacctcctttgccatccctttgattagctggcttccttcctccatcattcttctttccttccttttctgcaaaattgcccaggaatccaaccagtgacaagagaggaaaacaacatcagaagggtcaataatccgtttattgttgaaacatacatcatttctagtcttccagatccaccagagcacagatcctaatcctacaatcaaaaggttcctaattctcttatcagagcctaaaagccaattaccaaaagtatcttcatgtttctttgggactgtccttagattaagaacaatctgaacaatcctccaaatatatctagccaccgagcaattaaaaaaaacaaatgatcagttgattcgaataaaccacaaaagcaacattctcctccccctttccacattcttttgattagatttcctttagacaaaattttactcctagctataagccacaaaaagattttatttttttggggaattttaactttccataagaatttgaaagggacttcagacagatcactcctaatttttttgtaaagagacttggctgaaaatcccttcttatctaaagtccaagacactgaatcgtcagcgccagtcaggtgaatatccctgcacatgtgtttcatttcatcaagattattcaccgtgtcaccaaagagtcttctctggatttttaaggcctcaaaattggagcaaatcaccttatccacacagatatttctgttttcagagatgtcccataatcttttaaaccggacgcagaaaggttgatcccctatccacacatcatgccagaaactcgtgcgattcccgttgccaaatttttttctacaaaacttgtagaaagtatctttgacattcatcagccctttccaaaaatacgagtcttcttgttttttgtcaaccaaaataagggggttccccttaatgtattttcttctaactatttgctgccagagaccctcagtggattccaacctccaaatccacttcgcaagcaaactgaaattcatgcatcttaaatcaatcacacccagccctccctggtctttggggagacaaacaatattccaatttgctaagtggaacttcctagaggtattacccccttgccagagtagtctttttctataaatgtccattttgtttatcaccccttctggcgctgaatacatagacagcatgtataaagggatgttag

SEQ ID NO: 21029 - DNA, 579 bp, Zea Mays
ccatttccactcttgtccccacgctgcccaagcgacgtgtgccaaacctgatgagtgactggctagtgggcccgagaggttggcgtcccacgaacccgagagagatgggggatactcactgttcaatgggcctgggtgtcgtgtggcacagttttctggcttcgctgacgagtgggccgcgtcggtcaggccgccgtcttcaacaaccaagaccaggctcagcgatatcgccaaggaaagcgaacaagtggttgcgaaccaactcggtgcgcagggaggcagggtccacgagtataagtatcgttgcctcatgacccatggggttattggagcgaaataaaagggaggtctagacgccggtttgagagagactcctcgatgggcggaagaaggtgcgcctccgcaacaccattgcacctcttgacgctgctcaacccccgatattgggtctaggagtgctgtgaggacccagtgtgcgtgtgcgtcgagaatcaggtcggttgggcactctgggacacgaggattgcttgtcggagttcgtcccccctcgtcaagccgttgggcaccgcggacggctcg

SEQ ID NO: 21030 - DNA, 278 bp, Zea Mays
gaatttcagggatcattgttttagttgggctcaattgaataccatttaggagaacatgaagctgcttctttagaattggctagatgctagctttggccttttaatatttatggtgcatttatatactgccttatgggttgtattttctctgacataatttcctgctggtgtttatgtagactttgaacccttaactgttatcagaactacctgtccatgtggcaattgggttaatgaaatgacaagttttctttgtcaagcaaagctgtatggtttgg

SEQ ID NO: 21031 - DNA, 492 bp, Zea Mays
gaccaactacaggcgcagccggaccgacataataaacgtgctagaccaagtgcgcaacacccctatggacatagccggatgcgcgaaggcgcatagcctcatcatacaaactatagttacacacgtacaacgagggcatcacaccttacattggttcaaccttcggaatgattcccatctccctgtagttaaatagcattatcctaagctcctcaccctcaaaaagacttcgcaactccccctcacctacacccgccccaaccggcgaggataacaattcccgctttccagccctgcccacacgaagccgaccgccatccacttcactcactctacgcttcgccaccgcccttcgccgtctacgcccagcactcggaccaggcaaaacttcagcatccataacacgcggagaagcctccgctgcagccacatccaaggccgcaaagtaatccaagtcctcatctgaagactcttccgtccacacaaccgaac

SEQ ID NO: 21032 - DNA, 866 bp, Zea Mays
gagactaggaatttgcagtgggtggtcaagtccttctcagggtatcacctactaaaggagttgttcggttcagtgtctccggaaagcttagcccgagatacattggaccgttcactatcttggcctaggttggcagtttggtttatcgcttgcaattgccggattccatggaaggggtacacccagtatttcatgtctctatgttgaggaagttttttgcaggattcaaaccatcaaattgagttggaaccaattgctgtggagcaggatctgactctggagtgtcgtccggtgcgtatcttggagtcctcggagcgtgtcatgagaaggagatcaattaagcatgttaaggtcttgtggactaatcaggctgagcgcaaggctacttgggaacttgaggagctgatgcggcagaagtatcccaaacttttcgttatgggtgagtttttggtctttgttaatctttcttttgtcgttccgatagaagcatcggaattcgaggtcaaattctttttaaggggggtagagtgtgatacccaattttacaaaaaaattaaagtttatttttctttttttctctttcgtgttctgtgctattggggcttggagttttaggaggcataacctcagtgaagcagtagaactttcttgacttttacgctgtggtcgggagcagatgtgagagcgggtttgggccatcgatcttgatatgttggatgggagcccactatctctccctctccaaccctagtcgacctcccctttcccatttttttgtttgcagctctctcttgttccctttggccgctgccccctccctctcctccttcccaaagttcttgcagctgccccacacaaccctagcc

SEQ ID NO: 21033 - DNA, 554 bp, Zea Mays
tcaatattatttggaagtgcaagccactaagtgaggatgagttttttcctgctatagaagacaactactatcggccaaggaagttctactttgacctttcctatgagcaggtttgcttcactactgcttcgttacatgatgttaaaaatgctccttctgatagcacggctatgactagaaacttctgactaccaggttgttcggctttatgaactgtttggcaacaagagagtaggacgccctattcatgactatcaaaaaaatgagtgtttgcaaacaaaccgctcaagcaaagggatacctgacaaagaaagcttgactccagatcctcattccagtaatcaatcacgccttttggttcccaacatttccgaaatcataagatattctactcctacaagcatacacacagatttaccacttaatgttgaggcatacccaagcacgttgatgcccttgggaactgaagttaatggagccaaaattgctcccaccttcagctcccatagtgaccaaatagaacctttttctcaaagtgagtttttcccagctgc

SEQ ID NO: 21034 - DNA, 515 bp, Zea Mays
gcgcgtggtgttgattggatgtgtggtttgctgtgtggattaatcttaaattgcaggttatgttgtcagaagggcatcgatagaaatttatgtgatgagtaggtttggaaatacagattatgtgaggattgaattagtacacgtatgtgtgtgtgccgttgtgtattatagtagtggtggcgtaggatatttgatttaggtgtgcgggtatatgccgtgatatggttatactcacgacgaagaaagatgtatgtattgtgtaacacaacgtttaggttgctgtcgtataattgtgtgaaggatgctcacgatggtcatgtgactaaagggtggtgtagtggcaaagcgagaagtaagtttaatatttttaacgattagttgatagcatctatcggtgtcgtcatgatttctgttgtatggtggatcgatgccttgctttgtcaaatattgcattccattcccattggataaataaatatcatgttgattgattagaggtcttatatgagcgttat

SEQ ID NO: 21035 - DNA, 567 bp, Zea Mays
tgtcctatcaattttatcacatctttgttattactaacagcttgaatattcttgttgttctgagttttagcttttgtagctttagcgacatcatcacgcacagtagcctcggggtacatgggaagcaaaataattttcttatcatgctgtatgagagaataccgatttgagataccatgatgcatacaatctgtatcaaattgccatggtctacctagcagaatattacaggcatccataggcacaacgtcatagtcaacaacatcacgatatgaaccaatagcaaaattaattcttaccagcttggttaccttgaccttaccactattgttatgccattgaatgtgatatggatgctggtctggtttggacgtaagtacaagcttcccaccatgtcgcgctagccaagttgttgcaactacctccatcaatgatcaaacgacatgaacgctccttaatggcacactttgcttgaaacaacgtatgttgctaattctgctccaccttctcaatttgtgcactaagcacacgatgcacaatgaggctctcataatgctctacatcatc

SEQ ID NO: 21036 - DNA, 504 bp, Zea Mays
gcgggattctggccgtctgatcaggatctggccaccacgattaaatcgtccagacccccaaatcgggattccacagcaatcgtgcgatctaagatctatggtcgacgatcactcataactccaactctccccgaactacgtgatcacggaccgacaacttggatttaaaacaacgaagggattaaggatccagtggccatgcgatcccaactcccctaccacgactccggtcggcggtgatacccccgcacggcggcgcccatgaccggcggaatcaatcaccgcactcctatgcccgttttctaattcggcctagctacataatgcggaaggtatactgaggacaagggtaaacttattaccggggattgtgcggtgaatgggcccgaccacggcgactagattccacggaggcgagagcaattccgatgagcaattccctacgctccggccaccctcgatgcaaggcagtgtccccgtacgagatcgactccactcgaggac

SEQ ID NO: 21037 - DNA, 490 bp, Zea Mays
cgaacgcagaagctttattgatagtgaaacctttcgtttacaatgtgcaacttgtcgactggagtttgatgtactgctacaggtagaatttcctgaggtgctcaatattccacgagtttcctacttgggttccatccatctgggtaagtcgataggatcctggccgagtgacttctgatgaatggtccttcccacggtggtgacaacttgtgttgcccttctcctgccagtacgtggtggagcactaggtctcctattgaaaaagatcgatagcgcacggctttgtcgtggtagcgccttagagtttgttgatacctagccgattggatgacgacattcaaacgttcttcttccaatacgtcaacatcttccagactggttgcttccgcttcagctatgctttcaaatgttaacctgggtgctccaaagatcaaatctagtggcaacactgcttctgatccgtataccatgaagaacggagtgtttccat

SEQ ID NO: 21038 - DNA, 1134 bp, Zea Mays
cattgcttccataaaagcagcagaggcattagttaagccaaaagacatgactatgaactcataatgcccatacctggtgcaaaaagcggtcttctcaatatcctccttacgaatcctcaattgatgataaccagagttcaaatcaattttgaagaacacctcggcacccctcaattgttcaaatagaacctcaatacggggaagtgggcatttattcttgattgtcacttgattcaaagcgcgataatccacacttagccgcttgcttttatccttcttctcaacaaacaatactggagaagcccatggagacctactaggcctaatgaaacccttagccagcagatcatccaattgccgcttcaattcaacctgctcctttggggccatccgatacggggccttataaataggctacgtacccgggatcagcttgatctcaaaagctgcatcgcgctccggaggaatgcctggaagctctgccggaaacacatcagcaaagtcgcacaccacacggatgtcctgtactcgcaatgcagcctcaccctccaccaccatggagaaaaagattcccgacttccttgacaggcgatccggaagcaattgcgccaacaaggataacatgtactttggggaacttcccaagaataccacctccctacccgacagcgcctgcaataacactgtcttccaaaaacaggatataactgcgcgatattgagataaccaatccatacccaagataacatcgaatgcccccaaggaaatcacaacaagattggccgaaaagacctcataagcaagaataacggaacacccctaacaaactgaacaactactaatggatccattagcagaactaaccaaaattgggtgacccaatctctgcaccgaaagaccagcccgcgacacaaaatcctctgaaacaaacgaatagctagcgccagagtaaaaaagagcatgggccacaaacgaatcaactgaaatcgtacctgtcaccacgtctccttgctctctgccatccacagcgggtagcacataagctccggaaatacccgcagaagaggaagctcccggagtgaaattaacagaagaaccccactgagccgctgggtgaggtagacgcggagctcc

SEQ ID NO: 21039 - DNA, 538 bp, Zea Mays
caggaaccgaggtaccagcgtcctgatcaaaactggatactcaccgaaggcgtcttcttttcttcttctgttcatcagcagaaggatcaggctggttggctcggcaagggcgccttgggcgagtactgacaggtttctgagcatccaaagtcgtatcagcctctgggaggggtgccactaccaacgccccagcaggagcagcgtcggaagaatcctcagctagcagatcaagcatagcacttatctctgcatcactagggttcaagggcacctcaaaatggacctgccgttcatcatcaggaatctccccaagcgaagcaaccaaggcactaacttcttcagcagagggtcgcactctaaggcccaaactgccatcagtaataggtggattcgacacaaagagggtgaaggctctaggaggaggcaggttccaggccgagtatgccaccggagcaccaacatttgacactttgcccctaaggatcatctctagtcggctcaccaagtctgcaaaaggaattcttctgttagtaacccg

SEQ ID NO: 21040 - DNA, 294 bp, Zea Mays
cacagcatccgattccgatttccgatccataacgtattcgagtttgcatccttgcagtggtttgctaacattactttgtttaatctattgtgttctaatgggtctattacccgcgactgatacgtctttaagccgccgttggtccaggtatttgccaccgccgccgctgtagcccctttgccgatgcctccgtccacactcctcatagacatcgtcgccgctcacgcctacctccctgtcgctctagccgttcacgcttgccgacaccacccacgctcccagcatggtcgccgc

SEQ ID NO: 21041 - DNA, 521 bp, Zea Mays
ggaggacgccacagccctacgcaagcagttcccaggtgcacctgcttggggtcaagcaggacctgaagaggcggcggatgtcagcagtccaggcaccaacgaagaagacgacgggagcgctggcaaggaaaaagcgccaaccatccggagacgccagccaaataggcgtgtgattgggccagaatgggccaaatgaagatatacatgtaagagtgggctgaatgccgtgagctaggtttacgtgagggtataaatactcaaacaatgtaataagctggtaactttgcagaagagaaatatacgccgccactccgtctggccttcgtctctcttcctcctcttgcattccttgcttgctccccacgcacagcagtatatcccctctctaacacactctcgataccatagcgcctctcctagctatttgccgccgcaccggcattcttgcgtcttatccatcattccatcaaacatcgtccctacacccgactgcctctattgtgttgagttcttgcgtcgtg

SEQ ID NO: 21042 - DNA, 392 bp, Zea Mays
ggggattgaaaaggaaaagggttgtgagtatcctgaaaaagcaagcgcaaagatctgttgagaaggacaagaagaaaaggttgacaaagaattcgaagttgacaccagagccttcaacttcaaagaaaaggaagtttatgccatctagccacagagaagaagagagaccttctccgcggaagcattcagcaaagacctgttcggcaacttccattggcgtgacagaaattctagaggtaatgactgaacccctgcctttcacgatgctaagttctttaggatcagagctaacaagcatattacagccacgaaagaaaaatgttgagagaactgccgaagaagaggtaaccaaggatcctttggcgcctggcggggggaacgctcagaagaaa

SEQ ID NO: 21043 - DNA, 1287 bp, Zea Mays
gccgaggaggctggctcccaggcccaggccgcgtagaggcacgttagtcctctgccaccgccaccatcaggtctgccgccaccacaactaccaccaccatcggtcccgccaccaccacctgggggtgatctcccccaggggcaccaccaccaccagcagcaacaacagcagcaacaacaatagcggcaacagcagcaacagcaacagcagcgctcgccccgcttccagggtcgctggaaagtccagggcaccaagtgtagccccttttttccattagtctatttgtcatgccgacgtgtcttaacccatcctttgcttgtcagggcttcctccccctctgctctcaaggccgcgcctcctccgctagataccatgcccgctggcaggtctggctctcagcagcaggcatctgctgggagtggtgctggcggtccgcctctggctgctgcaactccgtcgacggctaccatagcctcaacgacagcgatgtcgtcgagtacatagttggcagcggtggaggagggcccaactgcgcctacccccgccattgagggcgacgcggggggtgcgtccagctccatcccgccgcccactctggaggagacagaggtggtttttgggcggcggctccggtccggcgccgagccagaagcagcgccagttcccctccccgggtgttgtctcgtgcccatcaggctcttcatgagactgaggcggcgatcctgcgggagtgggaggcgctcgaggccgagcaccagcgccttagtgactagcgcacccagttggaggagcgcaccaaggaggcatcccgccagttcgcctccgattggtccgagctcgagcgagaccgcaaggattacaaaaaggacctccagaaggtgtacgcccaggagctagaggcgagccggaaggagaagaggttggccaagagggaggaggccttgaaccagagggaggaggtcgtcacagagctctgggccaagctgagtgccatgaacgaaatcctggaagagcagcggatccagcagaccgcggctatggagaggatccaaaaatgggagcgagagctagaggacaaggccagcaacattgccctggccgaggagaatctcaaggagaaggatgcgtccctggataggcgggaggcgaatctcgcctggcgggagaaggatctcgccttcagggaggaaatgtttgaaaggtgggataagttgctggccgagcatgagctcgaggcggaggagaaggagaaaaaacaggaagagcggatccggtagttccaggcgg

SEQ ID NO: 21044 - DNA, 370 bp, Zea Mays
gcggacctgagacgcgctggccatggcgaggtcacaaggcacggtgttcttggttgatttgggggaaatcccaaattggaggtctctggtgaaggatctgaggtacaggtgggtgcgctagatgcctaaatatatagcgaagccgatggcacactcaatttataggctccgggggcggtggcgtccaatttcacgaagaggtgctggcggccggaggggaaaaaggttactggcgtgcaagcttagtggctttcaccgtggcaagctccccggcgatgaacagacggctaatgcaagtcacggcgatgcaatggatgtgccaaggcacgtggcgcaaggccgtgaagtggctgtctccagtgaactcatc

SEQ ID NO: 21045 - DNA, 483 bp, Zea Mays
tctgactagcctgacgaatctcaacctgggacacaacgtactctccggtacaatccctccagaacttgggtcgctgtatcagatccttcagctgaacctgagcttcaatcatttgtcgggtccgttgcccctaacatttaggaacctctccaaacttttctcgctcgacttgtcaaactgtagcctaactggacaagcatatgaccttcttgtcaccaccaccactgaccaggtcaccaccgctgtttcgttccccgaaattgagatcctcgccctttcctccaacggcatcaccggcaccatgccgacgctactctgtagtgctagcttcctcaagatcctggacctgtcaaacaacgccctacatggagatctcccgaactgtctgtgggaattgccatccttactactcatggatctgtccagcaactccttcagcagtgtagctccgtcctccagctcctcgtctagcgctagcgacac

SEQ ID NO: 21046 - DNA, 577 bp, Zea Mays
ccgacgatgcccacatatatatacatgaggaaggttggatgggaggagaggagggatcgaatcctcccaagattcatgcaacagaataacagaatctgttgggtacaaagcttatggtggtctagtcccaccgacgtgactgacgaccgtgttttatgttactcttcaccgttgcagggaaccttttgcaaattcatacttggttaagctatactcatacactctttttttacttccatacaaaaatagttcacaagatgatgtctattgaggacattgttcttcatattcaagtgttttctgaaactaaatgtacacgatgaaatcagcactggtaactgaagaaaaatcacaggtatgccaggtgatgctattgtctaatcgatcagcaagagagtacgcttaactgtaggttgtagcgctagaccataagctatatgatcaagatgtactgcatctgcaagcatccgtaggcatacaaaactcaccatcaccactgctgcgttgtccatgccacacaaaactcaccatcaccactgccacacaaaactctttgaaaaggaactttctgtactcc

SEQ ID NO: 21047 - DNA, 837 bp, Zea Mays
cgattaatttctgattaatccctgataaccgattaatcgctcatgtccagcttgccgattaaattccgatatccgatatattgaaccttggttggtaggcatgtactggactagttgtgggaggaggttgataaggttaagggtgttgttctgtacactgctgttctgccagagcaaaatataccattgtctagatccatggcgacaatccatgtccctcgtcatgttcagttcttttgagaattgagatgtacaagtcttttgagagttataatattttattttatgaacttattgtccagatccatgttctagtcatgttcagttcattgtccaactaggtccatattctcgtaatctaatgctttattcatacatttgtcatgcatgtattaacagtaagatgtatgtacatctatgtaaagctggaactgtgattgacaacctaatacaactgaacaggaaaagaacagagagattaaccgaacaccatttggacagagagtgagaatggggaagaaaggatttaatactcggttcgagtgacaagggagggatccactcagtccctctctggattggttccacttggggattcaacccctccaaccgaacatggcctaatggaaatagaaatacgtctaattggtttagttaaaaataaaataaaaaatggtgcatgtcatcatcaagttagtgaaatgttctttcaggctacaggatcataaacgaaaagctgctggtagcataccactttgttggcatatgcaattcctttcccagctatcacggttttaataaaaccgtcatatgtataacttgttggttgcaatccaa

SEQ ID NO: 21048 - DNA, 672 bp, Zea Mays
gtcgccgacaactcgggcctactttcagctccgtcctgaacccatcggactcggaaccaaatcacgcgccgaccactccgcatttcacggcgtgagattcatccgttttggggctataaaaacttggcacccatggtgccttgcctgtcgaaccccaacgcctgcaggccataccgggagcttgcgaccgcgtcacccagaccatgaggggtttgccgccgagggcaaaccgtgtctggccgtccttcgagcgtcaattggggaccttaaccgcatcgtcggggtcttggggtggttttccagggtctcctcatcctagttcggttgttggtgtatcggctattgctcaccagaggccaatctccgtcgtggaacaatagagcaccgtgggcagcatcgcactctcccccgcccgccggtaagactacttcctgtatgttcgctacttcgccatcattttgcttcacgaaaatcgcgtcgggttaaagggttgtgcgcgtggacaatgtctcgcgcgtggcggcgatggtctccacgcgggtgcttggcggcggcgccggtgcgtgcgcctgggagcaaggagaatatggtgtagccattgatccgcgagcgaacgtaccagattaaaaccacaatataccccttcgccccattaaacaacaatcacagatc

SEQ ID NO: 21049 - DNA, 528 bp, Zea Mays
gtcgcgcagagctccgacgagcttgtgtaccggccaattcactcaaagaccggcgccctaccttagccgagacagaaatcaagatctaatgagcatttcccctcactcaatttcacgaacggatacccaatttgtcctggcaacggtgacagtgggcatcgcggacagacaatcgcgttcctggtgatctaagggatcctagttcaatcaagttggttggggagcatcaggggcacacaagaacactaaaatgagagggcagagggcatgagcagacctgaatcgagctggccgcggtgaggattctttcacggtggcggaaactcagtttgggggaagtgagcaattcgtggtctcgggtggacaattggaggcaagtgtgggtgtgttggcttcgtgataacgtggcgcaacagacccgaccatcaatttataggatcgctaagcggtggccggtgaatttgggtttgagacacgcggcggtcggaggggtgggaggtcactggtgcttgggttagtggctttcac

SEQ ID NO: 21050 - DNA, 584 bp, Zea Mays
tcgatcttcccatcgaccgtccaacactcgtcttcctctccccgaccaatttccccaaaaatagaggacggcggtgaagccatcgccggcgaggccaaacctccacataggcgcaccaaacttcaattcaacggtcctacttgttgcagtaatgaaggcgaacacgggtgagggctccataccaggaatcaccagcgcaagcgagccgtccacgtgaaggggtagttccgccccaaactcgcactccagtgagaaattctcttcgattcgggaccgctcagctctacctgagggcacggacagacttcccggatgctggcgcactcactcggccacgcaccaaggatgcgacactggcgcagaggaatttcgtcggcagcgtggtcaaatcgatgcaaggtcgccgccccttctctctcggtttacgctttggttgtctacgtgcttgaatcggtcacgggcacgcggcgcgaccggttgttttatatgcgcgacgaggccacaggatccgggcggccttgaccgaggattctgcgtcgtgcgccaccacccgcgcgaagctcgggcgagttgttgacgacgac

SEQ ID NO: 21051 - DNA, 675 bp, Zea Mays
tgtgaatggaatctgattgtacagtaaactaaacatgatcccagattcagcccccctcgccgttggtgattctgcgccgggatcctcgtcaccgttgcgattcgcgctcaacgaagtaccgattgttgctcagggtagtaaatatcatcgtgtggatgaacttgagccactgttcactccggccgccgtgtctgcctagctctcggccgcttcggaatcatcctcgccagtgatagccccctcgcgaccttgtgccacgtgcctcggtgtcttaccacgtcgcagtagctcgcgttatgcatatccagtggtcgccggtgagcttgccactgtgaaagccaccaatcgcttgcgccagtgcacccccttctctctgaccgccaccgcgcgatctcaaattcataggccaccgctcaagggccctataaattgagcacaccttcggctctgctaagtattcaagcatccaatccacctactcgtgcctccaattacttaccagagagctccaatttgggatttcccccaaatcggtctgaaataccgcgcatagtgacctcgccgtggctagctcgttctaggtccgttcatactctctgctctcccgtttcagtacccttatgttctcttgatgctcctcaatctgttcaattaagctagaccgcgctagatcgt

SEQ ID NO: 21052 - DNA, 586 bp, Zea Mays
gcagcataaccatcgggaaatttaatttttttcatccatctcattacctcgatcttgtctttagaggtaagacagaacaaggcacgtggcggcttaccattgtcattgagcacttgggttggtcggtcacagagcattgctagatctcttcgagctttcagattgtcctttgttttttcaaaatgcatgcaggtgtgtatgagggcttcaacaacattactttcttggtgcatgacatcaatgttgtgcacaagaatcaatgacgacatataagggagctctagagaccacatatatgtgtctagttgtcgtccactccgaatccttcgtacttgtcccccttttcatttaggacaaggttgttcagctgagcatatatttctgctgcgttaagacgtttaggcggtcctttggtgaccatggtgttctttataaagtttttcttatcgctcctaaaggggtgtttcttgggcaaccatcgtcgatgacaatcgaagtaagtgatctttccaccatgagcaagacagaagcaatctatatctgaaccgcaatatggacatgtcaatctaccatgtgtactccaacc

SEQ ID NO: 21053 - DNA, 495 bp, Zea Mays
cccactggaagaaccaggggcactcggctgattgttaggagcgggggcagtagtgggatgaataaagacgggctgcttgaatggatatgaaggtgggtggggtgaagaacgattttgattaaaaggtcggatcaccaacctggttctcttttcaggcccttgatttgacctttcacctccatacccctttgattttccatgtcccacattcttggcttccactgccagtgctgtactgatagctctgctataggtaaggtccagacatgttgccattttccgctgaagcctgtcattgaacccccttataaaacaattctttttcttcaagtcagtatccacctagtcaatggcatactgagagaggtggttgaatttgttttgatactacatcaccatatctcctccttgcttcaaccggataaactcttctagtttcatctgaagcactccctcaggaacataacgctcttggaatgctagcttgaactcctc

SEQ ID NO: 21054 - DNA, 889 bp, Zea Mays
ctgtaaatttgcagtagtaaaacaatgcgcgatggttatgaaatttgtttgcgggatatagaagtcatccttatatgagtaattgtaatctcgtcagatcgccttaagtcgctgctgacttaagtcgcttgcttttgttaatagggcgtagtggtcaccctgaattgcgtagtcgtgagcatgttgcaccggcttaagtcgccactgactttagccgattgctccgttagtagggcatagtggtcaccccgagttaagtaagcgtgagcatgtcgcaccgccttaagtcgttgccgacttaagccgattgctccgttcgtagggcatagtggtcaccccgagttaagtaaacgtgagcatgtcgcaccgccttaagttgttgccgacttaagccgattgctccgttagcagggcatagtggtcaccctgagttaagtaggcgtgagcatgtcgcaccgccttaagtcgttgtcgacttaagttgattgctccgttagcagggcatagtggtcaccccgagttaagtaagcgtgagcatgtcgcaccgccttaagttgttgccaacttaagccgattgctccgttagcagggcatagtggtcaccccgagttaagtaagcgtgagcatgtcgcaccgccttaagtcgttgccgacttaagtcgattgctccgttagcagggcatagtggtcaccccgagttaagtaagcgtgagcatgtcgcaccgccttaagtcgttgctgacttaagtcgattgctccgttagcagggcatagtggtcaccccgagttaagtaagcgtgagcatgtcgcaccgccttaagttgttgccaacttaagctgattgctccgttagcagggcatagtggtcaccccgagttaagtaagtgtg

SEQ ID NO: 21055 - DNA, 1030 bp, Zea Mays
tataattccaaatttctcatgtcagcgtgtatacgtatcctccatccatctatttgttctattctacatggtgatagaggaggcatgcgagggattggggtttggaaactggcgatactagactagatttttggaatcaacgagcgatagaataaaggggaccgagaagaagaattgaacgaggagatagtctacgatggtcagaatcaacgacaaatcgattggtcgatgaagatggagaggaggaaggaaaaaatggaacatccgttcagaggaagatgggatgtgttatgctatctccagcagctgtcgcaaacggcctcgcgtacacttttttcgtgacagcattcaactattcacctttccatcagagtgtgcatgaggacaaaagacacgctcgagctccacgtgcctcccataacctaaatccatggtttctctcctccgcaggtctataaacgcatccatatgtgcgctctactggaaacactctcacattggcattgtaactacacaaaatacacatccgcatacggggaccgctgaaaatagcttgccttagtccgtgcccaacagatcgtgtatatggctgtacaaaacattattttgcactgaatgtactatttatagagtggagattgaaataggaggtgagaccagcagagcacgtatgaggacaaaagacacgttcgagctccccatatctcatataatctaaatccacggtttctctctcctctgcaggtctataaacacatccatatgcgtgttccactgaaaacactcgaacgtttgcacgctcacaatgacattgtaaccacacaaaatacgcatgcatacaaggaccgctgaagatagtttgcctttctcggtgcccaatagatcatgtaatggtcatacaaaacattttttatactgtatgtattgtttacaaagtgaagattgaaataggagctaagagcagcagagtgtgtatgagaataaaagacaatctcaagctcctcgtatctcccataccctaaatccacgg

SEQ ID NO: 21056 - DNA, 718 bp, Zea Mays
atcaacaagaggttgattccataatcgtaggtcatgcatgcatgatatttaaacaatactaagtaatcttcccctcttatagagacatggcatgcataaagactacccagcggaagtcgaccagaccttagggtgtacctcggcactagttggctccttgatatgaggggagcagtagcgggagtaatgatcccataggggatctggaggctagagttgaacgtctaacgatggaactgtgctatggaagtagggagcatgcacgtgatagccgccgcatcgcagagttgtcagcagaggttgatcatttgcagcgggagaatgtggagtgggatagggctattcactgggatgtaattcatgatctatagcctaggattacatggcgactgcccgagcttgggtggaagagctaagcatagcactggaaaatctgcaagcgtataataatactctgcatgaggaagtgcgcgtgttgtatgactagttgcatccgaacgtgccaccagaggttgcggcaatgggagctggtgcatcaggagcagctggcggaggaccttatggggtgttggatctctttggagcccctccttccatgaacatcgtggatgatcgttctcttgaagctagcagtggagcgggagcagccaaggacgtggatgactagattagtatagtagtaggttgtttccttatgtaatctaaattaggaaaagtg

SEQ ID NO: 21057 - DNA, 450 bp, Zea Mays
tatggttttgtcgtcccttagtacacacttatcgccgaggcttatggttttgtcgtcccttagtacacacttatcgccgaggcgaacaatgatgtcgcctaattatgtagcctgactgagctattgcctctcgtgtccgtccctcctcgcggtaagatcctctccccatctggccatctctcgagtcgtgcccttccttctacctcatcgacatccgcatccctcttggttcttcctttttgcgatagtttgatggacgaccgaggcggaccactgccatttcaccagcatccacaccacccctactttctccattacgtcgacaacctagcacactgtattcgtttgattccaccccataatggtttctcggattcgtttctcacaattggtttcctgccttgttcatttgttcttggtttaccttacttccgtggtacacaaattaga

SEQ ID NO: 21058 - DNA, 647 bp, Zea Mays
atcaacgggtcaagaaaccctgtcttaagttgtttcttcttatcatccatgtattgcatcctacgtgtaaaaagtgttaattgttagactctcgtttatgtgtgcgtgcacaaaactaacaaatatgaaagtttagaggtacttacaagcaaaagagggttaagtagttggtttccatcctttgtcggtggtacaacgaccacagatcgtcaaagaataaataccgcacaggatctatattatctttgctccaaaatgcatcttctggcacaacaaatgtgaagtcctcgagtttgtatttgttgctagccaccatgtaccactcatgcattctaatctctggagtcgacaacttagaaagttgcaccgtcgtcaagaacggcctcccattcacaaatttaggaggaacatcctccttcttgtatatcgggatattgattttaagacataatgattctcgagtatgaatcattccatcttcttcccatacttcgaaattgtctatttgggaccgtgtgcgtaatccacgagatgctgattccgcttttgattgatctgtcataactctcttcaatttttgcaggtagcgtgtcatagcttctgacggtttcttgacattatcggtggcgattcgctgatgaattttc

SEQ ID NO: 21059 - DNA, 602 bp, Zea Mays
cagagccagaaatctcagctggagattgaagcctgcgctcagaaaacctgatcaccctgaaggtctgatgtcttcttcttcaggcaaaggaatccaatcaggtaatcctgtcatttcccctttaactttgaagaaagaaatcgatcctgttcgtccagctttctttcagaaatgaggagtcgaaggtcaccatgctagaaattgctttactgtgttgtggtgtgacatatgtagcaaggaaacacacgttacttctcgttgtgtcctgccgaaacaaaacaaacccaccatgcccatagttggtatggcggcagatggattagggttttacctttctcatttcgctaaaccactgaacaaaaaaccaaaaagggttttcatcggtctggttaaagtgattgaagggttagtttcggtggaggatttagaaagggattttggtttccacttctcttggggtaaaatgtggaaggctactaaatgccattctagttttttgatgcaattcccctcacaagagcgtcttgatgaaatgattagcttccctgaactcaaaatgaagatgtctagtgccaagattgttgttgtgccttggagctctc

SEQ ID NO: 21060 - DNA, 459 bp, Zea Mays
tggtgtgccctcgtcctcctgcagctggatgtaccacagctgggccacatcttcgaggttgtaggaggccatccaaaccttctcctctgccatggtacgttgttgatggaaataggactcacaacggttgatgaagatgagcggatcagacttgccattgaaacgcgggaagtccatcttttggaaccggggcggccgatcgttgtggtgctcgccggttgggtggcggtggcctgcggacaacgatggatcggaggacagcgcgtggattgccttggcgttggcctcggcggtggcttggaggagttggacggccctggcgagttgcttcacggtggtcttgaggtcatcctccatggcaggcgcagcgcagaaggtggcggagcttggtgatgacgtcgtggaacaagtaggcgaggaacaccgggatcccgataccaagttgtcaagggcgttgaa

SEQ ID NO: 21061 - DNA, 408 bp, Zea Mays
cggatggttcaacacaaggcatgtaaggaccatacacaagccaagtcaaaatgaagacaaaaacaatcacactcaagtacaacaaaatcactctcaatcaacaggaactcagcagagtaccttcagaccaccagccgcaagaggtggaagaggaggaaggagttttggagggagattcaacttacaaccaagcaaactattctgcctattttgtggagaggacaaggggcatacaacaagaacctgtcaagtcacaattcaaaaacagaaggaaatcgttgaagctgaagcacgatagaatcagccaaagcaggtcctcaacaccgtctcatacttttctccatacatcccaaagtatgttcgcaatcaacagccaagtccacaaccctcaacttcagttgcttcggc

SEQ ID NO: 21062 - DNA, 390 bp, Zea Mays
gcagtattcatcctcgctacattccaccctagggtacaccatctcatccaggaggatgtcgtgcccagctcagtacgctccactgacacccatactcgtcaggctacccccactggcaccccggcgaggcccataagacagaagacaggccccacatgcttcaagtgtagttagattgggcactatgcaaatgcttgtccgatggggaattccagcacaccagctccgaacaagcaacagactcctggcaagggattcaacattgtcagagttaaccaagtcagtgccaacgccactactgatggagtggacatcactatcgatatgttttacattaatgcaactccagcagccatattatttgattctggagctacacattcatttatt

SEQ ID NO: 21063 - DNA, 290 bp, Zea Mays
aaaggggattaaattgcaaaagaagccgggcgaatacatggaggatcggaggaccaaacagggaagcagcccagcagcaccctcatctctttctgccttttttcccccagggctagaccaatcgtctatcccggctgtacccctgtgtgactctgggaaataaaaggtgttcatggttgggaagaaactgatgtctactaccaacttcaaacctctcacttgctatttgatcaacagttaagagatatatagcttagtatataatgaagaatcatctagctagctaaaaa

SEQ ID NO: 21064 - DNA, 1283 bp, Zea Mays
ttcaactggttcacctttgggatctcctttggaggttttgtggggctgattttcatcgtgtggcttgagaactacaaggggtgggacattggactcggactgtctgctatcctaattctgcttgggttgcttgtgtttgcggctggcctccctttttaccgcaaccaagtacctgaaggaagccctctaactcgaatcctgcaggttgaaaatctaatcccgtctcaataaccggcaagtgtgttctaaatgttaattagctgcaatcttgcctctctaggttcttgtggttgcattcagaaacaggaggtttgggctgcctgaggagctggaagaagcacatgaaagcagtgctgagcgaggctctactaaagtactttcccaaacaaatagcctcaagtaagattaggagaagcacgtaacaatttttcatttgcacattactagttttattgtggttgcattgccttgtcgctggtatttcctatcagcataaactatttattattccgtgcatctcgccagattcctcgataaggcttgcattaaccatggcaaagaaggagcctggtcactttgcagtgtgacaaaggtggaggagacgaaggctgtgctccgtatgcttcctgtgtttgtcagctccatgatcggatatatatcaaaccctgtcatcttcacattcactgtgcagcaaggtggcatgacaaacacaaggctgggcaagatccatgtttcccccgcgacactcttcgtcatccccatcaccttccaaatggcaatgcttgccatctatgaccggttcattgtgccgttcttgcgcaggcgcacaggctatgccagtggcatcactcacttgcagcgcatcggcatgggtttcgcctccatgatacttgcgtcggtcatcgcagcagtagttgagagaaagagaaaagaagccgcagtgcagatgtccctgttctggcttgcgcctcagttcttcctgctgggcgtgtcggacgtgacctcgtttcctgggctcctcgagttcttcaacagcgaggcgccacggggcatgaagtccattgccacagccttgttctggtgtgagatagggcttgcttcattgctggccaccttcctggtgcaagcagtgaacagcgtcacgaggcatgggcaccaaggagggtggctcgagggttccagcttggacagcagccatcttgacctcttctactgggttgtcactgttgtcggtttgattggtttccttaactacttgtactgggcaaaaaagtacgtctacc

SEQ ID NO: 21065 - DNA, 586 bp, Zea Mays
ttatatgcccttctgtttattcataggggctacggggttacaaatccaccttgcctccggtccctgaggatgcggcgagtcgggcggcgcgcaggttggctacagagcagcagaagaaaaagaaggacgaggaaaagaagcgagcccacgagaaaagggcggctcgtgacgagctcgagaagcatcgccgagcgcaggagagggaggggttgcctctggaggcatccctagatacgttcgatgacgatgacgatggtgatgatgatgaggggatggaggtttggctcggcttcagccccgaggtgagactttggtctgagccatcctcagcaggcccatctgatggtctggatgcgcctgtgcttgggattgaggtgacgacgcctttgctcgatacgtagacatccaccgagcgggggactttccccgtggtcgaggaggaggaggtgacagcggagcgggttgcctaccaactcccgacgcttaacacggggaccaggggcccaaagagtttggcgccaaggaggctagtcctgcctcgatctgggtatatttgaggttgggttctctttgatctctatgtgaa

SEQ ID NO: 21066 - DNA, 450 bp, Zea Mays
cgctagtccgctttggcgtggtccgcgcttcgttaacacggcgccaatggagctagtaatggatggctcgggtcgacgctaggttgatagagtgggaaaggagtctaggggcatggttttatagctggtaccaaatctagagcaggactggaccgagagcgcgcgagatctctggcggcggcaatactccctttctctcggtgtgcggcgaagctaggcgatggcgctctcagctatggcttgggtaccgaggaaaggcataggtcttataggaggcgggaccgaggttggttgcgctcggtctgcggaaatcgcgcgcgtgcagagctcggagttcacggcacgctgagcggaggttgttgtgaggagggagataagtctgacaagtggggcccacacgccagtgatatccgcaagcacgcgcatacccgaccggtggaagaaagcggc

SEQ ID NO: 21067 - DNA, 384 bp, Zea Mays
cacatgcatacatgcaaatcacacgccacacatagtgcattaatactttttctctatgcgaccagtcaatttgaaactgtccctactccctacacacctcatggatcttttgcagatgcacaccttatggcccttcatgtggtcgagtttttttagccaataggtttgtgccatgtcacttaaatccgggaatcattaaataagtgatatttttgcgtcagatgtccgatttatattcattcgagttgcattacattcgtattaactttgtctatgcgttaataataataatgtttatcatcacacatattttagttagtcaattaattagttatttgttggttattaaaatagcaatctagctaaaactaatttatagtttta

SEQ ID NO: 21068 - DNA, 309 bp, Zea Mays
gaactatatggatggatatcttgaccagttcaatgaatatacaattcaaggctcatttcctaccttacatgcctgccaactaatatgacctactgcacttctgccaaagcttcttgccttcgaaggaggaagaagaagatgatgagcagctaagaagaattcggcaacatctccatgaactctccaaaaatggagctttctccatggcttgtgttctccttgggtttccttgcgcaggctctcgtcatcttggctgacacgaatgcacaagacggtatgttccagtttttccgtcccttgtgtccttgt

SEQ ID NO: 21069 - DNA, 422 bp, Zea Mays
ccgttaggcactcgctctgctggaccgcagggatgagtcgaggcagctacggatcgctcgagcaagtggatcctccgtccagggctgggatgccaaggtacgatgccaaggtacgatgccgttgttcacttcggaacccgtcgtttttagcttctctcttttgctccccttgttctgtttgacgaaatgcccggcctcgacgctctgttttaccaacgtgctaatgcttgcctgccttcgctatgggtgtttttatctgtgtcaatagtacaatatctcaaacgcgcaagcagactgccctattttaccttgtttgttttgcttgctctgaagtaaccacaatatagcatcatatttgtcttgcttgctatgaagttcccctcatgcattctaccctcggtatgccaatcttagctatttac

SEQ ID NO: 21070 - DNA, 653 bp, Zea Mays
ccacaagcaaccgcgatgaccacgccatactctgccgttggagacgacgcagctaccgcatagctactcaccccctaccaccaacatgtacccgattggagccacatatccttgcctggtcgttgggggagtcgttcggatccgtttctcggccaaccgtgccctgaggagtgtggaattcctcaccggacttctccctccgttgtggagccactgcacatcatggattggccctctgcgctactaaactctggtaagttttgtccactcacgtgtccgccatggtgtctgcttccttttacgcatagtagaactcgtggtagagcctagagcctcagttgggcgtcgccccgacgaagcgccgccgtgggtaggtatcgccaccgtatcggccggacgagggatagaatacggcctttggccgtgcgatccgaattggacgatcaagattagaaccaaggtaccggtttgatcaaatcaatctagagcgttagatctagatcgggcatgtgcaggtgatccggacgattttaaatccgaggcatctgtccgcgatccgacgacccccatcgcacaccgagtcattataagctagatctaatgtgggccctcggttgttgatcgaacggccagatgcgaagaataccccttcg

SEQ ID NO: 21071 - DNA, 288 bp, Zea Mays
acccagagcaatagcccacacctaccagccacaatacccccttcactaccaaaatatgcaacaaccctaccctcaacaacaccaaaactacaaccaagaatgatcctcccacaactaccaaatcaagaatgattacaactgccacctccaccccactcccacaaaacgttcccccaatccaccaaatccaattacaacaacctaatcaagaagaagacttcacgcacccatccgtccggtgagtcatacacttgatctccagagggtacattcaagacttcaacacaa

SEQ ID NO: 21072 - DNA, 719 bp, Zea Mays
agacactgttggcctacaccagccatgatgagacatgtcaccgcagaataccatcccgtctaacatcacaacatgtcgggcgaacatcgaggggccagcttagataggatgggacacaccctcatacggccatgaacatctccaacactgcgatatggggcctgctagggtctacgacagagttagagtccccaaatgagacacgacagtataacccaccataccgcgtgtgtgctcacgcaagcaccaaaagacgacgtcaccagaagaacttctgtaaatgacagaccccactcctatcggctgcaaacaacccacctctttgtaaaagtccttccccttgaactataaaaggggtggctgaactggaaccagggcagagggtgagctaaggaacattcaatagaagccttcgtgttcctcgctctttcagtctcacgtgtaccccttataacacatcctcgggcctccaaccccaaagagcaatacaagatcggtgctacaattttgaagcgagtccgttataaaccctaacgagtccgcactaacctcccccatcgaacacaaattctattgtgttcccgttttcggaaccacgacacatttgcacaagtagtggtttatacaattggtaccttcctagctttgtgtggtgtttactagttataagactttcttgacaatttgagaactagcatgcatatgatagtaatagctag

SEQ ID NO: 21073 - DNA, 388 bp, Zea Mays
cagtctacggcgatatcgatggaagcttaatcccgaaaaatgtgtctttggggtaccagcagggaagctactcggatttattgtcagccaccggggaattgaagctaatttggataagatcgaagctatcatgaaaatggaggcaccacgatcacaaaagaaagttcagagacttaccggatgtatggcagccctgagcagattcatatccagactgggagaaaaagacttaccattttataagctactcaagaaggtggataagtttcagtggacattagaagcacaggaagccctagaggcactgaaaaaattcttgacgacaccaccagtgctaaagccaccacggcgagccacgtcaactcaaccagctgaagatttggtgttg

SEQ ID NO: 21074 - DNA, 605 bp, Zea Mays
gttgttcgtagaaatcaaagaattcagagctagtgaaattggatcccaggtcggttatgatgctattcggtatcccaaacctgaatattatatcttgtatgaactccactaccttggctgaagtcagagaagcaatgggtttgtattctatccatttggtgaatttgtcaatggcgaccaacacatgagtgtatcctccctaagctttcttgaaaggtctaatcatgtccaatccccagcacgcaaatggccatgtcatgggtatggtctgcagttgctatgctggtaaatgctgctgctttgataagaattggcaagcttcacacctctagactaactcggctgcatcactctttgttgttggccagtagaaactagaccaaaagaccttcccaaccaaggtcctggatgctgcatctatcccgcactgtccggtgtggatctcatctaacagttgttttccagtagccgaaagaatgcacttcatgaggactcctgttgcgctccttcggtacagtgcatccccaatgagggtgtagtgggctgactgccttgcgatgcattctgctgcagctttgtcatctggttcctcttcattctttata

SEQ ID NO: 21075 - DNA, 948 bp, Zea Mays
ctgatttcagaaattttagtacataatagttctttgcaaacatgctgcagttgttttttgggtcaaagtaacaatagttttctgtgcatatagtctgaattccttattaccgaagagcaactccaaaaaaactacaaacttaccccaaaacagatattaggaaagaaaactattttttaatcccaacagttccctcatgctcttctgaaaaatttcgcatctctcattcacagcctttcctaccgcatatttttgcgtcaactatcctcccaatccgtcgcgtgtcatgtattgcgctcaactcttgctatcagacaccgtgcatggctcgtgctcgcggatgcgggactgcgcctcccttgaccaagcttgtctgtagccccattgtggtagcgacacatctatggtgggcccctgcagaggcagcagttcgtggttgtgtctagcctatgtgcacagtgcacatgattaagtgaggaacaaaacgttagtagaatgcagtcatgtgattaaggtgtttttttaatttgaacttagttttctatttttttagtttttgtttcgagagaaatgttagagtaaacacaataattcacccctaaaaatttttagactgcccccaataatcattttttggtagaaaccttttaacattcttttggagttgatctaaggtatcaatacagtctctgatgcaccccttttaccaaattttcatctcagacactgtcaagtatggtatgctgattttaactttcaagattttaatttggatttacaaaattccaagagacataaatctagctacattgatacgcgtttccaaagagacacaatgttctagtaacatgtagagaaaatgagttaggtacatgatttctaaaaaatgattttgaagatgttaggttttagcaggaaacttctgcattaatctagtgcaatactctc

SEQ ID NO: 21076 - DNA, 801 bp, Zea Mays
gtaaaatccgtaactggctcattgccagaacgacgggcctccgcccggtggaggaccaaccctcgaataataggagcgtgggcagagggaaggtcaatctcatcatcttttccaccatcatcatcacttgtcggttcccatgcttgtggatttgtcgcgggtcaggaccgaccggagggattccgggccgtccgaccgcgagctccatgagacccggaagcctcaccaccttgcattacgttcccagatcctcgcccgcgcttggatctggagcgcgggggagtttcttcatgaatctcttattcgttagaagagtcggattcaacaactgatggatttctctgacgcaccatctttaaaataaaagatagaacctatgatgagtgaggagatcgaagtacaaggatcttaacaaacacgtttgagtagagacgcgtatgatattgagcatgtacttcaaccgttcatgcgagcggttcaactacaacgaacaataccaaacaactaaactcaaacaatgttcgagacaaaataagatagtctaagtgttgcaagcacctaaacaaaaatgtatcctagaaacgatacattagataatcaagaatggatgagatcgagtagaaacaagatgaaataaggtaatacctcgatccgaagatggatccacagaaatcccaactagagtgagggagatgatggaggaagccgagatgaacggatctccaacaaaactcccaacaatttgatggcacaaatgagctttggtttgtggtgaaagtgagaggaagagagaggaaaaac

SEQ ID NO: 21077 - DNA, 403 bp, Zea Mays
ggccgggtgacaaggaggtggggggctcggggatgccaatatcgtggtcgcagcaccgactcacttatggctgctcctcggtagcaacaatgtagcatgcgtgtacctcatggggggagggaatatgtgcccccacccgtacggggatggatatcgcggtcgcccatcgtggccaggggcggacccaggacgaaataggagtaagggtacatttacaacaatcaacactaaaatgtcagagcgaggacatttaaattagatcgagcagaggacctaatagtgaaaatctagactgtattacttgtaatcgagaaatgagcgggggcatgtgccctcactgggctacacataggtccgcccctgatcgtggtctgcgttgcgcctccctcacgctttctccaac

SEQ ID NO: 21078 - DNA, 418 bp, Zea Mays
acgagatgtgcgaatgatcggttagtgtttcacttgtctagtcagtaaacgttgtcataaataattgtgctaaaattggtcatgagaatgcagtggggacacgtatgtgcgtgtgtgccgtggtgtattatagtggtggtggcgtaagatatttgattgaggtgtgcgggaatatgccgtaatgtggttatactcgcggcgaggaaagatgtatgcattgggtaacacgacgcttaggtcgctgttgtataatcgaataaaggatgtattattgagcttgagtcaaaatgtggggtaccagtggtacgctaggcaggcggtgtccaaataaattaactggttgatgtgatggttgtcgtgcgtgatttattgttaatgagtagttggattatgagttatgtaaggagtatgttagaaa

SEQ ID NO: 21079 - DNA, 694 bp, Zea Mays
agaccggaacatggcagctgacaccttatccacgctagggttgagccgagcacaggctgcctcaggtgtcttcttccaagagattcaacaacccagtgtcacgtcagggccaagggaagaatgcaaggcaatagtgcaagcggaaccagatccaaatgactgaagggtaccaatcatcaaatacatcaaaaatgaagaagagtcagatgatagagccacgaccaagtgtatcgcaagacagtcggctcactactcagtcataggcgacacactatacaaaagaggggtcaagggtgttttcatgaagtgcattgacttaggtgctgaaaaacgcttattggaggaaatccactccaggcaatttggggtccatgcatcatcgagaacactcatcgggaaggcattcagggccggttttactggccaactgccaagaaagacgcagccagcctagttcagagatgtgaatcctatcaattcttggccaagcaacagcatttgctagcacaacaattatagactattccagtcacctggaccatcgcatgctgggggttggacatggtcaggccattcaagaaagcttagggaggatatacacatgtgttggtagctattgtcgagtttacaaaatggatagagtacaatccaatagccactctgaccttggccaaggtggtagagttcatccacg

SEQ ID NO: 21080 - DNA, 977 bp, Zea Mays
gtgaggtttcgcgaagtggtaggcaccgtcgtatggggatggagcgggaccgtcttcgagtagaccggattggtaaacgggaactattgtcctcgccgattgggacgagcataggtgagggggatctgtgaaatctttttgagggtgaggaattgagaataatgttgttcaattatagggagttcggtatcatcccgaaggttgagccgatgtagtatatggtgccctcgttgtgtgtatgtaactgcaacttgtattgtaatgtggcctgttggccgttttcgcacgcctgtgctgatccggctgcactcgtacgcgacttttgcgtcgagtgtcgattgacgtacatgttgcgcttatccggtggcacccttaggtgacttttgcacggagtgtcttttcggaaaaagacttcgattaacgcacttgtgctattccggctgcacctttaggcgtcttttacatggagtgtctttttaatgaaagacttcgattaacgcacttgttgtgttattctggctgcacccttaggcgtcttttgcacggagtgtctttttaagaaaaaacttcgattgacggacttgtgctattccgactgcacccttaggcgtcttttgcacggagtgtctttttaataaaagtcttcgattgaggcacttgttgtgctattccggctgcacccttaggcgtcttttgcatggagtgtctttttaataaaagacttcgattaacgcacttgttgtgctattccggctgcacccttaggcgtcttttgcacgaagtgtctttttaataaaaagacttcgattaacacacttgttgtgatattccggctgcacccttaggcgtcttttgcacggagtgtcttttttaagaaaagactttgattgatgcacttgttgtgctattcaggctgcacccttaggcatcttttgcgcggagtgtcacacgcgagggtagtctatgctacctgtcgc

SEQ ID NO: 21081 - DNA, 337 bp, Zea Mays
cttttcctaccagaataagctaccatgcagtagccgacgatgcttgctaggaagcatctcatcgcattggcttgccccgccatcatcatcgtcatcatcgtcgccactgccgtcactgtcctcgtcactgctgtcgtagtcaccgctgccgtcatcgttctcgtcatcttcgtcgtctgaggagacgatgcccatccaatgtccagacatcgggtcatcatcgttgtcgaaggactccacatccgatgattctccgtcgtacgtccaagaccagtcagagtctagctccccgtcaatgaggagctagaggtcatccccattggtgaggtcactgtcg

SEQ ID NO: 21082 - DNA, 583 bp, Zea Mays
cttttttgtgctttggttgggtatagccgcctctgcctaccgtgctgtgtgctttattttgcaggctcgcaagcacgttgttcctccagtggacgaataaagctgtggcagggcacaacgcaaatggattcgttcgctggaccaccgactatgtaaagaatcggatgactttgaatcgtctaagtgggcccacccacgcgcttgggcgccgcatccacggcgaggaccgaagtgcccccttggacccgctcgctggtaaatgtttggtccacaagtgcgacgtacacgagttacgggtacaaggccacgagtatagatgtcgtgacccgttatcacgacacaaagcacatttttttttggctcgaaactagcccagcctgaacagttacaggcccgcccgttgagccagcccgagcacaaccggtattagtcgaaccttgttaccaacccgctccacaaagaaaacggcacaacccccactcccccggcgccagcggcctagcccacttaccgcttgcccgctgcgactgtataagcagaggtgagaggccagagctaaacctaaccctaacgccactctgcc

SEQ ID NO: 21083 - DNA, 580 bp, Zea Mays
cgcggctaggcttcaggaccggggggagtagcccaccaggatcgcctgggaggagcacggtcccctccaggaccgggaccttgggccgcctcgagggactgacctcgttggcatcagcagcccatgggcctcagtcaacagccgaggagtcgaggagggagagaaatatctccgagggggttggtgacgttgacgtcatgtcagtcgccctcgacccctccgtagacaggtcggggatggcctcgattggcattgacggaggcgcaacagccaccttggcagcataaatctcctgaccagtctacccacccaaggcaagcctggcctcctcagcgccccattgaagggcctcctaggtggcatcaacacaggcaagggagtgggccacgactccgaccgacatcccatgcccatcttcacggccttggcaggggtgaagatcagcgtgcccgaattgcagttcaggttgaggcatgaagaagtaagaaatcacacgaagaacttagaaacagggatcaaattttgttaccagttagcgacttaactggaccaaggcacgcctatcgtcctaggctctcag

SEQ ID NO: 21084 - DNA, 775 bp, Zea Mays
gctgttgtccaccaaggattccaccatcaaggagttgcgtgcttccaagaagcttgtcatgcaggagctggaggccgcacatctcgctatcaagacctaggagaataaatgtgtcgctttgaaggctcagcgcgacagggccatggataaggccgttcacgctgggcagatccagatgaggagacccagtgtcgtggtgcctgatgatatcgtcgctgatgtaaggggcatgacgccgcaagccgtccatcttcctctgttgcccctgcaaaggatgtcgcctgcagggatacttcagtgcagtgatttacctgaaagatacttgtttatcgagttagcatcttttagagaaaagatgtaatatgagttatgtatgtgcacaacagttatgtttgaactgattgttccgtgggtagggtgctgaaaaacacccctggcactgtaagcgaaatatttattttttcgaagtactcccaatttgagttggttattttgctattagggtatagtggtcaccctaaatcatgtgagtgtgagcatgtcgcatcgacttaaggcgtttccgacttaagcagattgctctgttagtagggcatagtaatcaccctaagtcaagtaagcatgagcatgtcgcaccgacttaaggcgtttccgacttaagtcgattgctccgttagtagggcatagtgatcaccctaagtcaagtaagcgtgagcatgtcgcaccgacttaaggcgtttccgacttaagccgattgctccgttagtagggcata

SEQ ID NO: 21085 - DNA, 285 bp, Zea Mays
tgaagagcggcgaagcaacgagcacactcaacaaatctttgtgtttggatttatcgagagaaattaatgatagcaaatcttcaagatacgatgatgatcggtgtacgcatgtctagtcactagccacacgtatatcggttcacttttagaaacttagtacacgaaaaagtcggatggtaaataggttacaaattgactaagatgatggggttacatttgcgttcctgtgacctaattttactatgaacatagccatagcttgaagtactggtgcttatgtttatt

SEQ ID NO: 21086 - DNA, 337 bp, Zea Mays
tacgacgaccggctgtacgtgccaccaacatcgccgctcctgcaggagttggtggcggcagtacatgaggacgaccacgaaggggtgcaacgcaccttgcatcgttttcgccgagactttcacttccccgacatgcgtcgtgtcgttcaggattttgtgcgcgcctgcgccacacgccaaaggtataaatcggagcacctacatccaacgggcctccttccgctacccatcccaacagctgtctgggcggacattggccttgacttcgtggaagcgctaccacacgttcgaggcaagtcggtcatcctcacggtggtggatcgcttcagcaagtact

SEQ ID NO: 21087 - DNA, 300 bp, Zea Mays
cttgacaccttctttgccatattgatacaagtactgaaatcttttatcttaccaatgtcttccaacatcaaatccaagcagtgggcagcacaaggtgtccaaaacaaatggggcatcctatccacaagaatcctacctgctgccttgaaattggccccattgtctgtgacagtctggaccacatactccttcccaatcttgttgatttgcttctccaataaatctgccagcatttgagcattagctacctcacttgaagcatcaacagactcaagaaagaaggtccctgctggactgttg

SEQ ID NO: 21088 - DNA, 363 bp, Zea Mays
tccgcgagcgtgtcgctgtcagtgaggtgaggccgtgaggggaacaaaggctgaggacgggcataaccgacgggtggcagaatagaggagactggggcaggggtagaaggcgagaggcgcaacgaagattccttcccgtgggtaggcagcaacgatcgtgtgccttctttgcgccgggatggatcgtgtgccgcacgcggtgcaggggtggaaggcgagaggcgcggaaggagagaggggcagaggcagaactacagtgcaccggcctatattagagtcttatagaatagtacagactatagttacaacttcatcctaatcctaatctattatagactgagtccaacacaactccaaacctca

SEQ ID NO: 21089 - DNA, 1179 bp, Zea Mays
acacgattaatagtagatgataggggttagcacataaaaaggaccttcatctacctatcacgtgcagggaggggttaacgtaggaggagcaggggacgataatggcggggtcgatgaattcggcgtggtcgttggcgacgaacagtacgtgtggatcgacgatgagcagagtggggaactccggtgatgtctagcaagcgaaattccggtggcaccggggcacagaagatgacggtgtgtggacgaatagggaacggatgacgatgaggtcgctgggtgagcttgggcatggcgatgaagaacaacgatgatgtcgtggcttcaccgatagtgctccgacgaggaaaattcacagacagcagggcgtcgacggtgaaggagcacagcagcacgccacaacaatgacgccgagtaggagtggcaatcgatgaacgagcagagaactcggatggcagcctgcagcgcacggcacgacaataaggaactcagagcacgaagggagagaagcgaggcgagtgacttagcagctggagcaagtgtcgagcagggagaaaagggatgaagctcagcaccatttataggctggtagaaggaaatcatggcctcgaatttgattgtcgtagagaaacgtcctcacgaaatgccattaatggcaaggagaaactgtcatcgcagagaagaggagtggtggcggcagtggtggagagtacgactgggttggggagatgaatcggacgagcggtggtgagtgctccataacgccgggaggtgaagcggtgacggcataaggagcagggcgcgctagacggcggcgagatttatagagcacgaaagggagccagggcgtcgacagccattaatggaggtggagctatgtagaagaaacggttagcagtagtgaaagggagaggagcggacgacactcgggggaggagaatggccagtgcgcggtggtgttctatggaggtgaggtggaatccgcggggagccgaaccggcgttcactatcgatggccttgcgtgcaaacaggcagaacgaatcgagagagaaagagagtcgtgtgggagaaagaaaagaaaaggaataaaataaagagaaataaaggtggcatccacgtgcaagagagagaagagagagatgcatgcgattggtcggctaggattttgggtcataggtgca

SEQ ID NO: 21090 - DNA, 942 bp, Zea Mays
ccgccagtgatctcacacccggattcgcgccggcatcgcgattcacgcctagttaaacgcagataacaatccttgggtgaaaatctggcgctgaggatgagcttgggacactgtttcgccctggtcgccgtacccactcgccttatggccggtccagataacctcgccggagttggccgcctgccactcaggtgccacgtgcctaggtgctctaccacatcgcagtgaattgccttagcatgtccgttcatcgccggtggtcatgccacggtgaaagccacaaatcacttgcgccagtgacctcccttctctccggccgccagtgtgcctttccaaaattgggtgccaccgcccttggacactataaattggtgccccagcctgctccgctaagtaattgtgcacccagtgaaccagccctcacctccaatcgtccctcacagctccccaatttgggatttcccccaattctattctctgcgccgccgtgagtgagctcaccatggccagctttctgcaggtccgttcacaccctcctcgctcttgtttcagcactcttgtgttctcttgatgcttctcgacccagccaattgagctagaacacgtaggatcaccgggaacaccttgaattgtcctcgattggcgccatcaccgtgaacagaaagatttcaagctcgaatcatgcaattagttgagggattagtgtcaccaagagtggaattaggtgtaagccgaaataggggtccagtctttgtgttttccgaccggtataggctcgctggagccactgctccgccgtccacggtcggggatctcaccttgcgaaggaatagaaagggaagggcctatctgcgaatgtcagtgacacagagaaatagtgcaatggcctctttaagggtttttaaaataaccagggtcctctgtataaacctgacaccgcgg

SEQ ID NO: 21091 - DNA, 847 bp, Zea Mays
ctaactcattttatgaatataattcactatctggacctcacatcaatttccagagagttcagggtctatggtgcaaatattttaagacacagacctacctctgcatggacggtgggttagttctcctaaaacagaggggcttatgtgcaaaactgtcgcggccgattgggtacgggtgtttttcggccattggatcttcgtcagatggcacagattagattgctacatgctacgaagtggtatggaaccgggccatcggatcaacgttcaacggtaacgatttaaaatacgcccgatttgatcctacccttacgtcgatgttcctacggtcagcacgagatcaggccgaggcggtgcaatctccctaatctacaccgtccatcccaaatcagacggtctgaggccatctccccaaatgatcccgacggcggcggcgtagtccctcgcacagcggcgcccacaaccgaagccaagcgatccgaggccccagtggaatatccacccactaaataggtctacaccgtatggccagcaacgtgaatccgaggagggttatctcaccggcgatgatgacgcgacgatggctggccacggcgaagtccgagcgcacggtggagcttttcctccgacgaccaattcacaccactccggcctcaaaacttgcgtggcaagactacggatatcatcagggtgttgaggcgaagctccctcaatggctcaggtcagccagacgacggcggttgcgtgctttagccacgacgggttccacggctacggcggctctggaaattaggtcggttgcggacctagtggagctgcgagaagtggtgaggtgggcggagagtac

SEQ ID NO: 21092 - DNA, 518 bp, Zea Mays
cacgctgggcccctttgccagtcgcacccacctcgcgtgagacctctgccgcgtggaccccgcaagtcatccccgacctccagtaaaatcgcgctgcgccgcagcggaactccgattttgtcgcgcgcgttcaagattgggcgggggtttccgggtccatggcatctatatctatgcccgtcctccctagagtcgctaatcgtcctgtcgttcacgcgaaggcgtctccatccgcgccgccacaaccgcagacaaatctctccgcgctgccaccatcgatcctcgccacattgacgcactgcccccggggttagagccccgcaccttgcttagtcgtgtggagtgtgtgcgcggagccaattgagcttggaacatcgtcctgactcaagacgtcgccgccagtatcccctcttccaccgtggtgcgtggtcacggcctccgacatcgagtcttcaggtaataagcagttccgatagtccgttttcgcttatggatcacgtaagaccaattagaagttt

SEQ ID NO: 21093 - DNA, 638 bp, Zea Mays
tgtgttcacaacaactagcctctttatactgaagcgagatcggataggccactgaatcacacccgtgatgtcttccctcttgtccaagtcatttttaacataaaaccattgcttcatccatgagtctagccatttcagtcaaaaagttgggatagggcgcctagcatccaaaaatcgatacacgaaagtataacaaccaaagttaatatgatactgctctttcctagtagcttttgtttgatataagagctcgtgaatattgcaaaagcagtcagcatctggttctaagccttgactcatcactgcctagatgaagaccccaaccttaactagagctttgagggtaagttgatgaaggtatattttgaatattaaccaacatcttatggagaggaaaatgcagcccaaccttcaaaagcttcggtaaataaccacttcatccttttcgagaagaggaacaatgttctctccattaggcatcactaagaatacatcatgaaaatatttgcctttcatagcctcaatatgaccccttttcacaattgatttcccaaaattaacatggcttgatctccatggtcgatcttcggcatcattagcatcactcctgaagtcaaaatcctcgctatcctcggaat

SEQ ID NO: 21094 - DNA, 286 bp, Zea Mays
atttaaactctgagtttgtgaaccagtacccttgcatcggcttccatggtggcgtatacattagggacgacgacgagccagagccattggagacggtggcagcagacatggagtttagcacgcaaggtttaaactcctccgactttgtgaaccaataccattgtgacggcgcctatggtggcgcatgtatcagtgacgacaagccacaaccattggagacggtggcaacagacgtggagttgactacgcaacatttgaactcctgctttgtgaaccgataccctta

SEQ ID NO: 21095 - DNA, 525 bp, Zea Mays
acgttctccgtgtggaagttttccttagtcccgaatgtaactggttgcgcaatgctcccaaggggatacactggttgtgggcccactctggagaatgggtgtgagggtcctgcagctgcttgaacgccacatggctgatgacgttgaggcctgccccaccgtcaatcaacacatggtgcagccgcatgttggcgatgacaggggcggtgatgtgtggtagctagtatgccggcccctgccatatagtcagggcagtcggatgcctcgaaggagatggtggtgcttctccatcgttgatgtggggcagccttcgggacccctggagttgccgacaggatctcacggtgcagggacttgatattcctacgggaggtgagttcctagctcccgccgtacatgacgtatagcttcttgcggcggtcgctgtcctccccggagttggaatctccagtgaagacgtccttgaggtctcccttgggtgactgatacccgagctctcgttctcccgtggccacttcgtcgtcg

SEQ ID NO: 21096 - DNA, 442 bp, Zea Mays
acagttcactcgcctactcaggttagttgcataccgatcagggaacatcaacatcttgatccactgcagtacttccttcctttgggccctgctgaggacgaaatcggccttaggccttctccatgtctttccaccactaggcggctttcatctcttggtttggtctatcacataacgctgccagatccactcttgcctttacattatcctttgacttatcaggaatgtccataattgttttccaaagtgcctcggcgacattcttttcagtgtgcatcacgtcaatgttgtgtgaaaggagcaggtcgtcataataggggagccgagtctagcctgacttatgtgtccacatatgctgctcaccatatcccacaaaaccaccttctggattggccacgagcccatctatctgttgacgaatttcggcaccagtcatcattgc

SEQ ID NO: 21097 - DNA, 1259 bp, Zea Mays
acaaaaaactttgaagcagtccattacaaaacagtgtctagaaactacttctacatctgtagtgacgtaaccggtgaaacagaatcttctcaacatatgcaggatcacaaaatttggaataactcttaacgatcattttttatgaaactttggttgtccaaaaccacattacaggggctaatgcatataaataagctgttgccgttcaaggttttaagcatagtaatccaatgtagaaagcacattcaagctaatgtatgtataatctataggtgttcagtaatttaaatgatgcattatcaagtacatgtgggattggatttgggaaatccaaagtccaatttaaccctgcctgctttggatgtacatgaatatgatctgtttggatttggacatccaaaaccatgtgatcaaataaagcaaaatattcattggattgcaacacaaaaagtccactgtccattggaactagctggacttggttttacagtgatgacaaccctctcttcaaatgctacatgggggagagaatcaagaatgggtggatgagaggggcagactagactttctcatccgaaccatcaagtgacccccatagaccactgacgtcaaagatgaagcaagataatggtcatttcacttgtctctacgaccatggcacagcctggcgtggtgttccattgaataggtcactggagtggagtgggtgacataccaagcacaaagcaaaggcatatgcagggtgatgatgatgctgtagtgatgggccttgaggtagagcacggaggcagtaacgtagcggagtgcaacaaacagtagctagacagtataggcattgaccacatagaggtaatacagacaccaacagctccgggccaggaccatgctgtgaatctcaagatggtcatgacttggagttctgcagtgaggatcatgtggagtgtccagtgcctgatggatgaaggctaacattggagtttcacggtgagtagttttgcggagagctctggctggagatctgacatgacagatgagatgagagagtcagcttcgcttggtgttcaagttgcccgtgatggggaaggggaagaggaagacgccttgctgagatggttggatcatgataaatgtgatggctgatggttggatcatgatggatggattccaacttgaggggcttggattggattagactctaagcactttgagatatgtttggactggatggtggactttctgtagtaggattctaattaatt

SEQ ID NO: 21098 - DNA, 379 bp, Zea Mays
gcgagagtggaggtcgtgggtagagggagagtccgctgaccggagggtcgtggggttggggacggttggaacgcacatgagttcgctgaccggttgggtgaaggcagccgttggggacgaattggaggacgccactgcgctggaggccgccatggggaaggaggagttcgagggtgcgctggacgccagtgtcgcggccgtggaggagacgcgcgtgctggagccgccgccggccgtggctgaggattctcgcggccgtcgaggaggcgcgcgtgctggagccgccggcggctggtggaggaagctaggtcacgcgtccctctgtgggctggacgccggctgcaaatgaatgggcctcagatccacaaaatgcattagg

SEQ ID NO: 21099 - DNA, 831 bp, Zea Mays
ctgggggacagcaccagctcattggcggcgcaagtctggtgcttcgtcgcaggaggaaagcagagtacctcgacattcccctcaaggacaacattaaggggtggcgtatcgagtggttcattgtggagaaccactgcaagtcccccctcggtcagggaggcagccagatgtccgcacaccgagttggatagaatctctgaccccttcagagataacagaggctaaagtactgcttgccgaggtctgcttgctgaaggatagaggtctgactgctgaagctgtggttgctgacttcattttcaagaacatccagccgttgaaggacagggcctatcctgcttatttgtacagtggtgttaatgattctacctgggtcacgaacaaaaaaattcccactgaagatctgatgagccgactggacatgatcctgaggggtagagtttcaaatgctggtgctcctgtggcctattctgcatggaacctgccaccacttaggccattctctgagtttgtgtccaatcctcctgctcgtgacagtagtctgggtcttagagtgtgaccctcttctgaggacattgaggctttgattgccccactttggagtcttctagaggatgagaagcagactcattttgagatgtcggctagcactgatgacgcggagatagatgttgtgcttagcttgttggctggggaatcatccgactcaacccacaccgagccaatggctatcacagatgggcaagaacttggtgaagaggtggagactcagaaacccgaaggcgccgcccaaagcgtccacgtcgagtgagccgcccgactgcacttgtt

SEQ ID NO: 21100 - DNA, 629 bp, Zea Mays
gcttgctacctgccaggcagcttttatatccaggcaggccatcaaaatcctacacgagaatcgttgcctgggctaggcaagttttcagtccttgcgcacaccagcagcagtgatgattattgcagttcggtatcaaatgtcaatccacattttcgtggtgccatgcaactccagagtttcctgattatttgattttcgcgcatttccaggtagccggaagtatctttgtagattgatgtggtgctaagcctactgcacgatctatcgcaatgctaaataatccataagccaatgcttttcttggtgtgctgaataatctactgatggtgatggttgtgctgaataaatgtatatcccttcatccttagtatgcatctgatatctgagcttcaaccactgatggcgctatcctagtccaatttttcttcaatggtcaagattattcctcctttcccatctaaatttgacaaatgaccagagcagcatctgagttggagggatagaaaaatctcagcgaaggaaggcttaacagccatggcttacccccctccctcttcattcattttgtcgttctagtcggttctctgattcaactgttgtatattatttatctttaattggctttattt

SEQ ID NO: 21101 - DNA, 426 bp, Zea Mays
ctctccatcttcgcccaaattgattgcgcgcaatgaaaacacaacttcttacgaccctgtagcctcaatccccaaccccaatttcaacccgagctaccgcgacgccgatttcccccaaactggtccgccgcatcgcaaagaacagcccacccgtggctgggtcactctggtgagttcctattcaattcaagtgtcgtttccatgcctctgtatgcttgcgaagttcatggtggcgcccgtttgctttgatcaaccatggtctggcgggaacatgtactcccgtgctcggtttccgccgtgcacttggaccggtcgttctcggggtgttcggatcaaattagtgtgtgttccgaggccgtcgtaggccggtgaagcctctccgttagttattccgagcagtcatcgccggccatggccggtacggac

SEQ ID NO: 21102 - DNA, 513 bp, Zea Mays
gcggaggatcgaaacatcgacagttggcacgctatgtagggggcttgcgcgttctcgataaactttctagtctctagatggccagccacgacgctgatcggatccttaaggcagcgattcgcttcgggaaccttaacttcgtccttgacagcgatgaggggagggtcagaacccaaaaagcccgaccccttcctcctaggaatcttgacgctaccatcagggcacatggcggccttgtgtcgttctcactcccggagtgatcccccgtttcaggagtctcgacttcgtcatcaacaacaacggtgatgtggtctgggtgccgcctgcccagccctctccacccgagagcccatacactgttgcagaagcactcaatggcctgaacctcaccccacgcgggcaagatgctaggcaataaaactgttccatgtgatcgatcaacgaagagaccccggtcacctgcgacacaacaagcactgcctgttcatcctatgagaccagggtactttccac

SEQ ID NO: 21103 - DNA, 349 bp, Zea Mays
tttcaataaactttttgtggtccgataataagtacatacatcatgatactttagggcttcagttgacgatttggtgaattcactgtagatctaagtagtccatctatacaaagtcctggcaccaccgacatttatgagataggtatttggcgtggatcaggttaccctaatggcgctagccccaacgacgacaacaacgatttggccgctgtgttcggctgcattaccatttgaaacatcttcatttaagggtgttgcccaaagattatgttggccagttcctcaaggatttgtctaggctcctagacatggaacgctgcttgcgtgtcttttctcaatattttggttg

SEQ ID NO: 21104 - DNA, 336 bp, Zea Mays
cagtgatctgatgctggaaattccaattgcaggtgggaggagcttaacgaggctgtttataacgcgctggtcaatgatataatgaagccaaaaatcgaggaggtgggcgtccaatcttgactgatcatcatctcgacggtctaaacatacatgtattagttacctataggtttgttcaggtggataatgttcgctggacttgctctgctaggtgtgtttaagtgaatgatgtccaggaagtagcagctcagttcgactgacttcgaatgttgcattgcagattgatgagctactgtcttacggtgtcaatgtgacggtgtacaacggccaggtcag

SEQ ID NO: 21105 - DNA, 526 bp, Zea Mays
gatgaattgggccacaacttgtttaccaaagaataagggggtctaggcatccttgatctagagcactttgcaagagcgttaagacttcgatggttgtggcttcggtggacggataaagataaagcatgtactcgcttgcaactcccttgtgataaagcagatgtcgatctattcaatgcatccacaactataacaattggaaacggcaaaatgactgatttctggagatcgagttggattcggggtcgggcgccaaggaacattgcaccaaccttatacatgaaagcaaagaggaagaatatctcggtgtgccaagcccttagaaacaatcgctggatgcacttctgctctccttacatacaagatgatgaaataaaagaattcatctccctctggcaaggtatcaatagcatacataaaatcaatgatctcgatgatactattttatggtggtggacagcgaatgggaaatacagctcaagcagcgcatacaaaattcagttcacgatgattttttgtaaaatca

SEQ ID NO: 21106 - DNA, 298 bp, Zea Mays
gataagtcgcttttgaggccgaacgacatggaggtatagcagaaagcactgaatggagttatgaacgctgttttttcctcgtcttcttttgccaagctaatctgatgatacccggagtagcaatccaaaaaagacagcacagaacatccagcggtagaatctaccatctgatctatcctaggaagcccgaagggatcctttagacagtgtttgttgagatccgtatagtcgacgcacatgcaccaatccactttattctttttgagtacaagaacagggttggctaaccactcaggat

SEQ ID NO: 21107 - DNA, 557 bp, Zea Mays
cgaaatattgcctagactcaggcttcccacggtggacggcgggttgaataataaaaacccgagggtttatttaacaattttacaattttaccaggacgaaagggtaacttctgttgtgagccaaccgatcaaattttagtggctcagattagatcagcgtgattgcgaaccggtacgccataggggccctcggatctagatccaacagcccgggttttacacaactgagttctaatctcgtccgctcattcggatcaaacggcacagatccacccacagaactggtgcccacacattcaaatccgagccatccctctgagatccaatggcaccgggcacgtctcctttcccagctacccagccgacccaaactacggcggcgctcattgttcggccaccatgccccgccggagcacggtactgagccaacctggtggcctagaactaagtgaatccgctacatgatttgacgacgacatgatgagcaggttagtagccaacttaccggccgttgaagttgtggttggagcttgcccaaacgcctcgcggcggctcgg

SEQ ID NO: 21108 - DNA, 576 bp, Zea Mays
atcttcgagacgaccgccaaccccaaggggtccacgaccgtcccggcgggcgcgtccgacaccacaagatatatggctaccaccctcgatgggctggccgttatgatagtagggaggatcagtgcccctcccctgagccgccgggtccacgggtcttcagcactggagagcaccattcccaccccggttttgggccctgactactatcactaagtgtttaggggaaatgaagctattgctctagctcgctgactaccaactgatctgcctgctcgggggaatgaattatgacagcctcatcatctgtaaccttcccctctttctgtccggctctgcccaagcctggctcgagcacctcccgccagcacaaatccatgactgagaagacctagtcaggatcttcagggggaacttccaagccacatatgtccgcccaataaactcatgggacctccaaagctgccggcagaagcacgacaaaagcctctgcgaatacattcaccgatttttgaagcagcggatcgagctccccaacgtcaccaactccgacgtcattggggcattccttgctggaac

SEQ ID NO: 21109 - DNA, 640 bp, Zea Mays
gaaacgagcaccacgggcactcggctgattggtctgggcgggggcaggagtagggcgaatgaacacgggttgtctgaagggatatatgggtgggcgaggagaagaacggtttggattgaaaggtcggattaccaaccttgttctcttttcaggtccctaagttgatctttcacccgcatatccttttgactttccttgtcccgcatttttggcttcaactgacagcgttgtgctgacagccctgctatatgtgaggtccagacacgttgccatcttgcgctggagtctgtcatttagtcccctcatgaagcaattcttctttttcaagtctgtgtccacttgatcaatagcgtattgggagaggtggttaaatttattgagatactgcatcacagaatctcccccttgcctcagacgtatgaattcttccaacttcatctgcaacatgccttccgaaacataatgttccctaaatgccagtttgaactcttcctaggtgacttgatgtcccgcaggctggatggcagaaaaatttgcccaccaggtgctggcgaggcctcttaactttgagcggccaataggggcttctttgtctcggtgcatcggattagcccaaacttttgttccatcgctcgcaccc

SEQ ID NO: 21110 - DNA, 486 bp, Zea Mays
tgttcatcgtgctttaattcttatgcacagaaatggaacattctccgcaaggcagaataacagagctgggtgcaaagggtaacggaggacgtgatggatcggctataattgctgcagacagttagctgaataacagagctatggtggcagtgtgtcagctttgaatgcaatgttgggtatcttacctttctggttttgcttaaggaagagggagtttagagagaatcccactttaaacatgtaatggcataactcaatgctaccctttgtaagctggtctccccagcaaaacgttgctttctataaagcagggcctatcggtctggagtctaaaaaaacttgttcacaaatttcaatcaccaaaatttatagccagtgataatttcattattatgaacaaatggcacaaagttcagcatgtcaagacatttatactctaatgagcaaaagtatggctccataacatttatatttccatgtggtgta

SEQ ID NO: 21111 - DNA, 361 bp, Zea Mays
gattcttggtcgggtactctagaaatatgtggctttggcattcccatccccatgatgtcgatgaactcctccgggtcatcttcctctagctcaacatctgcaatgtcctcatcatctaggtcttcgtcctcgtcagacgagtccgtaaaagcttaatcaaggtatgagttggtaaagactagtacttgctaagtaggtaatctcatcaaaattatgcatatcataaagcgtaaattgagttgtcatggtgatttgggaacaagtagaaattcaagggaagatgtccacttgccttcctcacataaatcctaagggtcttcttcaaattgttcctgatcctctatgacagaagcgtcttcta

SEQ ID NO: 21112 - DNA, 680 bp, Zea Mays
tcttcgacctttgagggcggcctgatccatggggacacttcggttcttgctgttacatgcgagggttatccagcccccaagggtatgattgaggataactcagcccctgagggcgctggtgagggtggctcagccctcgagggtgttgttgagggtgacctagcccccaagggtgctgctgaggatgacctagcccccgagggtcctgaacttggctcttctttggctgcttctatggatgttcatgtcgagtaaccaccagttcagtttgaggaaccaacggtgacaagctttgatcttcctacagctcttgctggcccggtcactttagaggtcagtgatctaggtgttgaggatccgctgcatgctattggagttgaggtcccactaggtgtcgcctggggcatgagctttaatcctcctctggggctcaagtctgctcttgatattggctccaccagtgtcccgttgtttgatggcaccttagcacctccagctttgggattatacctcgccaaatttttattttttcttattttctgttctgtttatggtttacttgctggtcctattagctctattcttattcttatgcttacgatgccttttgtagatagctcaccttaggcacaccgctcataagttagtgattcccttcctgccccctcgccttgcgtaac

SEQ ID NO: 21113 - DNA, 589 bp, Zea Mays
ggaggatgtgagagggattattcaacgccctatatggtctcgcttcggcattaggaggccaaccacttcccttgggaatgatatacaaacatgtcaggcgaccttcaacacggtgtgtacttacataggcacaagagacttggtccaggagcacattgcttacagagtgtggacacttgcaaatgggtgggaaatgccgaaggaggctgctgctggatctagccaaggtggtttagtctacctgaagtataccttcaggtacatgagccaatttgatgaaccgaatgatgactagctaaatgccatagaagcgactagcgacgagctgcttggagcatattcaaaagccgaagatgaagccatgacaactagcttcggggctcgtggaaaaaagagattaaatagagtgttcgatgttatcgggtttgtgtacccgaactactgctatccttcacgaaaacaagggaaaaagagaaaactgctgcctcggcgacttctagtgcgtcgaggtcaaaaaggttaaagttttgacacatcggccccagcgcattgaaacggtcgatgtgccgaagctaattgaaggggccgc

SEQ ID NO: 21114 - DNA, 454 bp, Zea Mays
gattaaatacgggataaactgtaatggttctagcaatgtccagttattgtgttcattatcgatcaatactaaaaactaaagtactaataatgaccacaaagtgaaaatgcaacatacctatcctaatttgtacaaatatagctagaatcaaacaacgttacatcaatatgagaccactcgcgctcaagaaaaatgtaatcatatataaaacgcacgagcataaaaacgaacaaagctgattccctcgagtacctcgcatgatgccatttgtacatagactactcaaacggatcgatctatcaagagaggaaggggccatcgcaggaagagtgccggcagatttggaaaccatatgttagatcagtccaaggggagaagaaaaacaagatcaggcacctgggagaactgggtctggagccaatggttgacatcctcgaaagcacggcgaaggaca

SEQ ID NO: 21115 - DNA, 373 bp, Zea Mays
gttacagtcaggcaccctgaatcggtcgtggcatggtacagtgagtgaaaaagatcagggattcagagcacttcgccgccgacgatcgtgcgtcgtgatctgcgtgatggttgagatgtgtgtgcgctggagcgtaaaaatattggcggggagggtgaaaaatcgtcgaggggtgaacttgggccctgaagcaagcttgttgtagcaccacttgcctggtgtcgtggctgtaggatagtcgtcgttgatccatcgattctcccggttgtgccacgcggtagtccattcattactttgcagtagttgtggcggctatcgaagtataccccttggtcattgggtttccagagcgccacaatgaataagctctggt

SEQ ID NO: 21116 - DNA, 313 bp, Zea Mays
cttggttacactggtgtgtggggctcgtctgtcagctacgtctccctcccttgtaccggactcaggaccataacaacgctgcgcggatccctcgctgccgcatggagcacttcaatagaaactcggactcccctaccatgtgggtcccacacaacggctgtccctgcaacctcggcgacatcaaaacagaaaccgcgacggctaaccgaattcgctgctgcttgccgatcctcgccaggttgttgtatcttgcatgtgtcgcgcgcaagcctcacaacggattcgccgtggaaggcacgccgccccaatctcc

SEQ ID NO: 21117 - DNA, 394 bp, Zea Mays
gaatttggaaaggtgagcttcatccaatattctctttctgagctcgggattcttaggaacaaccaattggtctccaaaccatagaattcctttgctgtcctgacggaagcatttgtatttgtccaccttttgttcgatcatttccttaatgacttgtacacccttgtcaccaatctatgccaagactatctgctcatgtaaagtgggctccactgaaatataactcaaggcacctgaggaaacaacttctatgttcagcttgcataactcatcgcacagagtggcaatcttggaatccatactcacacagttgcactgggccttccggcttaaggcatctgccacaacattggccttgccaggatggtaatgcacttccaaatcatagtccttg

SEQ ID NO: 21118 - DNA, 566 bp, Zea Mays
gagcgcggcgaggacatcgacccctgcgagtgcagattcaagatctgccgcgactgctacctggacgcacagaaggaaggctgcctctgcccggggtgcaaggagcactacaagatcggcgagtacgccgacgacgaccccaacgacgcgtcctcggggaagcactacctgccagggccgggcggcggcatgatgaacaacagcaagtctctgctggcgcggaaccagaacggcgagttcgaccataatcggtggctcttcgagagctccggcacctacggctacggcaacgcgttctggcccaagggcggcatgtacgacgacgacctggacgacgagggcggccccggcggcggtggaggcgacggtatgctcccggagcagaagccgttcaagccgctgacccgcaagatacccatgccgacgtccatcatcagcccctaccggatcttcatcgtcatccggatgttcgtgctcatcttctacctcacgtggcgcgtccgcaaccccaacatggaggcgctctggctctggggcatgtccatcgtgtgcgagctctggttcgc

SEQ ID NO: 21119 - DNA, 1014 bp, Zea Mays
attttgtttctcattaaaaatcatttccagatatcatttatccatttcctatgaactctggattgggcgcattaatactgagaaaggcaggggcctcggggtaacttctccaagacacagtgcacaatacccgcaggacggcaggtactattctctaaaatcgtaaggtccctattgtaaaacgtacccgcgaaggggtacgcgctgatcctagccgcacgatctaaatttgaaggtgcagattagatccccactaactcttatccgcaatcaccaaccggccaccggacctagatccaacggcgaggacctagtgaggcgcacagggtcgccagacctaatctgtgccgaccggtggccgatcgacgcaccagattacaccaacacgaggagatgcacgagttcggatctggttcgttcatcaacctgccaatggtttgcagccagcccctaagtgatgtaatcttgacccttgttttgtaaatgaacggtaatcgtgtgtcttctccaaaccgcgcccagacacggtggctcgagcgcccacgacggtggacgcctaaacctatcttcacccgccattaccggctaccctgcgctcgcccaggacctagcacgagtgccacaggggaggttggacggccacaggagtgctcccaactatgctaccgtcgtccccaacccaacgcgttgtctacctccagccggttctctctcttctctcttttctttctccagtcaatttgccgcggccgagcgcccaagacacgttagcgaattgcccgagctcgccattcgagcccccatcctacggtgcaacccttcatctccccaaactccctacgcatcacgctaacaatggtgaactactgagatgtgcttttaccagcgtttggggcgaccccaggagatgaccgcgcgacggtgtttcttcatggcggggtaccggtgctctagcttgatgtcgcagaggacgccagtcgccacgcgcgttgaagaacctgggcacgctccccc

SEQ ID NO: 21120 - DNA, 826 bp, Zea Mays
gtcgagtgggcgagcgagcgcggcttgagcgggggcgggtgagccggtgaggtgggggggttggggcgcacgaacggacgtgggatgttggcgcatcaggcggagggacgaggcgcacggacggacgttgtagatttgatgatatagatggacagtgtagattcatggaaggcagaaccaggggaggcaagctaccctcttgcagccttaatatagtagtgtagattttaaacttgtttctacaaattgtttgtcgtcctctattttacacactctaccggacagtctcatgagaaatctttttaagcgaaacacataaatgatacattataatagacacttatacagtgataagggggcctaatttttctaagggagaaagtaaaaaaacgggaagaaaaaatgggtcgtatagttgaatgcatgtttcaagcaatgtaaagccctcactaatttgccaatgcagcagcagtgtcactcctccgagcgttcagagccttcgtcgctgtcgttgcaagggacggtgtagtggatcacgacacaggctccggacgacagcctgcacgaaggattcaaagcacaaccctcaataccagccctcgatgccactgcgtcaagacgacgacggggcaaaaaacaagaaagcatcgatcgagtgcattaccgagcactgacaaagagttcacagtaggttcgggtaaagaaaggccaccggcggcacttaactttccttgatcttgacgagcttctcctccttcctgaacgactcggcccctatggtcgcggacgcgacggaggcgtcggtgaacctcttgctcccgtcctc

SEQ ID NO: 21121 - DNA, 718 bp, Zea Mays
ccatctgaagatcaaccccgacgccaggccgatgagtcagaaacctcgcaggcagtccatcgaacggtaggacttcatccgaaaggaggtccggaagctgctagacgctggcttcatcgaagaggttcatcacccagtgtggctggccaacccagtcaccgtccctaaggcgaatgggaagcttcgaatgtgcatcgactacacgagcctgaataaggcctgtcccaaggacccgtatccacttccacgtatagatcaaatcgtggattctacctctgggtgcgacctattgtcattcttagatgcttactctggtttccatcaaatccagatgtctagggaagataggaagcataccgcttttgtaacagtggacaggctttactgctatgttgttatgccttacggtctgaaaaacgccttgccaacatttgtgcgggcgatgagtaagactttcgaggacctaattagggacaaagtggaagtctacgtcgatgacatcatggtcaagactaagagagggtcgaccctagtggaagaattaaccctggtctttgacaagctgcgggcaacccgcacgaagctgaacccggacaaatgcgtctttggtgtctccgctgggaagttactggggttcctggttacgtaccggggcattgaagcaaacctggagaagatcaaagcgatcgaggcgatgaggcctccggcccatatcaag

SEQ ID NO: 21122 - DNA, 273 bp, Zea Mays
gacaagtggcagtgcgggctgtgtggcggtgaggaagtcctctcccatgagcattgcgtccatgactgagtgccggcccgtgctcgaggtcaaacagcattgcaagaagtcagtggatccatgtctcatcccatgtgatgcggcagctagagctaggagattgggaggagcaaaggaggtcacaagggagcatgcttgttggtgatgtgaggaagacgagtggtggtgtgggctgtgtggcggtgaggaagaggaaaaaggctccactatctc

SEQ ID NO: 21123 - DNA, 475 bp, Zea Mays
gtacaagctctagcgtatctgacgtcaatgcgtgtgcggccatcagggctacgacaacacaacaagccttcgtaacaagcacaatagacgcaattgtggctcggtaattggggtacacgataaatccacgcaacgtgcgcaacaggcgtaattgtggctccggcagacagacagtgcctacagggcatgcaaaaaatacgcgactcagcgatgacagtctgactcaacgggagtgatccgattaatggagagcgcgacatagcaatcacatgacgcagccaagttcgaacgacacaaatattgtgtcgtgttgccagggcgcagtcaatattcagctaatgccataactcagccgattaataacgcagcctgatcggcgtgtccgagttcccactatacaatttaatcgctcggtgtgagtccgaaagctcaacgcaacacaaatattcagagcgatttgagtatgcgcactata

SEQ ID NO: 21124 - DNA, 276 bp, Zea Mays
gcccaaagcaacgggcgcacggcctatttaaccatgcgcggccggatcctatcgtgcccccactcacgcttgggcagcccatttcattttcttgtcgcgcggcccaaaccgggaattgggtgctgacaggtaggtccatatgggcggtctccaacttagagctgctccgcgggccccgttgactggagacttaatcgggcgcccgtgtggacgttgcgctcgcgcttgtttcgctgacttcgtgggaccgtcttgccagggccttctcctccgtga

SEQ ID NO: 21125 - DNA, 629 bp, Zea Mays
gaatggcaaacatggcgggcacaccgttgggcgattctcgcgcggcacccacgaccaccctggaattcgattctcgcgaccgactcgctgctagcttcaaaaacagaacctatgtctcctcttgccctcccttttcgcatctgttctatccaccacctccgccgtggtcaagcaagtgcgctgcgtgattctcggtcgtggggtccccgaatcgggcggcttggaccggtgaataaaaccctggcattccgtgaaccacgttcctcactcgaccgccatgaactccgcccaagtggaaatgcgagggagacccaccgccgccgtgtacatctgcgccgtgagggagagaggaaggtgctcgcgaggccgccattgaatcgagcatagaagccccgccgcgccctaagtatagtgtctgggagctcgctatggaggtttggcgaccgggggtcatgtgggtgctcgtcggagtccaagaaccatggcaaagaggcgccatcacgtggagcggagcccctgcgctgccatcctccagtaaaatcacctccgaatctccgccctcagcactaggttgtgtagccatcctgcatacttgacctagcgctcttgatgggaatcgttcatcggag

SEQ ID NO: 21126 - DNA, 636 bp, Zea Mays
tagaatctcgggcatctttgttgcttcttcagtttttgatttttcagccttatcttcgtaaaccctcatttcaataagcttagtcgaaggcgccttcggcattacagccggctcttcaatcttctgtgtgggaggaacaggttctttcgcttcagtaactgaagaagtttccccgccaaactcaggcactatggccggttcaatgtagcgcggtccgtgggtaaggaccttcaactttttcctcttcggcgcaggctcgcttggagcagccgaagcagcaacctttccagaagttgcaccctttcttttctgcccccgtggcgggtagcgatagtcagggtacacaaatccaatagcatcaaaaaccctatttgatcttttctttttttggctcccgaagaccgcagatagtgcattatcttcggacttggaatatactccatgtaactcatcgctagtattctcaacacacttcagccattcatcatctggtttgacaagctggtctccaaacctgaaggtgtatttcaatcgaactagaccaccttcgctagggttagtgatggtttctcttggcatttcccaactgtctatcagtggccatatcctgtaggctacatgttcttgaactaagtc

SEQ ID NO: 21127 - DNA, 422 bp, Zea Mays
aaacaacgagatagagctgataatgatggatcttgtatcccttcttaggcgctgcatgatcttttggcatccttatcttgacttcttgtcccgtctaatcaaacacaggccttgacttaggttgcggtgtagcctggtttgttgtcgtgtgtagggtgcaacggacagtgtcgtctagtcttctccatttgtcccttcacacctcggtaacacacaaggcacaatggaagtcatcattaagggagcccaaacggcgaattgggtcaatgcccttgtctcgttaacgtgcggtaacaataaaatttgcacgttacaggcctaaggcgtcgcgtgcatttaatgccagggaaacactacctgctacttacgcgggcaagtatgtgtctcatctgtactcaatgatagcgggccctatgtcagag

SEQ ID NO: 21128 - DNA, 684 bp, Zea Mays
tgtatgcatttttgtaggatgtatgtcaccactttgtcagaataaattgcattttttgtcaacattgtacaccaaaatgaagtgtacatgcaagtttctagatttttctagctacctaaggttttttagcacttattctttagtaaaataacaaatacttacattaatagttaaactagttctacaaattgcaccgacacaaaacatcatggtacacctccatcaacaccccaaaaaaaggttgaaatgatttagagaaactggtgctataaatgtaaataaataaaagaaaaatacaaaaatgattgaaaaatgtaaacaaaaccaaaaaaacctacctatcccaagctcgaacacaggacgccagggttcacagtagcaaggagttaccattggactagtcacgtttgttcgttagtaacagagcgcagttatatttaagcatcaactgttctctgtccaggatgtaaccgagcgcccaattcagagttctgaatgcccagttcatattctgcattttcagattgtaaactgcccagttcagatttctgcatttttttgttatgcccagttcagagttccgccatgaatgtgtccttttaaggtaacgacgatgtccaatgtagcataacttgttccttattgccatagacaacggattcttgtcgcaataaatgcataata

SEQ ID NO: 21129 - DNA, 480 bp, Zea Mays
ggcggttctgccactggaaccgagggacaataagatttgtgttcggtgggggatgctaacgcagactcactctgaatggtgaatcactaggactcaacaatggatctaagactctagggttatactggttcgggtttgcaccctactccagtgtagtgctgattattgtattgctttgagcgtgttaaaacaattgtgcttttgtgggaagaaagaggccccctacccttttatatctcaagggtagaaccttacaattggacttgtattgtactggagagagaaagagagagggagggagggacaaagatatgcttcccgagttagcgtggtgggtccttcgtagggtcgtgcgtagccatactcccagcatggtgtcgtgctttcccgctgctctggctcttgtagcgagtccatcgctgatgtcttcgtaatgggttccacgaatcagtatcaaagtgcagtcatacggggtgtggc

SEQ ID NO: 21130 - DNA, 1832 bp, Zea Mays
acaaagcatcatacacggaaagcatagctggtattttcttcaagtgcgagattacatcatacttgaccgacacattatgagtatggtcagccacatcactcggagtgacatttaggggatctttttgtggaggagatggtctagctaattgacggcctgatctaagcttaacttcgtcaacttctagtgtctcttcttcagggaagtgaagagactcttcatcatcctcaaaaactccgatggggaaagcatcatatcttttatgggagttgtcctcgcacctctctacattttggtagatgcgcgggccttcaccctactctatcattcgttggagagcaagtcgtcttgagagttgctgttgacgctctcttgatctttgggaacttgatgatccaccttttggggtgtggatccatcgtaagaaagccttgccttcatgctggcgcttagcttgctgttgtggataccttgagaaagacatattaacatgctcaggttttgatgtcataaatttgtcataagttggccacatttttagagttgcacaactcaccggatcactttgaactgtggcgacatttgaggtagccgttttcttcccgctcttcatgcttttgagcaaatcagcatctatagtaccatcgtctatgagcttttgtatgatattcttaaccacgaaacagtctttgagagtgtgacccaagatgcgatgatagtggcagaagtttggttcatcaactttagaggattcttcgggtctttttggtttagggagctcaatgagtcctaggtcccgtaagcccataaagaggtcttccacttcttcagcagggaaggaaaacttctgattttgacgctcgctaagagttggcctcctagaagctgatgcaccccctttatttggcaatcttgcagcagtgcccccagtttggaatttgtggggagctactgttgcttccattgcttgcatttgctttggcttggaaggtacttgcttatcccgttggttgtttttgtcaaacggcttgttgaatgcccttgacggacgagacacatgattcatgtagttctctatatccgttgccttcgaggacaactcctcaaaagttattggtctcataccttgcaaatgaatagccatgtccgggctcaaattattcatgcacatccgaactgcctctggttctgtgattggttgtgggcaatggagacttaaattcctccatctatttatgaagtcagcagccttctcatttgccctttgcatggtttgagtcagttcggttatccccactgtcctttgagtgctatagaagcgttctaagaaagcctcttgcatttgctcccatgtacggatggagctgggtgccaacttactataccaagtgaaggctggacctgataatgtctatacaaattggcggaggagaagagctccattatgtgcagtatcttgacaggcagcaagaaaatgggccacatgttcatgtggtgacccagttccattgaacttgctaaattgtggctaccgatagttgcttggaaaaggaaccatgtcaacttccgacggatatggtttcacataccctggacgcatggagtagtgtgtttgcatgtattgcgcccttacgccctcagaaatcatcctttgtatgcttttgagggagatttcaggtggagggtgaggaggaggacctccttggctagttgaggcattggcatcacttgttctatttctggtgttagccacttgctcacggagggcagccaactcttcttccttttgttgaagtgcagccatcatttgattcatttgctcttcaacggac

SEQ ID NO: 21131 - DNA, 516 bp, Zea Mays
gtggttgctaggcgggccgtggcgcgggtatccatgcccgagaagaaggtggcgccggcgccagcggccgccgccggcgaggtcaaggaggtggtggtcgtggaagtgcacaaggctgcggcggcagacgcgaagaacgtggcgcgaggaccagatgaggagttggacgacgacgacgacgaccacgacgacggcgcggagggtgaattgttggacgaggagcaggagacagacgaggaggaagaaaaagagatgctggatctgcaggatcacatggccattgacgacgacgagcaaactgctccgcaccaaggcaaggatccgtagtccccagtccccaccaccactgtcgtagtagcgtcttcgcaagattcacttgtcggttgaactaataatgacactgtgctcttcaattgctgccgtattgcagtggacgacgacgacgagcaagatcttgagccaccgacaaaaggtgcacgaacacctctgccaatttcgtccctattttccccctct

SEQ ID NO: 21132 - DNA, 809 bp, Zea Mays
caagagtttcaaccttttcaaacgcaatttgctctattgccttttcttcaattatggcaggctctgtctcagggggcactgaaggcccagcttcaatttcagcctgaattgttgtagcttcaacttttgcctgttttgttttagctttgggttgcgctttcgaagtttcggcaagtttttttgaaggagtagagctcaaggtctttgctgtctccagcacaacatctaacacatttgccatccttctcctcttaggagttgtggcagaacttttttgtgccttcggcactgtcacctccgatgaagggctcaaaatttttggcacttttatttcttcaatacttgactcttcagctttacccttaccaaccttcgtttcaactgactcaaccaaaggtgcctttggcattatagctggctctttagtcctctgcacgggaggaacaatttctcttcattcaacagctaaagaggcctccccgtcaaactcaggcaccacagccggttcaatgtaacgcgaccgatgggtaagtaccttcatcattttgcctgcagccttcggcacaggctcggctgtggcggccaaagcagcagcttttctcttcttcccctgtccccgcagcgggtagtggtagtcggggtagatgaagccgatggcgtcaaaaactctgttcattctcttttttcctcgacctctgaaggctgcagacagcgcattatcttctgccttggaataagctccaagcagctcatcacttgtagcttcgatgcatttcagccagtcatcgtttggttcatcgaacttatcc

SEQ ID NO: 21133 - DNA, 341 bp, Zea Mays
cgagaggaaccgttttgccaaacaatttgttaaaaacactagcttctatagaggagctgctcttgaagagaagctagagccggagtcattttcagaggaactgaagtcgtgctaaacaagccctcagtattgttagccaggctctaatctttgtcatccgttccagccatgaaactgtgtcatgctgatgtgaggaatgatgatagggtggtcaccgattcgtgattccacggtcacttcgtgtgggcctcacaggatctgtttatctcctactcatggagaactcaagcagatgcatatcgtaagtaactagcaaccctgaattctagcttctagttgat

SEQ ID NO: 21134 - DNA, 477 bp, Zea Mays
ctggtttaggaacacatgctggctagtcgtgactactgtccacacatgttgcacatctgtgccaacatgagcactggttgttcgacatcgacgtcgaccacatgtgtggcctcctatcgctcctcttttgccgccttcttgcactccatttcccaatggccatagatgccacacttacgacacttccatttgtggcattgggtgctcatggatgtgagtttgactcttgggtcgcgtgcaatactgtgctcgcctgatctctctttcttcttggaatgtacatcgctcttgttgccatatgaagatgacttcgtcaacatgcaggtcttgttcttggctgcctagtcctcctccatgtgcagtaggcgacccaccttgtccatgacctactccattgaaggctcgaatcgatctttcatcgcacgaagatgacccaccagctgctcgagcgaaaggttctttatgtcgtagaacatc

SEQ ID NO: 21135 - DNA, 539 bp, Zea Mays
tcgcttggtgaaactctcatgcatagccgagattcagggttcaagagggagtgcctctggtatatatactggagccagggagatctggtcatttgaatactttgtttggcagcgtcgttcggttgcagtggttgcggtgaaatcttaatagaatgaagatgagatcctggcgatacgaccccactagacggtggcaccagcttacatgagggaaacgggaagtgtggcattatatgaagtgtacgcatgtgtgcagttatcgcggatatgtctgcgtgtgcataggatcgagataggagggctagctggtgaggagaggtcggcggaccccggctgtgtcgcaatagccgtgattctagttcggactgaaggtaagggatgagtctgacggtgaaggcctacccaccagtgactagagcacatgctttacaaggctgagcaacggagcccatctaccagtagtggtgtatgcatgtgtggctgggacagtggcccacacggcaacatgtggacgtagggaaggggaggctggactttag

SEQ ID NO: 21136 - DNA, 469 bp, Zea Mays
agtcattaccttcaaaatttcaaccacttcgacatcagttggcgacggaggggttctctctgttgcttcgtcgaacttcggttcattagagggtttttgatcaagcttgggcttcttaattgttgccttcggctctggcgctatttttgttttctttagggccttctcatcttcttttattgagcgagaagcttgcctgctcaggatgctagcaaccctttttcttttcacacctctagcccctccatcaaacctctagtaatctgggtattcgaagtttaacgcatccatcacccagttcagccttcatttcggccgggtacctaaggcagcagtcatttgttggtcctccttcttcatatatttgcccaaaatctcattgcacatggtttcgatcatttccagccattcattgcatggtttcttgaactatttctcaaatttgaagcgacaggggagctgaacaagc

SEQ ID NO: 21137 - DNA, 753 bp, Zea Mays
gccggagtcaccaccaccgtccttgtagcctgaacgcagacggtgtttgttcttctcaagccagtcctcctcggcgagaaggagtcgtcctgccttatcgacgaggtgttcgacctagtcgtcgaatcgatcctcggccgcacgcagacgccccaccagttcgtccaccgagagctgcttgagatcacagaacatttcaatcgtgacaactacctgggtgaagcgcgccggaaccacccgcaggaacttcttgacgacgcggacatcttccacgacctcgccaagtgctcgaaggttgccgacgaggttggtgattcgcatcccgaaatcttcgaccgattctccgtccttgaacttgatgttctcgaactcttggagcatcttctgggcgttcacctccttcacccgatctgcaccgagccgcatcaacttcactgcctcccacgcctccttcactgtgctgcgcgcgccaagagactgccacatctctttcggcaccgagcgcaggagcgcgctcatggcttgacggtcatgcgccctcttggggttgatacctggactgatcacatcccagatctccagcgcctcaaagttacactgcattaacatcgcccactcggagtaattatcacgagtgaggagtggccacatcagtgaactctccttcacgccgccaccggaacctgatgcttgattcatggtgttcgacggctgtcgtcgagggagaacacgcttcttcttcgccggttctcg

SEQ ID NO: 21138 - DNA, 366 bp, Zea Mays
gtcggtgtgagcaaagaggtgggagcgttatgagaaagctcggggaggtcgggatcggatccaacggggcgtgtggctccattttatagagaagagggaggatagaggatgccaaggaaggataaggaaggttagcggctggccatcaagcgccattgatggcgttggtttggtggggagagagtgggggagaggaagagggacgactggccgtttttggcacaatgacacgaggcggtgagggaggcgagtggccggggagagggagaggcatggggtaggctacgcagcggggcgacgctgctacatgctcacgcatgagtgcctaaggctggggtcaggaccgaggagggcacgaggccaggg

SEQ ID NO: 21139 - DNA, 625 bp, Zea Mays
gccgcgaattcctagtcgccggcggcatgagctgatgccgccgtttggatttgtgcggtgacacataattcactgtaaattactcaaactactagcaatagctagctagtgcagtacagtatacttatatgattccatttgatgcgtacggtctacaacgtgtaagtactagtatttagcgttgccaataattagcgacagggcacgctccggcagcgagtggtgctgttgttgttggcggtgtgctttagtgagcattcatcattaagtattgggtttacgttcaaagtaacttcgctgggaactttaagcttgtggttgaattcagctgggtgaccactaccgctgacatcaaaagtccaagcctgtaatcgtgaaaagctgatgacgacgaaaagatgaaagcgtgtacaagcatgacatatattatatatactctatgttttttttatctgtcgcgatggaaacgtgccggttaaactttgtctaatatgcaagttttgcctcattttttatgcaccttctcgaagaaatactgattaattacttggcatatgtgcacgtacgtgtgtaagaaaaactacagacaagatgtattaaatgtgtgctcctagtagtattttgc

SEQ ID NO: 21140 - DNA, 804 bp, Zea Mays
gctgcatcggagtctctgctgtgattcgccccttgcgaggcactggtgacctcgactgatgcgggcataggagactcgtgaaggtggaggatgggcgtgtcgaaacaaagcatcagtgagtcttcacgaagtgtaagaagccatcgccaaatcggtatggaaaggtcccatcttcgaagtgggtcgcgactggatcggggtacccgtcgcgagctacttgcgtcgacatctgggtcatgcattggagaaggggacctgtgggacctttttgagggggaagagttgaggttgatgttgtttaattttcgagaggcaggtcttattccgaaggaggagccgatgtgatagtatgttgccctcgccgttctgttgcgatattgagtgaaaacgctgccctcccctcttcgcaatagaactgcgatggccatgctcgtgaggggtaaatattgtgtatagtgtatactatgatgtgttgtgtgatggtgtctttgagcccttctcttgttgttcatttgtgattgtgctacgtaatttgttttgcctattgcgagtttgctgcaatcttaggcaattttggtgtggctaggtgtgtacgtgtcataggtgactccgcgcttggtaagtgatcgtgcatctgttgtgcttatctagctgcacccttaggtgacttttgctcggatgatgtcttatgtaggagacgtcgcaccctatgagtggtgtcacatacttttgtttttccggctgcacccttaggcgacttttgctcggatgatgtctttgtggaagactttgcaccctatgggt

SEQ ID NO: 21141 - DNA, 555 bp, Zea Mays
gttggtgcattttgggagtactaattctttcatcagtaacactttggctgctcaattacctggtcttctgcccttacctgtgccagcgaccgtcaaagttgctaatggggccatgttactgtgcacgtcttatataccagattgatcttggttggttgcttcattcacctttcaacatgatttgaaggtgttggatctacctgttgttgacattgttttaggcatggactggttggaacttcacagcccaatgaaaatcaattggggacacaagtggatgtctttccctaacaaaggtcaaatcatttccttacatggagttgatacagtacccacaagcaacgtgtttgtgaagttaattactctctatcgagcacactgttgtttccccatatgctcaatctgaacaccctcctgacattgcttccttgtctaaatttgcacacttgtttcaggggcctagtgtccttcctccttctaggccttgttaccacaccattccaatagttcctggtgcccatccagtcaatatacgttcgtaccactatccaccag

SEQ ID NO: 21142 - DNA, 350 bp, Zea Mays
caaagcatctatttaaatcatcaaaggagtcatccaattggatgtccatagtctcattctcaccattgaaaagattgtcaaaatacctctgccacttgtgtttgatgtcttgtcctttcaccaagagttcatccatctcatccttaatgcatttaacttggttgaggtccctcgtcttcctctcccgaatcctagctatcttatagacatctttctccccttcctttgtacttagtcttcggtaaagatcatcataggctcgaccctttgcctcactcacagctcgctttgtagtcttctttgccaccttatacctctctatgttgaccgcgctcctgtcattaaacaag

SEQ ID NO: 21143 - DNA, 825 bp, Zea Mays
cccaaattcagggcgttacaccaatcgtttctccctccatgttttcttagggataaccattggcctatcctcgttaaaccacctgtcacgctcctcctctttcatcttttctgtcatttccatagtcctaaaccgctagacacgacgcttttgtgtatggcttaacccaggtggacaccatctcggtactggttttgtatcaggcgcaactgaaccatgattttttctgcccctcacatccagtacaccaccagctgaagctcgactaacaggacctgcattctgggcgacaccaatcaacacattttttctcctgcataaatccattctctaaccgacactcttgttgttcgcttattactgcaacctggttgctcggcccacgtgtgatgctctcctctacagtggccatccatcacaacaccgggaccgactacacgctgattcgcaatcatttcggtcctatgtttcctatcccagctagcagaattactcatttgccgtgtagccactacatcaagcttcatacgcttgcttctcatcccttgacctccaccactttgcggcctactctcctgtaatctgtttgtcccagcagcagctatgtgtccctgtcctatgtttggcttggttgccacttcttcgccgttctttgtgtaattctttgtgacagccacctgaccattttgcttcgccatctctgcctggagactttctgcagcatttaatatgtcgcactccactgttcccactatgatttttgagccgcttttgcccagcggctcattttgcccaccaacacccatacacagctctttggcatcc

SEQ ID NO: 21144 - DNA, 359 bp, Zea Mays
ggagctttcaatcatcctgtacaagcattggagccaccacctccaacccctatgactttaatcctgggctcattatagcagtaagagggagaagtgtccaccaatcttcgtcgatggccacaaaatggcattacatgtaggaaagcacaaaagaaaatacatgcacgattgcaggtgtttgggtagcagacacatgagttccaaaatctggggaaaaacaatcaagcctccatatggtttcaacttccaagccaactgactttcctaacgagacaattgcatttttgggacttcaaatatgacgtttcgcaataataccatccaaaacatttattttgtaaaaacaggacaataaacat

SEQ ID NO: 21145 - DNA, 392 bp, Zea Mays
agaaaatgatggctcgggtcgccgccgttagtacccaccttcgatggcgccatctcccctgtgctctgcgactagcttaggtagggtcgccgggtgtcaaggagtgtgtccgtggactgcacggatcggggcatcggcctggattgccggaattgcgcgtcgaacttccttctccgccatcgtgccgcaagccgctactgcacccgtgacactccaatcttgggtaaggactaactcattcgattcgttgcacgccctagatcgtttagcacctggttgggttgtgggaccggctcggtagcgccaattcgtgtgttgccggcgatgcgccgccgcacagttttgtcaccgccgcgctcgactgctgggattggggaagaaaagagcgatcg

SEQ ID NO: 21146 - DNA, 344 bp, Zea Mays
gaacaacgtgacaaggaggaggcggaattgctgcataaactctccgaacgacacaaggaggcggcagaaaagtatttgtcacacttcacggtggatcgccaccaaaagataatccgtcaaggggagatcgatatgaaagctctcctacctccacttcagggtcctgctgtaagtactccagatctatctcttatgactttcatggatcaacgaggagatcagttaaagcaatacgtagatgaatctattaaaatgcatttacgttcatacgagaaatcaactgctcctagttttccatcgcgtgaatctaatacagagccacccgcgccaagcgcatcggctac

SEQ ID NO: 21147 - DNA, 453 bp, Zea Mays
ggttgggagaatcctcgattcaggctgccggttaaagacggtggttagattcgagttttatttgtcaggttgcactagttatcgctgcttgcagcaagttatcttggcttctttgaagctagttatctgaagattgatcctacgtcgtgaagatcgggcatcgtgacgcatcactagggatctaaatctatgcgggtcatgcagtctggggtaccatagtcgaagcgaccatggggcggtgaacggtaatggtgctgaatcccgacaggggcgggagaaccaacatccagatagtggcgtgctgcgcactcagcacgcaattccgcaacctccgcccgaaccttgcccaactcgtcaagggcgtggtccaactctgtgttgagcacgacagccaagttgaccatgttgttcagcctaggattgccctcaccaactggcgaggcaatcacacct

SEQ ID NO: 21148 - DNA, 602 bp, Zea Mays
aaatgtcataccgaccttcggtaccaatcgttgatctatactatcatcctattcaattaatggagtcgtcatgcagtgcacatatatataaaataatcttatagcatggtgaatttctaggacttcataacttgcacggacaatataacaaatacatgtgtattcggtgacttcataacttgcacggactgtataacaaatacatgggtattcatttgaacttacatggctttggagaatgtgtggtgtgtcttggtcatgttcaccaattgtcctcatgggtatccgctgagttgctcccaccaaacttggatgaattgtgttgctgtcttcaagaattcctggcgtcggtaacacagttgggggagttacagcatgccagccatcggtcgtacagggtgccgtcgtcgccgtagcttctccacactgctccgatcccctggtcgtcgccatcatgtatgccctaactctcccagagcattgaacaaaagcaacggcgacggtgtgtagcccgttttttttgcaactattctcctatacttgcctaaaccgttctggccgatattcatggcatgatccaaatatcctgcgcgatttgcatg

SEQ ID NO: 21149 - DNA, 314 bp, Zea Mays
gtagactaggcgcgccgcgtgtagttaatgtgggggtacatcaccctctttttgacatgggcaagtgcacatcccgctgtgcataacgctggtgggccccatgctagaggcttaaattaggtatcacccgacagcttatgttaggtgtgcctggccacgtgtcggcacgagacatctgccttggcagggagtaggcccggggacgtgtggcgatgtggcacctccaagctctccctgactggggatccaaatcatgtttgagggggtctggcccctagccgttttggcccagacacgtggtggtaccagaccta

SEQ ID NO: 21150 - DNA, 920 bp, Zea Mays
gggttaattcttacaatcaccaggggctcttatgaaaaagtaaccgccgaaggggtatgttctatttttggccgcacgatctacatccaacggtccagatcggatcgtggacacgctgaacccgcacacgtcagatccaacttgcacggcccggatttaaaacaaccgcgatctaatccacaccgacgcttctggatcccacggcttggcttctattacgtgaaggggtatgtcaggttctaatcctgaccgctgcttctgagatcaacggccagcgcgtaccctccatcactgcctctccctccggccatccagcgcggcggcgccgcccgatcccgcggtggcgactcgccggagtcatgccaatccggcgagatgatggataattctcctccccgaaagcagctacgcgcagaggaactcaaggcgagcacagcaggagacaactcaccggcggttggtggcgcagggagcgttgtacgcgacgagggggcaactccacgggattgagaaactccggtgaggaattccgagtttaccggccgaagatcatcctcgatgcgacgacaaccatctccccggatccttcgtgaagcctcctagccaaccctcacgtcccgagcggccccgaacgcgagttcccatggcggcggctccctcttcaacgacggtggtcacggcggtgattctagcggctgcgagcacgggaaaaggtcgacagcacacgcctcaatatataggccgttgagattgcaacggattcccgaaaaatccggattgtgttggcttcaccccggatgcccgtggagctaacgcggaggacgagttcgatgagctcatcaacggggatggcgcgcgtggctgacaagggggccccctgtgtcggtgtaaggcggtctggtgctcgacgcgcgctaagc

SEQ ID NO: 21151 - DNA, 392 bp, Zea Mays
cattgggtcactggcgggtggctgtgcctgacaagagactgacttcccctgctggtcggtgaggaggactgtcttgtctgcgcaactgatgatgcctttgtgtttagttagccaatccattcctaggatcacatcaattcctttggatggcaagacggttaagtctgctaggaatactaccccacttaaaaggattctgacttgggagcatttgagctgacatagaaggtcggaccctagggtttgggtgaccaagggaatctctagaggagtagagggaatgccatgcttttccacaaaactagtggctatgaaagagtgggatgctccagaatcgaaaagtacggtggcggaagtaaattcaacaaggaactcaccgagcactactcccg

SEQ ID NO: 21152 - DNA, 1162 bp, Zea Mays
tctattgtcaatcctaaggttagtaacacgcctcagggaggaaagggccaaccaaacaatgcttcttgagggtgtttctgagccagacttcattttccacaagagctctgctatcttgagctatctcgagttgatgaagaatctccttggccaaccaccattgaccctgcacattgtcactccaactctgaagacctttggcagtggcctgaagcttcgaaggaagtgtcactaaggggcatgagtctgccaagactgaggtctaactagcagcaacaacctcctaaaaagtgaccccccaacttaggccaaaaagcttcgaaatgaagtctctttttaccatgcctaaaatcattcatccccaacacaaggggcaatggtcagagtcttgtgaagctgaactttgcaggagacagttaggaaaaagctcttcccaatccatagaacaaaacaccctaaccaatctgaccaatgtgggattaacctgcccattagaccaagtaaactttctaccacgaagtggtacttctttgagagcaagatcattaatccatcttcgtaatctatccatcatagctcggtctacatttgaatcattcttgtcttcatcttgaaaaatcaagttaaaatctccaaccaccacccaaggaccagaacacacatccctctcctccctgagttactgcaaaaactaaatcttagcctcatttccttgagggccgtatacacatttaagccaccaaggagaaccttctgctgagccaaactgaactgacactgagtgagaatcaattttgtaaatgccctgatggctgatacgatcacgccaagcaactaaaatacctccactggcgcccaccgaagtcaagacaacgaagttgtagaaaccaggacctaacattcatgcaataaggaaacgaaatacctcagtcatttttgtttcttgtaagaaaatgacatcacatctcaaggagccggctaaattcctaacaacatcctgacgagctccgacattaagaccccttacattccgtaccaaaatgtttgaaggatccatggagggacaaaacaactaccaataggggtggcgaaagctcaagcctctagggctggctgttcctcctggggagcaggaattgcccacccaaacaacgccgccaaa

SEQ ID NO: 21153 - DNA, 469 bp, Zea Mays
gttctgacccatcggccacgttacattgaaccggctatggtgcctaaatttggcgtggggacctcttcagttgccgaatcaaagcaagctgctccgattgtgcagagcgctgaagagccgactatagtgccaaaggtgcctacagtcgggccagccgaagttaaagatgataaggtcgcagagccacaggtggaaaaagtaacaaaagtgccagaaaacgtaaggccatcggcagaggcaaatttgccaaagatgcaaagaattcctgccgcaactcccaagaagaggaggatggccagcgtactagacgctgttatagagactatgaaggccttgaaccctgccctaagaaaattgccgaagctactgaagttcaggccgaaatcgaagctaggccttcagtgtccaccgagacgaagcctgccgtacctgaggaaaaaacagcagggcagattgtaccagaaaagac

SEQ ID NO: 21154 - DNA, 831 bp, Zea Mays
cacaagcttacattgagagacaacactctccatgtataacctaacaatccaatcatgctcgtttattctctcttcttgcggaggacaaagtcaatccgactaaagtgttagccactaatatagccacctttaactatgaggtctgcaaaaagatatatagttttctgaaacaaaaaatggtaacaacccaagcaccccaccatccttctctacactaaaactgactcgtattgcagcatccatagtatgtcatgtcacatactctctccattattctaagttataagacgttttagtttttctagatacatggcttttgttatatgcttaagtatacttttttactcgaacacacaagagagctgcgtgtcatttaattaataggtagaaaacgatatgattacatgctgaatcagcagcttggttagtggtttgttacacttgcgcccttgtacatatggaaacacagcctgtgccactcagttgccatgtaacaagtcgccttgtaacaagcctagtgcatatttagaatggaaattgaatgaattttttgtcatggaaaaaagacatttataaatatatagcatttcccgaaggatttgtagacatcaatacatcatacatggaacttgtatcagtatcagaggcatgggtaatttataaacaaatacatgcatgtgttcttatactgcgatatttgaaatgattgtagttgccattgcttgtttcctgttggtaataaacacctaaatgcagttaatttaggtaatggccaacattaacaaagagatgtacaaggttatattgaatgttgtgcctaagtcagaaaca

SEQ ID NO: 21155 - DNA, 397 bp, Zea Mays
ggctcggggcggtgctaggtgatgggatagaggaggaggtgcggcgcggagtagttgaggaggagacggccgattcttcttatgcgcagggttggtcagcaacggagcccgagatctccggcgagctccatcgcgagacgggcgcgatccgcgcggggcttgggcacgacccgtactgacgcaggggccccgccagccagcgaccgagcgaagaatgaggacgcgagagaaaagcggggaaaggacggtctcttacacgcgggtcccgcatcacagtggttagcgcgcgcttaagctgaatgacaggtggggccgtggtgtcagcgccgtgttaccgggtgggctgcgcgagttcagagttaggtgggccgatttcaggagattgagcccacacgac

SEQ ID NO: 21156 - DNA, 483 bp, Zea Mays
caagatctcagttgggcggatacactgctaataaaatcctgtggtcgtggacagataagcaaaaaagatagttcgccagtacgaacaataaaaagcaaaaagttgactcacctgaagattggaaaggaacaggggaagaccaaaagcaggaagaatcggtgcatggctcgatgaggggagattagcaggaagaatctcaagagcatgacttgggggaacttcagacccatcagcaggcggcagtcacctggcagtggcggacccacagggtatgccgggtatgcaccggcataccctgcaaaaccagtgccacatgcacatggtatatatatacatatagtatatacatggtatatatatgcacatggtatagtattttatttaaacaatttgtatcaagatttgtcgtcgtattgtatatagttttaccgaattgcataaaacattttttgtatcgcatacctagtggtcaaatcctaggtc

SEQ ID NO: 21157 - DNA, 365 bp, Zea Mays
ctatccatttagtgaatttgtcgattgctaccagtacgtgagtgtatcctccttgagctttcttgaaaggtccaatcatatccagtccccagcatgcgaagggccaagtcactggtatggtctgcagttgctgtgctggtagatgttgttgctttgacaagtactggcaagcttcgcacctctgaactaactcggctgcgtcactcttcgctgttggccaatagaatcctgacctgaagaccttcccgactagtgtcttgtacgctgcgtgtattccacattgcccagcatggacctcgtccagaagtcgcttcccagtagatgagagaatgcacttcatgaggacgcctgatgcacctcgtctg

SEQ ID NO: 21158 - DNA, 288 bp, Zea Mays
ccatgcgatgcaagccattttgttttattgtcaacgagactttagatgaaagacacactctggcttacgtcgcgagcttcttcctccacaagccaaccatggctataaaaccaggagccaagttgccttcctcctcatcccttctactctcgccaagaatggacaacaacactctcagtctctcaccatgctgctcctcattcttagcaatagcaaagaaagcgacgagttcatgttcgatgatgaaatggatgctttagagcaccacgtccacgaagaggagtctcg

SEQ ID NO: 21159 - DNA, 570 bp, Zea Mays
attaaatgcaggcggcgtgtgtagactgtaaggcctgggcacactagtaacccacacgttactgagacgaagaccatggacccattgcgacgtgcatgtgtaactcccatcatgactcttgttgttcccactacagcgtcaggtgaagggacaagcagaggggacaggacgataccgtccacctactcccctacgcaagacgacgagctagcctacatagttgccttcacccgcacgccgactagacaagacgaaggtactgtcgggcagggaatctgcacgatgaccaagtgaagagcttggacttcaggattaatagctccacactccgtttgttatacaattgaggcctacctgtcagggctcctcagtgcccatgtatgtgcccctttggctaaaaaagggagggcacagatgctacttagaaaaaacccactcacatggcacacacacacacttgaccggacgtaggcccatccagggactcggggactagacaaaatcacttaaatccccatagaggcatctccaactagtctaggctttctcaagctctcaacaatacaacta

SEQ ID NO: 21160 - DNA, 509 bp, Zea Mays
cccccgcaaaaacatgcgtcgaaaaaagaccgcgacgacggtcttcgacattcgaccaatacaaagtcaccgcgaggctcagcgatagctagcctcgcgtgcgacaaatccgcgcagaagtcgcctaagggtgcagccggactagcacaacaagtgcgaaaaccgaagtctaccgcgaagactatccgcgcagaagtcgcctaagggtgcagccggactagcacaacaagtgcgaaaaaccaaagtctatcgtgaagactatccgcgcagaagtcgcctaagggtgcagccggactagcccaacaagtgcgaaaaaccgaagtctaccacggggactatccgtccaacagctgcccgagggcacagccggacgaagcgtaacaaaagcaaaaacgaccacaccaactgtgcgcgcagagaccgactacatgcgcaccagtccagcataacaattacacctgaccaagtgtgtaacgccctcgcgagcacagccgaatgtgcgagggcac

SEQ ID NO: 21161 - DNA, 280 bp, Zea Mays
gcacaatattggagtcccactctgcgtatctgcaaggtctaataaaattagcttctagtagccggtgaattttgtccttgattcgtgggagaaggtctggacgaaatgttctagctttctatttgaaaggtttgaaaccggacttaatggacagtcgatgctctacgatctcacaacttaatcccggcatctcagtgtaattccaagcaaagcaatccgaatattctttcaatagaccgatcatttcatttctaggatcagtctccagggtcttgttcac

SEQ ID NO: 21162 - DNA, 499 bp, Zea Mays
gtcgttgtccccaagtgctcgatcgatcccgatcggccaagagaggttgatggatgtacgtgtgttggtggggttgcgttgcgtacgtggtgggtgggtggtgtaataacgtaacgtcgtcgggttcagatgcatcgatacgtacacgtacagtacgtgtgagcgatcgggatggtcaccatcatatatatcgtacgtacgcgcctgctctcgcacgggaaagtcggcaatgacatgtcgcttcgagatcgattctctccgtcgcgcgccgtacgtgtggtttgccaagttttacagctgctctggtggcaactgcttttcgaccaatgcaagggatatattcgaatggtggatcaataagctcactctcgcctttaatttaattagattgcgtttgttgcccgtggatttggagtgtaataactaataatacagcatgcatggccacagcccacaggccacggccggagagctcttgggttttgaccgcgcgcctcac

SEQ ID NO: 21163 - DNA, 473 bp, Zea Mays
caggagaaggaactccactactttcaccactagcgacgtactgccgactgttctttcgagtcagagggacctcgtcctcttcctccccgtcgtcctcaccagcaacacaggcaacacccatattggaatcagcaacagatgggagcacacccattagggtcagcagcagatgggagcacccccattgggatcagcaacagatggagcacacccatcggggttagcgtcagtaaattcaggcacatgcacttcttcagcagcaggaaccgaagtaccaacgtcccgatccaaactagatactcgccggaggcgtctctttttctttttctgctcatctgcgggaggatcaagttgattggctcggcaagggcgtctcgggcgagtactggcaggcttctggatatccaaggttgtaccagtttctgggagaggcgccaccaccaatgtcccagcaggagcagcatcagaagagt

SEQ ID NO: 21164 - DNA, 551 bp, Zea Mays
gcccagtcgccgttctgcatacgcaagggagagccaccatggtcggagtagggcagcgacctcggggactaccttggcaaggattggggtaagacacccatgcgacctcgccattttcccacttcatattttgacaattagcgctgggttgtgggcataggggctcttgctgccctcaccggccgtgcgccaccgtaacgggatagcgccaccacgggcttatttcacgtcgtagttggtactcccccctacagcgacccactggatcgctctctcccatgttagttgtttcctcgactccggatgtattgggtcgactcaacggtggggattctggggcgtcggtcgccgttgcaacgacgatctcaccatagggtagggcagagctctggcacctgggcgcttcggttaggaagaaacatcgtgggacatcgattcgtgagtgggtggtcgagattggtctaggaataacccttcgcagggttgatctggtctgtaggaactagatcggacgactacgatctgttggctgcgtaccgcttcgatgtgat

SEQ ID NO: 21165 - DNA, 354 bp, Zea Mays
gcaacgtggcagcaaatcaccgaggtgtcatgctccggttaaacggcgaccaccgcgctgtcaccggaatccgccgcacggtatgctcgccagcgcaaccgggaaatccacgatcctcatccgtcgccggccagccgtctataaatagagcgcgggcacggcttcgtcaccacattccgcacgtcagcaactgagcttttgactcgagctcaccggagagcccccgtagccccaaattccctcctcccctgttcttagctccgccgcaaaaatccttccgtggccagcgcgattcgagatagcttacgacttctacttccccgtttaagtattcccaggtaaccatgatgctcc

SEQ ID NO: 21166 - DNA, 792 bp, Zea Mays
aaaagacacgtttcatgttggtttgtggagagcagacatatcgcttaaatcatgcggacggagggagtagttgaaaggattcaaacaaaaaggttggatgtcgcggagagaagaaagctagtagcaataatttaagtttgaatgtagcataatatcatcttgattttatcacatgctcgtaaacctcaaccttatatttatacactatcttgattttatcacaagttttgtagggtctttgcatgtgtatgcaaggctaatcgctcgatactaaggcttgtttaggagcaagtgtattggaggagagttagacggtcaaaatctcttattattacgtagattttggtctccttaatttactcaattaaccttgctcccaaacttgccttcagtgtcttcgcatcatccactatgcgggtttccggtccatgatcgggtactatgcgggtttccggtagcacatattccgtccgcactagcgccttgatcgctttcattcttctttatcttatcccggtctggaaagttcactagtcgacggtacaccatacagaacatgcaataaataccacgccctcccatcgaatatacaaaaagaaaaccctgtttctcttttgaagcagtccttgtccttgaactcatctctgcctctgaaatggcatggcgtcaaacttacgcaaagaaacgaagcatcatccactactcggttgagactgagagaagagagccaacaacaccgcgcgccggtcccggtccggttccttccgagggtgcacgacagacagaactcac

SEQ ID NO: 21167 - DNA, 567 bp, Zea Mays
cttgagaggaggctgtgtaacgcgccaaggagaccgtcgctaagaaggagaaggctgaccttgtagccaatgccgttgccgccaaggctcctgtcgatgcctgtgcctgagtccttgctgcagctaaagccctggagaaggaacaagcagtcgtcgttgccctagagtgtgcggccaccactgctctcaagctagcttagcccccccatcgccttctttttagaggcagttgtgatccatgaggcccccatcgtcgccaacctccatgcacccattgtcggcgtccagaacatccaatcgcttgcctcagtcgttttggaccccctctccaactatacccgacggtggcgattagagaggtgcaccccggctattaatctacaaacctggacgactagatcactatgcggcctaggctgactttgggtgcctgacagcagcagtacaaacaatagcagcaaacttatatacaacaggcgttgttggctactgttgctgccccatatggcttacctcctagtttcatctgtcaccgccctagtgccaaccatgtagtcgcatcctgca

SEQ ID NO: 21168 - DNA, 563 bp, Zea Mays
ctcaagatgagagggctacggagcagggaaactacctgtagtcctgctgtcaggcacatagaggcggcggagcaaggactagtgcttccgtggctgcaacaccggccatttacagtacccccaaccatacctcacgccgctgctgggagcgaaaacaacgatgtacggagagctgggaaaaccggacgcagaccacaatctagccagcagacgacgggacgcaaatgatccggccaccttgctctcagtctctcgtccatccactagatccacaaatgccggctcatcccgtgtgtcacttggtattggagctagtgagaaatcgagcccaattctgtagtttcttaactaaaaaaaagctaatccaacgtgtgtcatcatttctatgtaagggtccagtcatagggcgcgtttgttaattgtcgcaggatttggccgcgcgtgccgacgatttggctaacatcagtcaaatgggcaatcagtgtgggggcaagataaatccaagaaccatcaaatggcttcaggtcaggtggcaggttcacaaagacagggtcaggactcag

SEQ ID NO: 21169 - DNA, 345 bp, Zea Mays
caagaaaagattgaacagggtgtttgatgcgattggcttcgtataccctgattatcactacccactacgaaggcaaggaaagaagagaaaaactgcagcttcgaccaccactgttgtgccaaagggcaagaaagtgaaggttctgacccaccggccgcgatatattgaatcggtcgtagtgcctgaatttggcgaagggacctcttcagctgccgaagcaaaaccagctgctcccatcatgcagagcgctgaagaatcgattgtagtgccgaagatgcctacagtcgggtcagccagagatgatgaagccgaagaatcaaaattggaagaaacagtgaaaatgcc

SEQ ID NO: 21170 - DNA, 445 bp, Zea Mays
gcagcgtgtcagtggttagtgagcagtttcagcagtcaggatgatgcggacgaagaatgtcaccccatcaggggaggagatgaccaagaccctcctcgtcccttcagacatgataagggcaaggacgtctatcttgagcagtagggaggcaataagaagaggaagttagatcgggctactcgagcagcagtagaagttgagagagcagagcagggaggacagttgaggatagactctgatcagatcgccttttgggtccgtcgcctctcgtcttggactcgctctacacttgctcgatttgacccctcagctccagtccccactaccactccaccttcctccattaccctaggttctaccactcctgagcctaccaccacacctcctatgcctacagcctccaccacacctgcttccaccgctcttgctccctctgccactccac

SEQ ID NO: 21171 - DNA, 606 bp, Zea Mays
agtggatagagtacaagaccattgcttctctaacttcagctaaggcagtggaattcatacatgacataatattcaggttcggaataccgaacagcatcataaccgacctaggatccaatttcactagtttggagttctttgatttctgcgaacaaaaaagcatctagatcaaatatgcatcagtggcacacccaagagccaacgggcaagtagaaagagccaacagaatgatattggaagcactcagaaagaaagtcttcgacaagaatgaaaagttcacaggaaaatggatcagagagttgtcgtatgtgatctggagcctaagaactcaacccagccgagctttgcatggaaacactcctttctttatggtttatggttcggaggcagtgctgcctgctgatctcaagtttggggcgccaagattgatcttcaaaaacatagctgaagctgaggctacaagattggaggatgttgatatactagaagaagaacgattgaatacagtgattcagtcagccaggtatcaacaaactctgaggtgctatcatgataaggtcatacgacatcgatcctttgcagtgggagatcttgtcctccgccgaa

SEQ ID NO: 21172 - DNA, 614 bp, Zea Mays
gagaaattgtcgtggtcgttgccgccattgcgcggggtaggaagggcagccactgcggagacgcgctgacaacaataatcgatcaccaacgaagctattcggtggtagtctaggccctggcggagctgcagaagggattaatcgagaggagagtcgctatagtgctgggaattgctcatcagagcgggttctccatcgccggtccgccatctacgtggccagcctcgccgtcatcttcaccgtcggtaagaaacccactcgcacgttcgttgttggctgcacaacgtgtagcatcgctttgatttgtgatggctcatcggctcggctggatggccctgcgctgccgtattgtaccctggcggggtagggagaagctgggggccgtcgatcatcatagggacggcgcaaattagagccttgtataccggttcagatgggtgaatccggtgcattgatgagctactggacgcgtgggattgagtgggataactttaaaaatgaaccgctggtaggataatgggtggcgcggatttgatcacaattattcttcgcaccgatctaatccgggccgtccagagaggatccaacggtccaacgccacccgtaccccttcg

SEQ ID NO: 21173 - DNA, 1204 bp, Zea Mays
cttggcatggcaagacagttaagtctaccaagaacactaccccacttaaaagaattctgacttgggagcacttgagctggcatagaaggtctgaccctagggttcgggtgaacaaggggatttctaggggtgtagaggggatgccatgtttttccacaaaacaagtggctataaatgaatgggatgctcctgaatcaaaaagcacagtagcgggagtaaattcaacaaggaactcaccgagcactactcccggagcttgctgggcctcttgagcgtcgacgtgattaactcgtgctctgccctggtactgggtcctgctctactgactgttggaggggggtgccttggaggcaggtgccgagggaatcttggggccattcaccgagttggagtaggtaggtccgggtgccttcaactgggggcagttattcttgaagtgactagggtctccgtagtgccaacaagcatttgctggcggttggttgcttgcaaccgagggggcctaaaaggagctctaactctgctgactgtaacgtgacggagtgggtccagctggtctattgaagcttggtcccttgggtggaagcccgaaggatcgagctctctggtgacggtcttgctgctgagctcgaagaacctggaatttcctcttgaggtgccctttttcttcctcttttgccctttccacttggatggctttgttggagaggtgcaagaagttgaggaaatcttggctggcgaggatggtcttgagttcaagtcttagccctttcagaaaacgggccatcttcctagtctcggtgctgacatcgtcagacacgtaacgagccaactctgtgaacttgtgcacgtactcactgacagatcttccaccttgagttagttcccggaattcatcttccttgagttgaacgatcccctggggtatatggtgctcacagaaagcggtttcaaattctgcccaggtagcatcccagatggccgcgctgaaggtatcccaccatgctagggccatcccagaaagttgatgagcaaccaattgaacacactgattttcggggcatccgatggcttccagtttcctcttgatcgtgcgcagccagtcgtcggcatcgaggggattgctagacccagcgaacgtgggaggcttgagtctcagaaattctcccatcctgtcctgtggtcttccaccacctgggcgctg

SEQ ID NO: 21174 - DNA, 684 bp, Zea Mays
gggaggtggaggggaaggaagaggtgtgggagttgttcacaaaagctcgatccaggcgagctaatgtgggaaccgagcacatgttagaccaggtgaaaaggcagtcctgtaactggagttcggcaacgccaaggtagtcaattgtgctattgaacagggagcaaaggtggttgtccaggtggccccggtttttgtcagcggtgcctctcaacatgttgaagtcaccgaccaacatccaaggacctgagatactggggaggaggtctgcaagttcagcaaggaaggttggagagtcttggtggttggatgggacatagacgttggtgatggtgaggggcgtgtctgttaggtgcgagctgaaggtggtggtgagggagaaagatcgagagatgctggacatgaggtcgaacacatcgctatcccaggcggtcacaacgccccctggaacaagtggcgttgaggcagaggaagctgggaaggtttttaggcagaaatgagcgtgctttgaaacagttgagctcgcaaagtttggactcttgtaggcaagcaacagagggggaggcaagggagatagcatcacgaacgattgtgcatttatccggatcgcctaacccacggacgttccacgatagcacattacaacttttacaaactagactcatgaccaaacaaacagaacaccaa

SEQ ID NO: 21175 - DNA, 1309 bp, Zea Mays
cagggatccgattgggtgatctgatttgacttcgccccaccctctgaggtagcagggacgatcacccgctccatcgacatttgtgcctcgggccaagacatcgacgcctcaggcccaggcgtcgacgccttcggcccactagatggctggttcgatgcccccgtcaaggacggctctgaccaaggcctcaccatggggctaaagctgagtcgaacctccatctcctcgtcatcaccatcatcattgttatcgtcgctagacgagtccagagacacctcccatggcagtccccccttctcctgcactcggcaccgcttctctacctcaccgtgaacctccctcttctcgtgagcttgcttcctctcctcatccttcttcttctactgttcttctgcggagaacctatacatcgcctggctcgccgcgtcctccaggaccggaggctcgacggatctgtaacccatcagcccgagggaacaaacggaaaacccggatgatcaggtcgaaacatagaaaatggggataaagcggaggcaagctcttcgacttaccaaagacacataaccctagtcagggctcatcgggacctgagtaaggatgtcataatcggccttacccactatgcccttgacccgcttggggaggtcgtcagtggtgagggtggccgatgacatctgagagctatccacctcggtctcgggcgtcatctcatacatgcgcaaccgttgctccaataacgacaacaccctccgacgatgaaaggcggcgacgactcgggcagcgataagaccatggtcgtggagtctccgtaaggcatctaggaggggctccagcttgagctggtacgcccacgcaatgccccaccgcctgttatcccctgtagcgtttatgattcgcctggtatacggaggcagcctgccttcatcattgcggaggtagaatcagggactctgccaccccttgtttgaagaggtaagagaggctgggatgtacagatgcacctgatctgaccgtagctagagtgtacaaccactggccctcaccacagtgtcgaccttcttcacctccgtcggcagagaaaagggctccacgtggaagaggtcgacctagagatcctaatggcggtcgatcccgaggcacccctcgcaaaccgccatgaaaatcactgcttgcacgatggagtccgggttgaagttgtggagtttaaccccatagtagttcggaagggctcgcatgaagtggctcgacgataccccaaacccgcacttgtggaacaacgcgaagctgacaacgtagccctctgacggat

SEQ ID NO: 21176 - DNA, 299 bp, Zea Mays
taatgtgaacatcaattatgaagacaaaacctagtgatgatgatttagtgtgtcaaaacctgtcgccaagtttttgtgaatacacatccattcgtacaacaacaaagcttgtagcacattcaattgttctcactgccaatagcaataatcaaaacaataccaactgctgaatgaagcctacaagcatggaatgcgtgttggcgtaaccataaaccctagatctggacgagttctacaaaatcaattacttgaatcatagaaaccacaatggatctgcaaggggtacctttttctcttcg

SEQ ID NO: 21177 - DNA, 380 bp, Zea Mays
atctagaaaggaaagagctaatctagggaatccttgccaaacataaccaacactaccaaaaccagggagggaggcagcagccgcaccccctagggttgtagccgaaccccctgggcccgtgggcctatacatcacgctaacacgcctccgcagtttgaacgtcggtgcttagccacagacattcagactggaccgaaactcagtgaacaccgaagaaggcagcctcttcgtgaagacgtcggcgaactaggatgtcgtgggaacatgaagaacccgcacggtacccatggcgaccttctcacagacgaagtgaagatcgatctcgatgtgcttcgtccgttgatgttgtaccgggttggaggacatgtagactgcgctga

SEQ ID NO: 21178 - DNA, 728 bp, Zea Mays
gggggacagcaccagctcgtggggggtgcgagtttggagatgcgccgtgggaggaaaaccgagtacctcgacatcccactcaaggacagcatcaaaggatggcgcttggaatggtttatgatggagaatcacgggaactctctccccctcggtcagggagacagcccgatgttcgcactccaagttggactgaatcccccacagacctggaggtagctgaggtcggggctctgcttgccgaggttggactgttgaaggagaagggtctgactgccgaggctgtggttgccgattttgtttttaagaacattcagccactgaaagacagagcgtacccagcttatctgtatcgaggcctcactgattcaacccgggttaccaacagaaggattcttgctgtggatctggtaagccggcttgagatgatactcagaggcaaggtgtcgaatgttggtgctcatgttgcgtattcagcctggaatctgcctcctcccaagacgttcattagttttgtgtcaaatccccctgccggggatagtggtatgggtcttagagtgcggccctctcccgaggaggttgatgctctggttgctccgcttggtggaattcccaatgacgagaggcaggttcattttgagatgcctttgaatccaagtgatgcagaaataagtgccatgctggacatgttggctgaggattcctctgattcagcccctgctaaaacgctg

SEQ ID NO: 21179 - DNA, 397 bp, Zea Mays
tttagaaatggtcaatgattaggtatatagttgaaacatctagattgctggtaacaaagtagccgagtaatgaaaggagcaaaaatatttataagcattatgtacagtttgaaacacttgtacaacacagttaacaagggaaccgagtagtggcggatccagaaatgagttaaaggggggctgacttcccagtgacgagtggcagagacaatacaatcttcttttttctccattttaggcaactaaaaagaatgataattaaccaaaaacacttcatgttaggcatgagcacatgttatatttgtttcccataatcgaagccatgcccattcgcagtatcatgagaattgagaaggcatgagtatcatgatacctttggatagatgccatgtttgtt

SEQ ID NO: 21180 - DNA, 344 bp, Zea Mays
aagaagtccaccccaagctctaggactccaggtcagtacctctccctccctcccttccaccagatctcttgatcccagcaagaattttcttggacctatcggcgagttcatcgactcatgatcagaacacggtagcaagaatatatcttctgcgattacacgctgatggctctactccttggctccaggtgttcccggagccacaagcatgttgtcccccgatacagagaagaataggaagggcatgtggatccagatcgatggtgtgcacgaggtcaatcggttgttgcaccttggagaacggcgagctcgtcggcgtgcataaggtcaatcgactgccacgc

SEQ ID NO: 21181 - DNA, 510 bp, Zea Mays
cgaacactcgataagctctcttggaaataggggcggtgcctgggataagctctatggcaaattcaactttcctttcaggtggcatgcctggtaactcctcagggaatacatcagagaattccgacacaatcctaattgcctcaatcgaattggactccttatcatctactgataaatggtggcaggctccttcttctagttcaggtaagtacagcttggttactacttcctttccagatggggacaccaacttaacggttctcttgtcacaactgacaatggcttgatttctgtgtagccaattcatccctaggatgacatctaacccttgagttcccattactactaggctagcgggaaaaatctatcccccttatttcaatccttagattcagacaaatcctatcggactgaacttttcccccaactgaattaactcttaaaggtggaatcattggttctatggggatgttatgtgattctacccaagatgcagaaacaaaagaatgt

SEQ ID NO: 21182 - DNA, 410 bp, Zea Mays
ggaaatctatacgaagctcttcttctctttcccaagttgcttcatcttcaccgtggtgactccattgaactttgcacatctttataaccttattcctcgtgactcgagtcagtgtatcaagaatcttgatggggtactctgcataagtcaggtcatcttgaacattaaggtcctccattggtaactgtttttcaggcaccctgagacatttcttcagctgagatacatgaaaaacattatgaacatccgcaagatgatccggtaactccaattggtatgcaacctctcccactcgctttaagattaagaagggtccaataaagcgaggggacaactttcctttgactttgaatcttctcatacctctgagtggtgacactttcaaatagacataatcaccctccttaaac

SEQ ID NO: 21183 - DNA, 475 bp, Zea Mays
agcgccgttcagttggcttccgtccgaagccgcgcgcagttaggctagagttccctggaccgctcctccgccgccgccgcgaaccgaacggagcgccgccggtccgcaccacacgcatcgccgccggtgtacgcaggtacggatccttcctcccattgccgtccccactgtcttctcctcgcattgccgcgtttccttgacccttatcctctgtccgtatggttggcgcagtgacgccgccgcccttgctccgtcgtcaaggttccgcgtcgtcccaaccatcgcgtctgcatctttgtaaggtacggtccacctcgcgtccatccgtacccaccccgctgcgtgatgtcgtgttcctagggttcatcctcgatcccgcgacacccctccccctcatgtccagtaggtccactgtcatcaaccacgaactaacagaacatttttcttcattgccgcctacagattgtcctatcac

SEQ ID NO: 21184 - DNA, 412 bp, Zea Mays
gatctggcggctggggttgttcgcgagtttgaagagggtcgggtttaactataccatagatgcttgatctgatggcagggagtggataccggttcataccagtcccaatctaatccgagtctttggtccaggatcggatggctcaggtttgatcataccccttcgccttgacatttattctaaagacccccttggcttttctcaaatcaacccgccacccgagtcagtgttaagatcattacagagaagacctcggatttacaaaatgaaccccgaactcctgttaaattgtgcctgcagtacacttattcgctggaattaataaaatagacctagaaaatgatttcttgtgtaaaggaaatactaaatgcttacaaaattcataacttctacgttttaactccgaattgac

SEQ ID NO: 21185 - DNA, 514 bp, Zea Mays
ggcaaaacgtggtttaccatttcttgatctcagggattgtgtctgacggtggtattggggttaagcatgtattatgggcgtaatctaggtgatcctaattacaatacccgagagtagcccgaagtcctccaaggaattcgacacttgtgtggaggcttttttgttttcgtgtgggtatttcaagtggtgctacattcaacctgttcaccaactgcttgacatgtacttggtggagctcagttgttgagatagctatcatcatcacagttccatgggatcctagcgacctccacgacaatgacttggggacaagtcgtatttttaaggaggggacaatgtcatgtaccagaagcgatgatgggctcaaaggaggcattgggatgggctagcatgggcccaagtggtattgcaacaagctatgctcaaaaggtaacgacatgggaacgagaggggatggaacaatcagaacctaaactctctaccactggcggttgttcgtcttatcctcccctct

SEQ ID NO: 21186 - DNA, 532 bp, Zea Mays
agctaatacattgctgacacctccatagtagtgtgtgggtggtccctcgtgagcggttgtgcgttgcacggttctgcctgtcgtcatgggcctacgtcaccccgtggcgtgtgtagacatacacctcagtatggtgtacatgttatgttctttcgggtatgcgggtcactgtagagactccggtgctaagacccttatgaccgaggttgactggctccatgagtcactgagggtatattcgtgggcgcatgtgggggtgttccgtcacgtcaaccagagccctttgggtactgtacatacggttcaaacgtgacttggtgatgttacgttttattgcgggcgtcgtgggctggcagcgtcgacctatgttcccttcttgtggatcaacttggcgggtacttggtcgttcagcccgtctcgtagatttgctcgacgggaacttggtcgcctgtcccgtctcacagacttgctcggcggggacttggtcgtccaccccgcctcgcagatttgctcgacggagacttgatcgtcc

SEQ ID NO: 21187 - DNA, 436 bp, Zea Mays
tccaggaaaacctaagtatgtcatgttagcgagtgctattttaggcagcttaggtggtacggctgcacaggcttgttgccttgtgcgcctgcccctagtatggttagttggtctcaataggcaaggatctccctgataggattgtgtaggattgtttccttttcctgtcgacatccttgcctatatgtacttgagcctttgctcccataaatcaactatcatattttctgctaattcattgtctctcatgccaaagaattcctaactcttttggtccaacactcaacttaccaacgctgtagattttaaatcatatgatgacaacagtgtctatcaatgcttctgcaaaacctaggtcaaagcaaggtcctaaaaatcgatgatcagtttgtttggccatccacctggtaatgattagctgattatacagcctaac

SEQ ID NO: 21188 - DNA, 470 bp, Zea Mays
tctggtgtgtggataatggccgacggtgaaaagatcttgaccgcggatgaggccgtgagctggccgtcatacccacttgccccgcggccggtcgagatgaccctcgccggagtttgccgcttgccgcctggacgccacatatttagaagtgttaccacgtcacagtagactgccgtaggtagcctgtccatcgcctgagacattgccccagtgaacgccacgtagttcgcgccagtgactcaccccactcttcggctgccagcctcccttttccaaattcggagccaccactcacggatactataaattgagtgcacagctagctccgttagtttgttatgaagccagagcaccaaccctcacccttgattagccaccatagctggaggatttcgttcttcccccaaatctattgtttgtgccactgtgagacgtcgtgccatggccagccatcgccaggtccaccctcg

SEQ ID NO: 21189 - DNA, 876 bp, Zea Mays
cgcgtaccggccaattcgctcaattactggcgttctactttggccaaagccaaattcaagacctaccaatggtttcccccaacttaatttcacaaatggctacccgatttgctctggccacggtgaccgcatgggcaacggaagaacacgggcgttcacggcaacccagggcggtcaagttcaatcaaaggagtcgtgaagcttgaggaggacctaaggacactagaacaatcgaccagagtgcttgaacgaacctggaataagctggccgcggtgagggtgtctctgcggtggcggaaaccggattgggggaagtaagaaattcgcggtctctggtgaacgatttgaggcaatacttggtggcttggtgcgtgatcatcctacggacctgaccgcgcgctcaatttatagaagacaagagcggtggccggtgaatttgggagggacgcgcggcggccggaggaacaaggagttactggcgagcgcgattagtgtccgactaccatcgcaggctccccggtgatagacggagggttacagcgagtcacggcgacgccggggatgtgccaaggcacgtggcgttcggtcgacgggcagccaactccgatgacttatccgaaccgaccacaaagcaaaaaggagcacgtcggctagccggataagtgcccatagtccaacagtggtgacgatctttttaccccgcggcgttatctgggctaaagtgggcacgaatcacctcatcggcgcgaatctatgcgcaaggtcaccggcagcgagctaaccgagctggcagtctgatccaggcactgtaccatggaattcatcttcagtgcgcctgacagccgaggtttagggcaggttttctccaaattttcc

SEQ ID NO: 21190 - DNA, 316 bp, Zea Mays
cgcagcgggcgggcggccaggcggcgagcgagacacctccacacgtctctcccccttccgtttcctcccgtccctgctcacacctctgtagctgcgcccgaccgaacccctcctaccccggaatcctccccccgatgcggcgccgataagggggcgagaccggcggaagagcggggaatggcggggcgcggcgagaagcggcgccggacaggaggggcccacgaggagcccgaggaggaggaccgcatctcggaccttcccgacgtgctgcgcctgcagattctgagcctgctgccgctcaaatcggccatccgca

SEQ ID NO: 21191 - DNA, 710 bp, Zea Mays
aagccaaaagcactaaaaaaatattatatcccataatttgtttgggggtattgatcagaaattctgaatccaacgtcagcagtgtcaagtatgattgtacatgtacagatggacttggattggtgtgttgttgggttagtggagatccattagttttcaccctttctatttagtaatcaatacatttgcaacaaagcagaggagagatagacaaatgtcaaacgtggcaactctatacgcatggtttaataatgtacaatgggcccgtgtaaaatatgaagtagattactggagcactcctctacttggacggcttcaaatgagccaaactaggagttagaaacaacatgttctttgttctttaaacattaactactggagcagatcatctaaccatccacacgtattttgtactcaagtgtaacctccctgctcttttcaggcacactttgtcttcaactgtctgttggtttttactgctgttcagcctgtccttatgttgattgttttgttggatatgtggatgttaagttgttataatcgacttgaactcgccagatgtactacttcgcaaatctcttgtttggatctgtgaacacacagggataatttatagggaatgatcctgtcatactatgaagacgaaatttcatgacgccatcaaatgtaggctcactattggtgggagaattcgataccatactgcttca

SEQ ID NO: 21192 - DNA, 314 bp, Zea Mays
aataaaatagaaaaggagattagaggtctaagtttggcttagatgtactgtgctagttgctaaaaaggaatttcatagaacattgatctatagctcagaggcacactagcatcatagaacattgatatatagctcagaggcacattagcataatagaacattgatctatagctcagaaaatatatgatcaagcatggtaaatagtaatgtgccagttgcgaatatataaaacagattcttacacgagccacgactgtgacatccaagagatgcgccacccagaggcattaaagcatcatataccattgatcgac

SEQ ID NO: 21193 - DNA, 374 bp, Zea Mays
cttgagtataataaatcagtccagttttcttgaaatttttgctcgttgaggtattagtcgtgttcccctttccttggttggagttcctagagttctgttggagattggttttattttgcttcgggtatgggcagtccttgatgaagtatccggactttccacagttgaagcaaccagtggaagaactagggagagtagggaaacgagtaccaggggcactcggttgattggtaggagcgtgggcagtagtgggacgaatacagacagactacttaaagggatatgtaggtggacgaggcgaagagcgattttgattaaaaggtcggataaccaaccttgttctcttttctggtccttgacttgacctttcacct

SEQ ID NO: 21194 - DNA, 595 bp, Zea Mays
cgctgctgacccacgtccgcacacccaccgtggagacagcccacatcgctcgcccacgcgccccagctcctttttgagccctgcccacacccattctctctcccttgcctcattttgcccattctcgccctctctcgagctctgcaatcgccgcccatgctcgtcggtgatccgtggccacgctgccggctgtctagcccaccagaagccgcgccaagccgtcccaaggtgaggaactcgttctcgtgcttggtttatcttatttcagccttgtcttagctaatttggcctcaccggagttcggctgtgccagttcgccgtgcccgcgcgatgactgaccgatttagccccgccctatgcctctgcttttgtccgtagtgttccccttaccccactggagctagtccaggccttagcgcgcccgaatccacctcctcgcggtcaggatttctcaccggaattgcccgacccgcccggagcacctcaccttcgtcgttctcccacctccggtcccgttcttgcggctggagtcttgccagcaagttcgctgaaccttcttcactcgttctaaccctcaccgttgaccccagacccc

SEQ ID NO: 21195 - DNA, 366 bp, Zea Mays
gttagttcgacctcggctgttggatgctcaatggacggacccgattaaatcactccattgccttcacgctttaaggatggaccatcagatcatatgcgtacggcctagatcgcatacctcttcgtgatggattcctggccgtttcatcaaaatcggttggctagaactgcataccggttcggtggggtttgaatctaatctgacccgctcgattgtaatccaacggtccacagacgaagataccccttcagccaacgcattttgcaaaagaacccttacgtttccatgcaatcaacctgccatccttggcgtgtgcaaagtaattgcaaatgagcccagatctttacgtagaagaccctagactta

SEQ ID NO: 21196 - DNA, 397 bp, Zea Mays
ggaagtttggttgctcctgagcatcagcaaggtgtttaggtgggaggagcaccatgtcatactcaatgtcgagcgacatgtactctagactcccaaaccatatcaccatgccgagcctcaaagggtgttggaggttggccatttggaaccttgatgggaacaaatgttttacacgtagtgagcccctacccggcgcgccaactgttggtgtcttgacctgagggtcttaccaactagtgaaatgatgttgtgtgctctgtcccatatgggtgatgcaagttgatgcaagtcgtttatcctggttcgggcgagagaaatccctacttttggcagggggaggttgagacttatattacttccacctaagtgcttgcagtagggagtacaagctgatcgg

SEQ ID NO: 21197 - DNA, 447 bp, Zea Mays
cggtcgattcatcattctagatgctataaaaaaatgagaggagaggagaggagacaaacctgcagcttgaattctagtagtagtggcggcaaaaaataaagataagatgggcaagcaagcaggaatcagcaggataggagagggcatcagcagctttacggggacagcaaaaggcagcctttaaatttttattcgcaccaccaatggcctgcaaacgggggagattagacgctgttttcttcaacgggaatgagcatgtgcgcaggggcccgccccgcgcctttctaccaaaagacgcggtccgcgtaaagggcggcagcatctctagtagtcgctgcggtggtggcccttgccgtccaccaccaccaccaccacctatctatgtatctatctcttcactgattccatatattattccgtgcttcctcctcatccattccaacttcc

SEQ ID NO: 21198 - DNA, 609 bp, Zea Mays
caaccgtaattactttatactaggataggacggtgggttatttacgtgtaagacgaggggttctttagtaaaacggtcgccgcgaaggggtgtctacctactagagccgtcagatcacatctcaacgaccaggattacatcttgctacattagaatcggcgtggatcccgaaccgtccattcccgatcccccgcctcggatttaatgaggccacgacccgactccgatcatcgatttataaacggacggccacgatctacttaaccgaaaaggtatctgcgtttttaatcccagccgtccgcacagatctaacggtcagaggctttcccccgtattccctaacgcagagcacggcggcgcccgaagccgtaccggcggcggcatcgtcggagcagcgtcccaatggtcatcccgacgcccaggacccaacccgaaccgtgctagacgaagtgcgggatactatgaacagcagggaagggctattaccggctcatatcgcgagttgaagccagtccatggtgcagagcggccccggcggcggcgatgaggtacgacgagaaattccgctagcgcagcgacaccacggagaaattaacagctgccgaagcg

SEQ ID NO: 21199 - DNA, 470 bp, Zea Mays
tgcacatcagatagattatcaggtagctcgagttgataggccatctctccaacttgcctaaatactcagaatggtccaatatagggaggggacaatttgcccttgactttgaatctcctcattccacgaagtggtgacatcttgaggtacacatgatcaccttcctcaaattacagtggtcttcttctattatcagcatagcgcttttgcctagtttgagctaccctcaagttctccttgattatacggacttgttcttctgcctcttgaatcagttcaggcccaaagaactgtctttctctagtctggtccaaaatagaggagtcctgcatttcctgtcatacagagtctcgaacagtgacatcttcagattggcctagtaactattattatatgagaactcagcataaggtagactcttgtcccactactaccatgctgaagggcacaagctctcaacatgtcctcca

SEQ ID NO: 21200 - DNA, 417 bp, Zea Mays
gaagcactggccgtcggattagaatccaagcgcccagaatgactcgcctctcacgcggaccagtgagcgctatgcaccctccgatccgacgaccaagccgtgccctagccgaatagtcgcgttgatctaatcgtagccgcccagttcaaatcaacggtccgagagcttatccgccccaggcatcccaggacggcggcgccgttcctctcgcggtggcgctctcgccgctacgacgaccgatgcccaaatcgctaccccatttcctatctggttgaagctactcgatcccggaatccacgatgatctgcgtggggccctaatcactacgctcgactaccgcgagcactgtgcccacggattcccctgccccgcggcggcgccgtgaagtccgatgagaaattccactccaccgacgac

SEQ ID NO: 21201 - DNA, 462 bp, Zea Mays
ccagcgcctgtaggtcatcgtcggtgatggaggatgccaaccacaggtcgtggggaggaagcacattcactttcctggacatcaggactggggaagaagacgagaggagaatgcaagagtttttcatggctaaaggagtaggcggctagggcaggaaggtgagagcagagggtaaagaactgaaaggtccatctcaggtgaatttataggggcaggcggagccaccgagtcttgggccgagccaccctaagacaaaccgaaagccggttgggacgcttcgaattccccgcgcacgtgtgcagcaacggtcagcatgcagaccggcgcgtcttgtcacatttaattcttgcccttcctatcggctgacgtcagacaacaagcgctgcctcatgttacgcatcaaaagttgtgcctctccctctccctccccttccatctccttgcagataatgggtagaagac

SEQ ID NO: 21202 - DNA, 580 bp, Zea Mays
cttggtcctccattgcttgcagtcgagggatggcccattgctcggcaggatgaggcggtcgttggcctcggtgctggcaatcacccagtcgttgcaccagttttcccacctcgcaccaccaaaggaggggatgtagactacggtcggatctggcctcatctgaaagtagtaggcaccaatgtggtccctagtcttcccggacctgaccagcacgaagaagtagtggaagagggaagtgtaggggggccacacctacaaacatctcgcagaggtggacgaatattgctgcctggaggatggagtggggcgtgaggtgttgaagctaaagctcgaactcctccagcagcagcaggaagaagggcgaaatcggcagcgccaacccacaagagatgtaggaagtaaacaacacaaactccccagtggtgagatcgccaaggggggcagcgacgacacggattcttctggcgagccctggcgcactccacccaagcaggccacacaccagattaagagcttcctgagactgaaagcggtcaggatgaccaagcgaagccatggcgtgtgtggcagtgcaagcgtg

SEQ ID NO: 21203 - DNA, 540 bp, Zea Mays
cgctcgttggggatccactgagggtaattcttggtggcggggttcttgactaccctacggagctagtggcgcactcaatttataggcgcatcgagcgatagtgaagaatttggctgagtggtgctggcggccggagaggagaggcgagctcagtatggggaaaagtggctttcaccgtggcagtggctccagtgatcgccgggcatgcaaccgatgagtcaccacgatgaggactagtgcttaagcacgtggtgcgcggcagtaatcggccggtggcgaggtcttatccgatcagtcgacgcgcaagggaggtacggcgagcctagctacgacaaaaccacggtgatggcacggtggccgccgattaaccatggcctgccacctccccattttaacgccacgttgcaaaagccttttaccgtggccgccaccgaccatccacgctgcggtggcgttcttatcgccgacgcgatttttctgaagatcggtgaacagtgcgctttgattcagtacaaagcttgtctgacagaccaagttgga

SEQ ID NO: 21204 - DNA, 692 bp, Zea Mays
tacgaaggaggaagccagttttgcagtaaatggtagtaatgcagctcaaaagttccatctgaaggctgaaataaattttgatctacagcacaaacagatcaaggtatgccttttgtttcccagtcatgatttcatcttgattaacaatcatgcacatcaacctttctttgacaatcgctttaacaattttatttattatgcttcctaaaggggttgagaggtactgtttcttctatcaagtctggaatggaacaactgaaattgcactactctgaggagttcactaaacttggtaaatcgcagttgatacctttgcactcataaaattagttattccctaaaaaaatataccaattgcttgatactgtctttgtctccatgttgtaatagggaagcatttgtacactatatccaatgctgcttctggataccataaagttcttgaggaaaatcgcaagctgtacaaccagatacaggatcttaaaggtataattttgtgcattgaaggagcaggatttacaggatcgaagtctacactatatataaatgatggtttctttcgtctccaggaaatattagagtttattgtcgagtgaggcctttcctacctgggcaaataagttccttaagcagtgttgctggaatggaagaaagaaccattacaataatgactcctacaaaatatggaaaag

SEQ ID NO: 21205 - DNA, 698 bp, Zea Mays
cataactggatccaacggttgtttctcagggcctagaaagtcgaaatgttcttcctttttgctttgttgaaaagacttggtgcaatgttttttggtgcttgaccatggatccaactagatttccagaatacagcagttttcccattacccaccttcacacaagtggaagcgttgaaaagatcttcatctgattcatcacatggcagctgcaaattcacccatgctttgtctttggccttccatcgaaaccacaaccatcttagtcttaaagccctcgcaaaacgattcaggtctagaatgcccaatccccctttgcactttggtaaacaagtagtagaccagttgatcagacagtgacccacgttgcatgattcaggattacttccattccagaggaaacttcttcttatcttatcaatttttttcaatagccatttttgagccgggaagaccgtcagatgataaataggttgctcggataacacagatttaactaatgtctctctacctgcctttgagagaagccttcctttccatcctgcgagccttttattgattttatcaactaaaggttgtagctcaattcttttagcggttctgaagtgaaggggtagacccaggtatttcccgggtaacttagcgattttactggggaagacttctacaagatttggccacagctcctctgggtaacgaat

SEQ ID NO: 21206 - DNA, 713 bp, Zea Mays
tcgagacgcttcaggtggtattaaagctgttaggttggccgcaggacgtaacccttagcctgacccaaaagtttttgagtccaaactattttcttaaaaaaaattcttgctctcatcccttcatttcaaaaatgctttcccccttttcttctctcagaagtcagatggaggttcgctgccaaaccaacttttgccagaatgaagatggtttccccaagttgttgagagcatgcacagttcgccttggaatcaggagccagccatagtatgatggtcgtgaattcgtcgagcatggcacaaagaagtgtgtcgtgactatatacattggatccagtccacaccatgtggaatggagtgtcactgttgctgggcacagattcaaagacacctgccaagtcatcgcccgcaaggcattgagggccctgtgtcaaatttatgaagaagaagtggccgacaccctgctcagattctttccgccctttcagagaaaccgtcccgtttggatggccaggatgcgtgcattggaagggcagcagtttcttgaggacgacccaacagtcctgtacctcactgcatacctactcaccctggatgcgcaatatgatttcttggctcggcaccaccgtcagatgattgcccgagcagaagatgcagagaagcgcaaccgtcaactccatgtggatctcaccacagctcaagcccatgtagctgcc

SEQ ID NO: 21207 - DNA, 427 bp, Zea Mays
ctggtcatcaagcaacaaaattgattataggaaatgtctaagccatttccctttcagaaccgaatgaagccgccgcagttgctacccgtccgcaccaacgatcttcacccgggttgtggcggagggtattcgccagtagccgctaagggagttcgtgacctctctgcgcagagcactccaccaataaactgagtaatttctcgtcgtcgtcttatctctgtcgtggagccgccatcgtcgtgcgcgggagaccctatgcctccatcgctggtacaatttcctttccccgaaccgcttttagtctcgcatcatgtaggagctgtcgatttgggaaattgtgctcggggagttcagaatcgcgctgctccggcgagcgctctgccgtgttaggtgttagctccatcgttcgatgatcaccagggaggag

SEQ ID NO: 21208 - DNA, 879 bp, Zea Mays
gcttaagtgactgagccttgatgttttatagaaattggagataaactggcctgaagatggactgttagtcgtcattgaaaactgaattatggccaccagtgaactaggaagaatttggagatcaaattgtgaggaattgattaggtaactgagtaagatctttataacaaacttgtagttggttctttggacgacaatattgatgcagacaagtgaccgagttgttacatgaaaaatagagaatgaagctctccaaatcgtgctgtcagagcgtctgatgaagatcgccatggtatagtgaccataaagatctccgatgtcgtgagctcaacgccggtgatctgtcgccacaattcgtgcccgcctgggagattcgtgctgcgagaagagtagataacatcggggcggtgtgaaaatatccagtgtggggtgaatcgggtcgctggccggaccggccgtcgtgtcccgccgcggtcaattgcgctggcatcaccggagctcgtcgtttttttggccatgacacgtaacaaccactcctccacatggtaagagtcgtggcaagccaccggtcatcgtcctcagaccagttcccccttgtgcgccacggtgagcatgacacgatgaaatatcctagctggataaccgtgatcttaatcccaaaattcatgctcagttcaatcgggacctataaattgacgatgccctctgctccgcctctttgttaagcatccaacccacccctagccagcttctatcgtgcatcatcgcaccctaatttgggatttcccccaatccgggtctccgcgccgccgtgtgtcaccgcgccgtggaccgccaattgtaggtctgttcttgttctcggtgttcatgttttatcac

SEQ ID NO: 21209 - DNA, 624 bp, Zea Mays
cggcaccaaaaccatcaaagccaaagagatggagccgcagcacggctcgcttcccaacccaaagagttggggcgcgcgtgggatggagccgtggctcagcccgctgtccaccttcacaaggctggtgatcatgcttccccccgaatgctggaagaagaagcgggaaggagcgctgcctccacggacatcccgcggaggtaggcgatgatggccgcctgaaggatgaagcaggacaccacgggtagaggctgggggccaagcccctccagcagctgcacgaagaaagatgggatcagcagagccaacccgctggggagtttggaaacaaagaacacaaactctttggcagcaaggtcgccgagaggagagacaccagcacaagtcctcccgacaaatgctagcacaccccatccgagcgggttgtgcgccaagttgagtgccacctcgggctggaagcgctcacaagggtctagcaaggccatggtgactacgacaacgcgaagaagagaccttgaaggcaaaggggcgcggagagctcggaggcgaaaggacgccgcgagtgggagagaagcaaggcatggctgctactcgagggatgaacccctctttaaaggcagactcccc

SEQ ID NO: 21210 - DNA, 489 bp, Zea Mays
gaagcaccgggctcgcttttatggtacagtaggggcggtttggctggtccgcagcttgcgcgcggccacgccggacacggaattccgttgaagaagactgcacagtcggccgcacagctcacgcgaggaggagtttctgacagtcagggcccacctgcaagtggcgaaagcgcgaggtatagcagatgggcggtcgatcgtgtagtatttatacatcggcatcatagcccgagtacatacgtctggccgaacggattcgtctgtgcccccgagatgttagcaattgttggtccttagatgacgaccatttgttgcagcgaccacaaaaatcacggaagggatctcaacggactaggaacgaagagcttgagcatgcaatttttacggaggtggttgcaatggaatacgatcgcgtggaagataagctatgcgcatgggagaggctggaccacgggtccgatcgaagaggaaggggctgtatatctattg

SEQ ID NO: 21211 - DNA, 524 bp, Zea Mays
tgcatcctaagatttcttcatctactccgccgaagagaacggatccaggctggtaaccaccagacatagcaaattctttcaactctgatatatcctctttagaaagttaatagcctcctaggtgctgtaagttgaagcttctattttccaaagaggcttcttcagtcttcttcccttttgatgctgagaattcaggtgcaatcgtcccctcggtattcttctcaggcaccacgtcggcaataattctatcaatttctgttaaagttgtcccgaggggactaccactactctcggccttttgaggcgcttcagtagcttcgttagcagtagagggggcaatcctcttttgaaatgtcacttggggatatcaagaatggccctcatcacagtcatcatatggcgcttcttctaggcatttaccccaccgggtgctgaaggcctttttctatctctgcttcggcagtttccctagcatctttcttcttttgttgtaataagcttgttagctctgatcctagagggct

SEQ ID NO: 21212 - DNA, 983 bp, Zea Mays
ccgccacaacggtgtgtcgccgcgtaccgccccaccagagtcgccttcgctattcaggacccccacatgagctttgtcgttaggtgggatgtaccacgctctccctctcacttcctttatcctagtgacactcacccatcctcctccttaaataccgagttcaccattgcccgccatcgccgttcgacgccatcaacgcctccctatcgtcaagctcgcctccctaacctgtgcctttaggtgaggaactcccccgactaggtcttgccctctctctctctctctctatctgatcagacgacaatcgctcgccgtagttggcgaggccgccaacgcccctacacactaatgcaccgccttttccaagccatcatcgaactttcccaacccccaagctaggttcgtggtgtcacgtcattgtcacgggctcataccttcggcccgagcctcacccaatcgcaagtatgctcgcacgtcgactatcctccgacacagagtcgaagtggggccgtcacaaccctcccctcttgattgtcgcagcccctcaacggatccccatagcttgcccacgatctgacggcctagagcaccaaatgtcgcttcacctcccaccgtctagtcttaactaatggtgccgaatccagcgctcaaagagctccacgtcactgcctcatcactaacgacaacacttttgctaaagaagccctagagttctgccaaatcaactcgcaatccaagattgtaaaatctagatccccttctctttgcactaaagctcctgaaacccttgtattcttcacaatcaagtccctgaggtcgcctttaagcaccaaatacagtagtctgatagcggagatttgaacaaagaatgttggtggagaggtacacaatctattgttgtgacccacgcgagaacgagaacaagggcagcagataatgtgcctaaacggtgacattgcccttggcggagatcagtctctccc

SEQ ID NO: 21213 - DNA, 456 bp, Zea Mays
aacgcaataggtactgtcaacggttggagtaaccctggcaactttgtccgatcagccttagcctgttgacaaagcatacactgactgacgaaagtgcttacgaagctcttcatgccctgccaagcaaacaaatgtttgagcctggcgtatgtgattggaaatcctgaatggccacccacagccgacgaatggaaggcttcgaccaactacgtttgcaacacttcactagcaccaatccaaatacaggcttcgagagctggttggcgattaacattgtagtacctttgatcttgtcataggtggtcttgggtgtagtcgtgtgatgtgtcaaggcagttgtaaacgttggtcgtagcctctctagaggtcaagatcggactatatttccattatctaaaaaaatacaggcttcgaccaactgcgtttgcaacacttcactagcgccgatccaaatac

SEQ ID NO: 21214 - DNA, 719 bp, Zea Mays
gcttcagcagtcaagcctctgtctttcaatgcacatatttcagcaattagcactctggactcagcaagttatgaatttgtaggggcctctgtctagctaggcatttggacgtcaggttgcctccccgatcggggagggagggacttgttgtggttctccatggtaaaccactcgaggcgctgtcccttaatgttgtcattcaaagggatatcggaatactcaaccttcctaccttggcgaagtttcacgctagcaccaccaacaaggtgatgctgtcctccagccatcccgggccgacagtgatagaggtacttccaaagcccaaaatgaggaagaattccaaggaaagcttcgcataggtgaacaaacaccgcaatttgaagaacagaattggggtttaagtgggtaagattcagagaataaaagttgagaaggccacggaagaaaggagaagctggcagggctagtccttggatgagaaatggcacgaagataacaacttcgtgggtatcctctgttggaatggtaaccccatgccagattcgccaggcacacaactcttttggtggaagaacaccagtttcgacgaggtgcaaaagttcagcttcggaaataacatacacgtggttaccggcgaatggaatttggctattgggatcgataggcgggatgatcgaaatagcagtgctctgtctcttcctcttgggcgccatcgtggt

SEQ ID NO: 21215 - DNA, 736 bp, Zea Mays
atgatagccacagagtcatcaggaatcaacgtcgcaccccatacctagcgcgccacgtgctagtgtttatgacccgactgcacatcacagggttccccacatgatgcttttgggtaggacgatgtcgttgattgcaactcgatggcacgtgcggatgcacatcggatcacacacagaggtttatacaggttcgagctgctagaatgtgtaacaccttacttcttgttggagctgagtatttgagtatcactggtgtacaaaggttgcagataagccatgagcggaggagagtgagttctcctatcgatctagtggcgacgtggttgctgtgagaaagctaatgagctatgatgtggtgacaagctaagatgtgctgtgagtcgagctgagagatcagagatgagataggtgttcataggcataccccctcagccttatatagatgaccagagagttatccctttacaggtcgtgatcactctctaaccgaatcctccttttaatgtggcacaccttccagcttatccggaattcagttgcccttcatccgagtcgtctttgggtatctagcacttctagtacgctcaacctccttgcccgaggtagcagcacatgactcggtcgtctggtctttagcttcccgagtcgagcgctcaacctccctgcccgaggcatcaacacatgactcggttgtccggcttggttgtcgcccgagggcatgcatggctttctaggc

SEQ ID NO: 21216 - DNA, 534 bp, Zea Mays
caggagggcatgaaggtgcccccttggtaacgaagggcgagggggctagctggcggaggacgcgtcgtatagagccgtggcggacacgggggactcaatgtctagggtgagcgcctcgagaagtagctcattgcagacatcgtggaaggaggggaagcgcacagagcgcttgatgaaggccttcaggtggttgtagcgtcaactgagaccgcgtagaaggttgaggacaagcatgcggtcggagacgggcatgccgagatcctgaagagactggtggcagaaagagattaggtgtggaatggtgtcgttgaggacgtggtcgtcgtgggcataacactgaaaagtcaggagcacctggtcgcgccagcggatgtagtgactagatgcggggtcgaggacaatggagacgagcgaccagatgttctagaaactcttcgcttgagcgtggatgttgcgatgaccgcgaccgcaaactctgagggaggtggtggcactggggctgccggagtaggctaagcgacagaggagccgagg

SEQ ID NO: 21217 - DNA, 357 bp, Zea Mays
tctgattactctatccaccctggtagcactaagatgtatcaggatttgaagcagaagtactggtggtatgggctgaaaagagatgttgctgcacatgtggctaagtgtgatgtgtgtcaaagagtcaaggccgaacatcaaagaccagctggactactacccgtttaagatacccgagtggaaatgggaagaaattggcatggatttcattgttggactaccccgcactcctgcagggtatgactccatttgggagattgtggacagactgacaaaagtggctcacttcatacctgtgaggactaattacatgggagccaagctagcagaattgtatatgactcggatagtttgtct

SEQ ID NO: 21218 - DNA, 508 bp, Zea Mays
ccgaaaatgaaaacgcaaacgtcaaacaagccggcccggccgctaatgagaccgctagctgctcctagtccacatatccacgcatctacaatcactgaatttttacaaaggctacaacgcgacacaagatcgctggaaaaaggcggcagggggtgcggtgctgtgatgcagtgatggcatattggcatgcatgaacgcatcgcgtgaggtcgctcttgccgcacaacagatccccggcgtatctatctctcagttagcaggtgaaagagaaatcatggtcaggattagataaactagatggtgccgtgacggatccatggcaaatcggggagcgatgcgatacctgtcgcttgggcagcagataaactagaggggggaagacgcactccgtcgtgcgccttctttattccggcgatggatggtttcttgcgtaaaagcgacgcgccgccgagcccacatcgtcatcgcctgcactgccgcggacgacgcctgcctgtcgccattcccg

SEQ ID NO: 21219 - DNA, 814 bp, Zea Mays
cgggtgcacccaccaagcaagtctgcgaagtggagatccaagtccaacactatgagcccacgtcggatttgataagatgtgtcactacaggccgcgactggatatataggcgacagaccaagggcgtgccgggaggtcgcaatcaacatgactatacatccccacgtacggtctgaggtgcgcctccactgcctcaacggggccagtcgaccttagtcatgggggacctcaacaccggagcttctacagtgggacgtatagtggacggcacacggtggatacaccataccgggtgtacgcctacgcacgccgatgagtgacgcgggcccgtgaggacaggtgagactgcacgacgtatgactgtgccatatgactgacccgcgagagctcctatgcactattacgaagatgtcaacaaaagactcgctacagggacccgtatgacgaacgaacaagacaatacaccatgttgggagtacggttgcgcacgaccctatggacgacgttagaagggctacgccatccaggagcgacgaacatgcccttgctagcagaatacaagtctccaatgcaaggttctgtccttgagctataaaatggcaggatcccttctatctacacatggtcacaccaattgtaacacgcctctaagtaatctacgatcaacactacactagactaaggtgtgagcctgaaccagtataatctctctgtctcaatccacgtctgagttctagcgattcaacattcagagtgagttcactctagcaccccgccgaacacaaatcttattatctccggttccgaaaccacg

SEQ ID NO: 21220 - DNA, 508 bp, Zea Mays
ttaaacactaactactcgaaggaggggcttgtgaacgatggggttgtggctgttgatggtgtgggacaatggcagtgcctagaaaggggctaggcgcgggcgaagggagagggagtgggatggtgtcagctagagagagggagacattaatatcgagattgagaaggtacaaggactcagagttttcactctatttctacttattgaaaaggttaaattggactctcaattgggaggcgtaccgttcaagttaggccctattggttagtttgggtccaacatggcaccttggctgaggccttacccgattaggacccttctttgggcttcattgggcttagcaagggcccatatttaggcctatgacatcactcccccttttcgtataatgtcatctggtctaatggtagacatcaaactagtccgatggtaggcttcaaactatataggcatactcaatgatttgtaacaactagtgctaacacagtactaacacaatagctattgt

SEQ ID NO: 21221 - DNA, 535 bp, Zea Mays
ggctgaggcaggggctctgctagctaaggttggattgttgaaagaaaggggtctgactgcagaagctgtggtcgctgactttgttttcaagaacattcaaccgctgaaagacagagcgtatccggcctatctgtatcaaggcttggctgattcgacccgggtaactaacagaagaatttctgctgtggacttggtgagtcggctcgagatgatactcagaggcaaggtgtcgaacatcggcgctcctgttgcatactcggcctggaatctgcctccttcccaggcctttaccagtttcgtgtcaaatcctcctgctggtgatagcggtttgggccttagagtgcacccctctcccaaagaagttagtgctttggttgcctcactcggagaaattcctgacgatgagaggcaggttcattttgaggtgactttgaatccaagtgacgcaaaaataagtgccatgctggatatgttatctgaggatttttctgatgtcactcctgctgaaacactggtggtggcgcccatccctgag

SEQ ID NO: 21222 - DNA, 594 bp, Zea Mays
aaagatttcccatgcgtacattgggtatgttcccaatctcaccaccgcagcgtacatgtatgggcacacagaaagctggggatctatgcgagaattcattctccgtcgatcattaagttttagaatctcttcatgagaatctatttgcgacccatacgcttgcttgaatcatgagcttttccagacattagggggagatttcaagtaccaaaaagtatgccaggaaattataatgaatgcagtaaacattcaggctcaggatcacatactaaaactgaacctttaggttcgaatgatttgcaagaagttgcaaattgactgccatgtgcatttactatgaggtgtcactcaaattaaacctatgtggaagtgccagaaagagtggttacatggaaaaccacttaactccctattgcaacgacgttgtaaataagagggggagaagtatggacacaaactaggattaagatgcttgcaagctactgaaggctacaccttctgagatagtaaatgcaaaccatctattcgttggtaaccaacctagtgttggtggacacctagaggatatggattatcctgtgaatggaagacatt

SEQ ID NO: 21223 - DNA, 602 bp, Zea Mays
aaagtgtggtaatccttagccacaaacattttttgcttgaatgcttgtattgttgctatgaataaaagaatattcagccacaaacatttgttgtatgcagtcctgtatgaacaagtttgctgaaattctgtaaatttataacaagcgatggatatagatgtagttcgcacattgagatcacattgagacacattgagatcacaaattcagttctcacattcatttcagagatagatgtagttctctgaaacattcggttctcagacataaacacaacagacacatttaatctaggcagaaaaatagatacatttagttctcagacagaaacacgatagacacattcagtttagacacaaaaatagacaaacacattctgttcacatttagtgcacattcactgcctcgaaccccgacgccgagcattcaacttctcaattatatcctcctgcaaagcttgatagtacatgtgttgaaggggttggcattgatcaaggttgatggccaaaatgcgctcctcctcttccttctctttttttcagcctccatgttcagacgttgcttatccaaagccagtctttccctctccaactctatcattg

SEQ ID NO: 21224 - DNA, 689 bp, Zea Mays
gatgtgagtttgggtcattaattatgcaagcttgcactgaatggtggttcactgtctgcttttccatcctttgaattttctgtgagatttgcctttccactgcaatgtaagtttaaggccattgattgtgcaatcttgcactggatgggagacttggatttctcccatggtatggactggttgatatgtattatgtcatatagctgtattgtgccattcttgccagccatgggcgattcagtcatttccagtacaccaaatcttatagtcaaggaatgcaacaaaactgttttcatatcagaagtaagtcatggcgcagccacagcagataaatgactaaatggtgcttgaggcatactctgtacataaaggtccttcctcacttgatatggcctctccagcaaaaggaatagatgttgaagctccttccttgagtgataatgcacaaggttcattgatgtggattgtggaatgtcaatgaagatggtgttgaaaaagacgcaaaatttggaagagggcaatgcagaaagtttggcaatttttgaacatttttctgattctggtaatgatatgcaatctgaatatactgaagttgtcgctcattaggatgatgcctcgttagaaaaaaacagatgactttcatcataaggccttattctgagcatagccaacataaatcaaaatgggca

SEQ ID NO: 21225 - DNA, 700 bp, Zea Mays
ggcaagttcattttgagatgcctatgagtctgggtgatgcagagataagcgctatgctggacatgttggttggggattcttctgactcggttcctgatgaaacaatggctattgcaattatcccagagcctgagaaaatcgtggatactcgaaggccgaagggtactcgcccgaaacgctttcgccaagtcaatcattcagttgctcctgccgaggggaagaaaaagaaaaagagacggcttcggtgagtgtcatgcttggatcgtgatgccggcccttctgcccctactgctgaagaagtactagtggaactctttactggggctgaacccgacgggtgtgttcctgctgatgctgatcccaatgggtgtgaccctgccagagctgatcccaatggctgtgaccctgccagagctgaacccaatgggtgtgaccctgccagagctgaacccaatgggtgtgaccctgccagtgctgatccaaatgggtgtgaccctgtcagagatgatcccaatgggtgtgaccctgtgccgtatattgtccatgttgttgacgaggaagaagaagaggaagtccccttagttcgaaagaacagtcggcgttacagagtcagtggagggagtagcgatattccttctccagctttgtctgcactcgttggtctgcaagaactatccatagcaaatttcgatcaggctct

SEQ ID NO: 21226 - DNA, 683 bp, Zea Mays
tggtcagcactgttgtcatcctcatctcaaagcatgccatgaaaggtaacaaaatcgcgcccaatttcatcgctgacgtgcgtaaccacctgagtagggatcccttagctccggggctacatataccatggatcacgcaccccctcgatcattaatcatccatggcatgcaccatcgctaagagccactaccgccgagcgaggggagcaggagagttcctatgggaaagccgccactgacgccccatgcttgcaatgcctctcaaagtctgtggtggggccggtggagttcgcctattggtgttgatgctcatcttggagtcttcaagcagggagaaggagcaaaccatgggtgattgctcgccgtttctctccgaccccgtggatctacgtcttaccgttggcgagagtctacaccgcgtgaaccctggtgagacatcttccctatgatgagccatggcctgagcatcatgtagagcgttacggctcgaggagtagagcaccagagccatggacagccgcacgccaacgagagctccaccatcgactgaagcgcaccgccgcgtggttgggatcaggaggaagaggatgcgccacagccgttgatcatgagataaacgcataggattagattagggttaccggttcgggaccatccgtgcgtgccatcggattgggatcttg

SEQ ID NO: 21227 - DNA, 689 bp, Zea Mays
cggttcatcaacttgatgtcaacaatgcatttcttcatgacaccctgtctgagaccgtgtactgtgttttgccttctatatttgtttatccaactcatttggaccatgtttggtacctaaacaaatttctttatggcttgaagtaggtgccccgtgcatggttccatcgattttctacacatctcctctcattgggttttgatgtagctcagtcttatacatcactattcatatttcactgtggcagtgagactgtctacctacaactgtatgatgatgatatcgtcctcacttcctcgccaacatatctgctacgtcgcaccattgttgccttgcagcaagaatttcctctaaaagatccccaacccctacatcattttcttggattgtctatgactaaacaacatggcaccatgtagctatctcgacatcactacatcttcgaaatccttgagcgtgctggtatgtctgaatgcaagccttgcagtactcctattgatactcagtcaaatctctcacccgtagaagaccctaacaatgccaccgattaccacaacattactagtgccctatggtacctcacttatagttgtctagatattgcttatgctatccagtagacatgcttatttatgcataacacgtaggctccccacctttcattggtcaaatggatccttcattgtctt

SEQ ID NO: 21228 - DNA, 874 bp, Zea Mays
cctcgccctgcacacataaccagggcgtccgccgccgctcaccgaagttcaccgcccgttctgcgaccggcgttgaacccttgtcgcaccctttttctcggtaagctctaccgcaccaccagtagatcgagacacccctctgttcgcccctaacccctctagtttgtccagttcgcattcaccggagccttccccatgcagtcgaaatccgccgtggtcgacctgaggctccaccgcatccccgtcgttccccaagcactccgaagctcgcactcgaggtgagcaacctacccatacctttattgcatcaactaccgcccagtgcccgcgaaattctttgccggagttgacccgcaccaccgtaggctacctcgccgtgttctgtgccctctgctacccccatgtcggttttgcgcccatggctgggttcgctagatcgccctaagcgcgctcgagctattccccaaacccctagagccctgccgtggccatccccctcatctccggtgagacctcggcacggagtcgagcggtgccaccctcatccgtaaaaccttctcggcgttgatatccactatctgatcctgatcgtgtggtctagatcaccgggtaccggttcgcacctacacgccctgtccccaggcccgctagttagtgcctgcgccccctggcgctgggcccgactagtcaacccgcctttccctctggtcgctgacaaccgtccccgcctgtgagtctcgcccgcgcccatgcgcacgtccgcgggtctgatcctggccgttgctcgctgatccgatggccgagatcactccgtaccccttcgcgtgaaactttagctaaagggacactcgggttttagagaattaacccatcg

SEQ ID NO: 21229 - DNA, 732 bp, Zea Mays
gaatttatgggaattagtagatgacttcactctacagccagacatcaatgatcaacacacttggaagctcactcgttcagagcattatactagaaaatctgcatacaatgctttcttcttgggattagagaagtttgccccatgaaaaaggatttggaaatcttgagctccgctccagtgcaaattcttcatttgattggctgtcaagaacagatgttgaacagtggatcgcttgtctaagcgagggcttccacatcctagtgtttgccctctttgtggtcaggaggaaaaatttgggccaaaattcttcttttattgggttgcctaatattgcatcccccccctcctgcctgatggaagaagttatggtggtccatggcaatcaacagaatgcctaaggagttgaagaaaggtttttaagtcttcaattattcttgttgcccgagagatttgaacacagaggaaattaggaatgcatgtgtgtttgaggggactagtcctggttctgctgtgctgtgccaggaggtgaagagcatttgtaagggtagagattagccccccccccccaatgcctaaggagttgaggaaaggtttttaggtcttcaatgaaatttgaacgcagaggaaattaggaatgcatgtgtgtttgaggggactagacctggttctgctgtgctaggaggtgaagaagaccagcatttgtaagagtagagattagcccccccccccctc

SEQ ID NO: 21230 - DNA, 629 bp, Zea Mays
ccattacggtggccaaaaacaaagaaacaaaaagacacccatggtaggaaccaggaactaccctgacctaaagacctgggattggatgctctaagtgtaactgtgctggttgtcacatccaaatgatctttgtttttctgatgttttttgttacttgtctgttgatcttgctttcttgtttggaactcttcttctctggctgtgatgactgatgaccaaacaccctatgcattcctttattttctagatatttatttgtcgcttatctgttgatcttcctttcttgtttggaactactcttcggcggctgtgatgtcaaatgccccatccacttgaattgtttagggtttaggatttagggtttggtattgtgctcaatacaatgttaaacttggatggcttgtaccatatacaagcaaccagtttgcaactgattgtctcattgccgtggcggtggtgtaccatatacaagcaaccagtttatttccaaatgaacaatcctactcaaaagttcatttagagtaggatgtgtcgtgttgatattggggtaaatctgagccgttcaacataatatttctctttctattctgtctctttcttttctgtcatatactttcgtttatgattct

SEQ ID NO: 21231 - DNA, 273 bp, Zea Mays
ctcttccttatgtcttagtacattcattgcgtatactgtatgtatatgacttctttataaaatcttttgaaaattcctggctaccccccaatgggtgtgaccaagtggtgtcttggtacgcagagcgtttagcacactgtcctggagtagtaacttgatgtgaccgtggggtgtaattatatcgcccgagcggttgaccttggtccaaatggtgtcatgttacgcaaagcggtgcctgctgcctgactcattttcaggcggcttgaattgctt

SEQ ID NO: 21232 - DNA, 457 bp, Zea Mays
caactacacccgctggcgcgatgagttcctcctcgtcactggcaaatactccctggacagccacatcctcgatgacactcccgcgcctcacttccccaactgggcacgcatggactgcgttgtcaagtcctggatctccggctccatctccccggaccttgctgaaatggccatggaacgcggcgccactgctcgcaccacttggctgactctcgagaaccagtttctcgggaatcgggaaactcgcgccctccacctcgacgctcagttctggcacttcgtccaaggtgatctacctgtctccgattattgtcgccgtttcaaaaccatggcagatgccctcggtgatcttggcgaaccagtcttcgaccggacgttggtcctcaacgttctgcgcggccttagcgaccgtttctccgacatcagacgtcatcttcgcctcggtcgccccttttcg

SEQ ID NO: 21233 - DNA, 840 bp, Zea Mays
tgccttccaaagtcaacgatgcgtgagatacagccccggatacctctaatcccacatctggaatgtcagagcaaacatccaccatattaccagcagttggctccgacagcataccttcaggaatgacatcctcgagagcctgatcaaaatctgttatggataattcttgaaggctaacaagagcagacaaagcgggagaaggaatatcactatcccccctactacctctataacgctagttattcttacgaattagcggaacttcttcttcctcttcttcgtcctcataaaaaatacggacaatagctggtgcacggtcacacccattgggatcagtttctgcacggttacacccattggggtcagcttcaataaggtcacacccattgggttcagctggtgcaaggttacacccattggggtcagcttcaataaggttacacacattggggtcagctggcgcgcggtcacacccattggggtcagcttcaacaggtacaccaccattgggatcaacctcagtaaggatctctgctggtacttcttcacaaacaggagtagaagggccggtgtcttgatccaagcatgacagtcgtcgaagttgcctctttttcttctttttctcctcaacaggcgcagttgggcgactaactgggcgaggacactttgggcaaataccctcaggctttcgggtgtccactgttttgttaagctcttgtacaaccgcaacagccattggttcaacccgagccgagtcagaagattctccagccaacatattgagtacaacatctatttcttcatcatccagacttgccgacactgaaaagtgaacttgcc

SEQ ID NO: 21234 - DNA, 673 bp, Zea Mays
ctctagttgagttggtatttctcaggactgtcgttggatttatgtgggaatgtcaaaggcttggccggtatttctcaggactgtcgttggatttatgtgggaatgtcgaaggcttgcccggatcaggatcgttttttatatgggctactgtgtagctgccaaagcataggactaaggctcagttctagttgtggtcgttcttgctggacatgtgttctctggcatggtcaaggagactgagcttgagtctatcttcttctaactgattcgcgccgtgattgggagcgtaaatccttatctcagatcacaaggacgctgtataaatagtggtagcatcggcacggaagtcaatgcttcctgcctttgtaaacactagcccctatattacgtaggtcctaatcaacttgtgccctttagtgtccgcgtattctcctctaaccatgtcattggtttagccaagtgcacccactgcatcacccatcgaaacccccacatatcctagctatgcaggaacgaggagaaggacgctaggacattggaactagtgcactagactatgacgacaaatagtgctgccctaaacatcggcccttgaaaggaacgttgacgcttaagaggggtggattaggacttctattttactcgctctaaattagcctctaattttaccttt

SEQ ID NO: 21235 - DNA, 550 bp, Zea Mays
ctcctctaaaaggttgtttcccagaacgggtttgctcaggttttggagcttgttgagaagaggtatgggaccatggaagctattgttggcaagacgaaggatacgaaggaaggtcaagtttccaagagaggagctgatttggccagccaagctttggccgttgagattgagctccgtgactcgatatggtcgagtggaactgcagttcacaccatgccaatggcagaagtggatgctggtgttccaattgctcaaggctccgtgcggatcactggtgatgcccttcttgaactctagcagagaatgaaaatcttggctgttgttatgatgcgtcgagcaatggactttgtccactgcatgacatagcagtagcagcagtactacaagcatggcgagtttcgacggctgcttccaatgactcattaaggcacgtaattgacacctgtaaaaaataaagaatgatcttggcggcgtactacacagaaactacgtacgctgtgttaaaggagtgatcaagcttacgaacttcctatctaattctcttaacaag

SEQ ID NO: 21236 - DNA, 919 bp, Zea Mays
gcagaagtgcaaacgcgagctgagtagaggctagagctggtgctgactctgacgctggctgtagtgcaggaactgccggagctggagcagtcacagaaacatccacgtcaatagtggtaacagctgacgctggtggcactggtggctaagcattgataggtccgacgacctaggtcgagaaatccagagtgaccggcctgagcggagagatggaaggaccaaaggagtggagcgggggtcctgactgaagagctgacacaacaactgcctgaagggatggaggaggagcagactgcactagagggagttgaacaccgatatgctggagaatgtgagtcatgaatgtctgatgctcggctctgtttgctaggagctgctgctgtagggtgtcctgacggtcctaaatattctcaaacatcgacaacatctgctcgaacatttgttgctgaatagctacctgcctagcctgctctacggccaaatgaggctgctgctgagtgagcgactgaagaatagcagacaaagcagggttaatagcaggaggggcagctggagcagcactgtagctaccagcctcatgatcatgggatcgaggtggcacagcaggtggtggcggaatctctagatcatcatcatcattggaagaagtatctgcaacgacaccctgatccttgaactattgggtggcctcatcctcgaccctgacatctaatactatagatggagctggaactgtgtcctcaggtgctgggcgatagaaaccaaactgcagtcgagaggcctcaagggtggcctagaactaaggaggccggaccagctacgcaaatatgtgacagagatagtgagcgtatggtagctgacggcgagcacggagaccatccaacactgtgtcctcaatctcacaaatcagaaaatcaac

SEQ ID NO: 21237 - DNA, 493 bp, Zea Mays
gcgggttgttttcaagtaaaccgaggggcttatgtgcaaaaaggcctgggcgaaggggtacagggagatatcagccgcaggatccagaatcgagggcaaggattagatctggcgccccacgaaccggtatgcgctattggccgtgggatcaaaatccgatggcccagattctatgaaccccgatataaccacaaccgcatgatctgagatccatggctcccgcttgatctattctgtgccgtccgatttccatctaacggccaacccttctcttcttcctccgaccccacccgaggtagcgccgcccgcccatcgcggtggcacgccgccggcgcacgaccaactcgccaaaatgcgctcagaatcgaacaccgagaggtcctacactatgcggatgactacatgactcggatgggtagcatcataccgtcgatggtgccgtggggaatccggttcacgccgataggtggcttcacggcgccactgaattccg

SEQ ID NO: 21238 - DNA, 298 bp, Zea Mays
aaaaagttataagatacaaagattattttatattgaggggaaggggacaggagcagcctgaatctcacacagtcaccctacgccacaaaaaaactcaacaaatgtatgcacaacaagacaaaacagaaacaatcccttctaatcttaccctctctaattcacagaatcagtaaaagtacatgcacaagaatgctacttttgatcaatataaatagcttcaatgatcaaaggatgagcatttgtacaaaactagttgaacatcattgaacttattgaccaggaataaactcattcaata

SEQ ID NO: 21239 - DNA, 1119 bp, Zea Mays
aacctctctaccactgcgcacgcacgtcctctctggccactctctgtcgtatggggcccgcattccagccttcttctccgctgggttcgcaacgcaggcgggatctcaacaaacctcaagcgaaatacgcgcggggatctcacgtgtggccccaaccgcttgaccagggcgcataactgatagaggaccgcctcggccgagctctccatgccttcaaaccgccatgcactcgccacatttcaaggaaaccgtgagagagaaccaagtcaggattgccgccgacgtcgatcccgacccatacggcaagcgcagcttcaagggtgtcctgggagcactggaaggccccgccgcaagtgtagaagccgatcctaggtcggattctattgccagtgggtggaagttgctcgtcgccgttcgtgtgtcgatcggagtccgcgaccgccgttgacagcccgccaccacgcatgactttcggtacggtttcctcgagtgagttcgtcttcattgtcgtaatgtttagagctggttggagtgatgtttagcgcgcgtaatccgaggagcgcctggccagcaatggcgccgccgcactcgggcgcgaccgtggccaggctttcccttgacttgtcgaccggtaatattcctattcctgagattctcctaatctagttcaacgattacatcggatttgggttggattgtggtattaggcaccggtaattgctcaatggagcaatttctccccgccgcgggtgcaccgtgccgtggaccggtttcatcccatagcctaggccaattagtagtggctcatcggatttgccgcgatggtctctctatcaccgcatggacgcattggattttgggttcgggtgcgcgatttgggggttcccggcgagaccgccgccgcgcggtgtgcgcacgccgccgccctgggaaaacagaggtaggtgatggcccctggtccgtctgatcttgacggacggtcaggattagatgatagcatacctattcgcgcgattaaatcgtgaccattgatcctctatctgatggcttagggcagatcgggctaacataaaatcagaaccctaggatcttgatctaatggtcagttttccataccgc

SEQ ID NO: 21240 - DNA, 427 bp, Zea Mays
gcgagagagagccgtggatggagcttttctgccaacaccgacccagtctgtgcttggagctcggggaactctcgacgtgtctgggtgcctcgtggggtctctggtgaagcgctcgtgaccgattgggagaaaccaccccttgcgttgcccggaattcgtcgtcggagcacgcagactgcgcgacaccgtgggcgacgtcttctttgccaccgaggctggtgaatatcccttgcgccatgtttgctagctccctgtgatttcatagcactccgtagagttgaggttagtgcgctagatcgcgagatccggatgtctggcgatggcgtcctccgcggctgggatggcgtggatgcgctcggtcatcggaggtagacgaagacctctcagccgtccatccaggattggacggtgcagattcgatcggggt

SEQ ID NO: 21241 - DNA, 505 bp, Zea Mays
gccagtcacccggtgcgcgccccaaacccgctcaaaatgtcgcccagaatccgagctgcgcgtcacccgtcgttgacgtgtgggtcccgctcgccagcacatctcagaccaaccggtttctctggcatgtgggactgatgcgtcatctctatcccctacaagtcttcaacaaacagaccgcgctcctcgcaacagaacgccgccaaacttgccgggacgttgagctacctccccgttctcgcacccgtgttgactgcttcatcttgcttctcagtgcataaaagccatgcgtccagtcccctcctccctccgatctcccccatcccatctttgttgcggccgcatgctacgccgagctccctcctcagtcgcctcccccatggcgagcaccctccggtggctgcgctccacagtcgtgccctgccactctactccttccttcgcttttctagttgcgcctcagcgcccggccatggcgccctggtggccgcgtcgtgcccatgat

SEQ ID NO: 21242 - DNA, 689 bp, Zea Mays
gagaccacagcgttcgcctagcagcgtcgctgaccgaagcagcgtaggtggatagcggtgtcagagactcatgtgctgacaaagtcctgaaccctctatcacctacatccattaccctgacatgaatgcgagtgatgtagtagcaagcccgaggaggctcgtacactcgccttgtctcatacaggggtcggacgtaggttcccaacacgtgcagaacatcctgcagcaggttagggaagtgccctgtctcgaacattgaggtgtaatgttcagtgacaggccataaccacacgtagtggtcctgttgttcttcgttggcttcctcgttgaggttttcccccatcttcttcttcttcgtcgtcttcatcatcgtcactagagtcgtctaggtcgtcgcctccgggagcaggggcttggactgctggagctggtggtgctgaagctgacgatccagctgcgaaggctagtgattctgccaatggggtgggtgtaggcagaaactcctccgagctgtcctccaaaatgactctgtgctccacccgaatgcgagggagatccacaggaatttcctcgactaccactaggtagacaagaacttgccatggtggagggatgaagttggtgttgatccgagtggtttgaatggtacggaccatctataagagaaaatgtcaatttagttgatgttt

SEQ ID NO: 21243 - DNA, 740 bp, Zea Mays
tgctctgttcttaacaaaaatccagagatatggtgggtagaaggttgctggttcagataagtcctgaagatccaatacgctgaaaatctgaagaacaccaaaagatctacgacactgttgatttggatgaacttggatgaatcggtgaggatttgatcgcctgggattaactcggtacgtggcatcgttccgcgagccgagccacgcgtggccggagtgggtcaccggcgaccacggtgactcgattaacttttgtcgcggtgtcacccatgcctcgatctccctcactgtgtctcttaccgacgtagtagtcatgcgctaacgaagctatctgtggccggagatcgctagccgagccaccgtggctataaatagcaccatgatccacggcggggtatgcacacctccacccagtttgatgatccaagcccaaattcgcacagcctccgcccccttctctcaaattgagtaggcactgtgaaactacagttcctaacggccgtgtagccccaatctccactgccaatttcgcccagagccgccgcgataccattttcccccaacttgggtctctaaaccgccatggatagctcgaccgtggccagcccactctggtaaggttctacgcctctcaagtgccgttttcgcaacttggtatgcactggatgctcatcgtggccaccgtttggtcaattcggccagggttgaacgggaacgcgagctcgtggtcacggtttccg

SEQ ID NO: 21244 - DNA, 420 bp, Zea Mays
agcgggagcgagagtagtggaagctggtgtggtggaggtagtgggtgcaacaggtgtggcggaaggctcaagagtggctgaagctgacatagtggaagatggagtggagactgggtctgagggagcggatcgagcaggggtggagcaagcccaagacgagaggcaacagacttggaaggcaatctggtcggaggtgatcctcaactaacctccctgctctacctgatctgctgctgcggcggcaactgctgcacggatggctttgtccaaccatctctttttcttgcccactgatgctcaaggtagactgccttgcccttgtcctttcggaaggggcgaggagggtcctggtcatctcctccccttgacggtgtgacattcttcatcagcaccatcctgcactgactactaacacgctgc

SEQ ID NO: 21245 - DNA, 468 bp, Zea Mays
atttgcgccctcagccaaaccccctcgccctctctctcgctcttcccacgcgagcagagagctccgccaccgcccgtcgtcgactgctgcccgttttgcggtcaccatcgcgtccgcgccctgtcccgtgccaatgtgagttccgcctcactgtcagctgctcgggacacccttcagtgtgcccttcaactatctggttcgaccggtccgcgctcaccggagcgattcttgcaccgccggagccccatcgacgtcgccccgtcgcgtccttacgcctccaccattgccccgtgactccagcacttccactctaggcgagcaaccctcccgcacccttaatttggccattactgctctgttgctcgcgcaattgctcgccggagctgtcccgcgccgccgttagcccgcctcaccgtgtgcagcgcattctggtgcttccgcgccggcgtgatacccatggccgagtct

SEQ ID NO: 21246 - DNA, 510 bp, Zea Mays
caagatcatcgacagaaggtagtacctcagaagtagtgtcgtcgccgatgtctttgtcgtcgctggtgccgaccgcatcctcaccaagtgcaatggtgcagaagcctcctgcggtgttggcaatgaagcacagcccatttagcttgtcctcgacccgcctctcagtctcctcatcgctcgaggaagatataacattgtcggagtcgtggtcgaggtcgctgagggaggcgaggaaggtacactccttgatctttgccttctgaaggtacttcttcttgagtgcctccttgttgaatcctcccttggacttgtacttgccggaggagtacttgcccttgcaccgaccagagtgatggccgcgtgggccagactccgatttgcccttcttggggcagttggcaacgaagtggtcgggatcgccacagttgtagcatctatccttggacccgccacgccggcgactcatatggttgttgtggaaccgcgtgaaccggctggccacaagtgcca

SEQ ID NO: 21247 - DNA, 353 bp, Zea Mays
aatgtgctagtaaatattgtatctatcactgacaatggagcatggcaacccatggagatggacaatgttatcaaagaaggcttttgctaccaatgctgctgtgtaagggtgtcccagagcaataaagtgtgcaaacttggagaaacggtcaacaactgtgagaatcactgacttgccgcccacctttggaaacccctcaatgaagtccatagaaatatcactccatacttccgaaggtagtgatagaggttgcaggacaccaccgggatggagatgttcagttttattgcgctggcagactgaacagcctttgatgaattccttaaccctttgtaatgcatgaggattataga

SEQ ID NO: 21248 - DNA, 438 bp, Zea Mays
tataacaaagttagagctaatttgttaggctacaactttgatgtagtgagatgatccagtcactacataaattttggcacaaatctccctgccattcgctcggattcgcgctcgtcgcggtgattcatgctcggtgcagttggataacgcagagggagtaagaaatatcacccagtggatgaattccgtccattgttcactccggtctccatgtccgcttagccccggccgcttcagatctaccctcgccgaagttagacacctcgcatccttgcgccacgtgcctcgacactttaaccacgccgccgtgactcatgttagcccatccggtgatcgctggtgagcttgccacagtaattgccaccaatcgcgtgcgccagtgcccctcctcctcttcggccgccgcacgtctccttcaaattcactggccaccactct

SEQ ID NO: 21249 - DNA, 651 bp, Zea Mays
caaaccaagatccaaaaactaaatagacttataatctgagatagaaaactcacctgcaacaccggagcactggatccaccgatgagagggcagaggcagaggtacaggagcgagctttgcgcagatcgagtttaggtttagggttactagttacagttaccaggtgagagaaggagagatgcagagagttcatggagaggatggagcgagagagagggagaggagcaggagacgaagattagcaatggtggctcactggcatacagctccgccgccactagaggcgagggcacgagaattgccctatcgggagccaggactcgggagatggagaggccgagagagaggagagaagagtagagtagaaaaatctagacactagggttcaacacgatgttgaggcgggggtagtgggggagccctccccatattaacagaccaccgctttgtcgacgtcttacacgggcctggttggcagcccaagcacggcaagtgccttcgtgttgtgtcgggcatcggactgcaccacgggccagcccgttttggacatgtatacctagaatacaatgcatgctatgccatgccagccttcttgttggtgttgtggagcagtggggctctcgcattgcacgggcgcatggccattccttt

SEQ ID NO: 21250 - DNA, 348 bp, Zea Mays
cactacagcattccactgctagaaacacatggatcacaaactataaggttccaaagccaagcacacactctgaaactcttcttcagagagctgaacccaaatgcaaccctttaagtctgacaaggcatattagagagcattttactcacaattccatatgacaacagacccatctcccttaacaagccttattctccaaccataggtattccactttggtacaacactccaaagctgaaactactcagaattgaagttgtggtgttccaaattatagcagaaacagccaaacacttggtctcagcttaactgaacagccctcactatttctgacagaggactttgcag

SEQ ID NO: 21251 - DNA, 567 bp, Zea Mays
gtggatctccctcacatccaagtggagaatgtagtcatcctggaggacagctcggaggaacagctgccgacgcccaccccgttggcaaagtcaccggccttcgcagctaagtcatcgacatcggccccgcctgcaccagccgtccaagcacctgcacctggaggtgacgaccccgacgactctggggacgacgatgacgaggatgacaacgacgacgaaggaggagacaaacatgtcaatgaggaagccgactacgcccagcaagactacttcatggggtttggtcctgttgtcgaacattacacatcaatgttcgagacggggcacttccccaacctgctgcaagacgtgctgcacacgctaggcacctacgtccgccccttatacgaaacaaggcaagtgagcgagcctccccgggctttctactacatcactcgcatccacgtcagggtgatggatgcaggggataggggattcaggactatgtctgctcacgagtccttgacaccactatccacctacgctgccttggtcagcgatgctgccagacggaccctatggtcgccc

SEQ ID NO: 21252 - DNA, 1275 bp, Zea Mays
cttcaaccaaacacaccttagtttcatacaagcggggaaacgaaacaactatgccatttctgtttgccatatttgcaggttcttataatggacaaattcacggtgaagatcatggcttatgcttgtaagatggcggaaattaccgatgcagggatttcgcgtaagttgcccagatcttgatgaatagtcatttagcaggaaaaatatgtggtggtggctgtgttttcttcctactatatttactggggatattcttactctttccagacaattccacttgaccattcaacttatgtttgtgaagtaaagatgttaagtaagtttattataataacttgcagttgtagaagatctgttcaagagaagggagccaatgccttcaatggatgcaatctactttcttcagccactgaaagaaaagtaatttttgacagatttgtgccttctcttttgtcttcttgagtttactatttcccattggtcatattggatttctgccttttaaacatctctatatgaaccaacagtgatttcctggttcacatgacatcaacttttgctggttcttcattgataaaggacctatgtggtcaaaagccaccctctgttgcactatctaattttccatgtagtcaatttatacgccatatcatattgaggcttcttctctgatactgtgatgcttacattttgcaatctgcagtgtcataatgcttctatctgacatgtctgggagatgcccactttacaggaagtatggttgtattatcattgcaatttgcagctaaagtatcattttcaaaattcagatgtaataaagtcactaacacattgattatttaactccgaacgctagggcatacatcttcttcagctcaccgattcctaaagacttggttacttacataaagaatgacagtagtgtaataccacgcatcggtgcactaagagaggcaagttacttcacaatgtacctttcactatttgagctttggcagaagttccttataatgctgttatttcattaattgcagatgaatttggaattcttcactattgacatgcaggtactcaacctctgatctattccatttcactgcattttgagacagatctatgaattttgtctccgcttttgctgtctgctgcctcagaaaagtacatgaactgattttactatttctttatttttggttagtgttcaacaaaaatattatacatagggttgtgaccattgtataagttatacagagcaagtggatgctgtcataaaca

SEQ ID NO: 21253 - DNA, 346 bp, Zea Mays
gctgaattgtagctctccaactttactgcagagcatggaatatgttaccatagggatttgtgagcaaatcgagcctaattattggttgtcaggccaactgaatgagttagccgatggtagagtaacctgcttgggttcagaacacttcaccgccgtcgatcacttctccgccgcgattcgtgtcgccggcattaggattcgcgctcggggtgggtggataacatcgcgagatgaaagatctttgccgtcggtgagctgggggtcactccggtaactcaccgtcaccttctcctttctgttttgcggctgagcagataagctcgccggggaaccaccgtcgcacagc

SEQ ID NO: 21254 - DNA, 276 bp, Zea Mays
gtctgttccgatctgttttttgaagccatagccatttggtttgaagggccaaacacatatgttgtaaattaggaatcccaagcccgccatacttcaaaggtcttgtgactatatcccaggccacgaggcagctgcctccattcacctcttttctccctctccacacaaatccttttctgattctatcaattttgttaatcacccacttagggacattcatagcaaggaagagataaactgggatggctgaaagtacaaagcgcacaagggttgtcc

SEQ ID NO: 21255 - DNA, 484 bp, Zea Mays
gaagataagattctgagataacagacatgtggttacccgcgaatggcaactggctgttggggtcgatgggcgggatgcttgccgtgacagagctttgcctctttcgcttcggcgccattgcaatctggccagcggaacgaatagaagcaggatcttggggaagcagaggagtggttcgaggcggaattgtgaagttagggctcagaaattataaacgcatgtaggtgcaagtataaatggggttttctgggttgagcactacttctaaaaagcgccaagtcattacttgggaaagcagaactttaggcatgactcgcgttacatctaaaacgccggtatcatcagctataactcgacggttacctctaaaatgccagcagcatcaagcatgactcggcgttacctctaaaacgctggtatcatcggctatcgctcggtggttacctctaaaaacgtcggcagcgttatatgcatggatgaacta

SEQ ID NO: 21256 - DNA, 787 bp, Zea Mays
cttcgttgcacgcgttcgccatcctttatgcgtagctctgtccaatcggtgtctggggcctgtgcatcgctgcgtcgtcgagtagactgtgcgaaccaaggagagagggagggcaaaggactcccggtgtgcagcgaacctggagataactccctagagggcagggtactcttgatgccttgtcgacgtagtgtgggagggccgtgcgttcctgttctcttcgaccggcgtcgtctacacctggatcaccggtaagaataccatattcctttcgccaggatccatgcatcgtgtggcatcaggtgcagcgggtgatggggcataggatcgctcggctcggttagaggtaggagaaggaaagtatagccgtagatctccaaatggacatactggattagatccaaacataacggttcgccagagttaaccctagtcgtcgatcacgacacgtacggctgcgattagatgtgcttgctgtcggttcggtcagggtatggggtccgtccgatctagattcgggggtgcagatagttctcgcttattttaaatctggttcgccgatctcacgatcaacggctctggtagtataccggttggaatcaaatgatcggccggatctggtgcgtccgtttctaatcggatggctgtgggttgccgataccccttcatcttgcgaatcttgcaaaaacaaccctgaactttatatgaatgaacccgccatccgtgcggggagaatatgagtcttgggagaaattgcgagttagcccctgacatcttaagaaatatt

SEQ ID NO: 21257 - DNA, 967 bp, Zea Mays
gcagcttcaacatcatgtacgcaagaattttgatgccctgggatcgcacgctctgcgctgcccctcagcgtcgcgtcgatccacggcatcacgcccggccacactgtccacccgcttggacaaattattctgctggttatgttctgtagttcgaagtgatggacttcctaggggcctacaacaccattttggggagaccgtgctacatcaaatcatggtcgttcccaagtacgcatacctgaagctaatgatgcacaacccccatgggtcaatacggcgtccgcttcattccaaatagtctatgcatgcgaaaaagcttgctgcgagctcgcgttagcacaagctgctgcgagagagttggcggagttgaggagaggcattgactccagggaggggccggacgcacccaaggttgcctccggcatgttcaaatccaccgaggacagaaaagacgttcagatcgatgacactgacccttccaagcatgttcgaatcggggccacgatctccgacaggcaagagggcaccctcatcaacttcctccaaaccaatcgcgatgcctttgcttggaaacccgcatagatgccgggaatcccaagggaatttgcttagctccctgaatatccaaccgacggtcaggcctgttaccagcggcttcgccgctttggtaaagaaaaacgcaaggccataagcgaagaggtagcaagactcctggcggtgaggttcataagagcaataaaccacccagtgtgggtcacaaatcccgtgtttgtcaagaacaagaacgagagctagaggatgtgcgtcgactacactaggctcaataaggcatgccacaaggacccctttcctctcccgcgtattgatcaggtcgtgtactcgaccgctgggtgtgagctcctttccttccatgatgcatactccggttatcaccaaattgccatgaaggaagccgaccgatatgcca

SEQ ID NO: 21258 - DNA, 599 bp, Zea Mays
gactacttcatggggtttggtactattgtcgaacattatacatcaatgttcgagacggggcacttccccaacctactgcaagaagtgctgcacgcgctaggcacctacgtacgccccctgtacgaaacaaggtgagtgagcgagcctccccgggcttgctattacatcactcacatccacgtcagggtgatggatgcaggggacaggggattcaggactctgtctgctcatgagtccttgacaccactgtccacctacgctgcctcggtcagcgatgctgcccgtcgaaccatgtggtcgctcagccacacctaccggcagcagctgcagaacacgaggttcaggcatcttcctcagcgtctatgtggaggaagtcagaccagcatcgtcccaggtgaagctggtgaggatcgcctcaacaccctagctggtgtagtggccggtctcaacaccgacctagacagtgccaccctggatctctttagggtgcatttggagctggagaatgcccatgccaggattgcagccctggaagcccaactgcaaggactggatccacccgaagctcaggtccccgccatggcgttgtctcctccccg

SEQ ID NO: 21259 - DNA, 949 bp, Zea Mays
gtgacttggacccaagtttgagagccagtttgaccttgatccagtgctcaaataagtgtaatccctatagtcgatttgtagctggtaagtagcactacaactttgatgcagaggcttgggtgagttgccaagtaaaatttggagaaaatcgacctcaactctagctgtcaggtgctctgttgggagttcaccatggtacagtagcaaaggggatcagatcgccagcgcaatggttcccaccgccggtgaccccccctcgccatgattcgtgtcgtcggcgtcatgattcacgctcgggtaagttgataacgtcacggggtcaaaagatcgttaccgccagtgacctggaagccactccggctagccgtagttcatctcccctggctcaccgcccgcgggtaaagtgctcaccgtcgtcgtgccatcgccgttggccaccgcgtgtcctaaccgcgccatcgcatcgccgtgacaccctctaaactcccagtcgaccatcggagttactgccacggcggtgaacacgtgttcactgcaccaccgttcttcctcacttccgaccgccgtgtgtctcgtccaaaattcgcggccaccgctcgctccacctataaattgagcccccggccagctgcgctaggtcataccgaagctatagcccccactctcgcctccgattagcccccatagcctgagaattgctcatttcccccaaattcgttctccgccacccgaaactcgacctaaccgcgaccagcctttctaggttagctcatcgctctccctctctcgtttaagctttctcgcatgcctacgatgcttgctgaaccaccaatttgaactacgggctccccaaacatcgggaacgcgatcaactgtccgccacccattcggttcacgcagacagagcttgatagctcaccatttgtgcaattaggttaggggaagcact

SEQ ID NO: 21260 - DNA, 869 bp, Zea Mays
tttggagccagggagcatgtagtctccctcacgaaggaacccacgggaaataagcgcatctaggtgaccttgatcgaccaaggagcagctctagaattccatgatcatccgaggacggagggcagcaacaaggactcgtggcaagcgaggggtggcggcgatggaacgcaagacgcgtggaacactagaggacgaatagggaggcgaagcggaggagtgcctctaccccaaattgagagtggttgacccaccaagacgcaatcgccagatcgaaggcacaccccgataagcaataagtgtcagaactaatgtatttcggaccttggtgaataggcccaggccgaatatgatgcctaccccgagaacggatgacacccgaatctgacctaggcactaggtgacaactacatgacatagccgaggctcgatagccatgcgaccattctcgggtaagacgactcatcccgccttgtgaattcacaagactatctcccctacaaggaaggaactagtgggcccatgccaacccccgaccacaagaggtctaatcaaggccaaaaatttggagttcgaaggccagccagcgaaaggttcgcggctactccaaaaactatagagcaacatgcgatcaggaggtggccacctagcggctaggaccctagcacacgagtgcaaagggcacttctaaatcattttcgagttttgtaaatgtctgactcatgatttatcgtagagagaggcagcgagccatgagacccggtcaaatgaagctagagcaactatttgagttgacacctaggaatatgaggacggtccccagcggaccccgcacttagagcctgtggaagacactagggcctcactcagat

SEQ ID NO: 21261 - DNA, 339 bp, Zea Mays
gaaggcctaagggtacttgcccgaaacgtctccgccaggtcagttatccaactgcacctaccgaggggaagaaaaagaaaaagagatggcttcggcgagtgtcgtgtttggaccaggatgctggcccttctgctcctgctgctgaagaagtaccggtggaactctttactggagctgatcccaatgggtgtgaccctgctgatgctgatctcaatgggtgtgaccctgccagagttgaacccaatgggtgtgaccctgttgatgctgatcccaatgggtgtgaccctgccagagctgatcccaatgggtgtgtccctatgccgtttattgtccgtattg

SEQ ID NO: 21262 - DNA, 806 bp, Zea Mays
ccgagtcctgggaggccgagctctgaagcagcacattaggaaaaagcagttcccaactaactcagcaaaaaactctatccaatttaatcaacactggatcagtttgatgattgaaccatgtgaaacggcgtccatgcagggggatcttcttgagagctacatcctcaattaggcgtctaaagagattcatcatagcctggttaagattagagtgattcttatctgaagcttgtaaaatgagattgaaatccccagctagtaaccaaggcccattgcaagcctctctaatggctctcaagccatgtgaatgcaactgtagtatgcatgcttcaatttagccatgtgaatatagctgtagtatgctctcatggatttaaccatgtgaatgtagctgtagtatacgtgcttcggtgtgaccatgtgaatatagctatagtacgcatgcttggatttaaccatgtgaatatacatgtagtacttgtgtgtgattgatttttatctaattggtctcctgttgcttgtcaaatttggtacctgcatccccctcaggcatgtttctctggttgtcaagcacaagtgtgtgcctttacatatgacaagggctgcatgtgaatactcagtggtagctgccattaattgttgttgtgcaagcctgaacctgtagtcttgtagtattgtgctatcaccagtgcctgtcaatgatatgaagtactgatcagtatccagtgttcagcattcacaaacctatttgcctatatatcaatcacaggcatggctgacatgcctgtcaactatcgagaaaccct

SEQ ID NO: 21263 - DNA, 732 bp, Zea Mays
gtgggctccaccgcccagtcccaccatgtgacatgctcgggttccttacgcgctgatgtgtggggccaccttcgacgggtccgtcttcctggctggtgtactccacacggagctccaacggagttgctatgccgctgccgggtatctcggaccgatccggccagcacgcatggactactcccgtttggattccgcatctcgcagctatatatgtgaccgcccgtgcccaggtcattccattggcaaaccctgcgaatccccatctacggccggagttgggagtgacaaagtgtgtcgcccttcgtcgatgaccgagctcctgctctgtccaatactctggtaagtcccttcttctcttagataccttctctggttcaattcacgccaaattgtgctcggattagggtgccggggcgtcagcgatttcttgccgttgtttctcacgccatagatcagcgcctcaccgtggctcggcatcaccgtgagccgattcgtaatgtgatcacttccctggaacccaccactctccctactacgtactgcaactagctaattttttaataaggcaccatggcatcagatagccatgctccgttgatgctccgccgtgggaagctatggcgccgccgcctgctgtcggcggggttggaggaggggtggttagtggcaccgtggccattggatggcgtctcgacgacccggattagaagtcgcgtaccctttcgcgtaatt

SEQ ID NO: 21264 - DNA, 742 bp, Zea Mays
gagggttgcaggcaggaggggatgccggccggtgggcagtggcggctaggggaagggaggaggagggagaagagaaggtggcttgataccatgttagatagaatagaaaaccctaacccttaattagggaaggcatgtgtatacatattcatagagtatgggctgggcatagtgttttgattcatgacctgagtgtcacctagacattgagccaacccactacgacaggttttggccgccatagcccatagctgttctacaccttacttttatcattgcagcatgtaaattagctaggtgggtaatatttggggagttccatgcagaatgggtataggggaggggaagacttggctaatgatttttgtgtatcatgcctgtcctgtgccctgtaggaagagtttggctaaagaattaatgatattgcgaaaaacagagctgtggattgatgcatgataagagtgcttttggtacctgtcttcgatgttgccatcccatgtgacccagttgtagaaactatctaccatagtgacagattctcgtgtgtagttggcatctctaatgtagttggcatgaaatcctggaaggcaggaaacactttacctttttctgtaacattgtgattatttccttgctcgctgtcttggcccacaataatcatttggttcatcaagtgtgtcaggtgacccaaattagcctgagacttttgatgatgggtcattgaaatgatatgttacttgat

SEQ ID NO: 21265 - DNA, 425 bp, Zea Mays
gcgcggttaacgtgttcggatattttgttagaggacacctgcttaatattgaatgctactattattctcctattgtttagaattcagcagtatttgtagaagtaaaatgttgcgtgatgattttgagacttcctcatgggacatagaggccgcccctagatgagtaactgtaagcatgtggcaccgtcttaagtcattgccgacttaagccgattgctcttgttagtagggcataatggtcaccccgggttgagtaagcgcgagcatgttgcatcgtcttaattcgttgctgacttaagccgattgctccgttagcagggcatagtggtcaccccaagttaagtaagcgcgagcatgtggcaccgtcttaagtcgttgccgacttaagccgattgctccgttagcagggcatagtggtcaccccg

SEQ ID NO: 21266 - DNA, 391 bp, Zea Mays
ctctcgtggcgctacgccgacacgtgcaaggtggacatgggaaccgaggtgctggagctcttcaaccacgctgaagacaacatggagaaggggatggagatgtgggaagggatcgagtatctgcgagtcaaagggctgtccaagtcgaggaaggggaaggcggccgcggtggtggacaagctggtggccctcagtgagcagggaaaagatctgtcgccggatgaagcctttgagcaggcatccaacatgcgctcgcagctcaacatctcgtggggcaccattctctacgaacgctccgttgtggaattcaagctggggctttctagctgggaggaaagccttcaggaggccattgagaagtttaagaccggaggcgcttccgtagcggaca

SEQ ID NO: 21267 - DNA, 408 bp, Zea Mays
ctgtgctgcgcacaggcacagccacatggagccgggcgggagacaggcaagaagcgacggcaggcacgcacagcacagtaactacgagacagacacgacgacacgagagggaggtcggtgctatagctatcacgcgctgtacctgtacctgtactgtacagtacgtgcagtacccctctcctagtaccttgtcacctgcccgcgccgatcgatcttcattgctcgttattagtacagtcgtaagcctagcacgctggaagcatgatcgacagttcgacatcgattagacaaaatagaggacggtcagaacaatgatgtatgtactcctacgttaccggatctacaatctgtgtcgcacaccatgtttcgaaccctccctccaggtccagcagtactgctacataccgt

SEQ ID NO: 21268 - DNA, 315 bp, Zea Mays
gtaaatgtcagcaagcccagttgcagtcatttcttcagcagcaggagctaaggtactggcatcctcatcaaaactggatactcgccggaggcgtcttctcttcttcttttgctcgtcagtggaaggctcaggctgactggtccggctggggcgcctcgggcgagtactgacatgtttcgggacatccaaagctgtatcaacctctggaaggggcaccactgccaacgtaccaacaggagcagcgtcggacgaatcttcagctaacagatcaagcatgtcatttatgtctgcatcactagggttcaggggcacttc

SEQ ID NO: 21269 - DNA, 450 bp, Zea Mays
cccccagcggcaccagcaccgagctcgcctcgtcggcccatgcggcgatacgctggaccccagtgcgatgctacgcccggagatcttcaagggtcttcttcatctcctccaccgcctgggagcctggagccgcctgcgccgcctgggctacctgcgctgcctgcgtcgcctgaaactagcggacccgctcctccagtgtccgctctttctcctcttgtttattctccttctcctctgcctcgagctcatgatcggccaacaacttgtcccgcctatcccacatctcctccctgaaggcgaggtccttctcctgccaggcgagatccgtcgcccgctcctccagggaggcatccttcgccttgaggttctcctcagcgagagcgatgttgctggccctgtcatcgagctcccgctgcagcttttgcagactcgccacagccgcggtctgct

SEQ ID NO: 21270 - DNA, 1356 bp, Zea Mays
gacgcgagtccgtgccggtggaccggcgtgtcgtgcaacgcgcgcggcgacgtcgtcgggctgagcatcacctcggtcgatctgcagggccctctcccggccaacctgcagccgcttgcagcgtcgctgaagacgctggagctctctggcacgaacctcaccggcgcgatacccaaggagatcggcgagtacggcgagctgaccaccctcgaccttagcaagaaccagctcaccggcgcggtccccgccgagctgtgccggctggccaagcttgagtcgctcgcgctcaactccaactccctgcgtggagccatcccggacgacatcggcaacctcaccagcctgacgtatctgacgctctacgacaatgagctcagtgggccgatcccgcccagcatcggcaacctgaagaagctgcaggtgctccgcgccggcgggaaccaggggatgaagggtcccctgccgcaggagatcggcggatgcactgacctcaccatgctcgggctcgcggagaccggcgtctcagggagcctcccggagacgatcgggcagctcaagaagatccagaccattgccatctacaccactctgctctccggccggatcccggagtccatcggcaactgcacccagctcaccagcctgtacctgtaccagaattctctctccgggccgatacctccgcagctcggctacctcaagaagctccagactctgcttctatggcagaaccagctcgtcggcgcaattcccccggaactcggacagtgcaaggagctcacgctcattgacctgtcgctgaattcgcttaccgggagcatcccggcgagtttgggcgggctacctaatctccagcagctgcagctgagcacgaaccagctcactggcaccataccgccggagctctccaactgcacgtcgctgacggacatcgaggtcgacaacaacttgctgtccggggcgatcagcatcgacttcccgagactgcgcaacctcaccctgttctacgcgtggaagaaccggctcactggcggcgtgccgacgagcctcgccgaggccccgagcttgcaggcggttgacctgtcatacaacaacctcaccggtcccatccccaaggcgctgttcgggctccagaacttgaccaagctgctgcttctcaacaacgagctgaccgggctcataccgtcggagatcggtaactgcaccaacctgtacagactccggctcaacggcaacaggctgtccggcgcgattcccgccgagatcggcaacctcaagaacctaaacttcctcgacatgagtgagaaccacctcgtcggcccggtgcccgcggccatatcggggtgcgccagcctc

SEQ ID NO: 21271 - DNA, 744 bp, Zea Mays
caataaagtactcctgcttcctctaatcttcagcaacttcattcagtgcgtatctagagagctgaatgaacttgtcgtgatactcgcttactgacatgctctcctgcttcaaagacaaactctttcttctcaatcttcatctgtccagcaggaatatggtagtttctgaactgagtagagaattccgcccatgtcatagtatcggcagcatcatgggcagtagtgtatgaatcccaccaatcagcagcaggacctgtcaaacgaccagaagcatatagaaccttctctcggttagagcattgggcaataatcaacatcttttccacagacttcagccaatcatcagcgtcaagtggatcaggagaactagcaaacgtctgcggcttatggctcatgaactcctcctggtgcttgtctcggggtggaactagtggtgggggtggaggcagtggtgcttgctgctgttgttattgcgcccttctctcctggcgtatctcctctcgctcttggtgcaactcctgtcatatatcctctcgctcttggcgcatctcctagcgttactgccgcatctgcacgtgcatatccgccatggtgtcagccatctgttgcattatcctcatctatgctgcaacagctgggtcaactccgtctggtggaagctatggaggatccatctcagtttgttgttgttgtggttgtctaaatatcctccgagtgtgtcaattgggaggtagatcaattcca

SEQ ID NO: 21272 - DNA, 392 bp, Zea Mays
cagaaataccgtaatttaattcctcttcaattaattcttgtcttcgccattcgatctagtagccatcacattttcatagactgatgagagaggtagtgacagattgtgagtcgttgcccaataaactgatgaacgaggttgatggatacatgtctaaacaacaactaatcaagatctaaagtatctcgacaagaccaacaccaactccttctgctgccactaatgcagtgcggcgagcgtaacaaggacatcaacaaaccctagctagaaagagaacttgctcttccactgctaccgactgggcatgctctagcatatgcttcctccctcccatgggttgagaggagacaaccgtccatggcctcggcgtatggctgccactggtggacagg

SEQ ID NO: 21273 - DNA, 334 bp, Zea Mays
gagacgtgtagcagtcgtgcgcacgtcgtcccagatctggcgcgaggcaggcttttttactagacgtgcgtgggacaaagaacgtgcgcgcgtgctgcatgcgctgcatctatgcgggagaagcatgcaaaaagctgcaagctagtagctttctctttctccctttttttatcatgtgattaaggaaatacttaattatgtccactcaaaagctatgtgtgtgagaatggaatatagcagcatgcatgcgtacatgcaaatgcatagttgattgatgggaatgcatagttgattgatgggagaccaatccattcaccactattgcacgtatccg

SEQ ID NO: 21274 - DNA, 291 bp, Zea Mays
tgacacaaaaaaacagttttaactaggaatcaggagttttagctaggctcagatgaagacatcttacacaaagcatgtgcatgtactaattaagcttccaagtcaaagcatcagtcttaaacatagaacagaacagaggagatggaggaggagcagataaatagcaaagggggagactggaagactggaggagcagcagaactatggcgtcgctgaccctggcgggcggcggctggggaagacaggaagagccgaagaggacaaacagacaggtggcgacggcagacctgg

SEQ ID NO: 21275 - DNA, 546 bp, Zea Mays
cctggacaaggttcaaacttgagacgtttcaaatatagaaaatgatccaaaccaccgcagtagagttgaacttatgatatgctattgaagttagtcatctaagtgctattaggcaactgattgttcgcaggcccaattccctcaccctctcgctggctcaattcctggttgtctgctccaagcatcccagactatataaaatacaacagactatataaaatacattaaatcggtaaaaaaagaaaaagcctgttgaagccgcatcaagcatcccacgccgctaggaaccaacagcgccgccaggaacaatcccacgccaccactcccatccgctccgctgttttggttgtcttcccacgctgtctctgtctttcgtcacccacatctcgccatgtatagacctctgcgtcccaattaatcggtagaaattggcttgttgaatgcatctgtagagattggtcgtgcttctccatttgcgccaggaagccaggatctgccccatgctaatgcaatcgacaggaaggaagaccgtacatgtgagacgat

SEQ ID NO: 21276 - DNA, 647 bp, Zea Mays
ccacgctcgcgcttggtttctctgccactgatcagtgggccggcttcgtcagctccgttctcaacaaacccaccgggcatggcggcatgcacggactccgcacgctccgttgacgcacctaccacgtctgcacccttatagggagtacgaactgggctcgcctctctctccttgtcctcctatcctcgcgaccatcgctgtagcagagagaaaatcgcacgcgctgccgagagagaagaaagggggggacagtgggagcgctgccgagaatactcgtcgccggtgggattcaagcgctagcgaagccattcgtgtgttggactgccctcactgcaactgggggaggattaattggaagggcgcctgctgaagcccgaggaatttctcgccgatcggccagcatttccgccattcgcaactcaccgcgcgctggaagctttgctccgtgcctactggtaataccccttcccatgtattgcttttcgcctcgcatcgagtaggagggtgttaatcgcgttttggggcagcgagaatgggattttgggcacactccggcgatgtgccgctgcgtccgtctcgggcgctgccgtcgggtcaccaaagttgggggaaacaggcacactgccgtggatctggccacggacggc

SEQ ID NO: 21277 - DNA, 651 bp, Zea Mays
catcttcgacgactgcatcctggaacctcgtacggtcgggggcggtgttgtcgctgctgccatggagttggggaaggagccatcgggtgctactttgtggtcaagcgtgcctcggaggccgtcaccctgggcgccgatgatttccttagctcctacttcgatgtggccaacctcgacctagcgtgtcgatgtggcctagcgaggccactcgcatacagcgccgccctccacgacttgcgcctcctcctccattctggtttgtgccagagtgattgccctaaacctagatagcttggaaagaaggggaggaagaatcgtgagggtcgaagcaacggtcgcgacgtcgatgtcgacgtggagagtggaggacggcgacgcgaaggcgcggggctaggagcgggcgggagcgaccgcagctaggattttgcgttgcgtgcggttgaggagatgcgtgcactcggtggcggagacggcatggggtagtggcaattgggatcaatcgagggaaggaccgaaggaggagacttcaggcgaagatcgtgggaatctggatgtacgggacacaatattatggtggagatgagtagtagaaccacggaaatggtaaagggagaaagattgttttttctcacatagaagtataggtggcga

SEQ ID NO: 21278 - DNA, 552 bp, Zea Mays
ccgagaagcaagaaaaggcccaaaccctggtttcacccgtactgccacaccataacccaggctggcatccagtaattactatgtggattgccaggaacttctttcaagtgcaaaccaggactagaaccctaactgtcagcctccgtagttaaggtcttaccatcgtgttatcaatgtgtttgctattgctatgttttatatacatatcacaacacaatttttctgataaagtgtgttagagaccatgtagatgcacaaaatagcacttctttctgagtggagaggatctccatcatatgagcagcaactctcttcttaaatttatgaatgcatgttttgattaacctaccaaccattgggcttacattaacgaacaggagcaaatagcaatacaatctgacaagtcactccaccagaaacattaactcatcaaactcagagaaagattgaggagctattaaagtcatcataattggcagatttgtcaaaacaagagacaccatttactaaactgatcatgttagatatgcaaccccgacacatacttgcaca

SEQ ID NO: 21279 - DNA, 791 bp, Zea Mays
cgagcatgatttagtgagtgtttgactatgattgctataacaagattgtagctggtttattaggctataactttgatacagagagttgattcagtcattacataaaatctagagcaaatcgatgccaaacatgctctgacaagctgactgaatgagctacgcgatggtacagtgtactgatcaggacgccaactcagagatctcaccgccggcgagctgtgcgttcggattcacgctcgtcgtagtgattcgcgctcggatcagttggatagcaccgggggtaagaaaatatcatgtcgtggatacactccgaccactaatttactccggccaccgtacccgcgcagaccacggttgatttggatgggttcgccagagatagccacttcaggccctacgccacgtgccttggcactttaacctcaccgccgtgactcacgttagcacgtccggtggtcgcaggggagcttgccacggtaattgccaccaatcgcgcgcgccagtaaccttcttcctctccggccgctagtgcatcttcgcgaaattggacgccaccgctgtgggagcctataaattgccgacctcgcctgctccgctaagtagttgtgcaaccagtgaagcaacccgtgcctcgaatcatccactaaagctcctcaatttgggaattcccccaaacctgctttgcgccactgtgaaagagacctcgccatggctagctcacctcaggtccgctcataccctctgctcttttgtttcaatgtccttgtgtgcccctgatgctccctgacccc

SEQ ID NO: 21280 - DNA, 660 bp, Zea Mays
cggggtgaccactatgccctactaacggagcaatcggcttaagtcggcaacgacttaaggtggtgcaacatgctcgcgcttacttaactcggggtgaccactatgccctactaacggagcaatcggcttaagtcggcaacgacttaaggtggtgcaacatgctcgcgcttacttaactcggggtgaccactatgtcctactaacggagcaatcggcttaagtcggcaacgacttaaggtggtgcaacatgctcgcgcttacttaactcggggtgaccactatgccctgctaatagagcaatcggcttaagtcggcaacaacttaaggcggtgcaacatgctcgcgcttacttaactcggggtgaccactatgccctactaatggagcaatcggcttaagtcggtaacgacttaaggcggtgcaacatgctcgcgcttgcttaactcggggtgaccactatgccctgctaacggagcaatcggcttaagtcggcaacgacttaagacggtgcaacacgctcacgcctacctaacctgggatgaccactatgccctattaacagaagcgatcgacttaagtcagcagcaacttaaggcgatttgacgcgcttacaattactcatatagggatgacttctatatcccataaacaagtttcaaa

SEQ ID NO: 21281 - DNA, 672 bp, Zea Mays
gtaatcaatgcacatcctcttcgtaccatccttcttctccacaaatagcactggggctgcccaaggtgaggtacttggtctgatgtagcctttctccaacaactcatcaatttgcttcttgagttccaccaactctggtccggacactcgataggctctcttggaaataggggcggtacctgggataagctctatggcaaattcaactttcctttcaggtggcatgcctggtaactctccaaggaatacatcgggtaattctgacacaatcctaattgcctcaatcggattggactctttgtcatctactgataaatggtgacaggctccttcttctagttcaggcaagtatagcttagttattacttgctttccagatggggacaccaacttaattgttctcttgtcacaactgacagtggcttggtttctgtgcagccaattcattcctaggatgacatctaacccttgagttcccattactactaggttagcggggaagtctatcccccttatttcaatccttagattcggacaaattctactggactgaacttttcccccaactgaattaactcttaaaggtgggatcattggttctatggggatgttatgtgcttctaccgaagatgtagaaacaaaagaatgtgtggctccagtatcaaataatac

SEQ ID NO: 21282 - DNA, 590 bp, Zea Mays
ccaggagagcccagcgagtgagacggcccaacatccgttattcgggagatgagtggtccaagtgaatttggagcccaagtggccctgtaaacacatacgtgtaataaggtgacttggccgaggggaaagacctcagaccacgaacagaactgaaccagaacacggctgtgacgacggcggcgatcagttttgacgctggccggagtgaaactgtgagcgtgatatcgtgagtctaacatctggtattcggagcgaggctggagcccacgcacgactacttcacccgagctcaggcgaagggcgtagcaatggcgccgccgcggaacgaagacccgatggcgcagatcatggctaaaattgaggaaggtaacaaggagacccatcggcgtatggagaccgtccaagcctccctggcaacagttgaggcgacgatgaaaggcatgataaaggaacaaggtgaattccggaaatggcgaccggaggtggagatgaaggtcacggaggtggcagaggcgttgaagacaatccaggcaaaggtggatcaattcggaccatcatcatcgacggagccccttcctgacgggaaacaa

SEQ ID NO: 21283 - DNA, 643 bp, Zea Mays
gccccccacgtgtgccatctagacctccggccagggtagatccgatgcagccacatgtccgggccatttcagattggacccggacctccatgagtgctttccgaacccatcctagggaggtccatggctgccacgtttgcatgtgctcctagttgctgctctccgcctaggcagggacataatgttggcagacatggtctgacgtgggcctctaacatgagggtcgtccgcattaaagacgaataggatgcacgcctgttcacaccagtagcaggcggcgtgtgcagtccacaaggcctgggcgcgctagttaccaccgtattatcgaggcgaagaccattgacccattgcgccacgtaagggcaactcccataatgacttctactattcctgctgcagaggaacgcgaagagacaaacagaggggacatgacgacaccgtccacctactcccctatgcaagtcgataagctagtacgctgcagcctaaactagagccttcacccacacgctgacaaagacggggcgaagacgattctagccagaggtgcccacacggcaaccaagagaagattcttgtccaccgcgagagaagacattggttcaccagctatatctgtcactccgtgcttcatattttggta

SEQ ID NO: 21284 - DNA, 530 bp, Zea Mays
tgcaactgcaactaatactatgttgaagtgtttttcgttaactctgctctgaaaatgctttttgcttcactctttgacatatctatatgactatatagccgatgcctgtttttactatatgcttatcatgaatctcatgttttccatatgaataatgctagctgttgcaacatctttgtttggagctaatgatacatttaatcctagacttgatggcaaagaacgggtgcaattttttgtctctctatttcctatttatgttgcacaaataattgtttccttttgttatccaaataaataattacttccttctccacccttttctccagttgtagcgagtgagttttagtaagggataaacaatagtaggaagaactctgttgtgtttcaatctcgagtatttgatggatggggcattgttctatagatggtgtatacagaaatgatcttaactgtcattttggtcaaaaccacaatagttctacttatgttagaaaatcaaaagatttaagtgtcttccatggtttaaa

SEQ ID NO: 21285 - DNA, 398 bp, Zea Mays
ttgtagttacatacccgagaaaggagcgtcgataaccagcgcccacggcgataggcggattcacggtggactggtggctctggcgagaaattaactcgccactcccggctttcccaatccaattcttccgtagcgtcaatcaccagactcggccaagtcgcccgacgccacgcaggacactagattgaccccgaggtgtggattccgcggtggcggctatatccttccacgtggcgtgcggaggcgcaatagatggcgatggagcagcggcggaaacaaaaaggggtaccagcggcaaggccgaggggagaggggtccgctatttgtagttaaggcggtcacgcagcgcgatagctagctcatgcgagaatctcggcaatgtcagtattccgcccacg

SEQ ID NO: 21286 - DNA, 498 bp, Zea Mays
gccagggagatgggatgctcgccacaggtgacaagcgacccggcgccgggacgaacgccgccggtgtagatctcttctctcacctcccgctctcattgcgtcgagtggaaaaacgagagcggtgatgctagattgtggtctctgcgatacaccgaggctagccaatgaggttgtgacttcctacttatactcatggacgagcccggcagagggtattcggttgcgagaatttcggtaggaaaagtccgagcaaggcgtcatccatagctatctagttttctggtcaaggtttgttacaggtggagaaagaaaaaaaacgattgacaaagcggccacgcacaccggcgttccacacgcggaggtccccacccgtcgtagacacaccacagacgtgcgtgcacagtttagttggattaaatatgttggatgacgtcatcatggctggaaataataaaaaaaacaagaacaaatgtgggctatacgctagggagatgggcc

SEQ ID NO: 21287 - DNA, 654 bp, Zea Mays
gaagcgtcggcctggattctccaggcgtgtgacggtgcactccatccgagcaggcggcgcaccgtgtcgagcctcctctcggtctggtaacgctcgggatgaaccagtgaagcatggctgctacagcggcgaaaagagaaatgtgggtgcaatagaggcgcataggactcaaaggagaagggacgcagcagttgaagaaagtgcggatgcgaaactgctggccgcagagtaagtccccttttctcaaaagggccccttcctcgcgcgtcccaaccccctccaacgcacgcctagtgctcatagtgacccggtccctaacatgggggcccaggtccacatgtcacgcacccggagaaccagtctccgagtgtgtggaagacgggtcgtctccccggaagcaaaccgtcacgcacgttgcttaggggtcactaaatgatattttttaggcggcggcaataagacgccccgcgtgcagcccgacgaaaccggcgggagcggaggccacgtacctgccagatgcggggacagacgtggcaggcggcatgactgaaagcaagttggtgacggttacgtcaacaagtgcccggagatggcacgacaaccagactttggccccaccgacaggcttgtaacctcccctgaggcgggcccaag

SEQ ID NO: 21288 - DNA, 632 bp, Zea Mays
cacggaggtctctatccgcaggccggagagactggtttcactgggactggattaattcaccggccatgactgaaccttttgatctcaccccagaaaagaaaaggtgaagtgtcggacgatttaacagcacaacgcaacagagagagagagggcagacgtgaaatgtcgaagtttgaatcgtgcgaagacaacaatgggagtacagtatacacagaaaattgaatgaaactgtaccagttgccctgggtcatccaggccttgtcacagacaacccccgtagcagtacagcaatgggcaggttgccacatgccaaccatgcatctgcgccgttcgcctagcatgctcctgcagtcctccgtccattattgccaacttcaggtctagtccttagtcctggcgctggaaatggtggttccatggcatttaggtttggagagttcaggcaacgcaaccactagatccaaaaatgcacacccagcaccagaatggacaaggccgaccactactcgaccagtttggtatctgttcgactgttcctcccactggatccggagcgcgcgagcatataaatcatcatgaagttgatgagtactctactagtttctctcattcagtgacggtgtcaaatcagt

SEQ ID NO: 21289 - DNA, 272 bp, Zea Mays
caacctttgtttagagtttaggctttttagatagtgtttatgttgcattgtgctacatttgggaggatgcagggacgagggggccgagcagaagccaatgcagcagtcgacaccggaggttactgtggatgtgggctaggttccatggagggatagattgagattgtgtggtgttttgtttcaggttcagcctcaccgcctgctgtggagaggacaacactgtagtctgagactgttgctctacaagttcctactgccctacttcattttca

SEQ ID NO: 21290 - DNA, 299 bp, Zea Mays
gcggcaagtgattagtctcatcggcgatgtcaatcatatatcaaccagaggccgggaacgttgtgctaaagttgtatggttcgtatctttattattatatatgatttggagctggactgatatgccactctgttctgaactgaatcaatcaatggttgtcttgtatccggtgaagatccctattgtgtatatatatatgcaccgtcagagctgcgtgtccggacgacgcacacgcacacccggtagtatcgtattcgtatcgcatctcgtgtgccgattgccgcgccggtccggtcggc

SEQ ID NO: 21291 - DNA, 274 bp, Zea Mays
tgtgcatgcaaaaagggtatgtttggatgcatggctgtcaccggcctggttgcaggagatgttgtttggtttaaagatgtagtacacctagacaacagcggccagttcctttttgcatgccgctggccaggctcaggagaaacgaaggaaaaggtcgcacgccgctggccaggccgaggggtgcctcgtgcatcaggagggccaggcccaatagactctccaggtaaccaatcagccataggttacatcccatgagcctggatgaggaatatac

SEQ ID NO: 21292 - DNA, 571 bp, Zea Mays
cgtaaaggtgccaccgtgcggccctggtgttgatgtttgtcgcgtggaactcccgcgtatccaacgcttcccggacattcaccctcccaaggctcgaattatatacggcttggctccttccccactaggtgtgtgcgtggcgctagctgccatagtctgctagttgcaacggaagcaaacggccggataagatgcgagatggtgaggcggcgtcccgtggacctcgagacggctcgccggccgcgtgacgggtttactttcccgttcggaaaacaccggattttgccattttttctggttttcgcaactcaccgagaaacggattgcggtcaggtttttgttagactattgtaattatagaaagtctaattatggtagtcagcccttgattgtagactgcccttgattggcttgtacgcctgtgcggttgccttgtgagtaaccccggcctctcctatgtatacgcacacattgcagtggaatagaatcaagtcattcccacaattactctttcatggtatcaaggttccgatccaccacacttccgcaacccaagaccgcgccgtcgccg

SEQ ID NO: 21293 - DNA, 519 bp, Zea Mays
atttgtttggttctatgtctgagtgttttgagtccgatggtgaatctgggagttcgtttccttggacggaggagtcctcggatgaaggcttggattattttgttgcattggatgtggctgcggtggagacttcgccgcgtgtggagggtgctgaggatcttcctggtgcgagtactgggtgtaggcggtgaagggtggtgggaaaacatagtgtgggtgaattttcgtgaagtggtaggcgtcgtcgtatggggatggagcgtggccatctccgagtagaccggattggtaaacgagaattgttgtcttcgccgattggggcgggcataggcgagggggatcttcggaagctttttgagggtgaggaattgaggataatgttgtttaattatagggagatgggtatcatcccgaaggttgagccgatgtaatacgtgatgccctcgccgtgtgtatgtaattgtaatttgtatggtgatgcggcctgtcggccgtatttgtacgcttgtgttggtcctg

SEQ ID NO: 21294 - DNA, 509 bp, Zea Mays
cggatacagtgacgccgatcatgccggagacggagatgacaggaagagcacctctagcgctatctttttccttggccggagcccggtcagctggcagttccagaagcagcgtgtggtggcgctgtcgtcgtgcgaggtagaatacattgtcggcgccactggggcgtgtcagggagtgtggctgtcacgcctgcttgcagatctgctgaacatgaaggtcatcgcgccattgctctacatcgacaacaagtctacgcttgccctcgccaaaaacccggtgctacatgattatagcaaacacatcgacattcggtttcatttcatccaggactgcatcaacaatggcgttttggtggcagatttcatcagaaccggcgatcagctggcaaacttattcacaaagccactcccacgcgcacgactccaggagctacgcgtccgtagtggtgtctttagtatagaaccaacacaacaagattaagggggagattgtcaaggataatcttgtt

SEQ ID NO: 21295 - DNA, 745 bp, Zea Mays
ttaattatttagatcaatgatcacatacaaatttgtatccaggatgaactaagtacgtttaaacaaaaggctgaggatcttgaaaataagcttattgagttccaaaaacagtctgatgaactgtcacaggagacacaagaacaagcatccaaagttactcaacttcaagagctggtcgaaaggtaataaggacctgtttggttcgttgcctaactaaatcgtgtatattacaaattctgctcacatactaccaccgcaatatggtgcaggcttgaagcaagtttatccaatatggaatctgaaaaccaagttctacgacaacagtcattggttgttgcatcagctgacgaggataaatcaaaatagatagagaggtacattctacaatacgcatacttcacatttacattttttttcttcctgggctgtactcatgtcctatgagaaagtctcataaactaaaaagaacaatacatttagattggaaagcaagatcgccaccttggagtcagagatcgagttgctccacagcaattctgcactagctattcaggtcgtggttactcctgaaatgaatcagacaacagtaattgaggtaaatttccttgaagagagctttgtgaaaacactacttgggagcattgactatttgataaataaaaacgtttgcatttaattctgtctaaaacctcattcatatttaggaatttgacaagggacaccagcttgaagaagttaaaacggt

SEQ ID NO: 21296 - DNA, 457 bp, Zea Mays
gcagtgcagtccctcgaacggtcaccgagaagaagtcgtacagcaggaacagcaaccgtccggaagaagatgaggaagacgaacaacaacgtcgcccaccaggaggaagacgaaggtttccgagaacaaggcaatgtcgatctcgcgaacaagccgatgtcaatttagcgaacaagctgagacatcaatggactctgtgacgatcaagcagtcacatcgtgtgccccccaaaacctgatgagctgcctatcccgagcaggatctcaagaacacagagccgggaaaacagaatgccatgtagcagtgtgtgacagggcgctaggaaattctcgtggatcactagataaaagaatgatccagtcatatataaacgcacacgggaatgtgaggagatgccatcatgtaaaacagcagtcataaactagccataacaatgactgttactagtaactccaag

SEQ ID NO: 21297 - DNA, 465 bp, Zea Mays
tgtcagcagaggttgaccgtttgcagcgggagattgtggagcgagataggggtatagactgggctgtaaattcacgatctatagcctaggattgtgaggtgactgctcgagcccgtgtggaagagctaagcgtagccctagaaaatctgcaatcgtataataacactctgcatgaggaagtgcacgtgctgtatgaccagttgcatccaaacgtgccaccaaaggttgcgacaatgggagttcgaacatcaggagtagctggtggaggaccttatggggagttggatctctttggagcccctccttccatgaacctcgcgtatgatcgttctcacaaagctagtagtggagcaggaggagccaaggacacagataactagattagtgtagtagtatgtggtttccttatgtaatctaaataaggaaaagtgagttgtataagttgagtatgtataattagaacca

SEQ ID NO: 21298 - DNA, 482 bp, Zea Mays
tgcttacttgaaccttcacactttgctccaacatatctcgtccaagcaaacataactggtatgccatattatatgttacttaccattcctttcttaatgattcccataccaattaaaatgattattaatgcatcagtagaccgtgcagaagcatgtcgacaacaatatcgagtaagacgtgtgagtatgacagctgaacaactcaagaatacacgtgcacgcgctcgagagtgatatgccagaagaagagatcaacgtaaccttgataatcttgagggagtaaacattacctatcagaattcggtcgtggcctcagatgattttggtagcatcgatgttgtatatagaaacctacctggcgccacacaaatgttgcaatctcagtcagattgtccacattgtggagcaaaaaggttccagtacgagtctcctggtttctgttgcaaacagggaaaggtcaaacttgtgatgccacagccacc

SEQ ID NO: 21299 - DNA, 452 bp, Zea Mays
cacacacacacacacaccgaaccccacctagccagaaacaacatctggagcaggggcagggacagagcgtttgtcagctgacagacaccccaacactaaaacagaaaaactaaaccacccgactttgagctaggaggtaagaaaaacccttagccccagccaaagaccacaagaaaacttcctcccgggccagccgaacggccaccaccaagtttggatgggaaccattgaagacaacaccatttctatgcttccacaacatccaagcgtctaaagcgaccaaggagtcaaagcccttcttactcagcccacccagccgagcactattgaaacaccaccagtgatcaaaatcatctatatcctgtcctagaaggaagtcctgcaaaccaaaaggcctgagcaactcaaaccagaaataacgcgcaaaggagcagcccaccagcagatggcac

SEQ ID NO: 21300 - DNA, 354 bp, Zea Mays
gtccatgttgatgttgatcccaatgggtgtgaccgtcctgaagttgatcccaatgggtgtgaccgtcctggagttgatcccaatgggtgtgaccgtcttgaagttgatcccaatgggtgtgaccgtgcaccagctgttgtctgtatatttgatgaagatgaagaagaagaagtcacgttgattcgtaagaacagccggcattacaaaggtagtaagggggatagtgatattccttctctagctttgtcagccttcaggaactgtcaatatcggattttgatcaagccctggaggaggttgtccttgaggatatgctatcggagccgactgctgatgacatgatggatgtttgct

SEQ ID NO: 21301 - DNA, 478 bp, Zea Mays
ttcaaacgtaggcaaactttgttagattcatagctttcttagtaattatatctggcatcagagtgagtagtttgtaagcttacctatagctgatacgacacccttatagacaagcatttgtctcatcagttgaacttgctcttattactttttattagtgcgatgaatttccaaagtatattgagtttgtgggtttgacaataaaagggcacacacgcatcgctatgactatgaccaaaaccgtctttgcaacgagagagtcaattaataaggcctatattatcagacaccgtgattctgccgtgattctgccactgatttgctcaccatgaaagaactttatggtctgtgcacgaccatttctaaatgatgttctacaaatatttgtttgcaggcaaaagatataactgatttgggaactctaaaagaggcatccaagatatttgtaccgggtgatttctgttatcttagaattgga

SEQ ID NO: 21302 - DNA, 302 bp, Zea Mays
gcttcgcacgacctcgtgactcgattcgcgacgcagattatagcgggccagtagaaaccttgacggatcaccttggcagcgagggccctaggccctgagtgagagccgcaggtttcgctgtggacttcgcgcaggatctagaggccttcggtctctgtgacacatttgagcatgggttgactgatccctttcttgtatagctggctctcaataagtgtgaaatcctggcttcggtgtttgaggcgcttggcctcgttgacatcacttggatggtaatatccttgcaagaacagggttattgg

SEQ ID NO: 21303 - DNA, 1032 bp, Zea Mays
aactttgttgtaatctggtcggtagcttgtcacatagaaatcacatagaaatcaaaggaaaacacccctgaatctgctccgtcagatagactaaagaagatcctgatggtacaatgaacgaaaagatcttcaggtgcagtgaatgtgccgccagtgaactccgcgttgtgatcctcgctggcgtcgcgattcgtgcgctctgagtgcagatatcagccggcggtgaaaagatcttgactgcaaatgaggtcgtgagatggccgccatgcccacttgcctagcggccggtccagatgacttcaccggagtttgctgcttgccgcccggatgccacatactaagaagcattaccacgtcacagtaaactgccttaggtagcttgttcatcgcttgagacactgcccaggtgaaagccatgacagctcgcaccagtgaacttcccctctctccggcctctagcgcgccttcttcaaattggacgccaccgtcgatagattctataaattgctgccctagtgagctccgctaggttattacgcacccagtgaaccagccctcgcctccaatcgttcaccatagctcctcaatttggaatttcccccaaatcgggttttccacgcccccgagagtctctcaccgtggccagccatcctcaggttggttcatgcttctctgttggatgttctagcatcccttaggtctcctgttgcttgtaggcttggttgatagaccgcgctgaattgccaagaacatcatagtttctcctcggatcttgccaccgtcatgggcagacgaactctgagtcagattcgtggaattaatggagggattagtgtcgccgagggtggaattaggtgtcgaccaagctagggctctagtcgttgagtatctcggccggtacgggttcaccggagggcgtgctcaccggcgttccccatcggggacctgtcattgtgaagaaatagaactccgagggcctaaatgtgaatgtcagtgagacagggaatagtagccgaggattcttcaccgatt

SEQ ID NO: 21304 - DNA, 396 bp, Zea Mays
ccgatcagatgccagaagctgctaccatgggggcaagatatgaagatgtgcatgttgtcctccaactccgcaccacagtgggtacatcccccgtctggcataatgttcttcttgcatagggttgaccagtgatcttgcatatgaagatgtctggcagaatgttcttcttgcatgtgaagatgtgcatgttgtcctcctcaactccgcacctagaccttcgttgctgacatatagtggaggggcatatcacttaaaatactttggaccaagaccaatctgcccgcgcattgaggatcttagatttccgcgcattgaaggacggggcaaggatcgttttcgagaacaggatcaggatggcaaagatcatgggccacacacctctagaactaatgaggc

SEQ ID NO: 21305 - DNA, 475 bp, Zea Mays
tctaagtcatgagttggatagttttgctcatgagttctcaactgccgtgaagcataagctactaccttgccttcttgcataagaacacaaccgagaccttgtcttgatgcatcacagaagatggtgaagcttttctggatgtcaggtaggactagcaccggggcactagtcaatcttgcctttaactcctgaaagcttcgctcgcaagcttcagaccagacgaacttcttgtcttttcgaagtagctcggtcatcggtcgggctaatttagagaagccttcaatgaaccttcggtagtacccagccaaacccaagaaactcttgatctttgtgactgaagtgggttgtttccactctgacactgcctttaccttctctggatcaacctcaaccccttcaactgtgagaacatgccctagatagctgactctctgcatccagaactcacatttgctgaacttggcgtacaatcggt

SEQ ID NO: 21306 - DNA, 687 bp, Zea Mays
ggcggggagccgagctccggcgagcgcataccggtcgaattactcaatgactggtgctcttctttggtctaaacctaattccagccttaatgagtgtttcccctcaactaatttcatcaatggggctttaacacggtctgtccacggtgacagcgggtaagacggacagtcaaccgcgttcccgacgatctaagatagcttagctcaatcgagttggtcggggagtatcaggggcacacaataacgctaaaacgagagggcagagggtatgagcggacctgagacgcgctggccacggcgaggtcaaaccgagcgatgttcttgagtgatttgggggaaatgagcgattcgtggtctctggtggacaattgaagacaatcatgggtgctatggatgggtgattacccgatggagctcgcaatgcgctcaatttataatgggcttaggcggtggcaggatatttggatgaagacgcgcggcgaccgtgtttccacggtgtgatatttactgacctcgggcgctatccaactgatctgagcgcgaatcatgacggcgatagcacgaatccacgcgtggctcgtcggcagcgagggggctgaacttggaattctgtctgttactgtaccatgggaagcatttgacagagcgcctgacagaccactttgcagggcttagatcttaggtttt

SEQ ID NO: 21307 - DNA, 1256 bp, Zea Mays
ggacaacatgacgggaaatgataatccgtctagtggcgaggtcaagacaacggtaacccttatgggaagatgggtatccgagaaatacacaagttgtggaacgtggtgccagcttgtgtttggaggtggctgtgaggttgggatagcaaaggcaaccgaaaacacgaagaatggtgtagtcagggggctactggtggagttgctcaaagggaactctatggccaatggctaagcagggacgtctgtttaggagataggtggttgtagctagcgcctctgctcagtatttgggtggcatgtgagcatggatgagcagtgtgcggcgatatcgttcagagaacgaatgatgcgttcagctttgccattttgagaggtgtaagggcaggagagtcgtgagtgaatgccgctggaggcaaagaatgtggtgagggcattattaacaaagtcagtgccattatcagcttgtacagccttgatagggaggttgaactatgtgtggacataagcgcaaaaattaatgatgtgagtggctacctcggacttgcggactagagggaaagtccagcaaaagtgagtgaagtcatcgaggatgactaggtagtactgcgcactggcaacgggagaggtcaaaacatcacagtgaataagctcaaatggtagagatgaaactgaactggaatttccaaagtccagccgcacgtgcttgccaagttgacatgaatgacatagagtgtgagcggacttattacatgagatggaattattttgtctaagtaaatttagggcagcagctcctggatgaccaagacgatggtgccagaggttggtggaggtggcgaggttggcttggggcgtggcagggacggtgtagaggccgtcagagctattagagcggagaatcacgcgtctggtctgtaggtccttaacagaaaaaccaaacgcgtcaaattagatagtgcaattgttgtcatgagtaaattggcgaactgaaagtaagttgcgcactagagatgggacaactagaacattgcgaagcgaaaaggatgaagtgctgccaggcaatgtggaggtgccggagcaagacacaggaaggtgatgatcgttgccaacagtgatggatgggacagaggagggttgacgggagaagtataccatccgtgttgtgcatgtgggaggtggcgccagagtccatgacccagccggagttctagagcgccatctggttcagggcagcgatgaggccggcctgatcccac

SEQ ID NO: 21308 - DNA, 564 bp, Zea Mays
ttagtaatgattttgatgaatacagggatggcggtttgtttccactaaaacacaggggctcttttgcatattcgctcggctgaaggggtgtgggttgtttctggccgcacgatctgagatcaagggcccagattagattgcgaagcggtacgcgatatcagtcatcggtacaacatcggacgatcgacattagatcatacccttacgtgcactagtagcgcgatatgaccacaggatcatgatcaaacgaccaagattaccagtgacgaagagttatgcagtcgtctgatgtacaccgcaggtgactgatccaatggccacacacccatcgcccttaaactcaatcgtgaccattgcagatcaatccaatggccagggccagacgctaccttccttctaatttcaaccgttctcatccgatccaacggctgacagtcatctccttccttaggtcgcccagggcgaaggcactagcgccgacggtgactgacccgccggcgttgggcgtagatgcccaggggcaccacaccatgaatgcccgcgagcaaaacataggacaacgca

SEQ ID NO: 21309 - DNA, 445 bp, Zea Mays
gagatttaaatgttgcatggtttacgctatcatgttacacaacgttatgcagtcgtaaacggtgtgcacatggtaatatccgttcctatgattcgtggcacaaaagattccttctatgcatgatttatgcacatttctacatatatttatgcgtgcatatatcgcctgttgcgtctcatccgggattcgtggctatcatatgcatggctgacgcaagctcgcgtacagtgggccgaccgtgacctggttggcgtcctggctagggcttcccccactaacggaagcccagagcttccattatctcttccctatatatatatatactgtatttatatattacacctgggtgcattcaatatagagaatgcacccaggccgaacctacgcgccaggtccgagccaaccgtcccacccaggccgtcttcgtccccccgcacgtcttcgt

SEQ ID NO: 21310 - DNA, 310 bp, Zea Mays
actcttgagcttcaacatctgtctcataggaattcaaaatctcttgaatccacactggttgtacttcagaaagaacagccagctccatcatagcccccaccctggatagagcatcagctactcgattctctacccctttttttgtaaacgatctgaaactgaaggcccattaatcttgccatagctttcctttgtagttcggactgtagttgctgctcccctaaaaaatgtaagtgacttatgatcagtcttgataacaaaaggactcctttgcagatatggcctccatttctccacagcaaggattaag

SEQ ID NO: 21311 - DNA, 532 bp, Zea Mays
aaaggataagaaagtaacagatgatcaaaggatgagtgaagagaacaacggtgtaagaaggctatttatagaggccgggggtgaccgtccactccctaccacgctcgccgaacagtcgcaagtattcaataagcaatttaagccgtctgaaaatgagtcaggcaacagacgctgcttcgcgtaacacgacaccatttagactaaggtcaactgctcgggcgatatgattacatcccacgatcacatcaagttacttctccaggtcagtgtgctaaacgctctgcgtaccaagacatcccttggtcacacccactggggggacaaccaggaattttcaacacattttctgaacaagtcatatccatacagtatatgcaatgaatgtattgagacaaaaggaagagatcgataaagatcgaaggaaatctaaatatagctattgaactgcaagtctagtcagcagaagcattaaagcacagagcgaggtgaagaccagccaagatccatctatcagacgtccaatctgtcaccg

SEQ ID NO: 21312 - DNA, 732 bp, Zea Mays
gcacacttgagaggacacgagaaagtgctctcggtgtagctattctgcatgcactggacgtgtctgatgatacaccggacatgtgcacctgatacaagattgttccgtatacgctgcatagttattaggtgagcataatggaggacggtatacaccagatggcgcactgaacaaatgactcagagagcatgcaaactgacaacatctgctctaaaggtcagtggacgtgtcagataccatatcagatagaaaactcagcgatcatgtaaaatgcacacaagtgctctaacatgcatcaaacatgtttaatgtcatgtctagtgtatgcataggacacttgacacacaataacaactagtttatagttgttggagttatatccgttgggagggcgtcggtggtacatgtgcatcaaatatgtttggtgtctccgattttagcctacgaaaagataaatatgagatttctttaggagtttataaatagacctcatggcatctatgcacccccaatcacttatgtatgcctcttgagagataagaaaaacattcaactcaattgcatcatttatcatcattttagtgacattgaagagctactaatgcatcatattagttcttgcattttgtagcactagttgagcggcttaagccggctattctcttgttactcttgataattgtcgccagctagacagcctagaaatcgtggaatcattgagcggctattgga

SEQ ID NO: 21313 - DNA, 417 bp, Zea Mays
cagatacgccgttcccgcgtgaagcttccgcctaagcgcgcgagtgaaacagcctggcgcaggggttctcttttgcgtctgccgttggagaatgttacaaatgcgtacgcgaccttgtgctctggcgcgaggcagattactgaatacatctccaattttaggtagcatggttggagacagtcttagtatgcgtaggcaactcaaggaataggagcgtagcagttgaggtctcatggctttggctatgaaaaggcgtacgtagatggtgttgttacaacaaacatacaaacaaacaaaaacagtttttccccaccaagtctcgcacgcaccagcacatcgacctgcgctctatgactcactctatccttatctttctgcctaatctttagcgatggacaccgacacgacgcgacgcgg

SEQ ID NO: 21314 - DNA, 1199 bp, Zea Mays
gaacagtgtataggatggcgggttgtttttgataaaactcagagtctgttctgcaaaatgcgcatggcgaaagggtacagggtgatataggccgtccgattagaaatccaaggtccagatcagatccagacataagtgaaccggtacgccacccaagccgttggatcagagatccacggtttacattttaaatacacgcggtcgccctggatccgtccgagttgagatcgacggcccgaacgaagggggtatccccgatctaatcagaaccgttcgtcaatagatcaatggcccaggcgctaacccagctacacacgcccaacaccggccgccggggtagctctacgcggcggcaccatcgtcggtgttcaggcgatccggggagccgggctcgatactagttatttcttcgcagaaggtggagaggaggtccaggcgaaccttacgggagggttccacattggtgacgaatgcggtgacagtccgtccacagcgcctcgcggcaccgcgacggtgagcaggagaactggacgaacagggggcggaatcgagcatggatgggttctacacgtggagcgggttgaggcgaactcggagtaggtttgcttaccggtgaaaaatggctggcgcctgttgactatggtgtgggtacacccggcggcggacgaagcggacctcggtgagcaatccgccatggacccaagcatccatgcccccaaaatccaccagtaagcacgaaccgtgacttcacaagcttgcaacctgacggtggccgacactctctctacgacggagctctcctgggcggcgtgaaaacctcagatcctggtggctgggttgaggagcggatgaggcggtcaagtaccaacgatttatacacccagatgcgctacgatcggggaaatcggttaaaacgacagcgcgatatcagagccaaggcggaatcggaaatccccaaccaaatcgcacgcgcacacggcttccgcggatcttgttgctagcagtgagtccgatttgaggaggaagacggctgacgatgtggacccaccggtcagtggctcgggtaggagacacgcacacgcgttgtgaagaatgagcggctgacgcgcggagaaaattggaagatgggccgcgcgggtgttaaagggatagtgggccgaattcgagatcagggccaactgggacggtttttgttttat

SEQ ID NO: 21315 - DNA, 660 bp, Zea Mays
ggagaactgcgcctaattttattaagtaagaagaaaaaagggtcggaaaggacccgaatacagggcctccttatggagaccagaaacaagcataaaggaaacaatccatacacaactaaagattacaacttatctcagacattggtactgggagcagctaaaaaggaaagacccttagctcctgcaaccatccatttctccctttcctcagcagtggcctctaagattgtagtgatatggggggtgggccgtcaaacaccactctgtttctgaacttccagatcatccaggctcccagaatcaaaagtgaatttacccccttcttggtcatatctgacacaatatcagcaatacgtttccaccactgtaggaagtttgtgtcaccctggagaggggcaagaatgtggagccgaaatttctgaagagtgatgtacatgttaaggcccatatattattgtctgcctatatatatgctacaatacccgagggggctatcatctcgcctaatccaggttagtcacatggtaacagagcaggttagggttagggtttacgtctaaacccgaccctgatccaaatttttggcgccgtcgcgctagctatcctctgccgccgtcgcgggccgtcgcggtccctttccgtcgcggacctcatccctct

SEQ ID NO: 21316 - DNA, 711 bp, Zea Mays
tagaggcttgtcaaatccctcgcagaagattgtcgacggtaaggtatgcggtggacgtcgctcttctagatcccacctccctattctcgagttggtggtctagccagtccagaatgcgccacatcttctcccacctctcctcctccttctgcgaagttgccatcgcttctagaagaaatcttgtctgcacaaatagtttagtggagggttccgtggatgtgacttccgagaatcatggacttggtggtggactgtgtcgcagatggtgttgacgccgttgcctgttggagtccagctccaatcttccaatgaagagcacttcgtgttctattcgttgtctttcccagcagcaagctggtctccttcgtcgcaccccaccgatgattgacggttctgataccaattgtcacaacccgttggtgatggagcaacgccaaacaccatgagtagcaacaaatctggtggaagcaagcttcctggcgctagaaccctggtaagtttccagaagaacatgtatgtggttctagcaactttctgttatttcatttcctgtccgtacatcagagttacaatgtatttttatagctggctagcacacgacctagatccccttgtattctatacttctaatgacagctaaatgctagctaattacatctggcttaatattgaaccactactacttacctaggcaccatccacgatcctgac

SEQ ID NO: 21317 - DNA, 1022 bp, Zea Mays
agcgattcgaataactggttaagaatccctacacactattcacatgtctcactggcatttgcactaaacccctcgcacttctatttcttcacaagtccagaaccccgacggtgaacggcggtgtgcgagccctccagcaaactggtactggccggaatgtgcaacgatcggtgccctaacttagttaacacataatcccaccctagcgaccctaatccctccatcaattgcacgaatccggcccggagttcttctgcccacaacgacggcgaacaccaaggacaaaccgaggcgttcccagcgattaagcgcggtctagctcaattggtcgagctgacaagcattcctagcgtgcatgggtgctgaaacgagggtggggagggcaagagcggacctggagacggcagtccatggcgcggtgactcacggcggcacggagaatcgatttgggggaaatcacgattgctcaggctatggtgagtaatcgaaggcgaggagcgatgcactgggtgcgtaacaagctaacggagcacgctgagcgctcaacttatagagagcaaccgcgagtacgatgaatttggacagagaagagcttgcagtgagaaagggcaggagtcatcagaggccgctcaacgaggcattcactgggctaagtccccgacgacagaggggctatctacagcgatctactgcgacgtggtaacaaggccagtagcgtggcatgcccggggataacagcgatcatcacggcgacggccgcgcggccacatcgccgggcaagtgggtacgacgaagctagttctatccattcccccgctgatcttttcactcccgcggtgatatccgctacacactgagcacgaatcacggcgcgggcacgaatccaggcgtggggatcaccggggcgaagtgcggtgtttctgctgatctttgtcaggctactgtaccatcagaaccttcattagtttgtctgacagagcatcttcagagatgttttcacaaatttttatgtggcaactccc

SEQ ID NO: 21318 - DNA, 543 bp, Zea Mays
ggaggatctggaacctcgccaggaagaaggaggtccgcctttttgctcttggttcgttccttccctctccgtgtgttgcttcttatgttcccagagcgtgtgcccatctcgattaccctttgataattttttcaatccgcaagttgggctccagaaagaggagacatgggttggattagagtatagctcgaactaggattgatcttggcgtaggtgcattttagagagcatcaggatatgttccgtaaaatgttctagtggagggttcgtcgagctgtggtgcttctcgacatgcttgcgaaggtattgagcagaagttccactctcttttggaccaggcagcacgcctaggatgtttctgctttatctgatcgctactttcaatgggataagacattggaacaaaatgccaagcttttcaagctctatatgtgtggactgggtatgtaagttagctattattaacacctgcccttagttctgtcaccttatccctgtggttactttgtcaattcatcaaatactgcttgaatgtgaaaaaac

SEQ ID NO: 21319 - DNA, 1119 bp, Zea Mays
gtcagactggtattgaacaactgaatctgaatctgatagcagaagtggtcgtcagtgttgttggccgaacttggggctcgaatttaagcatgatctagtgagaattcgactaggacggctataacaaagatgaagatgatctagaggtctacaactttggtgcagaaggatgatgatgttgccatggaaaatttggagaaaacctgccctaaaccttggctgtcaggcgcactaaagatgaattccatggtacagtgcatggatcagactaccagctcggtcagctcgccgccgatgatccgtgcatagattcatgccctcaccgtcgtgattcccgatcggaccgactggataacgctcgggttgagtaaatattgtcgacgtggatatattccaaccaatagtttactccggccaccgtaccgagttgccacggtcgtttcggatgagctcgccggtgatagccgattcacggccttgcgccacgtacctaggcacattcaccacatcgccgtgactcactttggccgtctgatcatcgccggtgagagctgccacggtagatgccacaaatcccttgcgccagtgacctcccactcctccgaccgccgcgcgtcgtcgtccgattcaatggccaccgctcttgccttctataaattaatcacatcgtctggtccgtaggataatcacgcaccaagccaccaagtattgcctccaatcgtatacccaagagctctaattttggatttcccccaaactgagtttccgccaccgtagagacaccttcaccgtggccagcttattccaggttcgttcaagcgctctagtcgattgttctagcgtccttaggtcctcctcaagctcctcgacccctctgattgaactagaccgccatggatcaacgggaacacattgttccttttgattatccgcactgtcaccgtggccagagcaaaccgggtagccattcttggaattaggtgaggggaaacgctcactagatcttgaatttggcttcggccaaagtaggacgccagtcattgagcgaattggccggcacgcgagctcgttggagctctgcacgtcgccgtccaccgtcgagggcttcggagtgtaaag

SEQ ID NO: 21320 - DNA, 527 bp, Zea Mays
catgtgattaatcagcatggcattgcagttgaccccaagaatgtcgctgctattgtggagtggaagaggccttctagcgtctctgaaatctgaagtttcttggggcttgctggatattatcagtgtttcatgccaaacttttccagcattactaagccattgactaaactcttggagaagggtgttccttttgtctagaccaatgattatgaggtcagctatcaggcattgaaggacaagttggtgaatgctcctatcttagccttgcctaagagtggtaagcgtttcacagtttatacagatgcttctcgtattagccttggttgggtgttcatgcaggaaggcagggtgattgcttatggctctaggtagttgaagaaacatgagaggaattatcctacccatgacctcgagttggccgctgttgtgtttgccctgaaatcgtggaggcattatctttatggtgagtcttgtgacatttacaccgatcataagaatctcaagtgcattttcactcagaaagagct

SEQ ID NO: 21321 - DNA, 526 bp, Zea Mays
cgcgatggtacagtgactggatcagaacgccagcgcggagaacctcgccgccggtgagccgtgcgcccagattcacgccaccgttgtgattcgtgctcatcagtgaccggataacacttctgggtaaagatcttcgccacaggataacaccggaggttggccaccatacccctgttgctttgcggccggctcagataagttcaccggagttggccgcccgtcgatcagatgccacgtgccctgaagcttcaccacgtcgccttaaaccgcactatatcactggctcgtcgccggtgagtccgccacggtgaaagccactaatcgtttgcgccagtgcccctcctcctctccggccgccgcgcgtctccatcaaattcactagtcaccgctcaagcacgctataaattgagcactccctcggctccgttaggtaatccagcatccaatccaaccgcttgtgccctcaattactcaacagagcccacgaattgctcttttcccccaaaccggtttccgccacgtgaaa

SEQ ID NO: 21322 - DNA, 595 bp, Zea Mays
ggactgctgaatcaaggatctttactggcttctcacggtactgaagatctttccgaatctgcactgcctcttcttcgatgtgactttctggtgcttgcagacatttgcggagctgggatacgtgaaacacgttgtggatgtcagacatggattctggtagttcaagacggtatgttgcgggtcccactctgccactgatgggatagggaccgacgaatcgcggtgctagcttttcttttacttggaaccttctgacaccacgcatcggggagaccttgaggtagacaaagtctccttcctcaaatctgagttctctccgctgttgtctgcataactcttctgtcgactctgagcttcaagtaatctcctgtggatcagggcaacattctcctcagcctctttgacaaaggcaggtccttcaagtgccttttcccctacgttggaccacatgagaggggtctagcattttcgtccatataatacttcgaacggtgacatcttgatgctggcctgatagctgttattatacgagaacttcgcatagggcaaactggattcccaacttttatcgaatgttaacacacaggcccttaat

SEQ ID NO: 21323 - DNA, 709 bp, Zea Mays
catttctaattttatcaatatccttgagagctcttggaggtaagtccaccgccattgcaaggtagatgaccattcctgtcataacatattgaacttgcatttttcttccagctcgagtcatcaagtcagccttccagccagggagttggtcggctatcctgtcaattatgccttgagtttgatttctggatagcttgctcagagacagaggcagaccaagatatttacaggggaaagaagagatctcacatgggagtagatcttgaagggttaccacttcttcttcctcacatctaattggatacacattgcttttttgaatgttggttttcagccctgaagcttctccaaaaatctctaagatttttagaacaatttggatgcaagaacatgatcacatcatcaacatacaatgacactctatgttgcaaaggtctagaggacaagggttgcagcagattttccagttcagcttttgagattaaccagcctagcacgtccatgactaatatgaacaacatagatgagagggggtctccttgtcttaaaccctttttaagctgaattttttcaccagctactccattaagcatcacttgtgtggacgtggtagatagcagtccactcaaaacatctgtccaaatctgtccaaacccaagtttttgaagcacttcgaggaggaaaggccaggatactgagtcaaaagctt

SEQ ID NO: 21324 - DNA, 1246 bp, Zea Mays
gcattttctatgaattatacaaattctatgaattgtttttatattaaactcattttctaattcattttcttgattttataactctctggattgggccaacgaatactgagaagtgcggggaccattctacaagaatttcccagactcaggctaaaccaggaaaggactacgggttgatatcaacaaactgtaggggctcataagaaaatgtatcaggccgaaagggtattagaagcccacagccacccgattaggaatcggcggcccagattacatctgcgcttccctcgaaccggtacggagcaggatccgcacgattcatgatcaacggccaaggtttaatgaagttcagatccgattccccaccatcggatcgccaatcgacggtcatgggtggaagcaatcgaatcagcaccccgatctaatctgatccgcacgcgctagatccaacggtccgcggtcgtcttccccaatcctactgcccgcacgcggcgacgcacaatccatacggcggagcgccgtcggagcagccacagctcgcccctccccggtgccccataacccaatccgagacgcgtacacaagtaggagaacctagcgatcacatggaggggattcatactggcgcgttcgcggtgtagagcacaggccacggcgacaggcgaatctgcggcgccccaaatgctccggtgaacaattatcgccgccctatagctccgcaggcgccaatcccgcctccgtaaggatccgcgcacaggtccgcacgcccacgacccggtcacatcctccgaacgatggtggaggtgcaggaccacaacggcgctcgaattcctctcggatgcacgactatggcgtcggtggtttggtttcgagtgctcaagtccgcgcaagagggcagcagtagggaggcagggagcgcaagggttttaatttattccctaaggccttgattcaggagaagaggtgatcgcccatgaccccgacaatggcggcgaactccgcgccgttcgctgcggagtggaagaggggcgacgcatggatcttgagcgacaattcaggtctagctccatagtccggtaaggcttcggcagccactgcgcaagcgacggactgggcccacgtgcgggatccgcggcgtcaggttcggccagccgagtccgcgaggaagaagcttctggcgccagggacccaccacgaagtcactgcgcgcgagacgtatggagcctggcggcgcagggaatccatc

SEQ ID NO: 21325 - DNA, 454 bp, Zea Mays
agaagaagtccaccccaagctctaggactccaggtcggtacctctccgtccctcccttccaccagatctcttgatcccagcaagaattttcttggacctatcggcgagttcatcgactcatgatcagaacacggtagcaagaatatatcttctgtgattacgcgctgatggctctactccttggctccaggtgttcgcggagccacaagcatgttgtcccccgatacagagaagaagaggaagggcatgtggatccagatcgatggcgtgcacgaggtcaatcggttgttgcaccttggagaacggcgagctcgtcggcgtgcataaggtcaatcgactgccacgccttgttgtctgaccacgacagtgggcatagggcacgccgtcggcatagatccccttcaacaaccggtcacctcggcagcaaacttcggcggccacatcggtatgtctc

SEQ ID NO: 21326 - DNA, 496 bp, Zea Mays
ggggaatttgagtcataaaataaacattgtgtttttgtcccccgtaaatatctaagcacacgaagtaagtgcccataatgaactgatataggagcagagacaaactgactcaagatctgaaccgcatgagcaatatctggcctggtgacagtaaggtaaactaagatgcctacaagatgtctatatcgagatggatcctccaaaggtgtcccatcagtcggacgaagagataagtgaagatccataggcatgacaacagtgcgagtatcactaagaccagaacgatcaagatggtcttgtatgtacttggcctgagaaagataaataccattttgagtttgcaaaacctcaatgcccaaaaaataactgagtgcccccaagtcagacatttgaaattccttactcagatacgcctttacatgagcaatatggtctggatcatcgcctgtaatcaacatgtcatcaacatatagtaatagcaacatgcgtcctcgtg

SEQ ID NO: 21327 - DNA, 1269 bp, Zea Mays
cgaggtctgtaccggctatggccggcgataactgcccggactaaccatcggggaggcttcactgacctaagatggcttcggaacacacatcaatttgacccgaacgcactgagaatggcatgtccacatgcacggcggaaaccgcggtgtcgattccgtgttcttaattatctacgcccgaattggtcaaacggatgctacggtgagctttacgtgcctacatagctgctagaacaacacttgagagatgcagagctttaccagagtggtctggccacggacgagctgttcttggcggcgcggcggactgaattgggggaaaacggcgtcgcggcggctctgggtgaaattgggggtggagattgaggcaaaacggccgtaagaagctgtgctttcaccgtgcacaatcgatttgggagaaggtggagggggcggtgtgaatttgacttcgatcaagtcactgtgtttgcgatgatcacacctcgccgtgaacccaatggctatttatagccgtggcggtccggcgatcacttcgcggccacggacagcatcactagcgcatgccgaccacgtcggtagaaggtacagtgtgggagaactacgacatgagcgccaccgcggcggaattcactggtctcagtggccgccggtgaagtctccggctagacttggggaacggtgccacgtatgcgccgtttaactccgactctatccatttcctatcgcgcgtgaatccgaacggcggcggcatgaattttggcgcagagagggcgctggcggtctgatccgatgttgttactgtaccatggaatgctccatcagtgcttctgacaggggaatttacagagccaataacttccaattttgtgtagtaacatgatcgacactctttaacaaagttatagtcctaagatccggctacaatattgttatagcaatcctaaacaaattattactcgatcatgcccaaattcatgcccaaagtcactgcagtggcactgtcagtctgaaattcagacctcaacagcctgacaacctgactttaggtttaattatctccaaattcttcataagaacatggcttgttctcttaagcaaacttgttatccattaataggtctataagtttgatgtggtgccccagggcaaaaactctatagtttgaaagttacaaggctccaaagttaagctcaccaatctgaaattcagacttaggctgaaatcacaactaggggcctttttgcaaatgaatccaaatcttagggtttg

SEQ ID NO: 21328 - DNA, 461 bp, Zea Mays
gttttgtgtatttgtatgtggaaatctgcagctggcatatatcaggcctcgacttttttggacaataacatcaagtgccacaacaaagaacctgcactatgaactggcaacaaatagccatatgcaccatcactagcctcagtaccatcgctggcctcactacaatcacttaccaccgaaaagaacaaccctcaattttttggacaaaaaacatcaagtgtaccatacaattgaatattttcaaagaaccagcaacaaacaaccatatacaccataactagcctcggtaacatcactggcctcaatacaatcacttgccacagcaaagaacaaccctcagctatttttgaaaaaaacatcaagtgtagcatacacttcaatattttcaaagaaagcatcatagggcaaagcaactatgaactatctcacatgtatcacaagcctcaagaacagtgttgcta

SEQ ID NO: 21329 - DNA, 669 bp, Zea Mays
caaaaacacatttatgtgggttcattttcaaaccatactgacacatcttatcaaaggctttgcgcaaatcagctaaatgagaactaaactcagccgattttactacaatatcatcaatgtagacttccacagtgtttcccaacaactcgtgaaagatcaaattcatagccctttgataagtagcaccggcattttttagaccaaatgtcacgacaacccactcaaataaaccaatgaagcctggacatataaaggccgttttagacgcatcctcttcggccatgaaaatctgattatatctggcattaccatcaagaaagctaataatcctatttcctgatgcattattgattaatgtgtcggctatgggcatgggatactcatctttaggagtcgctctatttaaattgcaaaaatcaatgcatactctaagcttaccttactccttctccacctgcacaatattggagacccactctgcgtatctgcaaggtctaataaaattagcttctagcagccggtggattttgtccttaattcgtgggagaagatcgggacgaaatgttctagctctctgcttgaaaggtctaaaaccggacttaatgggcagccgatgctctacgatctctcggcttaatcccgacatctcagtgtaattccaagcaaagt

SEQ ID NO: 21330 - DNA, 828 bp, Zea Mays
ggacggaatgggatgggatgcgagacgttgaaggcgtgaggagaaagtggtgacggaattgaatacgagggccgcgcccgccgcctgctcgtctagcgctaccggcccgaacgcaggaaattagcaaggcacgtcggttcggcctcggcgcgctggagcgcaggattcagggcggaaggccgtgccgtgccgtggtgttgtgtgcacggcttcgctagctagcagacacttcgcaacggcaactgacacttcgcgtgcacgtagttccgtatagacgacacgagagagggtgctgctgctgctagctagctagctggctggtttcccgtgccagtttgcgacgtttcccgtgcagctagcggggtatagaaggccgtgctcggcactcatggagacgagcatttttttttgttagattttgctgcaggccagatgaggaaataggaatgccggatggtggtggttagcgattgtttggttcagagcggttggatagcagacgtggagctgaaggcgttcgcctcttcgcagtcgcccacacgcagacaccctgctccgccgcggctattgtttttttgtctctccgtgggcggtgccgttgatggttagctgcgttccatgccccccctctcgacggttcagaaaatggtgatctacgtatagaatcagcgtcagtgccggctcctcctgagtggattaggcggaggcgcatcatggcgcggacctaacagctctcgtgatctccgtcagttggtcaatacggttgggcttctttaatttgacgattatatgtggtggtcgtcgtctggacgtgctcgttaattttta

SEQ ID NO: 21331 - DNA, 429 bp, Zea Mays
aaggaaccagaggaggtgttttagtggcttgtagagatggagtctattctgctattgagagtttggtgcatgatttcacagtttcagtcaagttgcaagaggaaggtggtgctcagtggtggttcacgggtgtttatgggccacaccaagaccctctcaagcattcctttctccaggagcttagggaagtcagggagacatgcgctggcccttgggtaatagctggagattttaatcagatctacagctcagaagacaagaacaatgccaatataaatagggccatgatgggcagattcaggagacttatcaatgacttggagctaaaagaaatcccgttggtaggcaggaaattcacttggtcaaatgagagaaatgtccctacacttgttaaactcgaccatgttttctgtacagccagctgggagg

SEQ ID NO: 21332 - DNA, 761 bp, Zea Mays
ggctcctctcaactggtcgaacagatcttctattctgggcaaggggtacttgttcttgatcgtgacctcattcagagctcgataatcgacacacatccttctggtgccatctttcttctccacaaataggacaggggcagcccaaggcgaggtgcttggccggatgtatcctttctctgacagctcatcgatctgcttcttaagctcaaccaactctggtccagatactctgtaagctctcttaaagatgggggcagtgccaggaagaagctctatagcaaactcaacttttcgctctggtggcatacctggtaagtcctttgggaacacatgtggggactcggacacaaccttgataatctcaagtggatctgcttcactgctatcgacagccatctgataacaacttcctttctttggctcagacgggactaactcggtcaccacttcctctcctagtggggacaccaacttgattgtcctcttatcacaattgataactgcctgatacttgtctagctagttcatccttaggatgacatctattccctgagtacccattactatgaggttagcgggaaacactatccgccttatttccacacttacattcaagcaaatgctatcgactcgaattctaccaccgactgagtcaatttgaatgggggttgacatggtagtaattggaagattatgtgtttctacccatgatgaagtaatgaatgatgcgttgctccagtatcaaataacacttctacaat

SEQ ID NO: 21333 - DNA, 526 bp, Zea Mays
agcgtgcataaaaacagaaaaagacaggggtctcaacgtataacgtgctaagacacagacgccactccgtggaggatggagggttttatttcctaattcatcgggggtctaactgcaaacgcgaccggccgaaggggtatcagcatatcagggccgcacgatcaaggtccgatgcaccagattaaacctttaatcggtacgcagcgcccatcgttagatcgggatctgacggccatgttttaatgaaacagggagctaatcatatccatcaatcgccgatccaacgacccaaagtagatcgcgaagcggtacacacaggtgtccaatggattacagatgaacgaccaagctttaatgtatctgagatttaatcctatccctctacaaccgatccaacggccccaaccaagccgcgacgcttgatctcatcccggccgttggctggcaatctacggccatagtgtgcctccccaacattccccctccaccaccgccatcagagcgatggagcacagggcccccgcgg

SEQ ID NO: 21334 - DNA, 948 bp, Zea Mays
atgaagaagggggtgggcattgaacttgttgtcctggaggtctcttggctgctctttttaaagctttctttcctcctttgaatcatatgagtgtgaagcctaacatcactacacctttaaagtgggagtttcatcgtgcgttgggccaggccatggcactattaaatgggtcgtgccttgggcccgctaggcacaacccatttggccatctatagtcaatagtctagtactcctccctcatcatcgtacctgatctcgtgagtgtggaaaaagatgagagaaaacacttcatcttgtttgaccccacaccacacagtcacatacctcgccatccgcactcacctaatctatgtgtttggatcgtgtttgaataactatcccatttaagcaatgtctacctatatgatatatagaaaccgtagcgatgcactggcaactaactatgaattagtcatgcaggagctcattcagcaaatggcgaatgtgcagtacaccgagaacatgacagaggaacaggttgatgctatggcaggaagtgagactttgcggcagcaagcttcactgttcggagcaacaagaaactataaggttgaagggacattcatctatctcagcagcatatttggatcaaacaattgtcttaccaaaaaatgtaattcttacgcaggtgttgagtaagtccacaaacaggctaagggattcgttgcttccaaaagatgagcccaaacttgcagttcctatgttactgcttattgcccagcatcgatccaagtaagatttttattaacttggtggggccattatcaggcatcttgcctttgttccatgtgtttgttccaaaccatgcaaatggcgatgcagaaatataaatggcgtgattgctaatgatttaccatcaaaggaagtacgtactggagtaggataggtgtcaagccttggctgacatta

SEQ ID NO: 21335 - DNA, 722 bp, Zea Mays
ttgccggctgtctgtccgcaatacttgccagcagatttctcaacacaaaagtgatcttcggctatgttccttattccaatagatatatgcacccataccaaaaaaagaacataaaaatattttcaaatttgaacttaaaaatattttcaaataaggatcagatagttcatgaagacacatgtgaatgttttctgcacaaaaaactctttaacactttagtttgttgtgcattcgtacttttgtgccttagaataatatggatcgattagtcgatcagacatcctaatcgtccaagactctagaaaccgaccaacctatataatacgcccatatgctatggtgttgcggtggacatggcttcagacactgaaccgcgggtggagtaggaattgcaggccgacaaacaggcaacagccatacgcccatacgtccatgaacctatcttgttaggtcgagatattgttggtgggactaatggcagagccactactcagacaccctataggactgctaggtggcaatgtccaacccaatcgcgcgcaacaaagagcaacagtagcagcaccgagccaggtcagtacgacctcttgactccaaaatccccaaattcaaacataccgaacaaggaaatgattagaggatatattgcatcccaaattcccaacctctagatctcttgtactgctctcctctacccagacataaaaaatatgaaatcaaag

SEQ ID NO: 21336 - DNA, 932 bp, Zea Mays
tttctatctggaaacctcagattgaaactgaggtgttgaatcttcgtcaagatgtgggatctctgtcggataaattggatgaattgatggcgagtaaagaggagcacaccactactcagaaggtgttcgacaccggggctctgcagtctaggtttttaccatcaacctctatgggtttatctctgcaccaggcgagtccaggaaatcacgatcttcaccttgcatctctgcaccggagcgatggacttggggtggtaaccaccctgactccacctccggtcaaaggtacatctaaaatcccatcacctgatgtctttcattcccctgtgattcatgcgcaagatccttattgggtgtcttatcagtcacgtttagccgcaaccttaccccaacttaattttccctcatttgacggacatcatcctaaaatgtggaaggctaaaagtgagaattattttgatgtgtacaccataccccgggagctttgggttaaaattgcaacaatgcattttgtggggtcggcggtgttttggttacagtcatctgatccggtgttacgtgtggcaccgtggccggagttttgtgctgtagtgtgtgctcgctttgagcgagatcaacacaactctcttatgagaatttttttccacattacacaaagtgatacaattactgaatacgtcgaacagtttgataccctcatgcaccaaattcttgcacatgatcctcaatttagtatttctgccattgtgaatagattcatagatggtcttgcccctgaaattcgttccatagtctttattcatcgtcccctcgatttggatattgtcgtctctctcgctttgttacaggaagaattggtgcaacctctagtgtccccatcttcaagccgaatgaatcattcttcaacacacaaagctgttcatcggcaattt

SEQ ID NO: 21337 - DNA, 629 bp, Zea Mays
caggatatgcatggctgtgatgcgactgcaactgtggagatgggaggttgtgttgcggtgccagaacggaacagagtcaatgaacgacaccgtgtgcgtgggacgacaggagacgaaatctcgtgaggatgggcgaacaccacacaccggacacggacaaacaccaagcagaaaagttagatgttgggacggcgggagacgaaatctcgtgaggatgggtgaacaccacacatcagacatgtgcatgcaccaatgagaaaagttagatgttgggacggcgggagacgaaatctcgtgaggatggggaacaccacacaccggacacgggcaagcaccaagcagaaaagttagatgttgggacggcgggagatggaatctcgtgaggatgggcgaacaccacacaccggacacgggcaagcaccaagcagaaaattagatgttgggacggcgagagacgaaatctcgtgaggatgggcgaacaccacaagcaccaagcagaaaattttgatgtattttgcaaatatgtatatggtcgtgcaaaacatataatgtagatagcactgcttttaaagtatagtttgaattagaaggtgtgataggcaataagaaatgagatacgccagaggtag

SEQ ID NO: 21338 - DNA, 390 bp, Zea Mays
ggttgtaaggttctttgaataaggatggacgacatgttattaaacaggaaacacagggactcatatgtaaaaaggattcgatgaaggggtacaatgtgattagagtcgcacgatccttttctgacggacccaataaaacgctcgaaggggtatcctccatagaaaccagcacctgacccctacccttggatcatggatccacgatgcagatttaaaatagccaaattgttttctatgcgtccggcccggatcgaacgacactgattgcatcagctcgaaccggtaccttccctctaatcagagccatccgttaggagatccatggcttagatccgctcaccgcaaagatactttaggttttaatcgcaacccttcatctgcgaactgacg

SEQ ID NO: 21339 - DNA, 576 bp, Zea Mays
gtgcaggttctggaactgaaggtaaacatcacaaacacagcgagcgctgacggcatagaagtagtggagcaacccgctggatatattgaagtagggtacatgcagaccgcaatggacgactggagtttgtggccgcccagccggacacgcgaaacacacttgaaggcgcatatgtagacaaagcttgcgaaggtaatccgcagctgtaggcctctgtctgctacctcatgccccagcgagctaacaagaactaatgtagtgatacaagtggcagatcgcatcccctggaacaagcagaagtgtgcatacttttcacagacaaagcagatgacaataaacagacctaacatggcaaagttgtttcccacaacatcattccacagctcaagatgactgcagtccagcctcattagggtcatccaatccgcatagggcgaccaaagccttggtggctaggtgggtcagcgggccattgaacaggctgaagtagcgcttgagctcctcgtcagttgcccagttctacatctgatcagagtccgactctggtaggattccaagccgcttcatgagcacttg

SEQ ID NO: 21340 - DNA, 578 bp, Zea Mays
cggagtgcaaatctgggcgggatcatcacctccccgtggccggctcgctagcgcagacaatcaccggtatgtgcacctcgcccagacccgccttcatacccaatacgcatgtaccaatttaattgtggtgtcgtgcacgtaattcggagaatcgctccgccggcgtgagacctcaccgcggtggcgtctcggcgcggctccgtcgggaggtaggtgatgacctccagccgttggatccaaatcgtgcgccgcggattggttctggctgggcaattgggggattcgatctggtccgtcgatcggatttgaacggctagggttagatctaggataataaaatcgtcaccataaaagacgaatccaacggctctgggcgcgtacccgttcagtagagattaaatctatttgtggccctcggatcagatctgagtggtccagattagaacttaccccttcgtgggtatcttttgcaaaggagacctcctgtttccggggaatcaacccgccatcctcgggagctgttctctgtgtctgggacgacttactccgagacccctaatctatctggtaattgaggc

SEQ ID NO: 21341 - DNA, 420 bp, Zea Mays
tgttgcggagcatttgcatgagtcaacccaaatgaatttggtacttgtgaatgcatctgatgaggaaaaggcggcatagatggtggtcttgatagttgaggcaaaggtggttgcaactgttgattatatattgtaggactttgcaaaggttgttgtggctgactatgaactataggtatatgcgatggaacattggaatactgtggaggagcatgaggtagggccatatatttggatgatgagatggctgaggagctgatgaaggcatctgatggataaggtatccttttgcttgtgctgattgtggtggatttgctaaaatagtaggagggtccatggtcgatccaacattagacaagccagatggaaacgaggcagaaagttgagcaacactgctggttagcaggtaatgggggcggg

SEQ ID NO: 21342 - DNA, 729 bp, Zea Mays
tgaaacctaattcaagccctaacaagagtttcccctcaattaatttcactaacggagctctaactcgctatgtccatggagacagcgggcgcaacggacagcacgacgtgttcccggcgatctaaggggtcctagcctaattggcggggtcggggagcatcagggacacacaagaacactgaaacgaaagagcagagggcatgagcggacctgagacgagctggccacggcgaggcctctttcacggtggcggaaaatagaattgggggaaatggcaaattggagagttgtggtggctaatcggaagcaggagcgggtgcttaggcttggtgataacttaatgcagcagaccgtgccgtcaatttataggggcgctaagcggtggccagtgaatttggtttggcgtggtggccgccggagagtgagaagagtactgtcgtgagagcttggtggcatctaccgtggcggctcaccgacgatctcttgataggtcagtacgagtcacggcggcgtggttaaagtgctaaggcacgtggcacaagaccgcgaggtgtctaactccggcgagggttgattcaaggcgatcggtggtagagcggacacggcggccgaacgaacagtgccttaagctcatctagggggaaagatcttttcaccgtgaaacgttatccgggcaccggtgagcacgaatcacctcatcagcgcgaatccacgctcgggtcaccagcg

SEQ ID NO: 21343 - DNA, 450 bp, Zea Mays
ttattcgacacagggaaaagaacttgtagcccgtacttgagttgttctcctttaggggcgatgaagaggatcctggctctagccccttgcagcttcaatgacccatcagagtacatcttccagacttccataggctcagggctcttagggacctgattttctgcccactctgagatgaaatcaactaaagcctatgttttgatagctgtgaggggccggaactcgatgtcatgagccaccagctcgtacgcccatttggctgtcttccctactttctcccggttattagtatgtctccgatcatgaaatcggtgaccgctttgactttgtggtcgccaaagtagtgacgcaatcacgcaacttgcgtgaagtgaggaggactgcgtagagcaacttctgaacttgaggataactgatcatggacggccccaagacttcgctgatgaagta

SEQ ID NO: 21344 - DNA, 547 bp, Zea Mays
gtcgtcttcttcacgcggtcatcccgtcatccccgacagacatctctgtgatggcatcccacacctccttcaccgtctccttgtcggtgactgcagacaccatctcaagtggcaatacacaacagagagcgtcaagcgccatcatctcctcgtgtgaatcgtcatctcccttctcgatgaccttctgccgagctcatgccttcaacttcaccttcatcgggagcactaaatatgagtaatttatctttgtgagggcggtgtagttatccctaccacccacctcatgaatcacctcctggatgcctggatcaccatgccatctttaaaggtgttgttcttagactttgtcttggatatcttcgacaatatatctctgataccaattgttaggacccttagaactttgttgtagcaagcacttgaccaagagagcacacaaactcacgtaacagtaacacataagaacacatatgaagcacaggacagtagcgcaaggattgacaaatcacagctgggtggagcatattagaggggccctgtcagtgca

SEQ ID NO: 21345 - DNA, 478 bp, Zea Mays
gtcgtcgcacacagcaggcagcaggtgaggaacagatcacgaggggggatggagcgaaagggagggaggagggaggacagggcgtgcctctctctacgtacggtatcgacctgctgggtgtggcagcacactactcgtgagtacagtcgtcactgtcacactgttgcctttatatattcctagccggtagctcatcacgcttgaaagacgcatgcatgcatgcatggcacagttagtttgctctctgtgttcgtaattaatttgcatttgctcttgcctgatcaaatcaaaagcgatcgataacctatacacatcaaatggttccgaatgtacgtacgtgctatgcccaaagtattttacgatgatatacggtgcatgcatcgcatactgtatgcattatacggatggatggcaatggcatcgaccacacaatagcatatccatggatcttttatagctaggtacccgcccgccccca

SEQ ID NO: 21346 - DNA, 674 bp, Zea Mays
ttgaacctcacattgaaattaggatttaaaatagagaaggaaggaaagaaatattatacaatacaaaatagatttataaataaataacttcaccacattttggtatgatcaaattaaatagtcagtctcagtacagatgtgccaacaaatgtgaattcaaaaatttgaaatttacaaataaggatggaaaataaaacagaaaatgagaaaaagaaaaggagaaaaacaaacctaacctaaatgggccatggcgacctattttggcccatgctgtcttctttccgcatggcctgtccactgggtcaatgaccaacctgccccaccggtcagccaaggcgtgtaccgcccgatcacctgcacacatcggtcactgtggcgtgggcccattcgtcaatccctcaagaagccggacccgcgacacactcatctcgctgccattcgggacccacttgacagttgtttcctccccaatggaacgcgaacttggcggacgaaatcccctccctgcgtcgagttccgttcgttcaaatcgcgagatgtccgcgagattttcttcatcaggagtataaatccctgtcgccctagtcccttggccaccattgacgaaccgagagccacgaccgccatggccgctgagagggaagaagaaagggaggctaccgcggtcaatcctc

SEQ ID NO: 21347 - DNA, 380 bp, Zea Mays
ccaagggccacccgtcagtgagggagaaggaggactgtctacccgggaaacgcccgtccccgaataaacctcgagacaccgagcccaaggtcaagcaaggcggagctaccgagggggtagggcgagccggaaggaagccactcaagtggattcctcgcttgacccgagaccaacccgtcataagtggtcagaccattaactacgcctaacatcgagtcgtagtagagagccgacccgtctcacactcatgacctgcacccctcccagactacaatgcactcatgacccccgtgtcccttcggtcagcaggcattcatgacctacgaactccatggcctgcagagcactcatgacctatcgagcctagacctaagtacgtt

SEQ ID NO: 21348 - DNA, 554 bp, Zea Mays
gaaggctagaggagatgcgaatagtgatatcatagaaatgctctagaaattcagccatcttcttggcattgtccaaatcatcctcattagggtgatcatgtcctcctctcacctcagatagctccaaaacatagctaacgtcttcagccaacctcaagaataccttctcatacacaattgcagccttcaacattagatatgttgaattccatcttgttgggacatcaagcctcaaaaaggccttgctgtcaaccttctcttcctctgcaatttccttgaactttaccaaccttgaagttccatttttatgtaacgaacaacatccctaacacgctgcactgagaggtccacatctttcaagccatctcgcacaatgaggttcactatatgtgcagcacacctcatgtggagatacttgccatctgctattatttttttctgtaattgtcttctcaaataaccaatagcactatcattggcacttgcattatcaactgttacaatcataattctatccaaaccgcagtccaccaaacttttgatcaagcttttcc

SEQ ID NO: 21349 - DNA, 627 bp, Zea Mays
gctagtccacgggttgtataaggatggccactgagaaccacccaaagcgccaccacggtcgcccgacgggccaccgccactgcgcccgcccttgcgaccgcgttcctaaagccagcatcctgtcttggagctctagagggcggcggggctggagtgctgtgaacaggaacccccctcgaagtcggagggggcagcccgaggtacgctgtagagcgtcgtggtgagagcagtggttgtagtggtggagaggtgaagctcctcgagaagcagatcgttcttggcctccacaaaggtgggaaacgacatcatgcaggtgaggatgggcgccacgcgatcgaagcgaggactcagaccacaaaggaggttgagcacaagactctcatcggtcatgggggccccgagggtgcggagagtgtccaccatcgtcttcatttgacagcggtactcgtccacagagagatcgccctgaacaagctgacggaaggcggtctctaggtatagaatccgagtttggcggttgccgaggaactgagcctcaagggcaccccagatccggtgagcagtatcgtccggcactcgaatgatgtcctaaagctcggccgtgagggtgccatggatccaagatag

SEQ ID NO: 21350 - DNA, 2159 bp, Zea Mays
ctgagtctgatgcgtcaactgaagtagcacctgattatgattatgattatgactatgataatgatatggatgttgcctctgctgatgagttctttgaagcagaagaaatcttcagtaatgctgaatctcaagatggaaataaggatgcggatactctttctatggtctctacagattatattcgaactccaagtgccgaatgttggaaaaactctccattttccaactttgatctgaatattgacattgatggatcacaagacaataaagccgataacttgggcttgttgttagaaacagtaaatgatggaaagacatgcacatccactgaagccaatattttgctcaacaatgagactgcagttgtgaagtcaacttttaccgctacaatagcatgcacatccactgaagccaatattttgctcaacgatgagactgcagttgtgaagtcaacttttacagctacaatagatggagacacagatagcggcatctcaagttctacctataaagaggatgggtgcatgtttgaaaagggtagttccaagcaggatataaggatgggttccaatcaagacttgagccagattgataatgtattggttaaggaggtgattatattagaaactaatagtactgatgacatacagatgatcaaagaggtcatcatatctgaagttacaactcccaaacaagtggtagaggggaatatgatggaaactgaattagatgaggcagtccacagttcagaaagcactgcactgggagaagacgaggacacaaaacgacctaatacttttttcaaaaaagatgagggacagagtgcacgagatgaatatgctgcttatgacaatggcatagtgattgaacgggaagaaagtcgcaacaaagaaaaatttaccatcacaggcacagattcactagtggctgagcccaaagatttaccacatcttgacagctcaaacacttctttggaactaagttcagccaatgaaaatattgatcagcttcgtgcttgcagtagtaatgtcactgcagagcgaagagcaggaattgacacatcattttccagctccaggagtcagtcttctaatatctcttgtgcgaacattctaccagaagaatctaacttgataataaaccatgcttcaacttctgtgaatgcaaatacagatacaaccgattcatctcgactggtgctaaagaaaaaaccttttctaccattggcgacatctagtcttttttctccatcatctcccagacgcaatctgcttcgtgctgcatccacagatttgtcctttttttctccatcacaaacagaatctaagcagaactccgttacttctacaagtggaaggggtgattcagatacatcttctgtgcttccaccatttcagctctacacatccctgggatcatcatccaaaatgtctctagtacatcctactctgcgaccaataagaacgatttcatctctaccatcattatcatttggcacattcatagagatgtcaatggcttcttcaagatcacccaaacaccaagagcatgttagatctccctcaataccacaagatcaacatcttcacccaccaatgacagaggaaaatgatctacattcaggtagcttaactttgcctgcttccaaccaatatggccctcaaaccccacacccacctccactaccacccccacatgattcttgcacccaaagttattcgagcaccataatatatgaacctgaacaaataagagctgatggatcttgttcctatagtccagattatagacaaagtgttctcaacttaggtgattcctcactaacttcactctctaatagtagtatagctgcaactgaatgtcccttaggagcctctgattttgtagatgaggaagtaacaagtagacctaatatagtaactgccatggatgtcccatttaccaatgaagatacaaattctttgttgcacatgacttgttcttcacctcccaaaacattacaacgtgctgaaccaccaacgctgccgccaccacctttgcctctagtaccaccaccatcacaactaccactgccaactatatgcagtgatagtggatcagttccactggtatactcaaatccgtcttcagattgtccatataaagaaccaacaatgcta

SEQ ID NO: 21351 - DNA, 875 bp, Zea Mays
gcaagacagccttgagcacccgcctgccattctgaccgtcgccaccaattttactagtcgagctactcgccaaatcatttttctttctagtgcccccttccttatcctatgggacaggcccatttccatcagcaccataaggttcatcatctccaaaaccctcatcatccatgtccatcagaaccgggttatcagagtccacattttcctctacccgaaattgcagctcatataaatggtcaccgatgacaatatccacaaactgaggaatgaggttcggatcaagaacaagtacttgaagacgacaaacatcaaacttgttcgtaaacttcatatcgacaacctttgtcacccccaagattgatccaacaacccatatcaacaaatactgtttcatttcagaaggtaaacccgtaaactggagccatatttttttaagtacaaccttaggcatcttagcggcgactggttcttcaatcttcatggccgcattgtattttgtttggaccacccccactccaacatatggtccaagtcctctcgcgatggaaacactgtcctgaaacagttcggaccagatttctccacaacccaattccaattgcctgagaccaatctctctaattcagccataacttgcgactccgacaagacaccgctagtgatcttcactgaggccaacaaagacacggtcttgtttctctgttgcggcacaaaggggatgtagtagaaacctaaaccatccacggcgtaaccgcaggttaaggcactaggtttgtcccccatgaacttcggacacctttccgtgttgtgggcatcagcacgacagatgtcacaaaatagcttagcagtacaacatgtgtttctatctccac

SEQ ID NO: 21352 - DNA, 744 bp, Zea Mays
ctcggcaagggcgcctcgggcgagtactggcaggcttctgagtatccaaagttgtatcagcctctgggaggggcgccactaccaatgccccaataggagcagcatcagaagagtcctcagccagcaaatcaagcatagcgcttatctctgcatcactagggttcaggggcacctcaaaatggacctgctgttcatcatcaggaatctccccgagcgaggcaaccaaggcactaacttcttcagcagagggccgcactctaaggcccaaactgccatcagtgacaggaggattcgacacaaaaagagtgaaagctttgggaggaggcaagttccaggctgagaatgccaatggggcaccaacatttgacactttgcctctaaggatcatctcaagtcggctcaccaagtccatagagggaattcttctgttagtaacccgagttgagtcggctaggcctcgatacagataagtcgggtatgccttgtctttcaacggctgaatattcttgaagacaaaatcagcaaccacagcttcagcagtcagacccctctctttcagcaatccaacttcagccagcaaagcacctgcctcagctacctcctgatctgtgggagactcggtccagcttggggtgcgaacatccggctgtcttcccgaccaggggggagagagttttcataattctcaactatgaaccactccaagcgccatcccttgatactgtctttgagagggatttcgag

SEQ ID NO: 21353 - DNA, 456 bp, Zea Mays
tgcaaaacgactataggagactagcacgtgcatttgataaatctagcattgcaaattttccttcgcacgaggttgagttaggaggtaactcatgtaatacatcggctataggttgtcacgaccaacccctttatgggatgccgatggacacgtcctgagcaaccgcaaatcggcagtaaatcagccgatctgcacatgtccgaaccgtccgcccgtgatcgcggaccgtccaggccagccacagccaggcccatttttaatgagttacccaggcatgcacccgagccaccacatatggcacagaatctgaagtacctagtcggacggtccgcatataaccacggacagtccgggccaatgtccggacagttcgcacatgacctttttgaggagaattgttacctgaaccctcacccatcccagcaacacttcccttcacactatgcaatgcatcag

SEQ ID NO: 21354 - DNA, 472 bp, Zea Mays
caatcgacttaagtcggcaacgacttaaggcggtgcaacatgctcacgcttactcaactcggggtgaccactatgccctacaaacggagcaatcgacttaagtcggcaacgacttaaggcggtgcaacatgctcacgcttacttaactcagggtgaccactatgccctacaaaacggagcaatcgacttaagtcggcaacgacttaaggcggtgcaacatgctcacgcttactcaactcggggggtgaccactatgccctacaaacggagcaatcgacttaagtcggcaacgacttaaggcggtgcaacatgctcacgcttactctaccgggggtgaccactatgccctactaacggaagttaccggctaaaagtaattgacggcttaaaccagaatagcatactcgcgcttatgcagttcaagggatgatctccatatcccacaaacaaacttcataatcatcgtgcagcg

SEQ ID NO: 21355 - DNA, 572 bp, Zea Mays
ggggcgacatttgttcaatagcttgcatcacattcatcatccgtcgtttcttctacttcccggccttctcttttgtagatggagcgatttcctttgattgtaagaggctagtcagatctaacctcattggacttagtagtgtaaatggtatggattcagtcattaccttcagaatctctgaaacttcagcagcagagggtgaaggaggactcatagtcttctctagcacatcatgtacctttgtatcagctgaagatatcatgacgagttttcgctttgtgggagccgaatccttcggctccgaaagagtcttctgtttcttcgaagttttctggtcctccttgacagaccgggcagcttgcctacccagaatactgacaatcctttttcttttgccccctctggccccttcgtcaagcctttcatagtcagtatattcaaagttaagagcatccataacatggttcaaccttcgtttcggccgggagccagggcagtagtcatcaactggtcttctttcttcatattatttctgaggatctcattgcacatggttcctatcatttctaacc

SEQ ID NO: 21356 - DNA, 726 bp, Zea Mays
acacaaggttcaatcagaaacaagttgcaaaaatagtgtacctaagtgcaagggaaactttaattatctccaatatttaagctctgactcaacgaactcaccgaaagctgcatgtgtgccatcagaactacaatcagctgtccacattgttcgatcaagtgaatgaactctgtaggtagtccatggtccgattgccaagtcaacagcttcagaaagatccataatatataaagaggcacgagattctccagatccaagagtagccaccatgttttacaacgtcaagggacacaagctcacaacatatttccagttaataataaagaaaacataatgcaaacatgtgcaactatggcaacaccaaatgtccaaataaatagagagtacaataagtaacgagttcaggatacaatgctcgctgaactgatgaattggtgttcgatgcatcagggacatgacgtccgagcttctttatgcatgatatactggatgagaaagctatgaagcctgttccaggtgaccaaatgctggggagtggtcctggcttgtgctttcccacaagagtacaagcaggttggggcaaaaactctgcctcattctcaaagttactcagagcagtccctaatccgtataacctattaagagattataggaaaatgcaccgtgacatttgacattagtaaggccatgaacccatgctcttacacagaagtaagaacattgaga

SEQ ID NO: 21357 - DNA, 389 bp, Zea Mays
gttgtgcaaagctgaaggacggaaaattgttgggagtatgctccgggtgaaatttccataggttgcattatccttgtggtcccctggtagggattcgagagtatggagaagttgggcaaaagctgaaggtcacaaaatttctcgagtatgtatcaggtgaagtttccataggttggcaggaattcaggagcatgaggaaagtcgggcaacagctgaaggaaagaaaattgctggcaggcttaagagaactacaatagtactccctttggtcgtcgatattagatgacaggattgataaagtaagtagtaaatttactgctctacccctgctaattgctgacgagaaagcaataaatcagtgtaccctgttcgtctgaccgttcctcaat

SEQ ID NO: 21358 - DNA, 760 bp, Zea Mays
ccgggatccacgaccgctgcccctcccccgctacaactgtcgtccaccccctcccccctattgcgtccgcgtgcatcgtgcctactccgactgggcaatcaccgccatcgttctctccatctctctagctgccaagttagtagcacaaggagaggaacatggggacctgatcctggacgatcgcaggggcagcatggagttgtcgattgttggatcagatagcagggtcttgggcgccaccgtggcgcacgagcttagagtgtgtgcatccaagaataggtgagcggcgacgtgcacggtaagccgcagggcagcatgggccatgagcacgaaatctgcctccacagtttcgtgcctgactaggtggggattggctgaatagaagaaacacacatcagatcaatatatgcttaacgagtgcttgattaaatgctggaactgaacatcgtgtcctaggtgacaatggtctctaagtaaggcgagaatggccacccatgggaatcactggatctgtttgcgctcgccatctggtccagcactaggtcagttttgtctatacttgatcttgtttgctttgcatataaattatcataccatttttgtagaattgacgattatcccagtttgattcaggaagctaggtattaagtgatgtgatggggtagttgcaaagtaccaaatttgtgttatgataactcatacgattctatattgttgcaaaagtgcccagtttgtttcagaaatgcataactgcttttgg

SEQ ID NO: 21359 - DNA, 462 bp, Zea Mays
atttgttcaaatgaaatgaataataataatatattgtgcatgtcgagttgtgtttgtgcactcaatctgatgttttaaatataaactcggatttgaataaaaaaatagaaaatataatataaaaaaacttagaaaagaaaaatagatgaaaaaaaccaaagctgcctgccttacctgattccggttagactcagcccatgggtaagcgttgattagccggtgctagttgtttccgaaaccagtccacgttcccgttttccatttctttattagttcagccgcgcgctcgcatcatcatgacgctagggtgacgccagcgcatattttactcgtttcgtggccagcggctggacccataccgtcagcctcacagcctgttcatgctcttgccgtagatcccgccgcgcgctaacagcacacctcaaccacctccgcgcccgtcggccgagtttgctgggtccg

SEQ ID NO: 21360 - DNA, 705 bp, Zea Mays
acatcgcgtgaaacgctctcagggcagcattcgcgtgtatcttttaaccagaagtaattcgtccatctccgttggcatctaagaatactatgaccgtctcgatgagagcttcgatattgcgcttctgaatcatcattttcacttcggctttgccaataatctatgaatttccttcttctaggagaacttcgtcttctctggtgatttacctcaattactttcttcttcattttgagttcttcttcgtcgactgtagtgttgcaagcaagttgaccgcccctgctgcatccacatcaagcaatggttgcacccctctgtgaccgtgcgacccctatgatgggccccctcgttgtgccgtcctggccacttcaccggcaccggcaagctaccactatcggcgaccttgccatacgcctgccgcctcgccatgatccggccaacaccatccccgcctccccttcgcacgggagcgcacgagcctgcgtcatgtcgcagagccactaccgccactccaaccggtgagccgccagcgccgtgtcgccattgcgtgtctgctctagtgagtcgtcccctgcatgatcccatcccttgctatcgctcgtacgtgcgctggtagaggaagaagaaaccatcccctccccacttggccacggagagatttgctattttgtcactctaatcatagacacaaatagtcccacaagt

SEQ ID NO: 21361 - DNA, 596 bp, Zea Mays
cttcaaaaggtgccatctttagactggactgatagctgttattataagaaaactctgccaaggatagacacttgtcccaatcctttccgtagtgtagtgcacatgcccgcaacatgtcttccaaaatctggtttaccctttctgtctggccatcggtttggggctggtatgctgagcttcatattacttgggtcccaagtgattcttgcagctgctcccaaaagcgtgccacgaacagtgctcctctgtcagacacaatggtcttcggaataccatgcaatcgcactatttgatcaacataaatttccgcatacttctctgtcttgtgggtggtatgcactggtaagaaatgagcagtcttggtcaacctgtccacaataacccaaatggaatcatggtgcctggaagtattgggcaatcctacgataaagtccatgcaaatgtcctcccatttccaagatggtatgggaaggggttgcaaagggcctgctgccttcaaatgactagctttgatcctctggcaggtgtcacactcggatatgtacttggcaatctcccttttcattctggtccaccaatataaagatctgagatca

SEQ ID NO: 21362 - DNA, 724 bp, Zea Mays
tgtagaaagactcccaagtttgggtgttgaatagagggccggctgcttgatcacgatgagctgaaaaccaagtgtccactggcacgtgcctgaagcgacgaaccctagcggtagtggctctatgaagatcaaacaatcacgggtccacaacaagtggctgaacctcgatctcgtcacgctctctaaaatgggcgggaggtactggtggagtggcagatgtagcaggagcgatggaagtaggtgtggtggaggttgcaggtgtggcgagggtggtggtagacactggagtggcggaagctggcgtggtagtggagggtggagtggtagtggtgactagagcatatgagttgtatctggctagagtggagcatgcccaagatgagaagcgacagacatagaaggctatctagtttgatccaatcctcatctgccctccctgctctgccctctcagctactactgctgctactgttctagtgactctgtccaattttctcttcttcttctctccatgcagcactaggtagacctccttgcccttgtcctatctgaacaagcgagggggatcctgatcattgccccctcctactggggtgacatttttagtcctcaccatcctgactacaggaactgcccactgatcattgacacactgcacgagaatgagagtagataagcgagagcagcaaagtagtagataagaagagagataggaaagatttgc

SEQ ID NO: 21363 - DNA, 1025 bp, Zea Mays
tcgggtaccacatcatcatacaaggctagaacaccaggcgccgccagctcctcaaccgcaacacacgggagggtaggggcatcaactggtcctgccaatgaatccgaagagacaggcaccgccaaaacatccactggagttaaagggcaacccgaatcaccagtagccatcaacgcatccaaaagccccacatcatcagagggtccatcacgcgtcgacgtggaatgaaaacgtgggcccagccgcgagtgcaccgaagtccaaggcaaaggtctgatcacccagcctccgcatctgccgagcccgacgaccctgctccggctcatcatcagatggatccggtggaggtggcggcagctcctcctcaaggacaccctccgatccaataatcttcactatcacagggaacaccaacgaacgtggaatccaaactccgttttcatcgaggaccgccggctccacagcatgcaggtccaacacctccggcaaccccacgggagagcgacaccatgctctcaacctgatgactgacaagtcctccccgccgatagaaaccgggtgcaggccctgaatcaggcagtatggaccaagcaaaacctccgctgtctccagtccccaaaggtgagcagggataccatggagctcgacgtcaatgagggaagacaagacactgcctcccgaagcaaaagcctgcctagtccatctcttaacatgcaaccttaatggagggacaaggagcgacgatccttcactaatcacccgcacagccagttcctctgaagggaagaggacaagaaaggagcctggcgcagcacgacgtaggcggagcgcatcggcgtcaaggccaaaccttgaggcgagcacctctctaaccttcgtggcgcaaccagttccttcctgtccaacaacgttgacgatcagggcatggcgaagttccaactcagcacggtcgatcatcctggaacgcccaataaacctcacaggacgaggaccgtccaaagccgtgggcgacaaattccccaaag

SEQ ID NO: 21364 - DNA, 751 bp, Zea Mays
gatagcagttgatccagataaagtgcaggaggtgatgaattggaagcctcctaccaccgttcgctagatttagagttttctgggattagctgggtattatcgccgctttatccctgacttatccagaattgccaagctaatgtctgagctgttaaagaagggagtcaagtttgaatgcagtctaagtgtgaagatgcctttcacaccttaaggcaacacctgacaaccgtaccagtactagcacatcccgacaatgccaaacctttaatgtgtattaattgtgatgcttccggcactggacttggttgtgttgcacaaagttgtttggcccccatacaccaaagaaagcttaaggtataagctaaaatccttacacagagatcttggcatgatcgggtatgacaaggtgacaaaacatgagggaaaacagactcacgcgctgggccacgtgttcgatgccctctacgcgcacccaccacgcactggccatgccacgcgcgcacccggtcagccaccgccacgccatgctacgcccgcaccaataaaggccaccgaggccctcagtcatgccctctgttctaccctccatctcttgcctagctcctcgagccagcactccactccggtgagctccagacgcgccaccattgtttttaagagccgacctctacggccaacccattccagccacctcccgcccaatccgacccgacggtcttcttccccgaaggtccatgagcttcccaagctc

SEQ ID NO: 21365 - DNA, 1559 bp, Zea Mays
caagctctagccctactagagaacagtggatcataaggttgcagttgcagacatctatatgcatgcatgcatagcatggagccatggactgagtttggactatggaaagacatttcatacatgctgaacacaacaaagagggatggtgtgagcaggacctcagtaagttcacatatatatgagaggcttccaatccatcctttgtgaagcaggttacatcaacatgaccttccccttttcaccttaccaaacccatacatatccctcaatcatcccctcttgcccccctttcccatcattcagtaagaacaaaggcacttttcttgcaaggttcagtgcccatcccttcgtctaagtttccgacccattccattgcaaaaagaattgcacccatgccctacagtttgctaggtagttaggaaaatccagccaaagccggccggctgagcagatgacgatgagaggccgccggccggtacgtacgtggcttctttcctcccacaccacgccccagcgcagtactcgcatcgcaggccggtgcagtaaaaagggagaaggccggacgagcaggcgagctcagctagcagtagcatcgatcgaagcaacactacacatcgcacaagaaggggggctagagctggcaacacatgcaggctgcagaggcagccatcaggtttgtacacctacgcactattcctactcctaccgcaacagtgcatagctagctaggttcgtacgccgatcgtcctccccactctcagcccatgacttactggcaggcgtaccttggtgttatgatcagtggcgccattgttggcaatgcccactagctttttacagatcactggcaaatttatctctctctctctctctctctaacttggatcccccgctgcctcagctcgaacgaactgtgcatatgtatgtatatgcagggcgaagtcgaggcccagacaatccaaactatacgtaagttggaccacagatgatgttccctttcgcatcaagaaaaaaaaagagtccttgtttattcttgctgcgctagccttctatgctgtacacatgtatcatacgcgcagagaagaagaacacaaggacagtagtagtacaataaagaggtgtccaggcctctccatagatatgagatgatgagaagatagaagtaccgatagaatgtgcgagggattttaagatcgcacctgcaatttgttgcttcaggaggcgtgtctctgctgtgaatgcgcgatcaatgtgtcctccgttaagttcgtccgtgcttctgcagtacaatttgttctagaagacatacaagatcatggcaaagatggatgctacttcctcaactgcactgcatatgattcttgtgatggaaatcttcaaatctagatacacgtttttagcagataatagacagatttgcagatgcatgttatcatatgtatgtagggattcgaatttccgatcgaatgggggcaagtacgtagtacagatgtggacgggtgtaacagcgcgaggaaattcataacatgatgagtgctgaacgaagaacatgaacacgg

SEQ ID NO: 21366 - DNA, 557 bp, Zea Mays
taaagcctaacataaccaagctcttcagcattctactgcgacttgtcgtgggttcattttcacgacagtaatctagttgtttgacgtgggtcaatgtgtgtctctagaggattcagcactcaaagcaggggcacacccacagggcgttctaggtgggccacggcgcaccctaagaccaacctagcaagatcccacctcgaccccgttagtctgttcagcagcgttcgactttgtatattgcttcgtcttccatctatattcacaacaatggatgagtagagaaaggggatcacaatgatgcttcgtcagttggtcttcatctccaggagtggagcaggagacaggggaccagcgcctggtgatccacgagcacgaacgaggacatcgtcgccacctcatacccttggccctagtgcatcgtcgagatgcgttgtgacaccgccgagacacgtcaccaccgcgcccagacagcatgcccttcacggctgtgctagtgtgccgaagctccaagcctccagtcgccacgtgagtcatgcgcgatgcctagcaagtagcgc

SEQ ID NO: 21367 - DNA, 715 bp, Zea Mays
cttgagtcctccattctacatacggcgttcaaagacacagcggactcaatatggtatacaacttttgttttttttatggtagtgcatgtgcgacagaacgttaattttggctcaagtatctgtacatctgtttgactttaattataatattagtccaaagaaaaatacatccagtattcttttcttgacctgaccggtgcatcttaacgtcgtacgcaggctcgttgttgcgtgtgaagacgggatggaaattctgaaaattaacatgccaacatcaacgaagtaagcaatcagcctgcaccagagatcagaccaaagagcaatattagagttaaaaatatttgcaccgcatggggcaggcctaacggtcggttctagagcctgactgaactatatgactatatctagacaactaattggccctcgaacagcttctctccactgtacgggtggatggacacttacacacaccaaccaaatgaaaggatgctgcatcgggtaaaactggcgacgttgtttgtatggcttggagtatgctttggggctagtctctatgtaattaattgcataccctctgtttaatgtgcttgtctaattactcattatatatacatgcgctcctaacccagttggggttagagttttcattctccaacttggtaccaaagtctggtttctctctcctccctccctccctcctcccacagccgccccc

SEQ ID NO: 21368 - DNA, 475 bp, Zea Mays
ctttagaacacgtggctcatggattttatctgttcgcgccacatgaccggaagctcaaaatggttctccagcctcaacctcgtgattggtaaggaatacatcacattcggggataagtcatcagggaaggttgtttctcgtggcaccattcgggtgaacgagagcgttattctcaaggatgttgctttggtttggagtctgcatttcaatctgctttcagtttcgcaactccttgaggatgactatgaagtgcgctttaaaaagggcttgtctcgagttttggatgcccgtggggatcttatttgctagatttcccctcttggtcgagttttcagtgctgatttttcacattcttctagcccttctcgatgtttgatggcaggatcttcctcttctctttggaagtggcataggaggctaggtcacttgagctttgatcttttgtgtcgtttgagctcacttgacctcatccaag

SEQ ID NO: 21369 - DNA, 659 bp, Zea Mays
gtttctgtgtttgcagatgtgtgaacctgatacacacacatctgatgatgagagggctggagaattgcttgttgccctatgtgctgtagacatatgggggagctcgcccagtggggtttctagaagaacaatggttgaaacaggtatccaatgggttgagcgaacattggagagtagtggcgactgtttcgacatgtttcacatgcggcgaactgtgttccgacgtttgcatgatacgttggtggaaagttatggtctgcttccaagccgaggtgtcagtacaacggaagctttaggtattttcttgtgggcatgtgggggtccacagtcatttaggcagataaggaataagtttggtcactctttggaaactattagtcgcaagtatagtgaagtccttaatgcactatataagatgtcttctgacgtaatcaagcccaaagacccaaatttcatagagattcaccctcgattgcgagagagtagattttggccccacttcaaggattgcataggagcaattgatggtagtcactttcccgcgtctgtcccggccacggagcaagccaaatatattggtcggcacggttacgcatcccagaatgtaatggtcatttgtgacttcgatatgaggttcacatttgttgtcacaggttggt

SEQ ID NO: 21370 - DNA, 607 bp, Zea Mays
gtgtggactgcgggttgtttatcgggttctacggggtctctttagtaaaattgccaagacgaaagggtaaggacctatatgaaccgttggatcagcgcccgatggctcagattagactaagcgcattatgaacccgcgaacgatgtaaaccgcacaatcgcccgctaacgtacaggattccttggaccgaaatattatcccctggtttaatccgaccccatcataagtcgatcaacggcccacagtgattccttccccagatctaatcccatccctacatcctgaatccaacggactagccgttgcttccttcccccaaatccagacacggcggcggagcacatcccgcggtggcacacacgccggcgagccgccaccgtccggttttggcgcccgattcctactctggacagaccctacacgaagtggagggaggcgaatagcaggaacgtgcacttacctgcgattgaggcataggccggaccaattcctttgcccagcggcaatggcggccatgccgcgagctccaccctcgtgagcaccgatgaacaccacagatcctccacccgaacccaagcaatcagcgctcgaagaagatccgcatggt

SEQ ID NO: 21371 - DNA, 618 bp, Zea Mays
aagccatctagtggataataagtacctctcaagttcagttgaaggggtcaaatgatcatcagcagtagcatccaaagaagagatccctgttcttctggtagcgctaagggtagaaggctttggtggagaaatagctaacgtgtttagttcattggagtctgaaagatgagacatctgttgtgatggtgaacatgcaccaccaatgcgtgattgtatttgatttctgaacttggaaaaggatgcatcagacctgtaataattgcacaaaaaacaactattagtatcaatgatcaaaaggcacaataagagctctcactttttttgctaactactgctgcatgttaaaatgttatgactacccaaaatcaacactctaaccaaaactaacatgaaacgaaacaaattcaaagaaaaaaaagtattacttctggacatcagcatatgcatgaagattctggactgagttgttgctgccaaaatctacagatgatgacctgatattgcctctggtatctgatggtggtgacttgaccatgcgtgtgaactctgatgcaggtgatcgcatcctttttgaggcttcaacattttcatcattgatggtatccgaatagtcaacca

SEQ ID NO: 21372 - DNA, 909 bp, Zea Mays
ctctatcctggtaggaggtagggctagaggggcttcttccttctgctcagtctggcatccttggcttctggtcttcttgcggattttctttgcgggggcgagcttctttagcttcttgtggtaatccatcttcagggttcggtaggcttcacgggtgttggtttcctcgccttctgctatctcgagactctcttggagggacgccttttcccttgtaagttccctgaattattgctccaggctttccacccgggattttaggtgagtgcagtgggaggcaaggtcatcatattggttatcgagagtgtggaggtatccaaccatgtagacgatggtggggtcatcctcggtgggatctctccttgacagggcctaaagtcttttcctccaggcgggggtatttttgttgctgggtggaaactagcgaaggggggtttcaaagactactctgctgtagttctggcataggtgtcggagggcttttcgggcaacattttggcaagtatctgggaagcggtgtccggtgaaagtgacttggaaagaagggtggtttgggtagtttcggctttctcccaggtagactgccatagagcacttctccattccattctcgagatattccttccagacatattctggcttcttgcggatccccatgtgaagtgacttcgcaatagatgtgggaacccctccacttctgagcagtaggatgtcctaatgaccagagagtcttccatctggaataggaaaagaagggtctgttaatatcgggggaaaggagagaagatttttcttagggtaagaggtattttcttttaaggcaaacttttaaggtcagggctgcgacctacggccagtcctatggctctgataccacctgaagcgtcccgatcctttgggactcaaatg

SEQ ID NO: 21373 - DNA, 401 bp, Zea Mays
tgcgaaaggaacttctggccaaaatgatttgtcaccgataggtggaaccacccttgagtatgctgtggtgaaatgagatatagagtagtactcatcgacaaaatcctccatcctgacatccctaaattcttgagctgttatcaagcacaaagcatggctacatggtttgcccgtgtgctgccactctttgcaagaacattcccgcaaatgagcattgacaatgtgcttcgaatgcacatcattgttatcccttacctcagcaatgtagttgtcagctttacgaactgataaatgacttaaacctcttgttctgtcgtgtaggatatgcagaaccgacggtaaaatccttccttgcaacttctgtgcaattctcctcctcctgtgaaacatctccataattt

SEQ ID NO: 21374 - DNA, 736 bp, Zea Mays
atggcgaactcatgttgaagagcggtgatgatccggtgcaagcaagccgaagaggcagtgagcacgataaatcatcaacatagaggagcaggtaaacggtttcactgccaagccgaacgaagaatagagatgtgtccgacttggcctcaacaaaaccaagagagagcagacgcatggcgaagcggttgtaccaagctttaggggcttgattcagaccatagaggaacttcttgagcttgcaaaccatatcggggtgaacaagatcaacaaagcagtaggctggctacagtagacggtctcagtgagtcccatgaagaaagtcattcttgacatccacctgattgactggccaagaacgtgagagtgccaaagtgaggacggtagcaggcttcacgacggattgaacgcctcatcctagttaacaccaggacactaagtaaacctctagagaacctagttggccttgtaccgatcccgagagccatgggcctttcacttgtgtgtctagacccacttgctaatcaccacatcgtcgtgtatgggacaatgcaccaaatcccaggtgtgatttgcaaggaggtcctggacacataagtgaaaggcggatggctctctagatcattataagaccaacagggttcttcggaggtttacttaccatcctggcattgactacgatgagacgcttagtcccgttgtgaagcctgctatcgtcttcacttaagcattgtcgaag

SEQ ID NO: 21375 - DNA, 385 bp, Zea Mays
gtgaaacgtgcccgcgctgatgattttgtgcaagggcccttggtcatttgaacaaacaataaagaacccttagcactatttctttgtctcactgacgtttgcacttagacccctaagcttctatttcttcacgggataagtccctggcgacgacgcgttaacccgccgattatctctttaccggaatccatcataaacgatgatgacagactaaaccaagtgctggactagcgtccccgatcccaggcgaccctaatctgccccttaattgagctagcccgacttggagttcttctgttcacgacgacggcgagacccgagggtgaaccaaggtgttcccggtgactaggcgcggtagcgttcaaattctaagagcagggagcac

SEQ ID NO: 21376 - DNA, 1035 bp, Zea Mays
ccccctctaaggaatgcgacttcggccgatgagttaaaactttattcctttttggcttcggcgtggcggaagaggtcgtagttgtggattttctcttcgttccttgtttccgcacggtaaagcaatagtcaggataggcaaatccaattacatcaaaaactttgtttccttcggcgggaaaggcattcatcatctggctcatcaaactgacttctataacgattggtgtatttcagataaactaggccgcctacactggaaccaacagcagtttccttcggcatctctcaattgttaacaaggggccataccttgaaagcaatatgctccttgaccaaatccctggtgccaatgtagctgcacactatgttgaaggccatcagacatgcttgtgctttgttaccacccgcgatcgaaggtctcctaatgccgaagcacgatagtatggggcgctgaattacgcttttcacatcctccctctcactcaaatcatttttaacataaaatcattgcttcattcatgagcccggccactttttccgaaacgttggcacatgacacctcacatcagaccagtacacaaagttataacatccgaagatgttatggtactgctccttcccattggccttcgtctgataagataactcgtgaatattgcaaaaacagttagcgtccggttccaacccttggcttctcatcgcccaaataaaaattccgactttaattaaagcttcaggagtaagttgatgaagctatatttcaaatcgatttagcacttcaaccagcatcttatgtagaggaaaccgaaggccagccttcataaaactttggaaaacaaccacttcatcagcttcaggaagaggattagtgtcccttcatcaacttccagccctcacaatagatatatcatgaaaatatttgcccttcattgcttcaatatgtcccttattaacggtggatttttcaaacacaacatgacttggcctccatggccgatctttggcatcatcgttgtaactctcaatatcaaaa

SEQ ID NO: 21377 - DNA, 345 bp, Zea Mays
ctttattgttatgttgtaatgccttacggtctgaagaacgccttgctgacatttgtacgggcgatgagtaagacctttggtgacctaaatagggacagggtagaggtatacgttgatgacatcatggtcaagactaagagggggtcgaccctagtggaagacttaaccctagtctttgacaagctacaggaaacacacacgaggctgaacccagaaaagtgcgtctttggtgtcaccgcagggatgttgctgggattcctagtttcgcaccggggcattgaagcaaacccagagaagatcaaagcaattgagacaatgaggcctccggcccgaatcaaggacgtc

SEQ ID NO: 21378 - DNA, 364 bp, Zea Mays
gattagatgagtgtcgtaaccatcggatcggtatcggacgattctaattagatctagaaatacccattcgccacttgaaatctatacgtggatcgttgatcggacgatccagattgagttgaaccctgggccatcgatctcagattcgtcggtcgcagatcaatacccgtccctttgatttgtgttctaatctgggccgttcagccgagatcggacggcttggatggcctcgtaccccttcggccttgcaaacattcaaaagagcacctgggttttggggaaatcaaccctcagtcctgcgtagggtggttctgagtcataggacgttttacgcagaagtccctaggctctctgtatattatgc

SEQ ID NO: 21379 - DNA, 531 bp, Zea Mays
gtttttttgtagatttcctgacccgccacacccctaactcgtctaatcaaggcagagtggaggagtagattgcgacgtaggctaaaacgctaccgtgtatagggatgctctagtaatgtcgtcctatcttctctgcctatcgccctttgccttggttcctcgcgcgctacagtggcggccatgatggcagctgcccactgtgtggtccgtgcatttcggtcgtagcgcccaccgctgaagtgggcaggtatacatcttgtccgtagttaatgctgagtcacattgtactctggaggatgataccaggtttttctcagcggtccacgctatgtgtaacaggatacgcggcaacaccgagcttcgcctggtgagggggtagcggtcggcaccgctgtaccttgtgtcagctcctttttcacccctcacttggtgatctgcaaaaaaacacgtccctgcacatggccttgttagggcgctcaatggtgtatctatgggttttgttccaaacgctttcaatcttctggattttgt

SEQ ID NO: 21380 - DNA, 394 bp, Zea Mays
cccttttctacgcactcgcggacggtccacgaccgtagctcaaacgacgtgcccaactcataacggctaccttccattcaaaaagctgtcagagttctccgacaagattctctgccatgcacgaaattgagacactcagaaaccatgcagtcctagagtacaaaattgtgcatcacacataaatacaacatatctgcacacatctctggtagcaccatggacggtccggctacctagcccggatggtccatagtactcaattcagtctcttttcaaaatccgcttttcaataagtttttctttcataacccgaagtgttgttagccctcatgcaaatgcaccaactatataagcaaagaggcattaaagacatgtcaattaagataattgtccc

SEQ ID NO: 21381 - DNA, 470 bp, Zea Mays
gcccagcccgcccacggcctggtgtccccctccgcctccaccaggcaccaccatggcaggaagacaaagacccccaacgtcgccgcctgcctgtttgcaaaggggcaaaacccatatgacttcgattcgatttgcctgcggtgctcgcgacgaagggaatggcaaactcctccttcccactgatgaagccggcagaaatcgtggaggcactgcacagctatggcatcggccccagctccagcctcaccgaggtcctcaccctcttccttgctagcatcgtcgggtatgccttcgtcgatccccttccctagttgtcctgtctcaccaagatttggccccatccctggtttgcttcatgggggcattttgcccgttgcagcgacaatcaacatctcgcggggatcacctctaccctcaccagctatggccactccccgacatttagcatctggcatcctaaacaaactcaa

SEQ ID NO: 21382 - DNA, 891 bp, Zea Mays
ctgggattagtgctgctcatcgtgattcgtgcgtctggtctgtggattgagttcgccggtgaaaagatcatgtcgcggatgggtttcacgttactgtggcctcgctgttcctcaatcacttgcaccggcgacgtggctttacgcccgtcaccggagttggcgtctttctccgcggttgtgccatgcccaggcatttaaccacgttgcttctagccgcaccagctcgtcgataaccgccgtagcccctcagccggtgagtgccacggtttcacccacgccagtagccttctccctctccgtcgccagcgcgtcttcgcgaaattttacaccactgccttgcgctcctataaattgatggcctggtctattgtgccatactatcacgaagcccgagcacccaatctcgccttcaattagacaccatagccggagaatttccttctttccccaattcggttgactgcgccgccatgaaccgcctcatcgcggctagctgcttccaagtccaccctcgctcgttttgtccatgttttagcgcccacacgtgctcgtgatcgtcacctgctcagcccattgatcttgacttcacctaatcaaccggaacgtcttgatcggtgtttggtatccgctgtcaccatggtcaggcacatcctggctcggatcgatccaattaaagcttgttctggggttgcctcaggtcggtaatgcttacccaacagctggtttgggcagccgccgaagttcttggccggtccgagcaacgggatggttgacggtgagcacgtcgtggtctaggggttggttaaagaagaaacagaactggaggggggttttgtaagacatcggtgagacatgggaatagcgtcgtgacccttttccagttaatcaaaa

SEQ ID NO: 21383 - DNA, 676 bp, Zea Mays
tcttatgacttcaattttataaatgtcttatcaattgtatatagactatggaagttgagcaagttgttgctggtagtacctcaaggactgccatgcgctggacccctgtgatgtcagcctttatcctgaggaagtttgcagacttggttgggcaaggagtaaaaatggataaagggttcaaggaggtccatgtcaactctgttgccaaggcactgtctgaattcagtggccaagaagtcacaggcacccaggtctacaatcatttgaggaagtgacgtcaaaaatggatcagggtttgtaggctcaaggacctaagcagtgctcattgggatgagaatacattcacaatcatccttgatgatgaacacctgctgggccatacaaaagacaacccaaaggatgctgaattcctcaatgtgctaattgaaaactatgtgcagatgcaaattatatttggagctgggcaggctactggcaggtatgccatggcctccaatgagctccttggcaccatctcggatatcactgaaggtgctggtgcatctgaagaaccatgtcttattggtactactgcttctggttctgctagtgccagcccttctcatagtggcgctggtgctggtagttcctatggatcatatggaaagaaaaggagactcagtgatgaagagctggg

SEQ ID NO: 21384 - DNA, 566 bp, Zea Mays
tcggcacgccgggtttagcacggcctagcctgtgtccaacggtcggcacgacccaccacccgagaggtcaaaaggcccaatcccccacggcgacccccctccccacttcgacacttccctagtcccccactattgttccccattcccctttgcctttgttgctcgtgctcccgtgctcccccagatctgaaatcccctccgggctccctcctctgctctcataactctcccgttgatccaccctgccgggaagaaagggttaactaaacattttcaggtttatgaatcaaagtttggtgatgtgcacttacgtgtacattaatcaacatccacaactaagggtaagaacaaatttgcctgggatgacatatatatggtgatgatgatattggtattgagggatatgcttctcagtctggtagtggcaggagatatggatatggttctgatagtaatgttccatctatttcttcctagcctactactgctcagtctgagctgtttgcataccttgatattgatattgtcaataaatttgatgacaacttcaacattctaggttggtg

SEQ ID NO: 21385 - DNA, 599 bp, Zea Mays
atcgcggtcaaattgagagccaccgctctcggagtctataaattgagccccccctcggcttcgctatgtattttactagatatcgcacccgctcccacacccgattgtccaccagctcgcctgaattttgcacttcccccaaatctgttctccgccgccgtagaagtgaactcaccgtcgccatcccaactccggtcagtgcccgcccttttcttcctcgtttgagcattctcatgcctctatgatgctccccgacccctttaattgaactagaccggcgcccatcgccgggaacacgatcatgttgccgttgtgcttacggccaccgtggccggagctccctagtccaccattagtgcaattaggttaggggaaatgctccttaggggtttaattccgtgtatgtcgctcgagagcgccggtcactgccccaattggccggactgcttgctcgccggagtgcggccgtgcttgaacgccgtcggggactgcgagttgtgaattgacaagaacccgaggaccttttcgtgaactgtcagtgacttaaaacaatagtaaacggacctatttctgtttagccgttaagccgagggcctctg

SEQ ID NO: 21386 - DNA, 392 bp, Zea Mays
cgggtcagcgtggaagtattcggggctgagatggagtgcgtgaagactgaaagttgagatgaagagagcagtaaactcaaaccacgagaattcgacggcgagcagagcatttcgggtttccgcaacaggagaggagaaaaccacacgttgtttgccgtattcttccccctcccatcccagccggtcagtcctacggtcgccgtcgacgagccccaaagcagcaaatctccagaaaaacaggaagctcaatcaactacgcaagcatacacgaacgcgaggcgcaaatatctcccagcgagttcctcgcttttttgcttcgtgcggccctgtgccccgtacttcaccttcacgaagacatccccggcccactagcgatccgtgcaggcgctgcc

SEQ ID NO: 21387 - DNA, 604 bp, Zea Mays
atcgctcgaagtagtattgctgctgcagctagggatgaaaacgggacgggtacccgggacgggtatcggatacgggtagccaaaatacccggattttcggatacagatacaagttttttttgttgtcgggacggatacgggtactacccggttaagaatttctggatacgggtaggatacggaaccgataatacccggcaaatacccgccaacgccgggtcggatacgggtattcaacggtcaggtacccggattcacaaatgtggcatgctggcactggcacccttgcgggctgcggcattggcacattgcagacttgcagactttagggcattagactgagtggctgacagcctgaaaccatgctcaaagccttaatcggtcaaacacagtcgtcggcctccgatcctccctgcactcgatccgagttcggagtgccgcctagtcgcagcaagcagcgccgggccactatcctccctgcactcgccggctcactgccggacgtcagtctccctgcattcgctccatcactccaagttgggaggctcacagcctcgcaggctatcaggcacacagcaccgggccgacggcctccctgcactcg

SEQ ID NO: 21388 - DNA, 1374 bp, Zea Mays
tccgacgcgcgcagggtgtttgatactagcggtgccacctccctggacgctttctcctggaacacgatggtgtcagggtacggcaagtgcggcgacctagaggccgcgcgggaggtattcgtcagaatgcccgagaggggcctggtttcctggagcgcaatgatcgacgcttgcatccgtgctggggagttcagtgaggcactgaggatgttcgaccagatgatgggaaatgggttcaggccagacgccgtggtgctatcgagcgtgctcaaggcttgtgcgcatctgggtgctcttgagagggggcggtgggttcataggtttctcaaagcagaggggcttgggaggagtccggataatgtcatgcttgagacggcgcttgtcgatatgtattgcaagtgcgggtgcatggatgaggcatggtgggtctttgatggagtccagagccaagatgtggtgttgtggaatgcaatgattggtgggcttgcgatgaatgggcatggaaaacgcgcacttgagttgttcagaaggatgcttgatatggggtttgtgccaaatgagtcaacgtttgttgttgttctttgtgcgtgcacccacacaggtcgtgtggacgaaggtaaggagattttcaggtccatgtgtgaccatggcatcgagccacggagggagcactacgggtgcttggctgatctccttggacgtgcaggactcctggaagaagccgaggctgtgttgctggacatgccgatggagccacatgcatcacagtggggggctctaatgtcatcatgcttgatgcacaacaatgttggtgtgggtgaacgtgtaggaaagaaacttattgagctagagccagatgatggtggacgttatgttgttctgttcaatctgtatgcagttaatggtttatgggaagatgcaaaagctcttcgtaagatgatggaagagaggggagccaagaaggagacaggtttgagctttatagagtggaatggtttagtccatgagttcagatcaggtgatacaagacacccccaaacaaggcagatctatgcattactggaagatatggagcagagattacaactgattggctatgtcaaggataccagccaagtgctcatggacatggacgacgaggaagataagggaaataccttgtcctaccacagtgagaggcttgcattagcatttggtattctaaacactccccgtcacatgcctattcgaattgtcaagaatcttcgagtgtgccgtgactgccatgtctatgccaaacttgtgtccaagctctaccaacgtgagatcattatgcgtgaccgccatcgcttccacttgttccgtggtggggtttgctcctgcaatgacttctgg

SEQ ID NO: 21389 - DNA, 694 bp, Zea Mays
atatattatactatagtaattttttgtaatggtgtatctatagtagatatccatatatagctgtttttaatactttatacactctgtacatcatctcggtttctgtgtatagacttactccaggttcttagatagtagaactatcattctttatttaatttgttgcgatagatactgatatagattccctatagagagctgattatgcaccattactgctgccctaagaatattaccatcgtgtgagctagtaggtgagggtgagctaaagcgagtgagtggtgatcccaatgcgatgcatacacggcgttggtggctagcgcgggcgccggccatgtacgctgcagcagctaactccagtactgccaccggccagcattcatgtgcatgcatgcagttgcagaccccggccatggtgatggtgatagtgattccatactacatgatgtggtgcttatctctctcccgctcctagttttcctcttcagcgaacagtgtcggcctgagcctctcactttagttgccttcctttatttggacagacattctatggctcgccaaactccactgctcaccgtcctccatccatttgtccattgcatcatcatccatccaccgctccatcctccatctctatggcttctctttttcctcctcgcgcacgagtactaccgcaatccatcatgtgcatcta

SEQ ID NO: 21390 - DNA, 290 bp, Zea Mays
ctgagagcgagttccaacaaaggctctttgatgtcagttgctgaaactgagaagtctagctgaattacagccttagcatgttcatagccagctttttctagtagtgatacagccccgagcgctgatgcaggtgtagaaatccccctgctagtgagaacttcgtcaagtacttcgacttcgcccccaatccatttgatttcaccctcggggtcaccgcgaatgaaattccgctcagacgaaaacgcgccaacacttgtaaaagcattttttagtttgtctgagcactgtat

SEQ ID NO: 21391 - DNA, 529 bp, Zea Mays
ccgggatccctccgatctggatcgaatggttggtaattaactaggtgaaccgtcacactccttctaatctcacccgctaatatcgggatcaacggtccatcgacttcttcctccccctgacacaacccgacgacggcgcccgctggccacgacggggccatggctggagtccggccagctagcgaacttgtaccacgacatgatgctattagagctacggcatgaggaaacgacgacgaacacgaccgaggtaccatgggtaggcaaaaggcattaaacgaggttgtccatgcaacaaggaggggacgaggcggagttgaactccggtgagcaatctacgacgccccaacgctccaaaccgacccataatcgatgaacacggtggcaggtacgagcggcatgggattgaagccttaccggttccggaagccgtggagcgccccgcctcggtgatgcgcgattcgggacgccctccctcccccactggcgagcaattgcgccaagggtgagaccacttggcgcacccccg

SEQ ID NO: 21392 - DNA, 537 bp, Zea Mays
aaattaccactctcaaattgaggtggaaaagagtaggatttaaagggtaggttcaaaataagcaccaaggtaaagatatagatattacaagggttaaaggcgataataggcaagggtgtaagagataagaggttaaggtgcacaagaacaaagggtatgagtacaataaagaatagagctaaggtaagactggcacgtgacaaaaatgaggttatgaccaagggtgggataagtagaaccgcactctcgaattgagaggggagaagggaggttttaagtggcagacatatgacaagcatcaaggtaggatcacaagggtaaaggcgatagcaaacaaaacacattaaacaatgaagttgaaagtttgcaagcaacaaagaataggatacatcgaagaaaaatgggtaagatacaactttcaaattgagacggacgagagaagattttagaggaggtataaaataagcgacagggtgagatgtagagatgacaaaggtaaagatgatatcaatgaaagcatgacaaaggatagaatta

SEQ ID NO: 21393 - DNA, 394 bp, Zea Mays
cttccatgcagaccccacttcaccatccgctctcgtctcgcactatgatattgctgcccggtggggcctccttgccaaccgcgcaccgtgccgcatccgctcggggcaagtcgctgtcatgtgggccacatccgttaggtttgtctccccaacagattactggaccaccgccgaggatctcagattctgttgaagctagccaaccaactcggctatgaatccgcgttcgaagccaccttcctcgaaccaacctagctgggctacaaaaaccatggtgcgggtttccatcccttcgcctgtatcaaacgccaccatcgccgaacaagggagagtgggggaggatcatcgtgcggacgtctcacctccagcgtcactccggcatggcgtgtggtcg

SEQ ID NO: 21394 - DNA, 387 bp, Zea Mays
cttctttctcgaacttgttttaccttgacacaacctctgtgatgggtccatgtgccacctctgattctgtcagatctatgccctgagttttgaggccaaatctatgaaatcattgttgggtggttttgtggatcgacctccaaactaccgtaggtagcatactccgtacatgttgccacgtcctggacatgtgtctcgccagtcctagaccgcactggtgacacaatccgctctgtcatattcttgaacctgttagagtatgtatgtgtcagccatcacatttagtcagctaacttcttcattccctcatttaagtcctagcgctcatcgttcatcgctcataatccatcggcacgaacccgtatgtccttcaccttcatcatcgac

SEQ ID NO: 21395 - DNA, 378 bp, Zea Mays
cgtgaccagtacgcgaggaggggcaacactggaggtccagcccacaagaggggcaagtctcagcatcagcgccaccatccctatcgtggcaaatcctctgactcgggtacttcaggaggaagaactcagaggtttcgggctgttcctaagcctgggctggggctggtgtgttttcattgtggtgacgcgcatcaccgtgcagagtgccagtggaacgacaggtgttcaatctgcagtcaagaccacaaggatgtggtgtgtaggaggaatcccaatgggaagctcagatgggagccagttgcttcctcctcttctcagggcactgtcaacatgatgtcaagcgctgagcagcaattttcagttccacctcctccgcaa

SEQ ID NO: 21396 - DNA, 408 bp, Zea Mays
aaagatcttgccctagataaacacaagccaccgtggtcactctgccttttgcccacttgcaccggcaacgtggccgcacggccattaccacgggcaccgccgttttccccggtcacgccacgctatgaccctttttaccacatcgcagtagctcggcttgcgatgtctgttcatcgccggtgagttcgccacgacgaaagacactaatcacgcgcgccagtaacttcctgtttctctagccgccgcgcgtattcatccaaatccctggccaccgcttaagcccgttataaattgagcccgccgtgagctccgtagggtaattacccatccatagcacccacgcttgccttcaattgtccaccaacgaccgcgaattgctcatttcccccaaacctgctctctgtcgcc

SEQ ID NO: 21397 - DNA, 666 bp, Zea Mays
tgcagggggccacacctacgaacatctcacggaggtggacgaagatggctgcctggaggacggagtggggcgtgaggtgttgaagctgaagcccgaactcctccagcagcagcagaaagaagggcgaaatcggtagcgccaacccgcaagagatgtaggaggtgaacaacacgaactccccggtgacgagatccccaaggggggcagcgccggcacagattcttcggcgagccctagcgcgctccacccaagcaggccacacaccaggttaagcgcttcctcagactgaaagcggtcaggatgaccaagcgatgccatggcgagtgcggtggcgcgggcgtggagcagagaagcatgaaggcaaaggggcgcaaccgattgggatagaatgcgaaaaggtaactactgcacgtggggtgaatcctttttcaatgaaacctgaatccttgttcagggaaacccttctgtgtgcccctgaattgctgcaggaaatcctgtttgacgggcaccatggaccaaggcaacccagtctgtgacacgggggcccgggtccaaaggtcatacggtttgtgtgccgggttacaggtgcgaaaagagggaaccgccgccttggggccgctacagaacacaaaatgttatcttttaaaccaaggcatcgacaacgag

SEQ ID NO: 21398 - DNA, 590 bp, Zea Mays
gtacaaatccggatgagacgaaggagattcagcgccaggtacaggcgttgcttgacaaaggatacattcgtgagtctcttagcccgtgctctgttcctgtgttacttgttcccaagaaagatgggtcatggcgtatgtgtgtagactgtcgtgttgttaataacatcactattcgttatcgctatcctataccacgccttgatgatatgctagatgagcttagtggtgccattattttcactaagattgatttgtgtagtggttaccaccagattagaatgaaactgggtgatgaatggaaaacagcttttaaaacgaaatttgatttatatgaatggttggttatgtcgtttggattgactaatgctcccagcacttttatgcgagtgatgaatgaagttctgaggcccttcataggattgtttgtggttgtttatttcgatgatatccttatttacagcaaatctaagaaagagcatttggaacatttaagtgatgtttttgatgcattgcgtgctgcccagttatttgctaacatgaaaaatgcatcttttgcacacgacgtgtctcgtttcttggttatgttgtta

SEQ ID NO: 21399 - DNA, 326 bp, Zea Mays
cacttgtgcacctcttttcaggctaccttagaccatctgttggactatactccagtgttcactggcaccacctaacttgttttgacagccctttggacaaacaaattttttattgttctttctgtggtgactaacggaaacacttatgcagtcaaagataaaacacaggaagggccgcacacaaaagaaacactcatctactgacatcccattcgtctcagttctttactttgttcaattgagtcatggcatatgacaaggatttccctttaggtcaccagataccctgtcctgacttattgggtacaaccatgtgactgagcaac

SEQ ID NO: 21400 - DNA, 426 bp, Zea Mays
ggaggggagagcgctgccgcatcctatcctcggcctcatcaccattgaggtcttggagaggggtcatgaagcttcaccatgacaccaggaggacgtccctggtagtgcctggcgagattgatcctcaggacgacttcaatttctcgccgcacttcgccgccgccgctggggccgcaatgcgccgaggatcggcttcgactcgtgctctgggcttgtattttccctcccctgctattcggattagtatgcacttcgtttagcacaccttggattggggtctggggcatcgtagtgaccaacgcgcgctgctccggtgatgctccgccatctgtcgtgcacgcaccggcgtgttagcaggttagggcgaagaagatgggccttgttcgttgatctcggagtggacggcccccattaggagatggataa

SEQ ID NO: 21401 - DNA, 657 bp, Zea Mays
agaccatgcccaagcgcgtgattggttacatgtactgcaccggcgtggcctgcacgtgcatgtgcaactaaatcaccttttccaccatttgcctgcatgcgcggagacgagacccggcgaggatctctactaggtcaggcggcgcgtgagccggtcgcatctgtcgcacacaaccaatcacccggataaagactatcagtcggcttgtcacaagctaacatacaaatcgttgttgttaccttctgaactgagtggaatccacattgatgggttgcattgtatctctactatctattaagtcaatagtgtagaccacagtcacaatcatgccccctgctctcgtcgtcctcacgtccggcccgccccccacaactccctcagaaactcgcttcccgctcaatgcgctcgcacacatcgccgccccctggcccacgattgccccctccccgtcaccacctcgtcgtggcctagtaccccgcccccatcctcggtgccaccaccccgtgccttgtctgagatcgtctcttccaccgctcccagcctcgactccacccctaaactgtgatgcccttccatagccagccgcgatgcccatccatgaggtcgccacagccacccctcaccgctcacactcaacccccagtcgcacacggcgga

SEQ ID NO: 21402 - DNA, 348 bp, Zea Mays
gtggaggcagtggcacttgttgctgctgttgctgttgttgttgctgttgaagttgttgttgcagctgctgttgttgcgccctcctttcttggcgtatctcatctctctcctggcgcaactcctggcgtatatcttctctttcctgacgcatttcctggcgttcttgctgcatctgggcacgcatatcagccatagtgtccgccatttgctgcatcaccgccatctgagcagcaaccagtgggtcaactccgcctggtggaggattaggaggattcatctctgcaggctgtggctgaggttgtctgtatattctccgagtgtgtcgattaggaggcaaatcaattccac

SEQ ID NO: 21403 - DNA, 447 bp, Zea Mays
cgcagtccgggactcctccagccactggacattccttctgcagcctggaacaccatttctatggacttcatagagggattacccaaatcctcccgctacaattgtgtacttgtggtagttgacttattcacgaagtatgctcactttattcccctgacacacccatttacagctgttggagttgctcatgcctttttccacaatatatataagctccacaggctacctgctgctatagtatctgaccgtgacaggatatttaccagcaacttttggcgcgaactttttcagtcagctggtgttaacctccacatgagcagtgcttatcacccccaatcagatgggaaaactgaacgtgtcaaccagtgcttggagacttaccttcgctgcttcgtaaatgcttgtccgagtaagtggtccagttggctctcagcaactgagtattgg

SEQ ID NO: 21404 - DNA, 364 bp, Zea Mays
gggcattttattgtctctatatgtgtctcccaagcattaagatcaagtagatggcccaaatccatgttcacttggtttgatttactctgtgctcagggggatcaatgccaacatattgctgaaagaaggcctttctgttcaatgtaatcatggatttcatggtactaaggcatcacctaggagcaggggtggagcatttcatggtactaaggcatcacctaggagcaggggtggagcatttcatggtactaaggcatcacctaggagcaggggtggagcatttcatggttctaaggcattacctaggagcatgggtggagctacagtttgccaccaggatcagctgatcctacaaattttggaa

SEQ ID NO: 21405 - DNA, 493 bp, Zea Mays
tacgatttgtacttcctggtggtgttggtatgcgtggtgcggtggatgcggagcgggggcgtggatgtatggcggagggggttgctgatatgtgtgcgcgacaactctagggttgtcggctggttgcgcccgtgccatcctgtctctggtggccttcgtctctgggcagtctctggtttggtgggcgcagtctttgccgtggaacaggcagcaaaatcggcgcggctgttgcgcacgtccccggccccgaccgcgagttccgttaccgcggccctggggggatattcctggcggtgaggggcctcgccagcggggtgctggttggcgatgttgtgcacttgctgctgattgcggccatcccgaccggagtctggctgcgaaggcctcgtctacgtgcggctggactgtggagtgtctttgggtttcctctgagactcgagtttgcgctggtggagctcttcggatctggcatatttttcaaatagctgataca

SEQ ID NO: 21406 - DNA, 569 bp, Zea Mays
tgcagcccgaccataccgtcgagttcaggacctcgaggatttttttggtccacatgctggagatgcagcgactaggttattttgggaacgatgttgggcgggctgtatgggtagaagaggtctctgagccagagggggaattgattgtttttgaagcttttttcgctgctggtcttcacctcccgacgaattggtttgtagtggaggttttgcggaagttcgaggtacaggtccatcagttgacactgaatgcagttgtggcgcttgtgaagtacgtttgggctgtctcctcatacagcgggcaatcgtctgtggaagtcttcactaagaactattgtctgcactgacagaagagaaaaataggtgataagatagcccaatttggatcgtgcactttcacgcaaaggactgggaagacctcggctgaagttgtcgagatagttccctgtgctaggaataagtggggaattggtgggacttttggttttatgtagctcccagggatatcgaagggttgccgagtttgccccctgccattctgtgttcacattgttatgtggcgtttccac

SEQ ID NO: 21407 - DNA, 680 bp, Zea Mays
gtttgtgtgtatgatgtcataattttggtccataggttgagttcttgtgcatgcctttgtttccatactgggccagcccctgcttacaatttttctagcctattatggatgcttataaagcatccacatttatgatactgattagtgcccaggcgagcatgtttgttggggatcctccaatcatacattagcctaagcactaattagtgcccaggcgagaggtcgctgttagagagttgggaggcagtgacaggccacttctccatgttgcttgtggaggaaaaagggcagagcagagcaggtctggtctggccatcagacggaggaggggactgggggactgctgagaatgagatccagtgggttgcttcgcttcttgttctcagctcagatccacccatgttacggacatctcttgtgctcaaaattattggcatagaacacccatcatcatgcacgaacgaaaggtcttctgattcgttattgggagggagctctaatccgcgtcctaatctgtccacttgtacatcgtaccacgcactaacctaacctggatatccttgttggcatgcagtgatgggatagcaacggctgcaatgacagacgagggatggccgatgccttgttaattagacaggcatactgcctgcctgtctacctaccaagcctctcctgtagtt

SEQ ID NO: 21408 - DNA, 1076 bp, Zea Mays
gccaccgcgcgtgccctctgaccagtggaccccgaccctcacggctcggtcagcgctcgtcttccacctccgtagcgaacgccggacttaacggaagctcgcgccgagtcgtagggccgttgggaccgattccgtgctttcctgcgcataaagcctctactgtggccctaaccttcgccgccatagcttagaaaccatcacggcagccgccgagggatagagagaacaaacgcctgggcgctcccatcgcgtggaggaccttcggaccgtgagcgtcagtcccgtcttcaccccctccgtgacggtatgtttcgtgcccccctctgtagcgtgataggaagcgcgagacgacttagcctaggcactggcgtggatgcggcggggcaatgctccaggcgctgtcgaggggatgacttgccactggatggcacgtagtctcgagcagtctgtagatgagggcttggcgccgagctagacgggtagtgggaggcgaagaacattccgcgccgtataacggggactcgaacggcggactcgggtcgtcgctgccagatccttggcgcacggccgcggcgaagtggactggagagagaaaagagagaagggagagaaccggtgttaaagaagacgcccgacatcacttgatcatgcgttggacggtaaggattaaagggatagggaggaagaaaccgtgaccgtaggatggtgagtggagggggtagatttatctcgcgtacccgccgttcatcactaatcgcatggctttgattagaagcaggaaataccccttcatcccaaccgttatccaccgtagaccggcaatctgacgactaaagcgaaatagtggggatcgtgcgctgtgaatcgtcgatctcagatccgacgatgactcgggaatcaggatttatacccatcgccggtctaatctgggcgctcggggttggatcggacggtccaaacatcgatgtacctcttcggccaggcactttttcataagagaccctctgtttatttgaaaacaacccgccatcctcggtaacagtaagctgtgtcttggggaaaactctggtttagcc

SEQ ID NO: 21409 - DNA, 485 bp, Zea Mays
gccagcactcctccccccgctcacggcccacacggcccatctccccccgtgccgctgtaacaccccaggtgtttatcgtctactcgatcacgagtgtggacgttaacacgtgatagctgtgaatgtaaaggtcactaaattttaatcatcctcgtttatcacgattttgatatcgtgtctgtctccatctgtttaaattgtcctaatttattttgcaaaattcagactttgataattttcggaacatcgaatccagtatcgtttgggttaagccatcgacgtcttgcccaaactttaattctagaaattagatctggttgcttaaacttcatttgaaattctttcacgcttgcgttgcacgtgtctctctgtggcctggcatcgtggcgcgtggctggtggtaaccggtgtctggacagcgcacaacctctcgcccacgtgaacgatgcgtgacttcgcttccgaagggatcacaatttcgatgc

SEQ ID NO: 21410 - DNA, 679 bp, Zea Mays
caagcaccacaacttcgccactgcgaggcgctggagcaccgcccttttcctccaaacgccagcgtgagatcggctcggagggaaggaacccttttgcctccaagcccttgggttggctccgagtggtagagcacggggaaaggcggccataggaccagcgggtggaaatcacaagggagcaaaaagagcaaagtagcacaaggctttctaaggggaagaagatagaggcccaagcgcatgaacgtggtaagtgtaaccagacccagaagcctcccattctattttatgtaagcaggaagcccaagtgatgcctaggaagtggggcccctaggccgcatagggaagatccgccgcaccaggacgctgttaccccaggagtaggtggaaggcgatatgtttttgcaggatacgaaccacctccaaaaaagcacaagtaacaggaagggtggattaactagccagtcacgcaacctgcacgcgacgtggcgagcgggtcgcatcatgtctcgttagagccacccacaccaagcggggtcatgatggccaatccttccgctacgccaccctggtaagctatgccatgtcaagctaggtaaaaaaaccaaaactcgccccaatctcctgtgtagagcaaggggtgggctaagcaagctcctagagagtcgcaagctaggtgacc

SEQ ID NO: 21411 - DNA, 281 bp, Zea Mays
gttgagcgaaggtacacttggagggcttgacaaaaaatttgtggtgtctaagcacatcgaatacctgctgcagatggtgcacatgcaagtcaagagcggggctatataccagaatatcgtccaagaaaaccataaaaaatttgcggagaaagggttccaaaatatgattcatcacgcactgaaaggtggctggtgcattcgtgagaccaaagggcattacacggaactgatagtgtccgtggtgtgtcttgaatgctgtcttatgttcatctgctggtaac

SEQ ID NO: 21412 - DNA, 619 bp, Zea Mays
ggaaatgcgaaatttggaggctctgatggacgatcagaggcgagagctggtgaactgggtgcgtaataacctagcggacctggttgatcactcaatttatagaagccaacaacggtggcgtccaatttggagaaggcatgatggcgggcggagaaagaagaaggcctctgacgtgagctaccgtggcagtcattggctgaggagctacgacggtcactggtgagctattacggctggtaacggcatggtgaaagggtcacgacatggcataatcacgacgaccgacgtacaccctagcgatggccgctcggccatgtcgccggcaagtgggtacggtgacagagcgactacagtgtcccatcttcatctcttgcaaaagatctttcaccccgcgaagttatccgagtgccaccgagcatgaatcacaacgctggcgcgaatccgggcgtggggtcaccggcggcgaggtgcactgcacctgagatcttcttcaggtcactgtaccattggaactccattcagagcgcctgacagagctaattgaagcgctttattcttcaatttttgtgtgacaacatggtcatatgtctgtagagaaatggttgtcctataatccatc

SEQ ID NO: 21413 - DNA, 855 bp, Zea Mays
atcggttctgacccaaaaccctgatcccggtggaagagatcgtcgcggtggccgatcgggccgattggtttgttgaagcccgaattgctgctcgcgaaatccggcttagacaggatcccgggttgcagcggcgcctgctcgaggacggatcggtcgacttgtttgccgagcttgcgcaattccagcttcaaatcgtccatggcggcgtcgaccttgggccgccactggtcgaaatcggctgtcgccgactccagagcgcccaagcgtccttccttgcgacgatcggcctccgtgaactgactttcgagcgcagcaaacttctttgtcatctcgtcaaggatcagcttcgtgttggcatccatggtttggcgacgttgctgcgatcgagtgttgtaatagggaaaaacagactacgccagaattacgactccaggaatcgacgaatctgataccagaatgttagcagaggcaggggaggaagatatttcgtggagcagaagaagaagaagaatagcggggaagcaggtagtggtattgtgatatctgataattgccgtctatagtgttccgcttattacatatatatatttctcactactgcctcagccattccggcccacatacacgcacattgggcttgcgcactcgacttgccactcgtggcccattcacagaaggtgtctttccagcagcgccttcctcagccaccggcgtcgtgtcttcttcagctacctcttccactggagagtccgtgggtggagtcctgacagtcttatactacatcttaactattgtgacgtttgacaaccacatgaacatttatgcgcgcacacacacatctccataccatgttta

SEQ ID NO: 21414 - DNA, 795 bp, Zea Mays
tcttgggagcgagcttccttagtttcttgtcatagtccatctttagggttcgataggcctcacgggtgttggcttcctcgccttctgctatgtcgagactctcctggagagatgccttctcttgcttaagctctttgacctgctgctctaggctttccactcgggagtttaggtgggtgcagtgggaggagagctcatcgtagtggttgtcgagggtgtggaggtatccggccatgtagacgatagtggggtcatcttctgtgggatctcctcttgacagagcctggagtcttttcctccaggtgggggtgtttttgttgctgggtggaaaatatcgaaggggggtttcagagatctctcgggtgtagttttggcacagttgtttaagggctttttgggcaacgccctggcaagtgtctgggaagcggtgcccgatgaaggtaatttggaagggagggtggtttgggtagttccggctttctcccaggtagactgccatagagcacttttctattccattttcgcggtattccttctagacatattcgggcttcttgcggatccccatgcgtagcgcgcaacttcgtagaaggtgaggaaagccttcctcctctgagcaataggatgtcctaatcacccaggggttttccatctggtagaagaaaagaagggtctgttaatatcggggaaaaggggaaagagtgtttcttgggggtaagaggtgttttcttgttaaggcaacttttaaggtcagggctgcggtctacggccagtcctataggttctgataccacc

SEQ ID NO: 21415 - DNA, 605 bp, Zea Mays
tccttgttatacattttttttagagatagatatttggaatcactgctgacttttcatttattatgcgtaggacgcaaaggtaaactgtggattattggtatagctattccactggtagcaattctgctatgttcaacctttacctttctgtggctgaggaggccaaagaaaggtttgttgcgcttcgtggatgctgtcgtcgtattcatttcctaggtttcgacggaacagttattctaccaaactaatgctagatttatgtacgcttacaattcaggagtgctgagttcgcaggacagagctggtgctaataggattgaagaaaacgccttggtttggacaattgaacagaagagttcagagtttactctttttgacctttctgagttactggaggccacaaaatcctttgcagaagaaaatagacttggacagggaggtttcggccctgtgtacaaggtaaataaaataagcatcttgctagggcatagcaaacacatcttttaggaaaatggaacagttacaggattattaagtgccttgcaagttacaaccatcatcagagaacaccatgacaatagacattagtggaaaaaataaaaaaa

SEQ ID NO: 21416 - DNA, 732 bp, Zea Mays
tcggaggatatttagacaaccacaacaacaacaacctgagatggatcctccacagcctccaccagccagagctgatcccgcagttgcagcccagatgcagataatgcaacagatggcaaacaccatggcaaatatgcacgtgcagatgtggcaggaacaccaggagatgtgccaagagcgagagaatacacgccaggagatgcgcgaagagagagaggagatacaccaggagagaagggcgcaacagcaacatcaatagcaatagcaacagcaacaacaacaagtaccactaccaccacctccaccaccagttccaccccgggacaagcaccgggagttcatgagccataaaccaccgacattcgccagttctcctgatccactagacgcttatgattggctgaagtatgtggagaagatgtggattattgcccaatgctctgaccaggagaaggttctatatgcttctggtcgtctgacaggtcctactactgattggtgggattcatacactaatgcccacgatgctgctgatactatcacatgggcgaaattttctactcagttcagaaactaccatattcctgttggactgatgaagattaagaagaaggaatttctgtcgctgaagcagggaagcatgtcagtaatcgagtaccgcgataagttcattcagctctccagatatgcaccggatgaagttgctgaagatgagaggaagcaagagcactt

SEQ ID NO: 21417 - DNA, 1821 bp, Zea Mays
gaagactggtaggcggagttgtaggtgtactcggcccacgacagccaacgaagccactcgcgtgggcgatctccggtgaagcagcgcaagtacatgtcgatgacgcggttggcagcctccgtctggccatccgattgcggatggaacgccgaggacatgtgcttcttaatgcccgttaagcgcatcagctcgctccaaaaggtggacgtgaagatggggtcccggcacgagacgatcgactggggcacgccatggaagcggacaatgtcggagaagaatgcctgggccaccgattcagcagtgtatgggtgagctaaggcaatgaaatgacaatacttgctgaagcgatccaccacgatgaggatgacggatttcctgcgaacacgcggcagtgcctcaatgaaatccatgccgatgtatgtccagacacccgacgtgactggtagcggcaccaggaggccatccgggtggaggtgctcggtcttgcagcattgacaggtggagcaggagcagacgaagtcctggacgatgcggcgcatgtcggggaagtggaagtcgcgccggaggcggtggagggtgcgttgtacgccttcatggccatcaccatgtacggcggccaagatctcctagaggagaggtgatgaccccagcctgccgttgtaggtgagcaggttgtcgacgatggcccagggatcgccgcgggtgccgaccgcgacctcgtcccggagggccatcagggtggggtcggcctcctgctcgtgccgcaatcgtgtgatgtagtcgaaccgcgacgccgagacggccaagacaaccccctcctccggcgtctctctgcgagataaggcgtcaaccacggcgttctgggaccccggcttgtattccatgccgaagtcaaagccgagcagcttccccacccagtggtgttgtagaatggtggcgaggcgctgatcgaggaggaatttcaggttgtagtggtccgtccggactgtgaagcgccgaccctagaggtatggcctccaatggcgtagggcgtggaccagccctctcagctctcgctcataggccgcaagcgaccgatgacgtggtgccaccggtctgctgaagaaagcgatgggatgcgcctcccggatgagcaccgcgccaaagccgtgtgtggaggcgtcgcattccaccacgaacagctttgtgaagttcggaagggccaagaccggcgccatggtgaccgctgccttgagcgcgtcgaaggtcgcatccgcctccgctgaccatgtgaagccctctttcttcaagagcgcggtcaacggggcggcgatggtgtcgtagtcgtggacgaacttacggtagtagccagagccccaggaaaccccgaactacgcgcgccgagcatgattgaggccactcgcgaaccgcttgcaccttggcggggtccatggccaccccggatgcggagatcacatgcccgaggtaagcgacggaggggaccccaaaggcacacttggactgcttgacaaacaattggtgctaccggagtagcgctagcatggtgcgaaggtggcgcagatggtccgcccgggtggaactgtatatcaggatgtcatcgaaaaacacaaggacaaaccgacgaaggaagggcctcaagatgtcgttcatgagagcttggaaggtcgccggagcattgcagaggctgaacgacatcaccaggaactcgtacaagccgtcgtgggtgcggaaagccgtcttgtggacgtcgtcggacctcatgcgcacttgatgataacccgaacataggtccaacttggtgaagaaccgggcgccattgag

SEQ ID NO: 21418 - DNA, 944 bp, Zea Mays
gtcgcacgatcttgcaccgcatgtccgagtccttccaccgcgtcgccgtgactccctattgttgtcccatcgtcgccggggaggttgccacggcagtggacacgaattcaccgcgtccgccttcttcttcatttccggccgccgcgcgtcctccctaaattcaccggccaccgacgaagctgcctataaattgagcccccgggcagctgcgttaggtcatcacgaagcccacacacccgttcatccactcgattgcccaccatagccggagaatttcccttttcccccaaactggtttccgccgccgtaaaactcacctcatcgcggccagccctttccaggttagttcatctctctctcccttgtttaagcaccctggttcctctgtgatgcttgccgagccttcaattcaaactaggggaccaccagtcgccgggaacacgacggtctagccgccatgcccgcggtcaccgtggccagagcttcttagttggtcttggatgcaattaggttggggggaaaggctcgggatgggttcaatccggtgtatgtcgctcgagagcaccggtcgtagcgtaaatccgccagtacaatctcaccggagttcgttcctcgcgctgccgccgtcgtggacttcaagccgagaatagatggaagtgcgggggtctttttgtaaacagtcagtgactctgttaaacagtagagagacggatccccagttagtaaaaaccccgagggcttttctgcaaagccgccagggtgcgggcgcacgcgcgcgctttcccctctggactgggccgcttgggccgaaaccagcctaatactatttagccttttcctttttctttttcagcagaactttgcaaatctatagaaaaatgtagaaaaatcccaaaattgtgaaaccaattttcctaggcttattattttccctagaatttaat

SEQ ID NO: 21419 - DNA, 389 bp, Zea Mays
gcagcatcagctggtggggggtgcgagtttggagatgcgccgtgggaggaagactgactatcttgaaatcccactcaaagatagtatcaagggatggcgcttggagtagtttattgttgagaaccacggaaattctctccctccacggtcagggagacagccggatgttcgtactccaagttggaccgagtctcccacggaccaggaggtggctgaggcaggggctttgctggctgaggttggactgctgaaagagaggggtctgaccgtggaggctgtggttgctgattttgttttcaagaacattcaaccgttgaaggatagggcatacccggcctacctgtaccgaggtctagctgactcaacccgggtcgccaatagaagaattc

SEQ ID NO: 21420 - DNA, 811 bp, Zea Mays
atcaatcttgtatccacgtgtgcacgcatagtgtaccataaagtattatcaagtacaaaagactacatcggctactaaatacatagtaccagacggtacgagctctgatgcccgatgaagcgatgcatcatacccgcccctacggtaagtatggctaccgcatagaaaaaggatatctctaacattgtgccacgacctagggcatgggccctggtacaactccaggaacaggataagaacaggttagttgggtcttagctggtgggatccgaggtttacataatatctctcctcacactataaaagagagggattgagcaatgttttcaaggttgatctagtcatctaaggtgggttaggttcacatacatcacattagattaggacaaaccagttcatatacaacggctaggctagacttcggacactctagcactagagttcatctagtagacatgtataaaggtggattagaaccattatgctataactcccaccacagtcatgtggtgaggaaggagctagaagatcttgatgctcattggtgtttgagcttgtaattttttcctcttttgtgttcatcaaccgatgagtagtaacgacaatacgacatatggtactacacacattgcagtccaaacctctctaactgactgtgtgctggctcccactcgtgtctaggtttaacaggaccaccgacctgcgtaatgctccctcttaatttgtgtaccctggtggtattgttactgttacacaacaacagagacgacaagagaaattacatgctcaactttgtttagctgcatactgc

SEQ ID NO: 21421 - DNA, 622 bp, Zea Mays
gctcgagtgattttccatggagaactataacaagtaccttcctgctcgatcagggaggcagcctgacatccaaacgcccagctggatggaagtccctatagatttagagcttgctgagtccagagtgctgcttggagagatatgtgcgttgaaagacagaggcttgactgctgaagctgttgttgttgattttgacttcaagaatattcaatctctgaaggatagagtctaccttgcctacatgtatactagggtcaatgatcctacccgaattaccaacagatggatttctgaagaagacgtgttgagctgagttgatttgatgctgagaggcaagatttcgaatggtggtgctcccttatcgtattctgcctagaatcttcctccaaagagcccattttctgagtttgtttccaaccctcctgttcaagatggcaatccgggccatagagtgcgaccctccccagaggatattgaggccttcattgctccataccgaaatctccctgaagaggaaaggcagacccatttctagatgcagacgaccgctgatgaggctgaggtgaacgttgttctcattattctggtgggtgagtcgtctgactccgcccgtactgagtcg

SEQ ID NO: 21422 - DNA, 702 bp, Zea Mays
cctgcatcccgggttgtctttctatttgccgaaccgcgtccgtcctccagctccatggcaccaccgcacctgtaagcgcgccgccggtctcacgtcgtgctgtgccgcaactcgggttgggggtagatgagcgcgccttggtcgttcgtttcctactggacggacaagatgagaagtaaaaatacaggttcagccattgatcggctgacgtgtggccaggggggaagaaagcgtttggtccgttggatttcaatccatcggctaagatcagatcgggaggaaggtgattgtgaccgtagattccggattgagcggatctgacgtcgacgtcgtagcacataacttcgttgttcattagatccggtgcgtccgatcgggatcccgtgacccagattcaatctcgtttcattaaaccacggccattgatcatggatccaatggctaatattgcataccggtttgattaagataacagtttgacctggacccctagattctaatcgtgcggccatgatataaggatacccctttggctgtgtggattcgcataagaacccctgctctttttgtaaatgaacccgccgtcctagaactatagcagagagtttaatataggcccctggtatttgtagtttgaaccctagatttctcggtaatcatggtcgcagtccaatccactggtaaattaatttaattagatgc

SEQ ID NO: 21423 - DNA, 566 bp, Zea Mays
agggttcgaaagaggaaacaaaagcagagtgtgcaaagcggaacatctgttgatacctagagcgagtgactcagtcgtgaggctcaccaatcatttgttgggaagggtgatcatactggatatgacgtggagcatctcacacagaggtagcctccccctcaacagtagcctcagctcctccaggactaacactctctagctcgagcagaccccaagtcatggaataagtcatgttgggtccatcgttcgaagtaatggacataggctcaactgggatagccaatgaagtcggctcgggatgaccccaatcagcagcatgatgctcctcctccacaaagatgatctcacccatttgatcgtgaactgcatgcttaaatatagggggtggactaggtgaaatctaatcaaaattcacctcacaggtttccatgatgcggttagtctcaaggttaagaatgcagtaagctcgagagtgcaatgcataaccaagaaatattccgcgagaagaccatgattcaattttgtccaaatttacctgtttaagcacaaagcatctgtagtcaaac

SEQ ID NO: 21424 - DNA, 697 bp, Zea Mays
gaaccgtgtgttgggatgaaatttagagatgaggttcaggcttggaaattatgggtagagtatggaggctatatgggattctcagtcagaaaaaggtacaacaataaaaggaaggttgatggcaaaattacatcatgtcgttatgtttgttccaatgaaggtcatcgagcacgagacaaaagagatcatctagtaaaatgtcctagagctgaaactagaactgattgtgaagtccgcatgtgtcttaaaatggagggagagggttatgtagtatatgagctatttctggagcataaccatcaccttcacttggcagagacctcacatttaatggtatcgcaaaggaaaatctcagaagtacaagcttttgaaattgagaccgccgatgattctggaattgggccaagagccgcacacgagttagctagtcgtcaagttggtggatcatttaatctgagctatacacgtcttgatcataaaaactatttgcggaccaaacgtgagcgtgagatggcatatggagaagctgggagtatgttaaagtattttcaagataaaattaccgagaaccattcatttcaatacactttgctaatggattgtgaagaaaaaattacaaatgtgttttgggctgatgctaaaatgttggttgattatgcacattttggtgatgttgtcacttttgacactacttttg

SEQ ID NO: 21425 - DNA, 616 bp, Zea Mays
ggtgacagcgggtatcgcggatattcacacgtgttcccggcgatcctagggactctagcttaattgggttggtcagggagtatcaggggcacacaagaatgttgaaacaagatagcagggggcatgaacagacctagaggtcgctgaccatggtgaggccaatccgagcggtgttcttgagtgagtttgggaaatgagaaattggagctctctggtggaggatctgaggtacgggtgcgtgcgctagctgcttgaatacataacgaagccgatggtgcacttaatttataggctccgggggcggtggctctcaatttgattacggcgtgctggcggccggagatagggaagaatacgggtggctgtgaccgtggcgttcaccggtgcaacggtgcaaggataatactcctaagggggccacgattactaccgcacagtaacaagctacagcgtggcgcaaccggggtcaccggagcttccacggtgacttggcggtccggccacgtcgcgacggctacaggcacggtgataaacttcaatccgcgatcaaatccattcccccgtgagatcttttactttcccgtggatatcctctgcgtgccaagcacgaatcacg

SEQ ID NO: 21426 - DNA, 584 bp, Zea Mays
atttatgtctttgcaatgtatgaaacttgtacaggtccagaccctcctaaattgttcagtgaatgtgtgtgtaagtttttgcggaatgtcacgagcgagcagctctgccgacggtggagaagggtggcccaagtatgggtcggtgccattgattcgttgccctaagtgtgatcggtgtgagcccctcattagacgcacatcaaaaaagggagaacgggaactatggttgtgagtttgctaggtgcgaaagcaagccacaccctagaaaggttgttttcattcccatcttttttcccaattattgtcgatgtgatgttttgtttctcatcttttttgtttacttgtttaggtacaagaaaattgtaactttttcatgtggatggatgattatgtaaagatggtggaagggacagggttgaagagcagctcaagggagagatgttggcaactacgagggatttgattttgaatcgggataaactgggtgtcgaattgaagaaaataaatgaaaatttggtcaaaataagtgacaatttaggcaaagtaactgaaaatttgggtaagattatggatcagactagggc

SEQ ID NO: 21427 - DNA, 1012 bp, Zea Mays
caatgatcgacgtccaagattagaagcccccccaatccaaaccggtatgcgctcggatcccttgaatcataagtgaacggttcggattttatgaggcgacccagtgcgcatgcgtcaatctcgcccgtgaacactagatcggacgattcacggcacccagacctacaatagggtgacgatctaatcctggccacccatcaaacatccaacggtcgcgataaaatagatggatatgggccatccaatcaaccttctatggggaggatttaaataaccgaagggttatttggttgatctaatctcgaccatacaagtcaaatcgaacggctcatgcttcatcatctatctccctacaccggggcacggcggcgcagcgccacccatgcggcggcagccattgccgcgcacggccaactggcgatccggcgcctaaccttcatcactgaccccagataaacgacgcggaggatataacgaactgggttacgatgtgttaccggtgggtgaggcgacgactgctccggtccacagcgcgacgacgttttacaactctggcgagatccatccctgtgtctctgatcgccttctgccccgaaaccgacgtacatgcgctcagcacacaccagcgaactcagccaagccctggtcacctccaatcgcgtagcgaagcttctcggcgttgacatccagcggctctatggtgatacgtccgctccggcgaggaattccttcctcttcgcccgacgatcttgcctggtgaggccacagacatcttccatgtggcctagtgaagcttccgggaacgaatccgaggacgcgacgacggcgatgagcatgcgaaattgactacggcggcggcgaggcttttccctccctctctcttcctctccgtggcggcggtggtaaggctctgctcgctcggtgatacggcctcgcgttatatacccccaaatcggtggtccgagtggaacacgacgcgacatgcgcggagtagagatcgcgcgcgtggaga

SEQ ID NO: 21428 - DNA, 719 bp, Zea Mays
gtagcagtggctcgctgaagatcaagcagatgtggatcagcagcaagcggtggcacctcggtcttgtcacactccctgaagcgaggtggaggaataggcggagcgggagcgggagcagaggaagctagagtggtggaggtggtggacacagcgggtgtggtgaatggctcatgagcgacaggagctggcgaagtgtgatttggagtggatactgtggcggaaagagtggggtgagcagtggaggagcgaggccgagacgcgaggcaacgacaggaggaggcagtctgatcagaagaaatttgtaactggcttccttgctcagcctgatctgctgctgctaccgctgcaagtgctgcacgagcggctctatctaggcgcctcttcttcctgccctcttgctgctcaagatatacagtcttgcccttgacctgtctgaaggggcgaggagggtccttgtcatctcctccccgtgacggtgtgacgttcttcgtcctcaccgtcctgaactgactgctgcaagatagtgtgaaaagataagcgagagtagagagcagtagataaggcctcaaatagagtgatagctacctgggaacttctcgagagagaaaagatccaggcaggacaggagacgtgcaagcgagcaggcgaaatcactaaaatgacagaaaaggtgagcacgtattagtcacatagtcataagtttatgaaatgtgcttaaa

SEQ ID NO: 21429 - DNA, 647 bp, Zea Mays
cggcgagcaccatggctcccgacgaagcagtgggtgtgaccagtgcgtcggatgtctcaaggggtgtgcccgacactggcggcagctgctgaatcaccggcgagggcggcctggaggtagcggaagagctcatgatcgtcgagggctctgataccatattgataggaaccaagttccctaagctgatcgatctaaggttgtagcaatgagagatcggcggacggagcttgaaccgcgagggacggcagcctggcgcggtggttgaagatgcactacggtggaacaggaggcagctagggttggactctcctgactccctaaaggaagccggaaacaatacttgtttctgcttgattcaatccaatagtgtttacagatatatatagctctctcaaatcaatctaatagctctatcaaataatctaactatctaggtaagcctctcacaactaactatgggccttggccccgcccttgctgatccgctatcagccatgcactaatgggcttgcggcgcctaacataagccttgtcgtgcataacacctaccctcttgttcatccgctcctgcgccgcggcaagcccttccaaatattagatagaaattttttggaccatttcgaagcttcgatagttgacctttggac

SEQ ID NO: 21430 - DNA, 584 bp, Zea Mays
gatcgcaacgcggcgacagacgcgttgtcgaaactaggatccagtcaaacccaggttccacctggagttttcgtccaagaggtgccacgcccaagcatttcctcagatcaagcagaagagtgcaatgttttgagccagccagagtcagactctaatgactggagggagcccatcatcagatatataaagaataaagaggaaccggatgacaaagctgcagcagaacgcatcgcaaggcagtcagcccactacaccctcattggggatgcactgtacagaaggggcgcaacatgagtcctcaagaagtgcattctttcagctactgggaagcaactgttagatgagatccacgccggacactgcgggatacacgcagcatccaggaccctagttgggaaggtcttcaggtctggtttctactggccgacaaaaaagagtgatgcagccgagttagttcagaggtgtgaagcttgccaattcttatcaaagcaacaacatttaccggcacagcaactgcagaccatacccgtgacatggccatttgcgtgctggggattggacatgattggacccttcaagaaagc

SEQ ID NO: 21431 - DNA, 567 bp, Zea Mays
aaagtgttcacccctattatacctgctcatcagcagaacggcgcaaagccccctcagtgctgggctcaccagtgttggcctccactcacaaagactgctcctccgcacccatcttagcaacgccgccatctagagtggctagcgagccctacaagacggtgaggtctttaacttcttcgtcccttagcgcttgcagcaagaaataaacaaagctttagatatcacaaatataaaacacaactttccaccccaccagaaaaaggccttcacctgctccaactctcaactgaccctattcctaacgatatagcgatcatgcgcccccacatctgatcgtacaacgcaccagcagaccatttcaagaatgtgttttcgacttggaaaaactctcgatcagagtcctcgttgccctgttcgaaaacctcaaagtgacgacagcctttgcgagacagggcattagcatcaccctcgcaggtgatgagggaggcataagacattaagcccgtcacatttgatgggagagtctctagctctttctgtagccaaccaaggaagcgagtccctaac

SEQ ID NO: 21432 - DNA, 475 bp, Zea Mays
tgggctgctcccatcagctgtcggggaccatacaacaccttctcacgatcgttgcactaggcagtgtgcaactcacgctctacagtacgcaaccaatcttccacgtccatgggatcagcagagtgggcaaaaacagggggatggcccctcatgaactctgcccacttatctctgggcacttgaagcatctggacctgcactggaggctatggtgggggtggctgctgctgcacttgttgcatcgctgctaatgtctgaccaattgcctgaactgcctaagtttgcatcaagaacatctgctcaatggtcatcgggggtggcggtggcaaatgctgctgcggagctgcctcctcctggggtgcctgctgctcttgctgagcacgcctcgcacctctgtgccttttctcagacatttgtagaaaccatacacatatcagatctgactctgcagtctttcagcataagaaaagatata

SEQ ID NO: 21433 - DNA, 379 bp, Zea Mays
gtgggggaggagcgtccttggaagcagaagaggaggaggccctgacgggcataggacgggtcaagacctgtcagcataaaagatacactcgcaagaacattggaaaagtctaaacttacttggggccctaaaccttccagtgaccctggaagcggggcgcccgctgtcgttgctgctgctgctgccgctcctactgttattgttgtcgctgcccccacggtgacgatggtcggtctgacgctggtggcggtggcggtggtgtcagatccgaaggtggtggtggcggagggctcacgcccctctacccatcctggacctgaggtttggcctccttagtcccaccagctgtcttctgatgcttctgggggagttcgaatca

SEQ ID NO: 21434 - DNA, 466 bp, Zea Mays
cggccgaggctggtgttagttgtagatcttggatcgaagggttggagctcggataggtgttgggtccatttggaccgtaggatcgggatatgaacgtcccggggcacgcatcaattatccacgtagtagatctaatctgggccgctagtgtttgatcgtacggtcggggttgctccataccccttcgaccgagtccgctttgcaaaagaacccctatggttccctatggtttcctaaaaccaacccgcgatcctagtcctgtataaagtaattaagcatagacccagaattcttacaaaatacaccctgcacttctcagtaatattgcgcgctgtccagacatcgagcaaatcatagaaattcatttggaaaatgatttttagtgtcaaaataattgcaggaacttgtttatccctagaaaatttattttaactccttttaaacccattccagtttctatattttt

SEQ ID NO: 21435 - DNA, 582 bp, Zea Mays
ccggaccagtgccccgatgtgagtccctaaggtacccctctttctgctgaagccttcccaagccttagcacgcctcaagccccctcccaatggccggaatccctcaccggagttcctctggtccgcccaaggctttctccccaccgttcttccccctctatccgcggattcatggccttttcctcgccactgagttcgccgtggcattctctccctctctgcccaactctggcgaccccggaaccactctagcacatgcctgcctcaactccggtgacctcaccgtcacggagaggagcagcgtcgcccgcagccgttcgtccctccctagcctgatcccctccgtctgatcttgatcgcacggcccagatcgcggataccacttcgcgcatgtgcgccttgccccctggcccacctgtcagcgcccgtgtttcctggcgctaggcccgctcggtcagtgcgctctccccctcggtcgttgacgcccctggcccacctgtcagagctcgcccgcccccgcgcgcgccctcggccgcagatctaatctcggccgccggtttttgatctaacgcttagaatcac

SEQ ID NO: 21436 - DNA, 571 bp, Zea Mays
cggcgccattgccaaactcccaaactcgcaaccccgctgccaggacttcgactcgaatggtgcaacacatagcttagacgaaatcgctcataggggatggactattaccaatactgacgcgcgacgtctcctgcccaaggcgagacgcggcccaacggtggtgtccgtcagtccgcgagatgccccgggacaccgattctctttcaagcttgcaaacgcaatggagtgcccacacgatcgtttgagactcctagaagaaaacccctgagttcaggcaaccgcaccggttgtggcgcaatcaccgtagattcatgccttgtctgtcgtcctccctccacgacgtgtggtgttattaggatgggaggagggaggggatcacaaggataggcttatatgcggcgagagggaagattcgatcacgcctattggttgacagcgagggatttctgagcgaaaatcgtgcgctcgttacgccgctgccgcgagcgctgcgcggtctatgtgtggaggaagacaagtccaacgatgggggcccacatgtcagcggtattggggagaggctagtcatgag

SEQ ID NO: 21437 - DNA, 563 bp, Zea Mays
gcgaaccctattcacgtgcacttcgggcctattaaagccatccttcgtgaccgcccccatccttgcaactcaaccaggggaacaccatcaccggacagcaaatgtgagaaatagcggaggaagaacatcaccagagtcgttgcttgggcaaatcgttcgtgtgggcggtcggggtagtggaagtagccaagaagcatcaaaggtgttcaccgcatccgtacgtggttttctcgggtgcgtttggcgtgcatcgcaggcatagttcgtcgtcgatcggtgttcagggtgccgtgggggaggacggacctcgccgcggtcgatgttttgtcgcaacatcggtgagcgccttcacatcagttaatcacgtcctcaattatgtttgacgctagatctcatgcgaggctaggcgcgcgacacttctagcgtgcctcaccggtgtgggcctcgagtagcgcgcagcgacggtgccgtacgccggggacgaaagcgtgccggaggtaggagacgaacctaggcggttcgatcttggttgagcgactgggattcgatctcagtaggttatg

SEQ ID NO: 21438 - DNA, 554 bp, Zea Mays
aaaatctagatcgatagtagtctattttttcaaggactcccttggggacctcaaaaaaagacaacataaacatgactagacttgtcagaaccgaattgattaatactagacgacctcccccggacatcagctttcctttccagctacaaagcttcttctcaattttattctcaatgatcatccaatccttattacccagtttcttgaaatgcatagggatacctaagtatctaaaaggataaatcccacttctacacccaaacagttgaaggtaactatcctcttgatcctttgcatggccaaagcagaaaagctcactcttgtggtaatttatcttaagacccgaaacttgttcgaacgccgctaataagagcctcaagttggatgctttggcaaaatcatggtccaaaaaaataacagtatcatccgcatacttcagaatagataagcccccatctactaaatgaggaataagcccatcaaattgaccatcctcttttgctctattgattaatatagctagcatgtcagcaactatattaaatagaactggg

SEQ ID NO: 21439 - DNA, 806 bp, Zea Mays
cagaaggcgaggaggccaacactagtgaagcctaccgaaccctgaagatggattatgataagaagctaaagaagctcacccccatgaagaaaatccaaaagaagaccaagagccaaggatgccagactgagcggaagaagaaagcccctccagcaccacctcccgccaggatagagaattgtccaacatcgaggatatgtccctacctagccttgattaccttctcaaggaatttggggacactttagaaaaatagttcggaagtacctcagagagcgctcacgtgtagtgcaacttgtagtagctgtatgcttgtaatgaattgtgtaatgaataaaataacttggttgaaaaaaattgacatatgcataatagtgactctctccccctggcagatggcttcggataaaaccacgcctaccgcctccgggattggagcagggtttctcctaatagctgaaagagaagccgatggagaagggagtgagacccacctccccgcacctctagaactacccttagatttagcccaagttctagccaaccaaacccgactcattgtggtcctcactagaagtctggagaatcaacacccaaatggtggaagaccacaagacaggatgggagattttctgaggctcaagcctcccacattcgctggatctagcaatcccctcgatgctgatgattggttgcgcacgattaaaaggaagctagaagccatcggatgcccgaagaatcagtgtgttcaactggctgctcatcaactttccggaatggccttagcttggtgggataccttcaac

SEQ ID NO: 21440 - DNA, 792 bp, Zea Mays
caagattaatctaccaaaggagccaatagcagcctgcaagtactcagaggaacgataatcgagggggaatcccaacaacataagccagcaatcgcgattaaaaaaaagtgccctgtggttccaagcatcattatgtcgctgagcagtaaaggtggcatcgagatattgctgcgggccaagcaagaccaaattgtctctttcaagcacactgctaaactgaaccagaacctaacccaggtgtgaccgctggatatcccgcaccgcaagccgccgatggtccaccaaatattctctgaccacatccctcaccgccggaaaaatgacttcatgatcaggtaaaggttggatattgataatagcccaatcctcatgcattggcggaagacgcctagtcactgacctggccataacctcacggtgcagaaccaccgaagcgctgaagctcgacggaaggaagggctcaggatcaacatgcctatacgccattggagaaggaagcgaggatcgccagccagcagtcgaagaaggagcagtttggggttttgatgaagtgacacccaaagaaagcgtcagggactggagaggtgtcgattcagattttttaatacatcttgggcgaactcctcgaagcaacaatatctagggggtccaccgatcagggacaccgcgggggagcgaaaccaggtactgtgatccggaaatttccgatttcccaccaaaatggctcaacttccaaaggcagggaacgaggctaaaggaaaaccgaaagaagatttcttagagggacaaaat

SEQ ID NO: 21441 - DNA, 551 bp, Zea Mays
gtatgggaaggggttgcaaagtgcccgctaccttcaaatgactggccttgactctctggcaggtgtcacattcagatatatacttggcaatttccctcttcattctggtccaccagtataaggatctgagatcatgatacatcttgttactgccagggtgcatggagaattttgaaaggtgagcttcatccaatatcttctttctgagttcagagttcttgggaacaactaatcgttctccaaaccataggattcctttgctatcctgacggaagcatttgtatttgtccaccttttgttcgaccatttccttaatgacttgaacacccttgtctccaatctgtgccatgactatttgctcttgtaatgtgggctccactgaaatataatttaaagcacatgaggaaatgacttctaggttcagcttgcacaactcatcacatagggtggtgactcttgcatccatgttcatacaattgcactgggctttcctacttaaggcatcagccacaacattggctttgccaggatggtaatgcacctccaatcat

SEQ ID NO: 21442 - DNA, 403 bp, Zea Mays
tggccggataagaacacatggtaaacatcttacagctaaaaggcaaatagtgaaatacggagtataactgaaggcagttgaccattaagacacggctatcaagacatcacaagacaggtgtatcttacttcttacatgtactaatcagaacagtaaatgctatctgaaaacaatcaggggtgtgtccatcagaggaactggaaacagttaaaaggtgcatcatagacgagataaactaaccagaaaaaagactaattagacgagcgctaatcagaactaagtcacaagcatgcattgacagatctccttcttaacaacttatttcacaagatattcattataaacgctaaatcggtctgcgatagaatgatctaatcataccctacgcctgaagcgctccggc

SEQ ID NO: 21443 - DNA, 421 bp, Zea Mays
aggcagctatgacgcgagaagctactagggcacagaaatccctgtgcctagtgataacttcatcaagggcttcaacttcattttcaatatgatcaaaggccctggggatgtctttggccgaagggttaatctcttcagaagcagctccaactgagttgaatatccccttcaaccgattagcacaccgggtggcaaagtgagcacacttgttccgaaggttctcaaaaccttcatgaagctttgaatttctttcggtttcagctttgacctttgcttcgagctcctttgttttgcagttaaagcgtcgtgagctttcatccaaaattttttgagcttcatctagttcctcgctgaatttggcattctgagattgtacttctgcaagggaaccttcggctgtttgcagcaagatgtccttttc

SEQ ID NO: 21444 - DNA, 891 bp, Zea Mays
tttgattttccccgagctctggatattgaaccaaatactagaaagacaggggctaaacatgcaaaaaccccacagacccagatctatcgtgggatggacggtgggtttatttggttaaaacagggggtctcttttgtaaaaccaccggccgaaagggtattatcggttctcggtcgaccgattgattaccgacggcgaggattagattggcccgacccgaatcggtatctcaccgaggccgcaggattcgaattctacggcacagatttagttttagcgcgatttgcctgtatccctccgatcagaatcctatggatcacaatttatgcggctgaaacgctactctgcgactaatccctagcgtctattctagatcgagtggcccaggtttcatcatgccgtggcactcactggaccgtcgatctgcccatcgatcgtccaacgctcgtcttccttcccccgaccaccctccatcaaaacagaggacggcggcaaagccatcgccggcgaggctaatcctcggcataggcgcaccacacttcgattgaatagccctacttgctgcggtaatgaaagcgaaaacgggtgcgggttccataccaagaatcactagcgcaggcgagccgaccacgggattgagcagcacacggcggagacgacacggcagcgagcaattcaccgacgactccgccgtcaagcccacccagagtgcaaccataccatccacgcggccccgcgaaggtcaatggcatgattcccgggcctcatacgccatcgctgaggaagtcccccaaagcggcgacccgaagtgggcggacgacgatagggcggcgaggaagcaacggtggccggccctggcggcgcggatggggacttggttgaggcataggt

SEQ ID NO: 21445 - DNA, 691 bp, Zea Mays
tgcaagttcagcatgttcttactagcatgacggtatatttagcaatggcagtagatatcccacagtggggtttggaggctattgataaaattagaagaggttttctatggagaggccgcaaagaagctaaaggtggtcattgtcttgttgcctggggaaaagtttgccgccccctaaagcttggtggacttggtatttctagttttccagagttatgttgggcacttcgactaagatggctttggttacaaaagactgatcaatctcgcccctggtctggtcttcaaatacaagtcccaaaaaaggctagagccttcttttctaaagtagtgaccactgaagtggggaacggaaccaataccaaattctggaaggataaatggctgaatggaaaaagaattgcagatttgtttccaaagctgatcggcgcaattccgaagcggctaatcaattgtaggacagttcaggaagcaattgttagcgccaaatggatttccgacatcagaggagccttgtcagtaggggttttgtcagattaccttcagctttgggatttgatttctggcaccgagctgcagccggaggttgaagacaggcatatcttcagtattgccccgaatggtgtatactcagccaaatcagcatatgaaggtctgttcctgggatctgtgacatttggacactataagag

SEQ ID NO: 21446 - DNA, 608 bp, Zea Mays
gtcatggaagaccttgcgctttcctttgagtgcggtgcttgggtctggtgtgctgttttcacctgcacctcggttaaatgtgatgctagtgatgaacacagtaactagatctacggacttgttcagaatctacaatcagaaacaaatcaaagggagcaatgaggggctgaataaacaaaacatgggccgatttgaatcgtatctaattgagagatgaggattgaatggtggaaacggcatatcagccactagcaacgtgaactatccggattagcgaacggatttgaagcgtaccacgagaatgcaacctcggattcacctacaaggccaaggaacaatgaaggtccagcaattcgatggggaagggggatgttggatagtgaccaaacagagagcacgacgagaaaaagattaatgtcttaccgcagcgacgagcggatgacggtcgagctggaccgtccgaagtggtgtcggagacgcgggaacaacgagttgccaaaaccctagggttggggacaaaggaatagcccgtgtggaatgcaagatgtcaccaacttcttgaagatgtggacttagggaggcttcttgcgatctatggtaaatgggct

SEQ ID NO: 21447 - DNA, 1074 bp, Zea Mays
agacggcagcagaagcctgggcattcctagaagcaacattttcatatatcaagaaagcccgtgctgttaacaccagaattgcactctccacaacacgcaagggtgatctaaccatatcagagtatgttgggaagatgcgagctcttgcagatgagatggcaagtgctggcaatcctctagatgatgaagacatcatctcctacattcttgcaggattagacgatgagtacaacccagtagtgaccactttggtcgcaagatcagactcagtaagtgttgctgaagcatatgcacaactgctcaactttgaacaacggatgcatcttcttcatggcgagcccagtcagcagcactcagcacatatggcagaccgaggacgcggaagccagcgaggccgaggaggtcgaacaggaggaaggacaactcgtggaagaggacgtaacaatcctggaccaccccgacaaaatagtggcagctacaacaacgacaaggacccaagatgtcagctatgcaagaagaagggacatacggtgatggactgctggcacaggtttgatgaaaattttgtgcctgatgatagatttgcaggaacagtatcaaactcatatggtgtggacaccaattggtactttgacacgggagccactgatcatgtcaccggggaactcgagaagctgacggttcgtgacaaatacaagggaggtgatcaggttcacacagcaagtggttcaggtatggagatagctcacattggtcattcagttataaaaaccccatatcgcaatctccatcttaaaaatattttacatgccccacaagccacaaaaagtcttgcctctgttcataagcttgctgctgataattttgctttccttgaatttcactctaatttttttgtgattaaggacaaggtcacgaagaaagttctccttaaaggaccatgtcacagaggtctctacccactatcatcatcgtccctaccttcatcaccaataaagcaggcttatggagtcagcaagccatctttagctacttggcatagtcgcttaggacatccatcctctccaattgtgg

SEQ ID NO: 21448 - DNA, 550 bp, Zea Mays
catcctcgagagcctgatcaaagttagctatggacaattcctgcagaccaacgagagtagacaaagctggagaaggaatatcgctactctccccactgactatgtaacaccgactattcttccgaattaagggaatctcctcttcttccacttcgtcctcgtcaacaatacgaacaatacccccattggggtcagctctggcaggattacacccattgggttcagctcgagcaagatcacatccagtgggttcagcatcatcgaggtcacacccattggggtcagcgtcagcagggtcacacccattgggatcaactccagtagaaagttccactggcacttcttcagcagcaggagcagaagggccagcttcctggtccaaacacgacactcgccgaagccgtctctttttcttcttcttcttcccctcggcaggagcagttggatgattggctgggcgaaggcgctttgggcgagcactatcagatttttgagcattcaaggtttttccaggctctgggatagttgcaacaactatggtttcagcagg

SEQ ID NO: 21449 - DNA, 474 bp, Zea Mays
gtcggttcagtaaaatgctgaagatcaaaacactgtaaatatctgaagaacgcggataaagatctgaggcactgttgaaccggatgtgctcgagtgatctggtgaagggagtcgatcgcggagagataacttcggacgtggcaccatcccgcgaacccagccgtgcgtggctggagatatcccaccggcggtcgccgtggctcggtcacttccgccgcggtgtcacccatgccttgttttccccttactgtgcctcttctctacgtggtaaccatgcgtgaacaatgcaatctgcggccgctgatcgttagccggaccgccgtgcctataaatagagccatggaccacggcgaggcactcacaatttcaccagtgaacttggtagaagccaaaattcgcactgccttatccacctctccccaaattgagtgtgcacagtgaatcggtagccctttgcgaccgtatagtcccaac

SEQ ID NO: 21450 - DNA, 1865 bp, Zea Mays
tgacctttcattggaccaagtgtactttctacccatgagaggtatatctttcagccccatatcatttataaatctcctgaacctgcccatcaaaggtctatttatgttggtattgtttttgttctcagagcaaaagatctgattaaaatccccagcaacaacccaagggcctgcacacaattccctaacatctctcaattcttgaagaaaaaactgcttaagattgtcctgatgcgggccgtaaactccagtaaaccaccattgcaatccagattcctcttgaagctgaatggagactgagaaatcacgcacaatactgttggcggaggaaaaggctccatcccgccaggccaccaggatgccccccttgtcccatgagcaggacagaagacaaaattaccataaccaacacccaaaatagataagacatcaaaagcagagatggaactcagcttaatttcttgcaaacagactaacagaggcttggaactaaggacctcagacttcacacaatctcttctagatctatcattcagacctctaacattccaaattagaaaatatgactgatacatgactaacaatatagaagaaaacgaccaaacagcgtcaggctgagacctggatctctaccggcacttcccagccgaacaaagcagccatagcctccacatgtgatctggagaggccgttcttgaataatttgacatatctagcagcattttctaaggagatttcctcatggtcaccaaaataccccaaatgcctgcacaccttggcaactgaaatgtttccgaggtcaggaggaagcttagccacccttctactcctcctgggcatgaaatcctttggcaatgtcttcttgtttctcaaattgcacctaggtggcgagagcagcccgttaatcggtttggtgataatttgtttgaaggcctccaggggcaaagaatcaaccgactcctccagaatagatggatctgacccaaccttcgatcttcgagaatagacattgagacaacagcgatcaggacgccatctctgatcaaacaagtcctgaataggaggaacaagaacagggctgctgctggccggagctatagcaaacaagggtacaacatccatcggtccatggggctcaataggaacaacctcctcaacagggacaacaacgtcctggaagagcattgcttctagagacacggtgaccgtctctagcataccatcaaggacaaggcctgagctgatgagggcaacatctgtgctgtccatgacaataacagggctgctgctggttgaattaatagtatacaagggtgcatctcccaccagttcaaggggctcaacaggaccaacctcctcaaaggaacaacaacgtcctgggggaacacttcttctggggccacagtgaccgccacaatcacaccatcaggaacgatgcatgaattgctgggagcaatgtttgtggtgccaaaaaccgatccatacagctccacaggaacaagctcctcgtcagggacaaaattgccctagggaagctctaatcccagaaccgccatagcaggagaggtcacccaaacattgctaggaagatcttctgcaaaaacatcagcatctttgggagccgtctcgggcgtcggacccaaacgatgcaggacagaccgcctaccccggtgagtattgtccacatcaggggttccacgaccgtcaaaatctgggggtggtgaccgagaacggtatcgtcgccgctgcctggtggaatcatcgtcaaccacagggtcccgaggagggggagcaatgcactctgatgggcaaccactttaatatggatccggtataccagggccagtctccccttgccggaggga

SEQ ID NO: 21451 - DNA, 408 bp, Zea Mays
cagaaaagcccttggggttttaagggcttcaacccgcgctcctccctccctcaccgaaatagtatgcgaaacaacagcgagaaatcgtggctcacctggtgcggtagctcgtcggggactaggccgtggagctttggattagttcggcgaacttgggggcgtcggtgattggctggcggtgagctgaccgaacgggtccacgggcgtaggtaggtgtaggtcatcggcgagcttcaatctaggggcctcgcgcagtagaccttcgcggaaaagctcagggagcttggcagggccttcgcgaaactgtcctcgagctcggattgggtggtggagatacggagtgaccggtcctcgtactccggcagcggaccgtgaatggctggcggtggcggggcttctccggcatgg

SEQ ID NO: 21452 - DNA, 828 bp, Zea Mays
gaataagtggggtaactggtgggattttttgttttatgtgatgttggaggatgccgaggggtctagggttacctccatccatcccgttctcgcactgctacatcaccttctcgcagtttaaactaaagaaaggggatacgaacgaagatgcccttcggcgcgcgtctaagacgagcaacaatcgtgacttggtggaagagttcattgcttgcggatgtgggtgaggtggagttgtgctcgatgccctttttgaataatcagatggtgctgagtcccgccttcgccatcgaactgcgtggtgaagattgttggaaaatattcaacaaggacaaagatgacgaggagataggacattcgaggttcgaatgtcaagttgaatcgtgtgtttgagctgaacatcctttgctatgatctatatcttgagggttctactgacgttggggatgccgaggagcagaaaaaaggtgggttgaagcatggtggggttgatgtaggttgttctaagagtaaatctactttggtgttggtaagaaaaaggaggaaagttgaggcgaaggcaaaggaaccagcgagggcggctggggtgacggacgcttcaaacaagttctttgacaagctagctgagatgtgtgccaagccgggagaggatatggcttcacatgtcctacgggaagcgtatgctagaatgtttaaagcgactaggggtgagtggtggagggacgtccccattcctgtggcttctggcgaggacgattcaacgtctttctggcttggtatttcaaaaaatttccttatgggtggaatgttgatgttgttgtgataactgtg

SEQ ID NO: 21453 - DNA, 426 bp, Zea Mays
catgcaatagtaggaccggtatgactcctcgatgacgacgacggtagcaggatccatcgtcgtggtaggaggatgggggagagggagcggcggctgggagcttcttgagagttgagactgtggttggagaagctccagtggcccagagtcgccagatacgatgagccaccggctagcatgttggccaggtcgctgtgtagcgtgtgagggagtgctcctaattttaccagttgaatgagatgaatgcgaacggacgataggcaagggccagcgaagacgacggcaactcgagtctgcctcttttttccccatgcgctggacctctctagaagcagcgtgagtctatgtaggcaacatgctgagacctccgtgatcgttgatgtttcatcgcagggtctatattctttttgctaacgtgggcaggct

SEQ ID NO: 21454 - DNA, 617 bp, Zea Mays
gtggtgttagagttgtggagaatggcctttaacaggaaggaggtcaccaccataactctgtgtgcctgaaaatagtggcgcaacttcctatacgcaacaagtatagcatagataagcttgtgcgtctcaaggtacctggcctttgcctcatggaggacttcgctgacgtagtagaccggcttttggatggttcggacccctacggttggtcccgagtcctcaaactcctggccttccgtcaacattgtggtggtcggaccaccaccttctcctaggggaactttttgactcccctaggaatgttgtgtcgtcctttcggcgaccagcaccatgctcaccgcctctgtagccgctgcaatgtataagtacaacgactcccccggctctggagctacaagtattggtagggacacaaggtgctgcttcaactcttgaaaggctcattctgcctcttcggtccaagagaatggcccggacttccgcaatagcttaaagaagggtagcgccctcttagccagtcttgagatgaagtggctaagggcggccagtgaccctgtaagcttctagacgtccttgatgcgggccggaggcctcattgtctcaattgccttgatctt

SEQ ID NO: 21455 - DNA, 747 bp, Zea Mays
ccagaacataggtgaaggggtcgcacacgacctgggggaggttggcgagggagcctgcagcctggccggtgtgagtgcgtgtcacagaggggcgtacaccgtagagcgccttcgcacacgtctggtcgcttctctgagtcggcgggcgaacatcgcggcgttggcgtgctcgctcagcgtctggtcgtcatcgagcacgacacgagcgtatggcctagggtcctagcaggtcgatgagtagacatcgtcttgggtggcacatttccacagcgaggtatcgagctcagcggctctgggtagtgcggggaggaggtaggggcgtgcgtccacaacgctgagtgggtggagtggatgcttgctggtgccggggtggccgttagctccaccgccggagagcaggggaggcgcaaccgtgttgggatggccgacgacgctaactaggaagaatagatgatgcgcgcccatgcatgggtaggggccgaatatgggaagtggcggcgcagccgtgcccgatgggccacgtcggcaaggagggccgcctaagttgtggggcattcatggcggggaacgagggaggagatggtcggcaccgacatggagcatggagaactgttggcagctggattagggaagaaagggtgggagggaggcttgatccatgttagagagtggcttgatccatgttagagagtgaaaccctaaccctaattgggcagggattatattaatgtaatagtcttgggccat

SEQ ID NO: 21456 - DNA, 582 bp, Zea Mays
ttgaagggctctaggaagaggatcactatagatgttgggaagagtgtcaagtgtgttcctaaggtggttatgttttgggcaccacacttgtttctaaggaggggctctcacatgctcctcaatcagttcatttttcacaacaggggtggcaattttaggtggagtcagtttgacatgtttgggggtggttgaagctttatctgagggttttaggacactacactcaccaacattaccaaaacaagcgacactcctatccttagaagcaaagcctaacctcggcccaccagttcccctcttgaactgactgaccatcatgcccagccggggctcactgaacgacacctagctcaagattgatcaaaggtatgtgttctcttccttgatctgagtcttgtcgtgtatgcaagactcaagagcagactgcaatccctcacatagtgcacactatgaagggtgtagatgcactcactgagctagccttctcaattgaggctatactagcattcttctccgctagctcaatctacaagccaggaaaagtttgacatgcacccaacaagctagacatagattgaagat

SEQ ID NO: 21457 - DNA, 429 bp, Zea Mays
aagttgtgtgccctcgcacatttggctatgctcgagaaggcgttacgtgcttggtcaggtgtatttgttatgctagactggtgcgtatatagtcggtcttggcgcggacagtttggtgtggtcgttttgcttttgttacgcttcgtccggctgtgccctcgggcaacttaggcgcggatggtctctgcagtggacttcggtttttcgcacttgctgagctagtccggctgcacccttaggcgactcctgcacggtaagtcttcgcggtagacttcgattttttgcacttgttgtgctaatccggctgcacccttaggcgacttttgcacggtaagtctttgcggtagacttcgatttttcgcacttgttgtgctaacccggctgcacccttaggcgacttctgcacggtaagtctttgtggtagacttc

SEQ ID NO: 21458 - DNA, 530 bp, Zea Mays
aaaaacgataatccatattgtagtgttatcagaacaggtaaactggagaagcggcaatgtataaatcaaggtgtaaaactaatcgcctaccctgtgtttgctctgcatcatgcatgtgtaagcaaaaagggggtgggctccctgaagttacatgcattgacaatggaccaattacaacagcaatgattcaaaattcaatagagacctgtcaaagcatattgcatacatcatcactcatccattctactcgcccttaaagcacaagtcatatgaaatgaaatacttacatcctctttgttctagaactacagttgcatcatgtaacatttctctagcctttctatctggagcacatccagcacgttccatttctctgtatacttcagatacctactcgagccaagagcagaattatttcaatgcttttagattaatcaggtacatacaataaaatcagttacttttatattcgaccatcctaataaaaaacaactaaaatttgaaacctatattcatgatctgaaaacatg

SEQ ID NO: 21459 - DNA, 596 bp, Zea Mays
accatagccgccaagctacaagacaagatggggaggggaaaggatgaggaagggagaggcagcgtcgtccatggccggaggatggccggcagcgagctcatggtgtttgtggctaggggagggaactgggaagggggaggaggttggcttgataccatgttagaatagctgaaaccctaacactgattagggtgggtggactgttgtatatatatgatagagaacagtacatggactggatgcctggatcaaagcccattacatcagccaacacacaaataatgtaacggattctaactctactgtgtacagctgtgtgtgaggtgtgccatgtgtttttggttatgctgtaattgcagctctcatgtgtattcaagaaataaaagggtgagtgaactatattttagccacacctttccaatcaaaacatcaacaggcagtttcgccagatgatacccaagaggtgacaactcttcatgtccttcaaaagctccaacctagataaaacaatagcagcataaccatagagtttggttgagaccagagaactaccaaaagaaaagccaagattgtcatgcatagttatgcttctcaca

SEQ ID NO: 21460 - DNA, 698 bp, Zea Mays
aatgctcttgcaagaaacaggtggatggtgggtcttcaacatcttactactaatgaccaggctcgtcagttccttcacctttggcttgctgtaaggtctgttcagttaactgaccaacaggacactgtcacatggagttttgggaacaccaattgctacacgactagatcagcgtatcaagtccaattcttcggtaccataaacaaacacaagtggatgaagatttggaaggcaaaggtgccaagtaaatgcaagatttttctctggcttctcctacatagtcgactacctactgtggatagaattgtcaggcatgggggacacgctgttcttacctacactctttgccagattgatcctgaatctcatatacacttgatggcatcttgcagttatgcccttagttgctggcaactaattgcaaactgtttccatcttaaactgccgtcacaagtcccacatggaatatcgcattggtggcagacattggtccggtcggcgcggaacgcacatcaactgcaggtgatgatctacactatatggaatatttggaaagagcgatgtcgcagggttttccattgcaaggaacaagccttccaagtgctggcctcacaaatccaagaggagatctgctcatttcggttggctttcgctacaactctgtattccatatccttgtatccaatcaactataatac

SEQ ID NO: 21461 - DNA, 409 bp, Zea Mays
gcgagatgctctccgaaaggttggagggttacaactccgttgaagaaggctacgatccaacttgggagtgcttccacgtcgactcagggctccccgaggaaggagattacctcggcgtgccataggagggcgaccagcctccatcacataacctagacaggacctagaccccaccagggagccatgaggctcacctcgaacaactccgagagttgcacgacaagctcagggaagaacaacaacgcttgcagcaactgtgataggatttggagtgagaggccacgggcaaagccttcgacggaggcgcgcaggcgaaggcacgcaatgttctatgtcgcattgaggaagacactgacgccgccgagcccccctccctcaacagggcgagccaaagcctagcagcggctgc

SEQ ID NO: 21462 - DNA, 853 bp, Zea Mays
ttggggtggccggaacgtggagccgaaggcgccttgttgaaagcagcaggagccttgttggaggccgtcgaagtcccgccttgtggaggtttggtggaggtaagcagggcggcggatggagaagacgcacgatgagccatcatgagttcctccaacaggagagtggcccggacgtcgtggaacgtcggaaaggggcgaccgaggcgaagatgacgttcgatgtcggagaaacggtcgctgaggccgcgcagaacgttgaggaccaacgtccggtcggagactggttcgccaagatcaccgagggcatctgccatggcttttgaaacggcgacaataatcggagacaggtagatcaccttggacgaagtgccggaattgagcgtcgaggtggagggcgcgagtttcccgattcccgagaaattggttctcgagagtcagccaagtggtgcgggcagtggcgccgcgttccatggccatttcagcaaggtccggggagatggagccggagatccaggacttgacaacgcagtccatgcgtgcccagtcggggaagtgaggcgcgggagtgtcgtcgaggatgcggctgtccagggagtatttgccagtgacgagaaggaactcatcgcgccagcgggtgtagctgttgttggcgaggtcgaggacgacgtgaacgagactccggatgttttgcacagcgacggcctgggagtggaggttgatgatcgcagcagcctcgtgaaggaggatggcgtcgtggaggcccttgtcagcaccacccgctggatcagagaggtgggactgattgtcgtcgacaggactgccatcggtggcagtctgagcagcgagggcgcgc

SEQ ID NO: 21463 - DNA, 569 bp, Zea Mays
cacggaaacgcgaagatgagtgcgctctgcggggtacgatgaggggaaatgggcgtcacaatgaattctggtggaaacggacagtcacgctggggctatacggccataagggactactaattcaccatgcactaccaattttggcttctactaatcacaccggaatacagtgaagacttcatggttcatggcgcaatttaaaggggtggcgacctggctagctatccatggtcacaaggctcgacgttagtgcatggcgaccatgcaacaaaggagcacagtgtggtagaatttaggcgtgagtgacaccgcgatggaagtactgagccacgatggtcgccggtgagatattcttgccccgaccccatcctaatacgcaagatggtgaattggctcgaagttatcccgccctgaccgtctctatctccagttcgcttggacacatctgaatcccacagtaccgcagatcttttcttcagatatttccttgagccattgatcttccttactcaactgaaccgtcttccttcaatccccttttctcttgattcttgttaagaacaggttaa

SEQ ID NO: 21464 - DNA, 564 bp, Zea Mays
cccgccagcatactgagaacaacgttcacctcagcatcatcagtggtcgtctgcatctggaaatgggtctgtctttcctcttcaggcagagtttggtatggagcaatgaaggcctcaatatcctctggggagggtcgcactctatggcccggattgccatattgaataggagggttggaaacaaactcagaaaaggggctatgtggaggaagatttcaagcagaatacgataagggagcaccatcattcgaaatcttgcctctcagcatcaaatcaactcaattcaacacattttcttcagaaatccgtctgttggtaatttgggtgggatcattgaccctagtatacaggtaggcagggtagactctatccttcagaggttgaatattcttgaagacaaaatcaacaacaacaacaacttcaatagtcaagcctctgtcgttcaatgcacatatctctgcaagcagcactttggactcaacaagctctgaatttgtagggacttccatctagctgagcattcagacgttaggctgcctgcctgatcgggcaggaagggacttg

SEQ ID NO: 21465 - DNA, 1544 bp, Zea Mays
cgtgtcatggctttcggtttgactggtgctcccaacacatttcttggagctatgaatgagatattgaagcccatactacgcaagtgtgttctcattttctttgatgacatattggtatatagtcaatcatttgaagcacaagtgttgcatctgcagactgttttgcaactattgaaggatcatcgatggaaggtcaaaatgtccaagtgtgagtttgcaaaaaaatcaagtagcttatctgggatatgttattactgcacagggtgtagctactgatctggagaagatcaaagttattgagaattggcagactcctactaatgctaaggagcttcgtagttttttgggtctcgcaggtttttatcggaaatttgtcaaaaactttggtgtgattagtagacccttattcaacctgctcaagaagtatgccttattcgtttggacccaggatcatcaaacatcttttgacctgttaaaacaagcccttgtgtcagcaccggttcttgctttaccagattttacaaaacaattctgcatctacacagatgcctgtcagacaggggttggagcggttctgatgcagaatggtcatcctttagcttttctcagcagagctttgggacctaagaaccagggtctatccacatatgagaaagagtatatggctatcctactggctgtaactcagtggcgttcatatcttcagttcgcagagttcatagtttatacagaccaccgtagtttgtcacaattgaatgaacagcggttgaatactccctagcagcaaaaagtgtactctaagttggtcggactgcagtatcgcattgtttacaaatagggcattgacaatggagctgctgacgctttatctcggcacaaccagggtgatctccagtgtttggctatttctcattgtacacccgagtggttacaagaggtggttatcgcataccataatgatcctgccactcgcgagttattgaccaagctgaacctgcattctggacacttagagcctttttcactagaccatggtgtcattcgccacaagggtcatgtttggttagcaggcaatactacaactcaatagcgagtgttacaagcttgtcatgactgccataggtggtcactcaggggttcctgctacttacagtagactaaaacaattgttttattggccaagtatgaaagcgacaatgaagtcatatgttcagtcatgtaccgtgtgtcaacaggctaagccagatcgtgctcgttaccctggttcacttcagcctctaccagtaccaccacaggcttggcattcggttactttggattttatcgaagggttacctaggtcaggtcagcacaattgcatattggtggtggttgaccgattctccaaatatggtcacttcttacccttgcagcaccccttcacagcgagtaaagttgccaaggttttcttagacaacatatataagctccatgggttgtctgttaacatcatttccgatagggaccgagtgtttaccagtggtttttggcaacacctgtttcac

SEQ ID NO: 21466 - DNA, 285 bp, Zea Mays
taacgttgtccatccatctcccgatctccggttcagatcgaaccgacgaagggatgactctagatctaatctccactgttcctggacggatcaacagtcacccatccccttcaccacaccgacgtagagtcttggcagcacccaagcacacggcgtcgccatggccggagttcccctcagtcttgatccccgtgcctaaactccgatccgaaagcagtagtaagcagtggtaacggtagggtatcgctaagggagatgctcaccgagattcgaggagcgccgaaa

SEQ ID NO: 21467 - DNA, 1321 bp, Zea Mays
ttccttcggaatgtccgaaggtgaacaaagaatgaacatacttcacagcttcagatgttgagcaagtcgagaagaaatgtgtgcctcgagctatccaaaaagacccccctttcatgggcattgtactcctatttgtaagggaaacatggcgtatagcttcgtatgaaattacacttatgacctaaagtcctatatataagagttcactaagggtgtcactgttttttcctcttaggtgacgcatagcacacattgcttgattctttcttcgtctccttgctatctacttcagatgctcttaggtgcttcagctaatcaccgatgtcaaagcttctactcgctcctttagcctgcgggacaatactgtgatgaaggccactatcctaaaacaaacatgaagataactgaggtttgttaatttgaggacctttggcaaaggcacatctccaacaactgccatctggtaactcatgatgtacttggacttgagtgcggtgtctttttttctttaattaggcgttgtagttctgcttggacttgagtgcggtgtcttttggctgctagggcctctttatgcttttgtaggtgttcatttctcatacgaaggctctggagcagttgtttttcattattgacgtcgagatcctcttcatctgggtaacttgtgtggtccttcttgacgttgggatgggaaggcattggcctcttgtgtcgatcctagactgagatcgtgggcctaaggaaagaagacatggattggtcctcgtctggctgaggattggatggttggcctcttgataggttgggctagattttggctgtgtaagggtggctttaggggttgaaaagggtgtgacgagccccccctgagctgtttatgtggacacttcctttggggattggattgtttgatggctcattgcggtctagggaggggggctcactcctgctggttggacaatgaaggctgccttcgcctttattgtttgactttgatcggcgaaggtaacctttgcttttggggtgttgtcaaagacgactgccttcgtcgtcgcgaacttcgaagcatgctgtgattgggtgttcatcttcttgggaggcacaaatgttgaattctaacaggtgggaaccaaacaagaggaacaaatagggcaaaacaacgagacaaattgggaaacagtggttcacaaatgtcttgtcaaccgtcccctcaccccattcggacaggggtagtagggtaacgaaggggtagcccccctaaagtacttgtttgccctttagtacaacactttaatttgaggttgttacagtccaagtatta

SEQ ID NO: 21468 - DNA, 333 bp, Zea Mays
cacggagcagacccgccagagacaggggaaaggaggggagacgccttggatggggaggccgcattgacgacggcgtggggaaggtgaggggttgccgccggacccggggtggatgccggcttgggctggtggggagtcaaagcgtcagggggagaatccaaggcgtcggcgggagacgaggggacgtccatccccagtcttgctccttcctaacttcttaatacaatgatgtgtgattctatcgcgtgttcgagaaacaaagtacaaacagttgtcatatgagcaaccggtgcaaaggtttcatcataatctagtccttgagtctgataaaaa

SEQ ID NO: 21469 - DNA, 548 bp, Zea Mays
atcaccagggggctcttatgaaaatgtgcttgcgaaggggtatggacagacgctggccgtccgattagagactcacgacccagatctgcgctatgaataactgaactagaatcgctccacgtacgttggatcagatatcagtggtcgggatcttatgaatcgcaattgacatctgtccatcggatctaatttcaacggtcttgatctagatcgcacgaaggggtactttcttctaatctgagtcgttacctacgaaatcgatggccaacctaccccagcagaagcgatattcaggaccgattcctggccgtcagtcacaagatcaacggcaggggatcaaaccgcgaatctttttgtttggatctaatctcactcgccctatccaaatccaacagtccttggatcgtcttccaccttccagtcgcgacccggagatggcaaccggagcaccgccgctgagctcgccgcagcacgacaaatcatagcacctgagcaccaataccaaatcagacagacgctacgcagggggaatatcaccgcggacatgc

SEQ ID NO: 21470 - DNA, 381 bp, Zea Mays
aaaaaatcgatgtctgtggcaataactgtatgcttttctggaaagagaccacgagtgagaagaagtgtacaatatgtggtgagtgtagattcatagaggttgagaacgacgatggtttgaccattacgaccgaggtagcacgtaagtagcttcgttgcatgctcttatacctcggttgaaacgtttgtttatctccaagaatacagccagacacatgaggtggcataaagaaggcgtacatgagaatatcgatgtcatggcgcacccagctgacacagatgcatggaaggcactagattcctttgattctagctttgctgatgaagtgtggaatgtccgcttcggtttggcaatagatggtttcttgcctttcaatctaac

SEQ ID NO: 21471 - DNA, 484 bp, Zea Mays
tgacagatccaaggataacagcaacatccattaatccacatggatatgccgtttagagataagtcgataaaacaagcgtcatgatcctcggagaagggggtatgagaatgaccagaaatgagagatttaggcaagatcatcatccaatacttgagtacaggttatagcagataaccagataatagggcaggatcgataggggatcccgagattcggatgataaagccaacatgattcacaagaaaaaggattaccagatccaggcaaaaggagaggtaggcaaacaggatcagccaggatgattaacataaatgctatgaagttttaggagcaaggatttatggaaagaaacatggccttgatagggtttgcgcaactagacaccaacaataatttttttgacacaacaagtgcacaaggaagttttagtttggctagcggttaagctatgggggtctacaagttgtgcaggtttaacttcaaa

SEQ ID NO: 21472 - DNA, 478 bp, Zea Mays
tgcaagggtgtcgctccttgctctgtgccaggatcaagtgctttatatgagctggttctttggcactctagcattggtgaaccgctcacaaccttgtacaatcccgagttgggtcaccacaagctcccttgatgataactgcacctgatcgccaacaagcaaacactaaactttctgcctaaggagaggtcagcaaataaggacaaagatatccgggaacaggtcacccgattgggaacatcgtgaccttcttcctcgtcgtcagcctcacccagtctgtgcgggcatctctcctccgccacccctagctcgagctaccacaactcgcagcatgtgtcttcctctgccttgtcgcttcacccaactcccattcctgctcgtcgaccccgccctcctctaatcatttagccatcgatgactactcgacacgacacctcccagggttcacgttctcgttttactgttcctagattctgtt

SEQ ID NO: 21473 - DNA, 554 bp, Zea Mays
aattaactaagttctatgaattatttttgtattaaaaaaatacctttactaattcatttgcacattttaaacgggttctggactgggcgtcaatatctgaaaaactcaggggctctggcgcaagatttctgagacacagagaatagtgtcaaggacggcgggttgatatcttttaacccaagggtctctttagcaagaatccagagccgaaggggtacggggcgttgtcggccgtccgatcaagcacggatggtgaggattagatcagcgcgatcgcgaagcggtatgcgcagggaaccgttggatgttaaaacgacgggtaggattttattatcctagatccaaccttgtccgcccaaaccagatcgacggatcagatcaaatcaacgcgaaagggtacacgatgactaatcccagtcgttcgctgagagatcaacggtccacaacccatcatctccaaatcgtgcccatacgcggcggtgccgccctgcccgcggcgcgccctcgccggaggggtgaccaatccgcgcgcccacgccccgatctcacaatcc

SEQ ID NO: 21474 - DNA, 373 bp, Zea Mays
cttgtgtaggagggcgtcgtaccgccgctcattaggatggaacttggaagagtccaatagcgttgtgaacgcaagaaggatggggatggagatggggatcctggcggcgtgcagctcatcgggaagagacgcttgagtggattgggctcccgacgacgtgcagctcgacctgcacggacatcgaggaaggggatagggctcctcatggcgagcagctcgacgggaataggtgtttgaggagatggggttttcggcgacgtaataggtgtttgaggagatggggttttcgagggggagggagttgggtgggggaggaggcggatgcggctcaccggcggcacgcaggtcaccatgaaacagcatgtgggcccag

SEQ ID NO: 21475 - DNA, 408 bp, Zea Mays
tgaagggctgaaggtaagaagctgggaacgtgcagcaaggctgcaaaaacatgtccattaatccaggtaagtacccctaattcctaggtaaaattgtttttctgtgcaaatatatattatattgtaatattcctacaaacgcttaagcacgattaatctatgcttaagctttataggcgctaagcagtggcctaacgcccgcctaacgcctagcgcttaatataaccttggagttatctaaggctgaaaaagaagagctaagagagtatgttatatcttgcagctaccagccaggagcactgctcttcggtggcattgacgaagaaagcttaggttgcctccgagaccgaactggagcgaaggttatcagcactctatcgaagagtgttggttttccgaagcttgaag

SEQ ID NO: 21476 - DNA, 507 bp, Zea Mays
tgtgtgttaacgttcgacagaaactgggagtccagtttgccgtatgccgaattctcatataacaacagccatcaggccagtatcaagatgtcaccgttcgaagcattgtatgaacgaaagtgccagacccccctaatatggtccaatgtaggggaaaggacactagaaggacctgcctttgttaaagatgccgaagagaaagttgccctgatctgcaaaagattacttgaagctcagagtcgacagaaaagttatgcagacaacaggcggagagaactcagatttgaggaaggagatttcgtatacctcaaggtctccccgatgcgtggtgtcaaaaggttccaaatgaaaggaaagctagcaccgcgattcgtcggcccctatcccatcattggcagagtgggacccgcagcataccgccttgaattaccagaatccatgtcagatatccacaatgtgtttcaagtgtcccagctccgtaagtgcctgcaagtactagagaaccac

SEQ ID NO: 21477 - DNA, 275 bp, Zea Mays
tcccagtgcaacgtcaggttagacagttctttgatttgtcggtttttaccattttagggaatggggctactactctcttctggtcggatagatggattcatgggaatactatctaggacattgcccctgaggtggtgggtatggttggccgcaaggcgtattcttccagaacggtggcacatgctctggataattggcattgggtcagtgatattcatggtgctctttccttgagtgggttgcagcaatatctgttgttatgggatactttgggg

SEQ ID NO: 21478 - DNA, 474 bp, Zea Mays
aacacatctagtacactggccatccttttcctcttgggggtcgctgtaagacctttttgtgccttcggcactgtcacttctgccgaagggcttacaacttctaatatttttgttccttcgacttctatctcttcaatattatcggccttcggctcagctaatttggctagggatgccttcgactttgcagccggctcttcaatcctctacgtaagcgcagattctttggcttcagtagccgaagaggtctcaccgccaaatacaggcatgaccggttcaatatatcgcggtcggtgagtaagaaccttcatctttttcctcttcggcgcgggctcgcttggagcagctgaagcagcatccttcccggaagttgcactctttctcttctgcccccgtggcgggtagcggtagtcagggtacatgaatccaatagcatcaaaaactctatttagcctcttcttttttcggctcctg

SEQ ID NO: 21479 - DNA, 568 bp, Zea Mays
gatcaagtatgcttcggtagcacacccgagggccaacgggcaggttgagcgagctaatgggatgatactggaggcactcaggaaaagggtcttcgaaaagaatgaaaagttcgctggaaagtggatacgcgaattgccctatgtcgtctggagcctaagaactcaacctagccgagctctgcatggaaacactcccttcttcatggtctatggatcagaagcagtattacccgccgatctcaagtttggggcgccgaggttgatctttgaaaacatagcagaagctgaagctactaggctggaggacattgatgtactcgaagaagaacggctgaacgcagtaattcaatcagcacagtaccagcagactctgagacgctatcacgacaaagccgtgcgacaacgatccttctcagtgggagatctcgtcctccgccgaattctaacgggggagggacgacataagttgtcgcccttatgggaaggaccattcatagtagcagaaatcactcggccgggatcatatcgtctaactcagatagacggcacagaagttgggaactcttgg

SEQ ID NO: 21480 - DNA, 464 bp, Zea Mays
ggtggtgtagcctcccacagtcgacaaagtagtgagtcggtggggtgggcgatggcccaacccccgagctggtgaagtagcgagtcggcaaggcgagcaatgacccagctcccgagctggtgaagcagcgagtcagcgaggcgggcgatggctcagccctcgagcaagtgaagcagtgagttggtaaggtgggcgacgacctagcccccaagctgatgaagcagcgagtcagcgaggtgggcaatgatccagcccctgagctggtgaagtagtgacttagcgaagcggacaacagaccaacccccgagctggtgaagtagtgagtcggcgaagtcggcaatggttcagcccccgagccagtgaagcggtgactcagcgaagcaggagcagaccagcccccgagttgttgaagtagtgactcgcaaggcggacaatgacctagcccctgagctagtcggagtggt

SEQ ID NO: 21481 - DNA, 437 bp, Zea Mays
ttttcaggggcatccttcttctccagagtcatgctagtatctggagattcttgctcagctctctgctcagttgcaccaggccctgcctcggcgggccttgagggcccggcttcggtttcagcacgagccatagcaatttcggcaatctttttcgcaggagcaggagtcaatgcccttatcatctccatgacagcgtctagcacgctagccattcttctcctcttgggagttgttgcgggagcctttgcaaccttcgacaattctgcctctgctggcgagctcaagatttttggcagctttaactctggctctttggccaccttctctttggtttcggcatcatgttctggcgtttcggctgaaccggcttcaggaaccttcggcaatttagtcaggtcttccccagggatggtgggagcaggttgctctatttcggc

SEQ ID NO: 21482 - DNA, 701 bp, Zea Mays
ttttgttttctgttgttggaattcaacagttgttatgattgcagaagtaaatgcagtgtgctggtttcgaagctttttcctattttatgctaattgattagctaatgaggcatagagatcgccctaagatgagtgatcgtaagcatgttatactaggtcgagtaggtgtgagcatgttgcaccatcttaagtcattgccgacttaagttgattgcttcgttagtagggtatagtggtcaccctaagttgagtaagcgtgagcatgttgcaccgtcttaagtcactgccgacttaagccgattgctccgttagtagggtatagtggtcaccctaagtcgagtaagcgtgagcatgttgcaccgtcttaagtcactgccgacttaagctgattgctccgttagtagggtatagtggtcaccctaagtcgagtaaatgtgagcatgttgcaccgtcttaagtcactgccgacttaagacgattgctccgttagtagggtatagtggtcaccctaagtcgagtaaacgtgagcatgttgcaccgtcttaagttattgccgacttaagccgattgctccgttagtagggtatagtggtcaccctaagtcgagtaagcatgcagattgataataaatagttcgagtgcccttgagaatgaaatctttttattgatgatgtattttccgattacagaatacaatgctg

SEQ ID NO: 21483 - DNA, 505 bp, Zea Mays
attattttgcataagcagcggacgacgggttgattcatgtatttgttaggggctcatttacaaaacacctgagccgaagaggtacggggagatatcggccgcccgatccaaaaccgcattctctcttggtcgtcggatccgagatccgcggtccctgggtcatgatcctctctctctctgccgcacaatctgaatccacggtccggattagatcgcgtggtgggtgcgcaacaacccgatctctaccgaccactatcaaatcgatggtgcggatcagaggacccattatctgttgtaactaatctgagccacacgataacgatctgacggtgatccccatgccgactcgttcctcggccaaacagagcggcacccgcgcacggccgcggcggaggccatggctagagttgccgaccacggcacatgcatccggaattccaggctaatcgatgctacgcattaagggaagaaatacaaacttaaatgtgtgtctcataccggaaat

SEQ ID NO: 21484 - DNA, 768 bp, Zea Mays
tttaatcacttagtggttgtttaggcaaaccatagtcaaggtagggctatccaagactacagaaatatgatttggcttttaagagtaattgtcatgtcacatcacttaacattcacaaggttcttaatagtactagatagcaacaatggtggtttccacctcaatatcgggcgagaacaatggtaacatcccttaaccctatatatggattttgttatgtataataatcttttttttcttgtgtggcaattagaggtggcagccgtattatgataatctaaagtccaactaaactctagttgctttggttgtacttggataatatttatttggatttaggatgttgtcgtggtaaagacactagggtacccaagagtaccagagaacggttagcaagaggagtagtgagcgagtcatgataacgaagaatatgtctatgaagtcttgatatcacaacgtaaaacacatggaattttacaatgtgcataagacctaacgtcctcttgttgattatatattgatgtatacaaatgatatagaaattacaaaccctaacactagggaagcccaagacccactagataataagtttggggtggtaagctagactaccaccaattgatgcttatttgactggattgaattgatttcccttattggtgtcagtttagagatgaagtccatgttgaactctcgttaaatgatactctagcctcatttttatagttcaagggagtggctaatcttatatgtatgcactacttgtgg

SEQ ID NO: 21485 - DNA, 510 bp, Zea Mays
gaggtgttcccggtgatccaacacgggctagttcaattggctgggccgataagcatctatagcacacaggggtgttgaaacgagagcgaggagggcgtgaacggacctgcagaaggctggccacgacgagctcactcacggcggcgcggagaactgaattgggggaaactctaaattagagctctctggtggacaatacgagacacgggtgggtgtgctggatgcgtgatgacctagcggagctcactggggcggtaatttataggttccatcggcgatggcgtccaattttgcgaaggcgcgctggcggtcggagagaggggaggtcactggtgcaagtgattcgtggatttcaacgtggcaaggctaccggcgatgaacggacatgctaaggcgattcgctgcgacgtggtattgcgcttaggcacgtggcgcaccatcggtaagcggctaacgccggtgagggccattccgaccgaccgcagtccaagtgggtacggcgagctcaac

SEQ ID NO: 21486 - DNA, 431 bp, Zea Mays
atgttaacgattgttttgattttggttggatcaatttcaatgccacgcttagtgactacaaaaccaaggaattttcctgaagacaccccgaaggcacacttcataggattcatttttaatttatgctttctaaggcgctcaaacaccatttccaagtgctttaagtgatctttctcacgcttagattttacgacaatgtcatctatatagcactcgacaatcttatatagcaacccatcaaggataatggtcatggcacgttggtacgtggcgcctgcattttttaacccgaagggcattactttataacaatatatgcccttaggtgtgcggaatgctgttaactcttcatcttctggcgacatctttatttggttgtagccagagtaaccatccataaaggagaatatttcatatcccatagtggcatc

SEQ ID NO: 21487 - DNA, 304 bp, Zea Mays
ggcgtagccaaacccaatcgccaacggtgaaacgaaggttgcggtggttcttgtcgtagaagcgtttgtagacaacctgagcctgttctaggcgactgcgggcatctgccagaaattcatcgcgctcggtcatgctcttggcgacagcagcaactcgtgtctcgcgctgttcataagaccgaatggttggacggtctcgaccataaacgatcctgaacggtgtggtcttgagtgcggtttgataagcggtgttatagataaactccgcccaaggtaaccaacgaagccattgacgcgacctatc

SEQ ID NO: 21488 - DNA, 381 bp, Zea Mays
gccgagtgcaaaccttgcacaacgcccgtggataccacccccaaggtctctgctaacccgtctgactaccggagtcttgccggtgccttgcagtatctgaccttcacacgacccgacatcgcctacgccgtgcaacaggtttgcctttacatgcacgaccctcgagagccccacctggctgctctcaagcgcatccttcgctacattcggggtactctacacctgggtcttcatcttcgaccgtcgacccaagatgacttggtggtttattctgatactgactaggctggctatcccgatacgcgcaagtccacctcgggctatgctgtgttccttggtgacaacctggtctcctggtcctccaagcgtcagaacaccgtg

SEQ ID NO: 21489 - DNA, 726 bp, Zea Mays
ctggttttgtaattctctggactgggcctcaattacaggaaactgcaggggctacggtgtaagaattccacagactcagggagacacccgagcggactgcgggttggtttcctaaaaataggagggctcttatgcaaaacaggtacgacgaaggggtaccgagcatccagggccgcacgatcaagatccggtgcaccagataaaaccttcaatcggtacgcagcaccaaccgctagatcgggatctgacggcccggatccaatgtaaccgaatagcttatcaacgatctaatccggtccgctcaggatggatccaacggtccgggtcagaataaccaaaggggaagagctgagtctaatcgtaaccgtccacgttgagatcaacgtcgcacgaccctttaccccatcccgcaatacaggatggcgacgccgcccaaccacggcgatgcaccatcgccggtgacacgccatcattctcccagatgcctcattctcgaatccgaagcgctctacccgaattgaagtcaaagtgagtaggttgagactgctattaccgatattcgcgcaggggtgagccttatccacgagaaggggcggatgcgcggtggtgctagatctccggcaaggaattgaagacgccctgaggggtatcccattatggcgtggccacggaaacgttccccgcggttcgacggagcgagcgagcaggcgacagcactcaatcgac

SEQ ID NO: 21490 - DNA, 994 bp, Zea Mays
gtcaggcgctctgaataaggttcccatggtatagtagctgaaaaagatcccggattcagcccccctcgccgccggtgatcccgggtcgtgatcgtcgtcgccgttgcgattcgtgctcagtgaagtgcagataactgttgggggtaagaaatatagcatcaaggatgaacttaggccactgttctgccccggccgccgtgtccgcctgactcacggccgattcagataaactcaccggagttagccgcctatcggccgtgcaccacgtgcttaggttctctaccacgttgcagtaactcatcttaggcgtgtccatttgccgtaggtgaccttgccacgatgaacgccacgaatccttttcgccagtgctcttccctctctccggccgccaacgcgctatgtcaaattcatgagccaccgccctcgggccctataaattgacagtgccattagctccactaggtagttaagcatccagcgcacccactcgtgtctcgaatcatccacagagagctctaatttgggatttcccccaaatcggtcaaaaatgccgcgtgtgtgagctcgccgtggccagcgctccacaggtctgatcatgccctcctaactcttgtttcagtactcttgtgtactcttgatactcctcgacccattaaattgatctagatcacgctagatcaccgggaacacttcagattgtcctcggtttgcgccatcaccgtggacagaatgattgtgagccagaaccttgcaattgagtgaggggaaatgatcgtttggggtagaaattggtgtcaagcaaaggaaagggctagccgttgcgtattccggccagtacaagttcctcggagctcagcttgtcgccgtccatcgtcgtggactcggcgttgtaaagaaaaagaaagggaagggtctaggtgtaattgtcagcgacacaagcgaatagtgcacatgactctttacaagtttttcaaatcaccagggtcccctgtgc

SEQ ID NO: 21491 - DNA, 357 bp, Zea Mays
cgcaccctcctgttttaggcctcccttcttactcgttactaggttgagggactccacactgtcagtgtcacctaccttctgaaccgcctcccctccaagacggctagtcatcccactccttccttcgtcttgttcggcaccgcccattcctattcgcaccttcgcgtctttatttgtgcttgatatcctaacacctctgccaccgctccccacaaacttgcgccctggtccactcgttgcctttttctcaggtactcctctgatcacaaggggtaccgatgcctcaatcttctcacccaccacatcatcatctcacatgttgtttttgatgagcacattttcccccttgctagctcc

SEQ ID NO: 21492 - DNA, 407 bp, Zea Mays
gaatctccgtccacgatgctctgtgatttggcggcaatgtcgatcgtcggtgaagaattccccaccagaccacgacgttccccgccaaattgagggttgtcatgtctttctagcgcgctcgtgaagctccctaaccaactcccggtcactatgtggcgtcacaggcatcagacggcgacggcggatttccccttccttccgcccccctctgaagcaccaattctcttccctggcaatggcgctctgctagttggcggggttgtagatgtggagaggtagggagatggccccggcttttatcccccggccacgaatccaccgcgatggggcggcggtcgttacgcgaggccgctgcgtacagccggccacggactcgggttctgttacacggggagagggaaagagct

SEQ ID NO: 21493 - DNA, 500 bp, Zea Mays
ttgctctatcgatgtctttgattttggctcttcaaccagcttcactctagcttcgaccggaacgggccgacggggctcagatgcacaggaagatccctcaatcagcttcggcactacggtcgtttcaatgtgcctgggccggtgattcataaccttaatattttttgacgtcggtgtgctagaagtcgccgaagtagcagtttttctcttcttcccttgtctccgcgcaggataacaatagtccggatacccgaatccgatgacatcaaaaactctatttagtctcttcttgcctcgaccctcgaaggctattgccatagcgtcatcctcagcccttgagtaagcaccaagcagttcatcactggttgcttcgatggcattcagccagtcatcatttggctcatcgaactggctcctgtacttgaatgtatatttcagatagactaaaccaccttcgctggacccagcggtagtttccttcggcatctcccatccacttc

SEQ ID NO: 21494 - DNA, 421 bp, Zea Mays
gcggatgctttgtgctaaaacagggtaatctggacaagtttgagtcccggtcttctgatggggtttttctgggttaaccattacattctcatgcttatcgtgttcttaacctagagactaaccgcattatggagacttgtgaggttacattcgatgagactgcaccttgtccatcacctgtctttgagcctgcaggtccagattagatgggatagaccatctttgttgaggaggagcacgacaacgatgattgggttgctctcaagccaactccaccagccgccctagttgagcctgcttccactactatggctgacgaacccgaccccactccttccaccacttggggttcgcatgagccagctccttctgggactggaggagttgaagctactgttgagggggaggccacttcctcaag

SEQ ID NO: 21495 - DNA, 505 bp, Zea Mays
caatagtctcctttgaaaaatgcaggtacccaatctttgcgtatctcatataatctggcaagggtgttgttctcgtgtagctggaaatcatttagcatcatttgccaggcagcctcgaactccatttcattcaatgaatgatgtattatagattggaaccttgttttgaaatccatctcctcaaatcttgcatacaattcattcaagtggggcatatacctgttttgcacatgccacaaacacaatcgatgtattgtgtttgggaatactctgcctagtgcgattggcatagcagggtcttgatctgaaatagataaatttacatagcattatgccaaccaatatgatatcatatagtacgtgccataataaatacgagccatttataacaacatacctgtcaacatcactcgtggtccttcacatcccatacatgttttgaacgtattgaaggcccactcgaatgtatcaactgtctcgtctcctagtaaagcaaacccaaata

SEQ ID NO: 21496 - DNA, 575 bp, Zea Mays
tccgatgaggaattggaggtgactcagtcgatccacgctcccctagaagctatgccctggttcccagcaatctgaagaacccctccaatcaccaaccgagcagccagcgttagcgtaccgaggttttcccctgtggcaaccccgctttcttttctctttgtgcatggtgacagagcttggtgatttgttgacgcgaggcggtgctaggtttctgggagaggcgagcacgagcggatatatatgcgccataggggagaatctggatagaggtggtgagcaaccgatggtgaaggcgaaggactgcggcggcggcaatcttcttctctctccctctctttctgtctctcaaccgcggtggatctcggtgagctggggagcgcgagggcgcagagttttatacactgacccgaggaggtaacgagcaacaaccggcgacatttatgtagttggatcttcggtcgttccgagctaatgccgcgcaatggggaggaaggagtctgacgtgagatccgtgaggttgaggattgtgctaacaactagggcccacccaacagagacacgaagtgtgaaacgcg

SEQ ID NO: 21497 - DNA, 399 bp, Zea Mays
cttgccatcttaaaggctgctgtgcacacactattccttcttaggtttgctgctttacaaatttggtaaagtgaattcctagcttcctgaactgaaatcatggtcacctggctgtgagcctgtgacatgtgtttagtgtagagacacagtactagcttggcatggcgatagggcaacacgggtttgcatgaaacatgatcaaccatgagagtttcctgcaagtataagaactgtttcctcaggcagaacccatcttgtagacccatacaattctgaagatattttttagttcaggtctcagcagccaaataatgtatacatacctatcggaatcacttccctgaacatggaagaacataattgtttcccaaatattgcactgcagaaaactcagcctcc

SEQ ID NO: 21498 - DNA, 405 bp, Zea Mays
cggagctcggccagggttacgcgctgggcatctgggaggttcccctcgcgtgttcgtcgatgggaggactgggctccttcacggcgtgttgaagaccgaactggacgacaccggtgcgaggctgctcgttcctgtgcagagccatggtaaaacatgcctccatgatcttcctctcccttatctccctgtcgtttgagcttgcgtgtggtggattgtagcctcggcgtaccctggtaattctccggcttggcatgccgtagacggactcaccgttgttagatgccgaggtgcgcaggtagaagatgactcgctggccgtcggatgtgggagcaatggccggatctaggatttgtcgctcatatggatgacgtccactcttggccgtcgatctgggatcagacgcat

SEQ ID NO: 21499 - DNA, 297 bp, Zea Mays
ggctaatgttaggatacgaggttccaaatctttgcttgcattggcaactaagggtgaactcaaaatttggaggggccgtctgtatggactacaaatcctaaaccgaaacaagggtacaaagtttgttgcagcaggtacctaaatgggaggatgaacaatgtaacaaggtgacagcttaaactaaaagtgtggatctggtaaagtcgtaagggttggggaaaataaactaggattgttgaactaaaccataggtgttgtaaatcattgttcaatgaagtattcatatgacggggtaca

SEQ ID NO: 21500 - DNA, 427 bp, Zea Mays
aagatctcgcgctagggatgatgttggggcactgtggccgccctgccgctgtacccacttgcgccacaacgtggccgcacggccaacacctgtgtgaccgccatttaccggaatccaccacgctactgaccctgttacctcgtggcaaggtgtcctgtgaattgattagtcatcgtctcaggtctctaccctggctggttatacggctccggtgactcacccctctcttcggccgccagccttctccttcaaaattcggagccaccactctcggacactataaattgtttttgccgctaactccgttaggttgtcacgaagccagagcacccgcccttgtctctgatcatccactatagcgcttaattcgggttttcccccaaatcagttttccgccccgccgtgagcacccctccgtcgaccctcc

SEQ ID NO: 21501 - DNA, 495 bp, Zea Mays
ttaacaacacttcttcttatcttgctaccagatggagggcacctttatccttaagacatactattgctcggaggtggaaggatttccttaccttcgtcggagttgtgcgcttcgcttgggagtccgcaagaagccatagtatgtccggaaggaataccgtgaaaatggagtcgagaagtgctctatggcattctacctgggagaaaactgaagctacccaaaccaccctcctttctaggccaccactactggccacgcttcccagacactgccagaatgctgcccaaaaagccctccgccaattattgcataactacagcaaagaagtcgctgagacacccctccgctactttccacccagcaacaaaaataaccctacgtggaggaaaagactccaagctttgtcagggagagaacataatgaagatgatcctaccgtaatctacatggccggatatctccacacccttgacacccactttgatgaccttttct

SEQ ID NO: 21502 - DNA, 584 bp, Zea Mays
cgggacattgaatcgatcggtccatggaaacggcacggacactcgaatgggtatcacgttcccggtgattaagagggactcagtgtaattgggttggttgaggagcatcagggaagcacactaatgctgaaacaaggcagcagagaccatgaacaaagctggaagtggctggccacggtgaggtgcgttttacggtggcggaaaccgtgattggggaaagtgagcaattctcggtccctagtggataatccggggcaaggattggtgcaatagatgtgtgattaccctatggagccacaagtgcactcaatttatagtgatcgtgagcggtggccagtgaatttgggttggagatcagctcacggcgacttggatattttaccgtgctctgcgtatcgtggcgcgcgtggagaaaacggtgccggaggggtaactggctatcctccacgatccctacgacgtggagaatgctttgcggcgtggcacgattgagtgaaacggcgagctccggtgaggataaactcggtcggccgcgcggcaagtggacaggatggccgaaccagctagcaatcacaatccatccc

SEQ ID NO: 21503 - DNA, 877 bp, Zea Mays
attatgtttttctgtttgcattttcctagatttgtttttgcctttgcagaacagatactgtagaattcaaaggtttggtcctgcatatagagcgtaggcattggatagaattagggctgcatactttttatatttgtgcaatcatagtagctcatccaaatttgataactacattaatttcatgctgatctgcatgttcacaagttaagatgatttgattttatctcctttggttgcaggtttacatttgtggatgcttctttatgggtttgtcatccattttgctacttctagagaaatcaccacttctttaccatgcttatgtattgtgcacaatattcctttggacaagaattgtacaaaaaattgattttttgaagtccgtatggagagaactagctaatatgcccttcaagtatatttttaatctcctgaccagttcagttgttgcactgcttgtattggagtttctggtatgtacccacatattgacacagctatcattttaagacttcatggaatttgatgtgaaatttgatacttgtgggcaggttatgagcttctttgataggaaaatttatacgtggtgcttcttggtccttgggatactcggttcaacatatgtagcattgtttattcaagctagtgctgcacttgcgatatacatatggcttgcttgctggttcctgtctgtatttactttgatgccagctgaaattccagaaaacaacaacttggtgtatgcttctttcactgacaggattcatgcattttttcccttacattttatcctgtgctagtagagaacaagctgttacatatatattgtaataccgtttaatgttgttatgtttcattcatgatttcttaagaagct

SEQ ID NO: 21504 - DNA, 281 bp, Zea Mays
catacatcatgtagtctatctcatccatatccatcctaaccatatgccccaacctcgatgatatgcactcaccgcgaatcaatgagaccaagatcggaggagaaaagaccaacctcgttaagggaggagagaagtcaaactcgatcctcagatgcattacctcccaacacggagatctttcccaccataaactaacttaccccaggctattcttgccctaacctacccatcttttatcgtacgtaataaaatggctatgcctatagatacccatgctctcc

SEQ ID NO: 21505 - DNA, 672 bp, Zea Mays
accgcagccctgacctaaaaagctttccttaaaagaaaagacctcttaacctcttaaagaaccttctctcctttcccggtattaacaccccttcttctcttgctaccagatggaaggcacctttgtccttaggacatcctattgctcggaggtggaaggattccctcaccttcttcggagctgcgtgctccacatggggatccgcaagaagccagagtaaatctggaaagaataccatgagaacgggattgagaaatgctctatggcagtctacctgggagaaagccgaagctacccaaatcaccctccctttcagatcactgctactggccaccgcttcctagatacctaccagaatgctacccaaaaagccctccgccagctatgccaaaacaatagcagggaggtctctaagacacccctccgctactttccacctagcaacaaaaatacccctacttggaggaaaagactctaggcattatcagggagagatcctaatgaagatgaccctaccataatctacatggccggatatctccacacccttgacaaccactttgacgaccttttctcccactgcacccacctaaactctcgggtggaaagccttgagcagcaaataaaggaattgaaggaagaaaaggcggctcttcaagacagtctcgagat

SEQ ID NO: 21506 - DNA, 1155 bp, Zea Mays
gaggggtctgactgcagaggctatggttgttgactttgtcttcaagaatattcagccactgaaggatagggcatacccggcctatctgtaccgaggcctagctgactcaacccgggtaaccaatagaagaattcctgctgtggacttggtgagccagctcgaaatgatactcagaggcaaggtatcaaatgttggcgcccctgttgcatactcggcctggaacctgcctccttccaaggcctttacccattttgtgtcaaatcctcctgctggtgatggcggtttgggccttagagtgtgaccctctgccgaagaagttagtgctttggttgcttcgcttgaagaaattcttgatgatgaacggcaggttcactttgaggtgcctttggatcccagtgatgcagagataagtgccatgcttgatatgttagctgaggattcttctgatgccgctcctgctgaaacattggtggcggtacccatccctgaggctgacaaagctttggacgctcagaagtctgtcaatgttcgtccaaaacgttctcgccgagccaatcaagcctcttttcctgcttaggggggagaaaaagaagaagagacgtcttcgtcgggtgtctagcttagatcagggtgcccgtccttctgctcctgttgctgaggaagtgttgtgacttaatttactgaagctgatcccaatgggtgtgactcgtctgacgctgaccccaatgggtgtgctgtccgtgttgttgatgaggatgatgaagaagaggacaaaatccctctgattcggaagaacaaccggcgttacatagctagtggggaaagtagtggtgttccttctcctaccttgtctgccctcgttggtctgcaagaattatctctggcgaactttgatcaaactcttgaagatatggttccagaagatctgttatcagaaccggcagatggtggcgcgattgatgtttgtgttgatgtgctcgatgccgggttggggtcatcccgggcagcttcccgtgcctcatcgaccttagagcgcggtcttgagagtcaggaagctggtttggattgccctgctcccatggaagtgactgagggaccttcagccttagaggtggctgctgcagataactcgaccctcaaggatggtactggcgc

SEQ ID NO: 21507 - DNA, 289 bp, Zea Mays
atacccagattatccttttgagcatcaattattctttgcaaaatgattgactcaagccttaactgatttagagttccttgttgaatgatccccaggtttagcttttccatttcttgacacaaagtgttttcggaagtcttcgccataagacagtggcaggcaaccttacggctcaacgcatctgccaccacattggccttgcctgggtgataatggatctctaattcgtagtctttaatgagctcaagccatcgtctttgtctcatattcaactctgactgggtgaaga

SEQ ID NO: 21508 - DNA, 663 bp, Zea Mays
caggagtatatagaggcatcagccttgaaggtgtgctgcttgtataggataaatcgaacgagctagtgcatccggtggtacgggcacttgaacatggagggactcgtgcgctgataatggtggcaagggcaggatacgccgcacgcaggtggaggatggtgacgtccatgtcgccgaccgcggacaggggcatagcaggcgacacggtggaggtggaggcaagggagagagaggctgggacactaccacagacacgagagggaagggaaggaatggaatgatgatctcacaagagaaaaggttgctggtgaagatgtcggcggccgatggtggaagggggcttgcggttccgtcgtgtcgtcgcttccacacccacgcgctgggaggacttccacacctgttagttagtggatcaattccaggccgggattcagtgttttcgtgtggattgggtctggtttctgaatacgcgtgggctaaacgaacgactatttcgttgtgggcctgtattgaatccgtgctgggatgacacccatggatcagtcgtgatctaggtcattctaggcccaaccgaacaatgcctaatggatccagctagcacctcgagtatcacatgatcggtggggatttctactagaagatagtcacgaccaggaaggcagt

SEQ ID NO: 21509 - DNA, 1106 bp, Zea Mays
caccccttcaactatcataccagttattctacccatcaaactattgaaactcatctaattaaccccctgaagtggttttgaagattgttttcactattgaagtctccataacccttaaggcatcaacggctgactacatatggtaggattgcggatcctaccagggatctcccttagcctataaggatgaacagctgcgcgagggagatgggggcggcggcgctggggcgccgtggctgacctaggctgcgcgggcaagagagattgattccaactcctgactccctcagggaagccagaataatctgattctgcttaattccatagatgacctcttacaagtatttatatcccagctgatgcttatctgatctaaggataagagctatgagatctcttctaatccttattcaactaactagagatatctctcttttttattagctaatccttatctaatcttatccaactaactagagataatctctcctttttattagctaatccttaactaatctctcctagccgcatgtggcctgtggcctggccgtgggccttagccctcctagccactaatgtccctgcgcctggtgtaggagatgccagtcataacaacataacctctttaaccatagaacacgatattgtggcttttaatagtatctaataatgtttaaatgaccccgatagtcttgtagggccgtttggatacagtatcccaccatattggctattgaggagaaggccaatcaagaacccgatcatcggtttagttgaaaccatctaatcaatcaccggacttcactcctatgaatgtagggttcgtcgaaggccacgaagactacaatgaagacttctccctacagataatagacctgtcgatacgaccgatcaggactacaaccacctggtccattaaagactccgaagaacacggcgaggacttcgcccagacaacaaggcgaggggaagtcttaataggcggactccgccatccttgtcgagcacacgaggtccgatcgaagaccgaaggcgtgctaccaaggacctcattgatctaggaacggcctagaagatgctgaggacttcggccacgtcactcagac

SEQ ID NO: 21510 - DNA, 714 bp, Zea Mays
cttcgtcatcgtgcaccaccagtccaccacacgtccacaccaggtacaagaaggagtatcccggcgaggtcaccggcatcgtcgtcttctcgctcgtgactcatcgcctccatcgccggctgcacctttggttacgacatcggcctcacctgtgactatctgtgagtgaccaacacctcatagagtcaggccatgataccttctccagctagcgggggcttgatctgaccctaagctaaccgacgttgtatgttactgtcgccgccgacgccttggtggtgaccgtggtcgtgaatccgggttgaagtcgtcggagccatttctggtcaagttcttcccatgtaagcgtgaaaacggccggtaacggtcggaaaaaacctctcaccattttcacccgcataaatttttgttcggtcggaatcggtaaacgggaaagtcagaaacggataacggccggtaaattctggtatatcgaaaacggttaaatacgagcaaaatagctcgaaattgatcgggaaacggtaactgtaatcggaaaagctcacaataaacaaatcctaatcacacagatgttcattcacatccacatacaagtctcattcacaaaagtacacaaaacacaatcttgtccacatataattggtcatacactcatacatgtccactcttaaattttaacacacaacacataagtcttaaaacacgattgttcat

SEQ ID NO: 21511 - DNA, 432 bp, Zea Mays
gtcattgtcagcatatatcaaatggatcacaaattgcatagatgtatcatgaattctccttttaacttagtgcacatcaagagagatatcgaatgatagtatataaggcactaagaaacataagtgttaattgaagttattcaatgatgaaacaaataacagatgtgatcaaaagaacaacatatgcattcgataagataggagaatccagtggatatgctactttagcaatgaaacttcaatccttgataaagatgacaatattctaataagttggattgatttgaagcagcatacttcatgagaatcttattctcatacttgagactaaatgagattattaagataaagtgttagtctcaacatgatcaagatatagaaatagactccccctaaagatatgcatcaagaatttgaatgagatgaatagat

SEQ ID NO: 21512 - DNA, 551 bp, Zea Mays
ggggattctcgcgcggcccaggtacctaacgccagcccaagtcgcatccgcgccggcgggtggggccctctcgtcagtcgctccctctgctgctctcttgctctctctggttggtggtacccgggtgtcagcaacggcttctccacctccgcgcacatgtcggatctcctcccttcgtgcgcatgtgtcgccgcaggaatcgggtgccgctccccttagctcgccgacctcgtgaaggatttaaggcagtcgcatgcctttgtaccctagaccataagacccggccgcatcccctcctctcctccccaattccgcgcgcgccgccattgtgggagtgtgccgccgtcgggtagactcccttctggtcgtcctctggccttggacctgagatcgggagctccttcggaacccaaggaaggtagtcgtggccaagccattcggggattgccgtcaacgccgtcggaattcctcgccgctgtgacattgccgtggccggcccgctctgcgccgtggccagcccctctctggcgctcaaccacggtaatcccaac

SEQ ID NO: 21513 - DNA, 374 bp, Zea Mays
ggtctgcactgcaccgtgggaccaacttgtcatgcactgtgctccttatcttccgttcggcttccctttctcgtttacatgtggggcccagcaaccaggtcgatatccttcccactccgtgcgtggcgggcgagcttcaactaccgcgctcagctaactccgcgagaagcgggcaccatcctcctcccgtcttcgatcctgggtggatttaaggcgatcgcgtgcctctttatcccaaccctttgacccttgccgccatcttcaccagttcttgcgcaccgcgtgccattatcgccggagccagggggagaaaagcgaaggtagcagccatagcagcgggtcaacgccaccttcatcgcgtaatcaggtaagaa

SEQ ID NO: 21514 - DNA, 965 bp, Zea Mays
gctttcttcaatgcacctgatggcgatgagccattagctttagatatgagtagcatgggtaaaggtcaaatctggataaatggacaaggtattggaaggtactggcttggctacaaagcttctggaacctgtgggatctgtgattaccgtggagagtatgatgaaaagaagtgccaaaccaactgtggtgactcttctcagagatggtaggcgctttgtatatcaatgcagaaatatctatggaaagctcacatttgaaagcctttatattcatgccatgctcgctcaggtacaatgttcctcgttcatggcttaatctgatgtacgtggagaagcgctgatatagatcggctactacaagcacagaccacgccagaacgaacatccgctgctacagaagacgatgtggaggcgagcagcaagcacggcatgtagacgcaatgcaagcacaacgtacgtcgctacagatcacgtggaagcgagagcgcggactgcagatctatatacaatgttggatatacgatttgcaactgataaaacccattgaatcctgctagtgcgctgacagcagaccgatgccctaaactgatacacaggcattagtgcactaactaatacaggttgataaacttctgagcatcagtgcactataaactgataacacgggcattgggaggcttgccagcatgaataatagggaactcaacgactaaacattgtaaatctcgacacatgaatttgaaaaaaatatcggaaacaagcaataacacattcatcagataatggtagacctaatatgttgaactaaatggcatgcacaaaaacaaggtcaaaccagtagacggagtggaacaaagactcaccgtgctgatgtgcgatatggccgtcgtatgttcttctccactgctcaccctcgctctggacgacgcgccgctctgtagatagggtctcctgctcaccctcgc

SEQ ID NO: 21515 - DNA, 669 bp, Zea Mays
gcagtggctcttgaatttggcatggcacgctagcggccggagagagggactaagtcactggcgcgggtgaccgtggctgttaccgtggcaaggccttaggcaatagaagggctttgtattgtggtcagttgcgacgttgtaagatggctgacgacgtggcataaccatgagtaacggcggcacaacggtgatggtcgcgcggccacgtcgccggcaagtggatgagcgacagagcggctactgtactccaagttcatccactgcgagatctttttacccggggatcgttatccacgtttaactgggcgtgaatcgcggcgtcggcgcgaatctgagtgcaaggtcaccatcagcgaggggggcgaacctgagatatttctgcagacactgtaccatcaggatcttattcagtctgcctgaccgagcgttttgtaaggcctggatctctgatttctatataacaacttgttaatccacctgtaacgaatttgttgtcctataatccagctacaattcaactatagaaaccctatccatttgcttactggattaagcacaaatccactccaaagtccttaagtgttctctgtcagtcacagttcagtcctctatcttgattgacagccaaactttctgtccattttactctaatttttgtgcagcaccaag

SEQ ID NO: 21516 - DNA, 369 bp, Zea Mays
tttgttctggctacttgcttgcctagaatgtgcgcgaggcatggcgatgcagcctgccagctacggaggaagagagaccccctgccttaaacaaacgagcaggagagttctgtcggcaggcgacaactgttgcttcaacacgtgggatccgactacctagtggggaggaggccgtgcggggagagaagcctgctcgtcgcgcctcctcgagagggcgacgacggagataaccagatcttgggatttggggttggtggggagagggggacgcgatgagagggacgacaagagagaggaacaagcggacctttcaaggctcaaccgagctgaaggaaggcttcacgtccggagcctgcccacgtgccggca

SEQ ID NO: 21517 - DNA, 673 bp, Zea Mays
aaaggaggtcctatgatgtactagtcttctaggacctaaaactgttttccttaaattaatgacgggtaagcgctttcgagaacataagtagtgctgtgtgtgaatgacaactgcttttgcttctttacgaaaaataatttcgtgtaagatttgtgcttatcctgctggttgtcaaaaatagcaattcacttcatttgccgtaactcactcacaggtattgagtcatggagttccagaagaggttatggtgaacataaagcgcgatattcaggagttctttgagctgccgctggacgtgaagaatgcttacgcgcaaaccccaggagaccttcaaggatatggtcaagcatacgttgtttccaacgatcaaaagcttgactgggcagacatgttttgcatcatcagtcagcctcctccggcccgtgacatgaaacattggccgactcaacctcttactttcaggttagcatcggatatggacgtttcttaatttattttaactaccttatatgactatgagtctatgactactgtataactcgtgttaacacgctacgatgctagggagagtagaggagaggtcgacgacggtggcgtggcgcgatagaaggggttgacggtggcaactactacgtgagtgaggagagggggcagaagggatgcggagggaggg

SEQ ID NO: 21518 - DNA, 377 bp, Zea Mays
cggcgttttagaggtaacagccgagtgataacgggccacgccggccgctttggaaacaatggccgggtgaagtctggtaacatcagcgtttttagaaataatcgctgagtttaaatgggccgcgtcggccgttttggaaataacggacgagtgacgatgtggcacacccgcgttttagaaataacggccgggtgatgacatggcatgcccgcgttttggaagtggtgccaggcccgggaaaaccccatatgtactgcactgtcgcacacctccgcgtttcgtgccctagttttttcttttctgcatccaggccttctccgctctcctgcaatattgcttccgctccgctcactagcaaggttgagatggcgcccaag

SEQ ID NO: 21519 - DNA, 944 bp, Zea Mays
cttcgtcatggcgcagaggccagcttcaagcttcgggaaccccatacttctggccatctcccggcagacagataattctttgttctctgggaggcaatataataagtcatcttcgtctgtgccattaaacactaaggcccctttcgggtatttcagttctcgggcatagtgtttagcttcaaaattttcttcttcagataatctttttcccgaagcatgtcaaataatataatcaaggacttcggaagacgcttcgggagcaggagcggcagctttttcaggcaaaatctgttctataccttcttcttccgctgccttttctctagtttctgaggatttctccttggcgggcacggaaggcccagcttcggcgtcagcctggctcagtatagcttcggcttcggtcagctttgtctcggtttcaatctgtgttttcgaagccttggcaatttttcctggagtagagcttgaagcttttatcgtctccagtacatctaatacactagccatcctttttctcttgggggttgctgctagacctttttgtgtcttcggcacctccactcctgccgaagggcttagaacttctaatgtttttgtcccttcggttttcggttcttcaattttgtcagtcttcagcattgcagccggctcttcaatcctctgcataagagcaggtcctttggcttcagtagctgaagaagtctcaccgccaaattcaggcactgtggctggttcaatgtagcgcggtcggtgagtaaggaccttcaactttttcctcttcggtgcgggctcgcttaaagcagccgaagcagcagccttcccagaagtggcaccctttcttttctgcccccgcgatgggtagcgatagtcagggtacacaaatccaatagcatcaaaaactctatttagccttttcttttttcggctcccgaaggccgcag

SEQ ID NO: 21520 - DNA, 346 bp, Zea Mays
ttttaatatttagctttacacacttgcactgatgttataatatctagctttacacaccaacacatactttaaggctcgttctagttcaaatgcagcatgagcccggctctggcaactgccaacctcttcgatcgcatacagccaaatcgcgtgtcacggaaacctattggcgctggaaaaaaatcatgatccttggtcgacggaaggaaatagacaaagagattgatcgacgggagcaaacagacgagcggtgacgtcgggaggaagaagagaacacgggcgcagcgccaaaagcactttaaatagggacgatgatgagaattgagaagccgtgaatctcattggg

SEQ ID NO: 21521 - DNA, 694 bp, Zea Mays
cgaggatgagaagggaaggctgcggctgcctaaaggatcgggagctcgatcgggtaatatacaagttgggcggctgctcgcattggtttggttgctaagcgggcgcagcaggttcgttgaacgacgcggaggcggagtgagtcatggcctagtactagtaggagcaaggcatgtcatgtgcgtttttcgctccgcaaggctgcacgttttgaccggagtggtacccgcggaacgtacctcgcattccatgaaccgtcagacggcagtgggtcgtggccgtacggcgggtcgtgtgattgagaggacagggagatcggtttggggatcacgaggggctggctgcccgagagatcctgaaccccggccttttcggccggtgccggtgccggtgccgctgcgctgtgcatttcaggaacggtggcaggagtggtcggtcgtcgcctcgtcgtcgtgatggttgcgttacgttgcgggcttcccggtttcggcgtcgtgggatgctggtgcgtgctcgttcgttggtcgccttttggctttgctcaagcagtcaaagcgcgacgtagcgtgccgcgagccggccgacaggttcggcgccgggcggctgcctacaggttcagtgttccacttgcactgttccgagagttcgtcccccctggggcctggattgaggacaacgtactgcctgccgtcgccg

SEQ ID NO: 21522 - DNA, 430 bp, Zea Mays
aacaccccaggcggtggggctggccccacggccgtgcagcccagcgaggtaccctgccaagcgattcaacgcactagagcccaacccgaaaagtgctacacaacacaaagttcatggtgaaacaaagggtaggaccttacttgcaaacgtgtagcatggtgccccggcgtcgtgcatggtggctcggcggtgaaggaggaccttcagagaagaattccggcgactctaaccaagctcaggatgttcatgccctcacacagcgtgccccagcgatgcaccctggccaccctgagactttaaacagcagtcatcgatctgatcgatgatggcggctcctgctggcttcccattggtttccgcccgtgcacgagattgtggccgagacttgggatttcaggtctactctatcgcttttatatcctgggcagag

SEQ ID NO: 21523 - DNA, 435 bp, Zea Mays
ttgagccatagccatggtgttgcttctgatttgaagaggctacgtaagttatcccatttcatgtgactgtgcctatcctgagatgccatgtgcttcacatagacccgattcacaaggatggattaacttccatctttaggatgatttagctaatgctgtgatttgttgcttagaatacagagattctaaacctcttgttagagtttggtcatttttcagatcgcctgatgtggggccgaagttatgctcgcctggtataaccatgtgtgtgtgggtacaaacaaattctggacataatcggaggctatgttgggttagttgttagctagctaattttagctgggtctaataggtcggctaactttttagccaagtctccaaccagttgttaaccaggcatgccatgcctaactggagctaatttttagccaaact

SEQ ID NO: 21524 - DNA, 459 bp, Zea Mays
caatctttctttttaccccttgccctcgcagcgggtaacaatagtcagggtatacgaagccaatagcatcaaataccttgttcaaccttttcttattccgacccctgaaggctgcggacaaggcattgtcctcggtcttggaatacgccccaagtaactcgtcgctagtagcttcaatgcactttagccaatcatcatttggttcatcaaacttatccccaaacctgaaggtatatttcagctggaccaaaccacctttgctagagtcagtgatggtctcctttggcatttcccagctttccacaagcgtccataccctgaaggatatatgttcttgaattaaatcttttgtgccaatgaaagagcaaacagtgctgaaggccttctgacacgcttcatctgtcatcttcagccttcaaaggccgaagcaagaccaaatgggcgcatgatgacttcctt

SEQ ID NO: 21525 - DNA, 393 bp, Zea Mays
ttctcccctcggggcttaggggctactgtcgggatatgatccccggtccctgggacccgcagatcaacgggcacacggggaaaggacttcaggcaactgggacctgttggttagacggaggagataggtaatgtctaccctgaaagaacttgctcggtacgaatccctatggcactaagcttggggacgggcacgacagaaccagacagggggacaaacatgtcgaagggaaaccactcgagtagatctcgtgcctggctcgagactgacccatcaaaagtgaccagccacattaattgtgtctggcgccgaaccacgacaggggtgtcggtcagcctcccactcatgacctacgaacccttggggcgtagagcactcatgatctaccagccc

SEQ ID NO: 21526 - DNA, 456 bp, Zea Mays
ggtatgtaaggatcaaatctcatccactggtggttgatctgacgactcaagcatcatcactcccacggccgaaccagtatgccaggagcgatcccagccgtctgctatggatccagcggccgcgacatcatcttccccattcaggcacgtggctacgacagcgccgccccaaaaccacaaccgagccagtgccaggataccccgccctgttctagcctctagcacctaaatcgaccggctcaacataaatcggaggtaaaagcgaaccatcagagagagtccttatattggtcaatggcgcagacatttctgcccgcgatgaggggcagcaccgttgtgaaccagcaactccggtgagaaatcgaagagctttggcgcacaatcccaactaggatggcaaggatcaccatcccccggatgacctgaagcacacggactagcgcacaagccccaaat

SEQ ID NO: 21527 - DNA, 639 bp, Zea Mays
gggtatttccatgcagagctcggctgggttgagttctcaggctccaaactacatacggcaactctctgatccattttcctgcgaacttttcgttcttgtcgaagactttctttctcagtgcttctaatatcatctcgttggctctttctacttgcccgttggctcttgggtgcgccaccgaggcatatttgatctgaatgctcttttgctcgcagaaatcgaagaattctgaactggtgaagttggatcctaggttagttatgatgctattcggtatcccgaacctgaatattatatcttgtatgaattccactgccttagctaaagttaaagaagcgatgggcttgaactctatccatttagtgaatttgtcgatagccaccagtacatgagtgtatcctccttgggctttcttgaaaggtccgatcatatctaatccccagcacgcgaacgaccaggttatgggtatagtctgcagctgttgtgctggtagatgctgctgttttgacaggtactagcaagctttgcacttcaggactaactcggctgcgtcactcttcgctgttggccagtagaaacctgacctgaaaaccttcccaactagggtcctggatgttgcgtgtactccacattgcccag

SEQ ID NO: 21528 - DNA, 320 bp, Zea Mays
cggagtggggaggaagaaggcacaggaggttgggttggaattggatgggaacgccggaacggcaccgattcctctccgcagcagcacaaggccccgtgcggccgtgccggcttcccctgccccccgtctctctctcctccatctccttgctgacacctttgcgtgccctgtggttctgatccgatctatccatcatccaaggccgcctccatcctgtccctgcttctcgcgcgcgcatgcacgctaggagggaggataggaatggcgacggaggtaaaccgggacgccaacgctgacgaccctcctctgccgcaaccggc

SEQ ID NO: 21529 - DNA, 647 bp, Zea Mays
atacattaaagcgcttacccacctctagaagggtacggactggaccaaacatcaatatctccttcaatttttaaaggcttcgctcacactttattcgtccgtttgaactttcacattattgtgggtgagcttagacaaggtattagcaataatagaaaaaatcttcacaaatctccgataatacctagccatgcccaggaagcttctcacctctttgacattagatgacctttgccactccattaccgtggaagccttgtttagatccacagaggtgccctcattgataacatggcctaaaaaaccaactcgtaaaagacaaaactcacaccttttcaatttagcataaaacatgctatcacacaatgtttggagtaccatcccaaaattttgctcatgctcttccttagtgtttgagaaaatcaacatgtcatcaatgaataccaccacaaattggcccaaattataaaacatttttttcatggttttcatgaaatagggaggtgcattaatcaacctgaacaacataactctaaagtcacaatgctcatacatcattgcaaatacagtcatttcaatatcctcttccggtcttccctcactgggatttggttataacaaccttggaggtcgatctttgaaatcac

SEQ ID NO: 21530 - DNA, 354 bp, Zea Mays
agctgatggcctcgacctgaagtactacccacgccgttcgaccggcagtgctggaggtgtgattgcctcgccaattggtgagggcaatcccaggttgaacaacatggtcaacttgggtgtcgtgctcaacacagagttggaccacgccctcgacgagttgggcaaggtttgggcggaggttgcggaattgcgtgctgagtgcgcagcacgccactatctggatggtggttctcccgcccctgtcgggattcatcacccttaccattcactgccacgtcgtcgcttcgactatggtaccccagactgcaagactcggatagatttggatccctagatcgacaaagtgggagtctg

SEQ ID NO: 21531 - DNA, 358 bp, Zea Mays
ggccggccagaacaatgctaggcgagagagggaagtggtggtgataggaatgtgagaggagagggattgttatctgttaggtcttatgaatatggaggaccggccggcagcaaacaaaaaagtgaacactcatcatagctgctgttgggtagggattcttttccatctcgcgtcctctggttgagagatatatatgtctgctgctctcgctatatagagggccagcctgccctgctagctagctagctagttcaagttctaggcacggatcggatcggatcgatcaacattaatttaattacttaattattagttccagacgaaattaatatatgttaaacaaagactttaattttta

SEQ ID NO: 21532 - DNA, 377 bp, Zea Mays
ggtgaagtgcgtgaacgtaggattcctcggctgtccggtccatgtcgaggtacgtgcggcacttacgcagtttggcgatcaccccagacccgctttgcagacctcggacggcggcgcaacgcacgacgacggtagcgggcgctggcgcacaaagctgcacacggcgagtgcgattgacgttggtctgggctcggtatgggaaggtaggtaaaggtgagatggcgagtgcggccgaggaatcgttccccaccattatctagccgcgagagcaacggcccaagcgagattgtcggcgccaaccacggcggtgggtgcggcatttctgttgaatccaggtcgaggcggtggggccatgctgtcggtgcaacagatagggc

SEQ ID NO: 21533 - DNA, 351 bp, Zea Mays
ggaagtgtcccgtctcgaacattgatgtgtaatgttcggtgataggcccaaaccccatgaagtagtcctgctaggcatagttggcctcctcgttgacgtgttcctcatcatcttcgtcgttgtcgtcatcctcatcatcatctctagagtcgtctgggtcgccgcctccgggtgcaagagcttgaacggctggtgcaggcggtgccgaggttgatgacctagctgcgaaggccagtgactctgccaacggggtgggcgtcggcagaagttcctccgagctgtcttccaggatgactccatgctccactcgaatgcgagggagatccaccagaacttcctctactaccactg

SEQ ID NO: 21534 - DNA, 845 bp, Zea Mays
ctggaattatcgggctacagtgggtaatcggaagtgaggagcggtgcactggcttcgtaacaagctgacggagcacgctgaacactcaatttaaagggatcactcgagtgtttcgcgaatttgggatgggatgagcttgcgatcggaagggaggtgagtcaccggagcacagctaccgtggcgctcaacaaggtaaagaccctggcagtaaacaggttgtccactgcgacttcttgcgacatgataatgagcgtaagcacgtgaacggctacaaagagcggcgaactccggcgagaacacttcagccgatcgcgcgacaagtgacgcggtgaacagtccggtgataaggctccaactcctccctgcgctgagatattttacctcaagcagttatccgcgcgccacttggtacgaattgcaacgccgacgtggatcgcggcgtgggttcaccagcggcgagatgcactgaatctgaagatcttttcaactactgtaccatcaggatcttcttcagtcgttctgacagagcacattgaagggcgtttttttctcgaattctcacgtgacaaactgctaacacacctacatcaaagttgttgtccaatgtaccagctttaattttgttataaagacctcgatcaaacatccactagatcctacgcaaatcgatctcaaagttcatccaagttcaccgacagtcaagtttcagtattggagttgactaacagtccaacttcatgtccatttttctcccatttccatgtagctctagggctagatcacttaatcaatcttgaactactaacatagctctacaagtttgttgtaatgacctgtggcaaaac

SEQ ID NO: 21535 - DNA, 667 bp, Zea Mays
gcggtgactcactggttgcatgtccggcgatcaccggagccactgccacggtgaaagccacttttcccccgtactgagctcgcctcccctctccggccgccagcacccctcagccgaattcttcaccgtcgctcgatgcgcctataaattgagtgcgccacaagcttcgtagggcagtaagctatccagccaccacgaatcagcctcgaccattcgctagaatccacgaattttgaattcgccccaaatcagtctccgccgccgtgaagaacagctcgctgtggccagctcgattccggttagctcgcgtccctctgttgcttattctagcatccgtaggcaccctgcgatcccatcgacccgttcaattgaactggaccaccacccatcgccgggaacatcttcatccatccgcaaccttcacggtcaccgtggccagcacaaccctattgatcattagagaaattaagttgggggaaaggtttgggatgagtccaattccgtgtgcgtcgctcgggaaccctagtcatggccccattcggccggtccagacagctcgccggagcttccccgcgctcgacgccgtcgtggacttcaccctgtgaagaattagaacttgagggacctctgtgcaaatcgtcagtgactcagaaaaacagtaactgaa

SEQ ID NO: 21536 - DNA, 841 bp, Zea Mays
aacctatggagcagcagtagttaattttgggaaagcaaaggaaggggggttgaagccgagttgacgagacagattagagcctgatcggaactggtgactgcaagtggacttggaaccgactaggagggcagcattggaagttggagatcgcatcgccaattcgcaaccgtagggcctgtttggttggcgatgtggcctgggagtgggggaagagtgctcgggcaggcaggtcgatccggcgagcaggcgctcaaaaccaacggcctggggagctgcctggcccaggcagcttcgcggatggattggggctgctcggctcatgtggtgtgccatgggggtattgctggatttctgcgatgaaatcgaaatccagaaacgaacggatggagtatggatcacagaaatcacaagtccccccgataaatccaatcctcatgtgaccctaatgattaattgaaaaatgagcagcagcaatcgatctccaccaccaccacctacacgacgaaacgattaggtttgggaagtttgggaagcggagtcagaaggagggcagggcggcggcggtgggaatttcgaaagcaaaatcctatctctcttaggagcaacaagcgcacgcaccctgatggcgaggcgaaggatctgctcccccggtgcgtgatcgatctcgatctccccttcttcttcttcttctcttgtttctgtgttgcctctcctctctttctctctcctttctgtgttctactagatcaatcaatcaaaaggaaaccaaaaggaggaggaagaagacgaagagaaagagggagagaccttccctcccgtgggtgggctgtgcctgtgcctg

SEQ ID NO: 21537 - DNA, 2244 bp, Zea Mays
cctgcataccctgatgaccatagtcaagccatgaaacctctttgataagactacccttctcttcaaactgggaacaggtgacccaaaagagttcaattgaatttgtaagagcgtgttcatgtccatcgtccatgtcaagcacagaaagctccccattggtccgcaagatcaaacatctgatatcataaataaaaaaaacaataaaaacaaaggagaaaaggattgtgtaacattatggggcgaaagtaccttgatggttgctgggacaaaagatcataagattcattagtatctcgcttcagcacttctttgtcattttgttcaggaatgaagcgcattgaaacaggtggactctttggactcatgattgaaagttctcgcactgttgaaagctgttcatccggacaaagaataaaataactattcacagagaaaaattggaaacacattatgaattggggttgcaaatttctttcacgatggacattacctgtaaaactggattgctagaaggcgataattctcctgagatcatcacatggaagatatgtacatcaaatggactgtaagtaactaatatataatcctggaaaacatccatgacaattggccttccaagcagtggttttcggtagagtaaagagctataatcaagatgatatcttgggaaaaagagaagctcgtacctgagccaaaagaatgatacatgtctgtgactaaaatatattgtaattagaaaggcattagaggcctaagttaataaaatgagataaaaatatcagcagagaaatgcagttcagctagtatttcaaggatcatagttcaatgcaataaactcccatatagcgagctttctcccatgctccttgctacagtgcacggaggagtttgagctagtgaagccaaaaatagtagcttcaccagctcctagctcatgttgagaagagagataataaaatgactccttgcttcagtgaatgaaggagacggagctaaagacggccgaagctccaccaaacagggtcaggtcagttacaagataggaatggcaaggaagatggtatagaagtgagaactcacgtgtttgacgtttcaacatagttgcacacaataacaatttttctcagccacaataggcctttgcattggatcttttgctcttgtgtaacatcgccaaaaaaacgccaccttttatttcgcaaatcatatagcactagcccgtgagagccagcaactgccaagtacatcccatcattgcttgccaccacatgtagaagtggccagttctgggaaatgtatgaaatctacttcgaaaaatatatattatcataaaaatgcatcatcaaacaacagaggttgcagcattttaacctctcaaataaatcaaagacaagggagttaacacttaactggaacattaagatgcaatatcttcagttcatcagcatcatccggttgcaccaaaaggattcgatcatccccataaagaacctgatgggaatatgttgtgcccgaaagccctctgtttaggcaacatttggcaaatgagaaagcaagaaccctttctgacaagttttcttcgacagcaaataacttatatccattatcatcccattgaatgtgtgatgttcctcccattagaggctcaaattttagagtgcaacgtttcaccataggagatgaggcagaatttgaaccagtttgacgaatagtacacatcaaccgacatccagacacagaccatacagtaagtcccctaaatttccacccaactgcgaaagcacaattgtcaggcgtccaagatatacaagcaacaggcccggtatcttccactgaatacctacaattttttatccaaaaaagaaggaaaaggagtggtcaaagctcaacttcaaatataacaaccaaaagtagagtggtgtgaattggcatggttgcaccttaaccacagaaggtccacgaaatgttaaacaattgataactctagggaaaaggaaatgatcaagcctaaacacaaggtaacaacatcatgctataagactctgtttggatgtagatattggatggctggaattgaattgggtacaatgccaaatcagattggttttggaaataggctacaataccatcacatgtttggatgtagatgaattgctagtgcaatccagtcacatggcaaataacaaatcatgtttggatgttgattttgttaatttgggaatccggtgctcgggctagtcaacg

SEQ ID NO: 21538 - DNA, 544 bp, Zea Mays
gtctaattcaattagccgggtcgtgaagcatcaagaactcataagagtaccgaagcaagagcgaggagggcgtgatcagacctggggagagctagccacgacgagctcacacacggcggggttcttgactgatttgggggaatcccaaattggggagttgtgagggacgattggatgtgagggctggttcactggatgcaaaattacttagtggagcaggctggggcaccaatttatagcttccaagggcggtgtctcctaatttgggcattgcgtgctggcggccggagaggaagaaggtcactggtggcttagtcgtggcgttcaccggtgcagcggtttagagatggtaagcctaggcgtgccacggttactaccgcgctgtaaagagccacaacgtggcataattgaggtcgtcggagtttccacgacgacaccggcagtccggccacgtcgcacggctacaggcgcggttgataagcttcaccccgtgaccaaatccgctccccttctgatcttttcaccctcccggcactatcctgcc

SEQ ID NO: 21539 - DNA, 636 bp, Zea Mays
cacaaattccagactacataaggcagttctctgatccattttcctgcaaacttctcatttttgtcaaagacctttcatattgcctctagtatcattccatttgctctctctacttgcccattagctctggggtgcgctattgaagcatacttgagttggatgcatttatgttcacaaaaatcaaaaaattcatcagttgtgaagttcgatcccaggtctatgatgatgctattgggtatcccgaatctaaagatgatttcccggatgaactctactactttagatgaagtcagagtggcgatcggcttgtattcttcccattttgtgaatttttcaatagccaccagcacatgtgtataccctccttgagatttcttgaatggcctgatcatgtctagcccccagcatgcaaagggccatgtgtctggaacagtctgcaactgttgtgccgatagatgctactgcttagctaacaattgacatgcctcacatctctagactaggtcggttgcatctttcttggctgttagccaatagaaactagctctgaaggctttccccacgagtgtccttgacgctgcgtgcactccacattgccctacatgaatttcctccagtaagcatttcccaacggct

SEQ ID NO: 21540 - DNA, 713 bp, Zea Mays
tccggcggtccgaaccactctaacccttatgttctcgagttcatccaactagctagtcaaatccctaagcccactcctcatcttataatcagggcgggtgcactccgccacccggccggagaagttttatgtcgacagtattgttaatggagttgtaaggatcttatttggttttggtaattgtatgacaactgaggcgaactaacatgtgtttatgttgatatatttaggtgattagaccaaaataacgttggtgcgagctacttatgccacactggtgaagtgaattagttatgttgattgatatgcccaacaagtaggaacaagcggaacggagcatccgccagacacaccctaaagtgatatagctctgtaaagttggattcaattgcaagctgcaaagatccatgacatccaatcccttgttgtccaggccaatacgcaccggaacaggagtttactggcactggacacgggagctagcctactgctactatgcgtgttggtttgtttgttttgttgttgccagcaatcacatcacaggatgacaaccccatgggaccgaggaagaagatgatgccaagtcatcaggtgagagagactcttgagtgagtgatgagcgtgtccaccgtcacccgtttccatcattggaaatggagaacggcggagaagacctgcctgcgactgcgaggctgcggcgcgcggcttccgtc

SEQ ID NO: 21541 - DNA, 356 bp, Zea Mays
ctactactaattaagcacggagcgtgggcgcctggcgcggccaatgcccccgcctcacatctccatcacaccctgccctgtggcccagcctccacttcccctctgcgtcgtctcctccgcatcaccagccatgccgctgacgcgtccaggacccctccctcgcatctccatcacaccctgccatgtggcctagcctccacttcccctctgcgccgctgtttcctctgcataaccagccatgctgccgacttgcctaggacggagcccgcccgaccaaccatgctaggtgccacgccgtcccctccgcgtcgtcctctccgcggtgtggccggccgtctcggagccctcgcgtcccc

SEQ ID NO: 21542 - DNA, 736 bp, Zea Mays
cgccaaccaattcgggttggcaccaaaaaacgaaagaggatttcacatgctggtgctttggaagctaggacgtcgacacgcgaacgacgctgcggccgatgtcggaaatgtttcaagttggctggacctgtttcgggtggcgcgttgcgtattggtggcgacaaggtcagcgggctagatcttggccctcgtcatgttgtactgacaggggcattgtgtggagtccctgcccttaatcacattagcgagtctgaccttgggttgtttggcgaaggcagagaacttgagattatgttgtttaattgtagggagcgtggacttattctgaaggaggagcccctagtccttgattgtactcatctgacctgcaaacttgtaatgaagacttcgtttgttgttttttgtttgcttgttttggtgcagacatcgatttctagtgacacacttttttgtgcgaaatcaccgtgcgtgcgctgatgtcttttagttcatattgttttgcgatggtcgcgaggtagttgtccttgattggcaaattaaacgcagaatgctcccctctcctcatggtgggcgccaaatgttgtacgtgctgacacgtggccaggtaggcccaaacactcagagacaaatggaactcaggtgcgtgacaagacattagatgggaaatgtagcatctcgttctatgtgtcctgtctagtgtatttatagggtcgtctagggtaggtggtctaaaata

SEQ ID NO: 21543 - DNA, 357 bp, Zea Mays
attgattgcgcgaagaggtacgaaatcatctaatcctggaggatcatatcggaacggacggctagctgcacatcaccctaacgcgactagccagggtagcggcatgcttgccatcgcggcgacgcccctcgccggagagggcagaatcgaccccccggcgaccgatccacaacaagcgctgatgcaaaacaatgcgaaggtgatcgcgagttagatggtagactcacctccatggattagggcgcttcgaaacctgcccgcagcacaaggcggcacggccgtggaggccaattccgatgagcaattcctggagctccggctgacactttctcgagccaagcgcgaattcaccaccgc

SEQ ID NO: 21544 - DNA, 398 bp, Zea Mays
gtgacagctgcttcacggccttgcgccatgtacctgggcacattcaccgcatcaccgtgactcactttgggcgtctgatcatcgccggtgagggctgtcacggtagatgccacgaattccttgcgccagtgacctcccactcctccgaccgccgcgcgtcatcgtcgtccgattcaatggccaccgctcttgcctactataaattgaggccaccgtgagctccgtagggtagccaagcaccaagccacccaaattgtgccctcaatcgatcatcagagagcttcaatattgaatttcccccaaatctctcaagaacgccgcagaaaagacctcgccgtggccagcccaattcaggtccaatctcgcccgctgcattcttgttttagcacccttgcttg

SEQ ID NO: 21545 - DNA, 460 bp, Zea Mays
atgagagggccgggggcgacaagtgtgctttattgtactgcatgcatgtattgtgcgcatggattgttcttgctgcggtgctttgggcaggctctccttccaaaacacctcggctgtagtgaggagaggggatcaagcaggtgcctttaaaatgtgggagctcctcagcagcagccagaggtcagagccatatgccagagctcaacgcagctgccatccagatctctatatctctttctctctctataggacagacagttatgggaggattggaggtcagatcctaaatccttctcctatcctatcctatccttcacagcagaggttgatctaccttggtaagcttgcttgctcatcctctatctcattctctctactagctacgcgcatatactgttccacccctggacttggtccgcgcatttgtctcccggcctggcctgtgccatgcgcaccttcc

SEQ ID NO: 21546 - DNA, 618 bp, Zea Mays
tgcggattgtcgcacgcggagggtagctagcgctgcccctcgctgtgactttgtattggtcgaatgtcgaagaccgtcgacgcggtcttttttcgacgtagatttttgcgggggatttttcacttgtatattacatgactccgcctcgttaaaaacctcacccccgggaggaaaagagtgcgggctagaataagattgtttttgcgaattacaagggcgagctggccctgatgagtcaaataaaaaaatttgcggaggttatcaatgttccaggaatgctccaagtcctcgccggatggtgttgcgagcctgtatgcgctgggggatgccttcgtcttgacgatgaaagggccctcccacttgggctcctgtttgcccctggactctgtccgagctgttcggacgagtacgaggtccccttcgctgaattccctcgggatgactgcgtggtcacgccatgcttttgtttgggcttggtacttatttagagcctgtagggtgaagacgcggtctccatcgatgagatccttcgaagtgggttcgtccatgtcggggacaactgacgagactgtccgtggggacccatgttttatttcttgcggggtcatggtctccgat

SEQ ID NO: 21547 - DNA, 453 bp, Zea Mays
ggtcggagtcatccgtggctgagctctggagaagagaatctgaaaattgttcctcccaatctgttgtgcagaaaaccctatccaatttgaccagtgtaggattagagtgtccattcgaccatgtatatttccggccaatcaatggaatttcattaagagccaagtcatttgcccatttcctgaacctgcccatcatggcacggtctaagttattgttattcttctcttcctcccttaatatcagattgaaatccccgagcacaagccacggcccagtacagagagctctaatttctctaagagattgcaaaaactgaatcttctcatggttcccttgcggaccatacacacatgtaagccaccatggtgagctggtgctagaatgaaagttcacagagacgctatgttcatccaccctactgccagcacaaacaccgatgctatttttccaag

SEQ ID NO: 21548 - DNA, 469 bp, Zea Mays
cgcggggcgacgatctgtgcactgtcggggagaggggctggccgctgcgagaggtgcgcagcctgggaggcttgaggttgaagaaggatggcgagtcgttgatcttttaagcaacgattgcgattagatagagcgatatcccttcgatggattggaactgggccataagtgcagatcggacggccttgtgcgctcgcgggttcataatggacgagattcgatcctggctctcggatctgatctaaacggtctgaatcttcccataccccttcgcccgagaacacttgcaaaagaacccctctgttttagagtaatcaacccgcagtccgcagaactgttttatgtgtcttaggcaaacttaccccgagacccctgcacttcctagaaatctgtgcgcagtccagatagttgataaaaccaggaaaattatttagaaaatagtttttagtacaaatttaattgcagaaac

SEQ ID NO: 21549 - DNA, 617 bp, Zea Mays
cttcagctcgaggtggtatgcgtccagacagtgcccgaccagcgccacaaggagtgcgtgcgcggatagcgccatggcggctagggcatcccgccatctaatctcccggtgaattctcctggcggcggtgctgcccccgacagcgcagcagaggaacaccgtgacgacgcccaggtgcgcgcgcagcggcagcaagaccttcccccacgagcacggattgtagtgttctcatgatgaagacgactagcaggaagagcggaacacgatacttattcacgggagcccaagagatcgcggaatccgcggcgaagctccggccgaaccccaacaaccccggctaggtcgcagcgtcccagattcacgcggtgagcaacagattttccaccggatgaggatgactgtggtagcaagacattacaggtatatcggacccacatgcaagtgtcctggtacttggagacagcgagaggaacactgcattgcatgccccactggtcattcacatggaaaagaaacgtgagcaagggatgaatgggctggcgggagtggaaaatgcctgattgggctgaccgtgtgtctgagatggctgggttaattagtggctgatgcataggatt

SEQ ID NO: 21550 - DNA, 520 bp, Zea Mays
tgttgtttagggaccgccatgcgtgtgtattcctcatgtttacctcctgtgcagggcatacgtgtttcacggggtgggggtgggggcctggcagatcgacatcagcgacaggaaaaagggagacgaacctaatccatctatcgccgtaatcaaatcaggaacaggtttgcgtcaggggcggcggtggcggtgcggttaattagctgttaaaacagcgcgcgtccagcgtggtggtggtggtggtgggagagtggtaggcatccatccatcagcacaagcacacacggtggttgtcgcttacctcactttacacctaaccgccggagttcccgttccacgggtcacggcccccggcgtcctctttgcgaaactcagtggcagtgatgagctggggtggggccgtgggggagtcctaccgctaccacccaccaactcagctctctagaagacctaccctcccgcgattcctcagtcaagtgcctatgcctatctataaaatccagccccgcttcacccacac

SEQ ID NO: 21551 - DNA, 674 bp, Zea Mays
ccctttgacatgaggggcatcccaagagaagtcgtcgagcactctttgtgggtcaagcttgtgtgcaaacccgtaaagcaatgattgtgtcgcttcaatgaaaagaagcgtagagccgtaggggaagaggtcagcaacccctgacatctaggttcatcaaggaaatacaccaccccaagtggttagccaacccagtactggtacggaagaagagtcggaaatggaggatgtgtgttgattacaccggcctgaacaaggcatgcccaaaggacatgccttgtagcgattgttagcgattgttttccttgacacacattgaccaggtggttgattccacctcggggtgcgaagagttgagcttccttgatgcttactcgaggtaccaccaagttgcgatgaaggaatccgaccaaccagccacctccttcatcatccctttcggtccatactgttacgtgaccatgtcgtttggcttaaagtacttaggggtcacaaaccagcggtgcatgtagatcttcaataaaggtcttcttaatgtcttcttttgaggtgttgtatccttagtgcccaagtttaatccacttcacatgctacaaaacagaatcacttggaaaacaatcgttcactagttatgttgttcatcaaacaccaaaaccccttaatcaaatgggtca

SEQ ID NO: 21552 - DNA, 800 bp, Zea Mays
gtcctcgagggggaggtcatcagtgtatgtgtggatgctacccttaggtgtggaggcatcttcgtcacaagggtgcttgctgtttgctggcccagtcttgttagtctcagctacatttggcagggtgttgtctgcaagtactgctttgcctttcttttctgtcagggttgccttggaggcatcgtccagataggtggtggccctagtgatcacattcttagaagccatcgtgggagcagttcagagcatgaatagtgggcgccaaatgttggcacgaaaatctgtaaccaagcactcagaaacagtaaagcaagtagcacaatcaagcggcggactgcaggcgtgattgtattaccaagcgtgtccagaatgttacaagactggggtatttataggggtagtcaggggttggtaaactaagtatcgtaatgcccccgactaccaactatattctcgtcaagcacagtacaacaggttaattacatgaccgagtacggatttcccaattacacagtaattgatatcctcctgagtcgcttaaaggtgagcctgctaacggcgagctctgttacactgagaattcttagagcaaggtctactagtgtagacatcatggatcgcctttgctgctcttcaagtctgcaagccctcgcaaggagttagcccccttggctcattggcgtgcttagtagacttcgttgtggtcagggaaaggttgtctcgatgctgtaagtagcctctcggactgcctcgacagtttggagacatggtcgaggggaccgtcgcgtcttcgccccaac

SEQ ID NO: 21553 - DNA, 477 bp, Zea Mays
cgcgagtttggagatgcgccgtgggaggaagactgactatcttgaaatcccactcaaggatagtatcaaaggatggcgcttggagtggtttattgttgagaaccatggaaattctctccccccggtcagggagacagccggatgttcgtactccgagttggaccgagtctcccacggaccaggaggtggctgaggcaggggctttgctggctgaggttggactgctgaaggagaggggtctgactgcagaggctgtggttgctgattttgttttcaagaacattcagccgttgaaggatagggcatacctggcctacctataccgaggtctaactgactcacccgggtcgccaacagaagaattcctgctgtagacttggtgaaccggcttgaaatgatacttagaggcaaggtatcaaatgttggcgcccctgtcgcatactcagcctggaacctgcctccttccaaggcctttac

SEQ ID NO: 21554 - DNA, 735 bp, Zea Mays
ggggagtataagatcttggcgcctagataagctcggacccggtcactggatggctcaccgtaaccacttgctctatggccggctgtgataatcctcgccggcgttggccgcttgccacccgtgcgccacgtgcctaggagctttaccatgttacagtgaaccgtagtaggaagtccgtccatcgccggaggctttgccacggtgaaagccacgataacccgcgccagtgcacttcccatctctccgatcgccagcgcgccttttcaaattggacgccaccgctgatggattctataaattgatgccctagtgaggtccgctaggttattacgcacccagcgcaccagctctcgtctctgaccgtccaccagagcctcccaatttcacacttcccccaaatccgttttccgcgccgccgtgagtctctcaccgtggccagccctcctcaggttggttcatgcctctctgttggatgttctagcatctcttaggtctcctattgcttgtcggcttggttgattgaactagactgcactgaattgcccagaacaccatagtttcgcctcggatcttgccgtcgtagtgggcagacgaactccagaccagattcatgcaattaatggagggattagtgtcaccgagggtggaattaggtgtcggccaagctagggctctggtcgttgagtatctcgaccgatatgggttcgccggagggcgtgctcaccggcgttcatc

SEQ ID NO: 21555 - DNA, 830 bp, Zea Mays
tgaggtaaactgggttcctcgatctgatactttcttcgtcggtactccatgcagacaaacaatcctcgacatgtataactctgctaactgggctcccgagtaagttgtcttcacaggtataaagtgtgccactttagtcaacctgtctactatgacccatattgaatcatagccatcccgagtacgggttagtccaactatgaaatccataccgatttcttcccatttccattccgataccttgagaggttgtagtaatcctgctggtctttggtgttcggctttaactcgctgacacacatcacatagtgcaacatgagtagccacatctgttttcaaactgtaccaccaatacttttcctttagatcctggtacatctttgtacttccagggtgaatagagtaagccgagtcatgagcttctctcaaaattaattggcataggtgttcgatttccgttacacagattctctttttaaaccatagtgtgccttgatcatcttccgtgaaatctggggctttacccaaaccaatcaaagttttaatttccttaattttctgatcagcttcctgtcctttacgaatctcttgttccaaagtagattcaacttccataactgttgcttccatattattgagcataccaaggttgagttgttccatttcctagcacaattcatgtgacatcaaatgagtagtgatgttgttcacttgacccatacggctcaaagcatcagccacaacatttgcttttcctgggtgatattgtatttccaaatcatagtctttgattaactcaagccatcttctctatcttaggttgagttctt

SEQ ID NO: 21556 - DNA, 536 bp, Zea Mays
tgggtttttgcgcaaagaccattcaagtattgcacgcaaagacgacgagcgaaagccgagctgccagcagaaagtacccccattgttcagctccctgaaccaccttcctgatgaacaaagctgaagttggtgagacagagagagagagagagacggtgctgacggaagacgacgtcgacgcgtgcagtgcaaaagtgcactactcggttcgttccagagcttccgccagaagagcaagggggagtaggtggccatgctcgagcctttcgtgatgtcgtgagggtcactcttcctctcgaaccaatccgcattcctcctgttcagagacagctagcgtccaggaaactgatggtattggtaggcagaaccctccaccagacatgaagggccaggcgtcgtgacctcgccttcactccagtgttgtgtagcatagcatgcatgccctttgctgatgatagtggcaagcctatgcctaccccaacttgacaggacagctcgtgaccgttccacttgcacggtgatctgatcccgccggc

SEQ ID NO: 21557 - DNA, 679 bp, Zea Mays
ccggcacttgcctgagtggtggggtgggcacggggaggattgatggaacacctaaaatggcgagtgcttgtattgaatgagcaggcttgagctcactgtagcacattatgaaacctttgcatgtctgccctgcatctgccattcagttcagtcaactctttctacactgattacacagtagatcaagaatctgaagacattgcaattacttcgggggggggggggggggggggggggtgtttggttaggtttgcgtcgttctgctgtgcaggcaggcatgggcagctgtaataaatctgcacaagtacagcaagctgtgggctgtggcccgaggtgggggactgtatctgcgtctcttatctttatatcgtccttgtgtgggaaggctcttatatgatctcttctatcaggtgaagatggggaaagccgagtgaacagttgatgggaaggagttggacagtgcgcaggtatatttgattttttgctactctgtgagaacgcatgtagtacagtatatttatttctggaccattcacgatttcgttgcatcatttatggaaaccattgagacgacgctgaatttcttaagacacaatatatacgctcacagggtacagcaaggtatggtgcggcaaacttgctctgaagctctgcaggtttgacgcggagactatctccg

SEQ ID NO: 21558 - DNA, 595 bp, Zea Mays
tgaatttcttcaggttacttcgggtaaaactttatacacgaggagagagcagagatttaacttatctgtgttccattgtatttcgatttaattttcccagatttaatatagttgttatggccacttggcgatatatataaatatacgatgccacacaacataatcaaacagaatgtaaagtgaaaacaaaattgtttacgaaggttgcacataatgtgacttcaggaccttgaacaacccaccgcaatccacgcgagtacaagctctagcgtatctggcgtcaacgcgtgtgcggccatcagggctacgacagtatagcaagccttcgtaataagcgcaacaggcacaatattggctcaatagtcgggtacacgataagtccacacaacgtgcgcaacaggcgcatttgtggctcgatgatcatgacagacgaatagtgcctacagggcatgcgaaaaatacgcaactcggcgatggcggtccgactcaacgggagcggtaatcacatgacacagccaaattcgtacgacacaaatatttagagcgattttattatgcatagtataaccttcacatgtatttcaaataattttct

SEQ ID NO: 21559 - DNA, 480 bp, Zea Mays
aacatgttgcttgatggcgtggtcatatcatcctcctccccttgaaaaggagtcatcctcgactctgaagtgtcttcacttgtatatggtaagaggtcagcaacattgaacgtgttgctcacgccatagcttggtggaagatctatcttgtatgcattatcattgatcttggtaagaacacgaaatggaccatcccctcgtggcattaatttggatttgcgctgatcaggaaaacgctccttgcgcaagtgaatccaaaccaagtcacccggttcaaataacactttctttctatgcttgttcatgcttgctgccttgcgcattgctttgagctcaattgcttccttggtcttctcatgtatctttttttatgtatgcagcacgcttggaagcttccatattagttctttcctgcaatggaaggggcaacaaatctatcggagcaataggtttgaacccatatacaatttcgaaggggca

SEQ ID NO: 21560 - DNA, 512 bp, Zea Mays
ttgagccacatagttgctgctaaggtcgatccacacaggtccgcggtcccagaagtgctcatttgttacctgttgcggtggggtgagtggttgctgccatgttgggcatctccggcggcagcggtggaggcagatgcacagcggtggttgcgagcagtggtaacatgagcttctctgctggtgtcgacatgcggcacatgaccttgacactagcctgcctgagttgctctggttctactcagcgccactcgtgtctgcacttgtgctagtgattgctccacgttgctggtggcttcactgatcaaagcggtgcatacccctccacctcttcacccttcttgaatctgccaatgcaagctgcatgtgcgtagggaggttgtggctgcgcgtgaggcagtgtctaaaaggtgactaggtgtccaggcgagtgctggttccgctgctgggggacgaatgcagagcagagcgaacgcgttcggcagccacgtcgcgctcctgagccgtggtgtccg

SEQ ID NO: 21561 - DNA, 568 bp, Zea Mays
cacgactggcccgaggccaacctccggcaagacaggcagtcacgactcgcccgaggccatcctctggtgggatacacagtcatgactcgctcgagaccactctcggtcgggagaggctgtcaagaatcgcccaaggccaagcccggtgggagacacagtcatgactcgcccgaggccaccctcgagcgggagacataataacgactcgtctgaggccaatctcgggcgggacaggcagtcacaactcatccaaggccaagcccgggcagcagacgcggtcacaactcatccgaggctaagcccgggtagcaaacgcagtcacgactcgcctaaggccactttggcagaactgtccgcacccggcctcctccacctcttcccgcctctcgctctaaccgcgccacgttccacatgtcgtggcctccatccacctaatgccctccaatctgcctcctgatgcaattcacggtcccacacacccgacgccccgccccgagcctgcctcccaatgtcacctccctcgcatgtcgatccgaggtgtgaaatttggttgataacatcactaaac

SEQ ID NO: 21562 - DNA, 388 bp, Zea Mays
cgaataaatacgggttgtttgaatggatatgaaggtgggcgaggtgaagaacgattcggagtgaaaggtcggattaccaaccttgttctcttttcaggtcgttgagttgatttttcacccgcatatccctttgtttcccatgtcccgcatttttagattcgactaccagtgttgtactgatagccctgctgtaggtgaggtccaaacatgttgccatcttctgctgaagtctgtcatttagccccctcataaaacaattcttcttttttagatctgtatccacatgctcaatggcgtactgggagaggtgattgaatttattgagatactacatcacagtatctcccccttgcttcagtcggaggaactcttctagtttcatctggag

SEQ ID NO: 21563 - DNA, 433 bp, Zea Mays
gtttagaggagcactttctggaacacgcagtgcgagccacaacggcgaacgtagagggtgatggagggtgccttccctccgggtccccgactccaatcaggcggtgctcatggtctccccattggcttctgtggtgctgccgtgcaggagcagatgccacgcaacggtggatcggaggaaggatggcgaggggagagtagcgggtcggctgctggtgactcaccgacaaagtcgaccgaggatctagacgggtacatggccggatccctgaggcagacctcaccagagagcaccagaacccttaggtgcccagcggtagtggggcaaaggagagaagctgccccccggcagatgcgacagtggctctccaatactctctgctcatgtgaccacgacgtttgggtcaccaacgatcagcgtcggtatatggatg

SEQ ID NO: 21564 - DNA, 630 bp, Zea Mays
ccgaattctaacgggggagggacgacacaagttgtcacccctatgggaagggccattcatagtagcagaagtcactcggccgggatcatatcgtctcactcagatggacggcacggaaatagggaactcatggaatatagaacatctcaggaagttttatccctaactgtattttaaaagctatcgggacgacaatgtactctgtaaaatgggaaatatatcatcaataaaaaggcttcaagagtactcagtttgttcatgattgacctgcattcttacttaactcggggtgaccactatgccctgctaaacggagcaatcggcttaagtcggcaacgacttaagacggtgcaacatgctcgcgcttacttaactcagggtgaccactatgccctgctaaacagagcaatcggcttaagtcggcaacgacttaagacggtgcaacatgctcgcgcttacttaactcggggtgaccactatgccctgctaacggagcaatcggcttaagtcggcaacgacttaagacggtgcaacatgctcgcgcctacttaactcggggtgaccactatgccctgctaaacggagcaatcggcttaagtcggcaacgacttaagacagtgaaacatgctc

SEQ ID NO: 21565 - DNA, 688 bp, Zea Mays
gaaaggccttcatgagaacattgctacgaagttgaacttcagttcggcctatcatcctcaaactgatggccaaactgagagaactaatcaagtatttgaggatatgctaagaacttgtgcccttaaacatggatgcagttgggacaagagtcaaccatatgctgagttctcctataataatagttaccaagccagcctgaagatgtcaccatttgaagctttatatggcagaaagtgtaggactcctctgtattgggatcagactggtgaaaggaaattctttaggcctgagattattcaagaggtagaagaacaagtccatataatccgggagaacttgagagtagcacaaactaggaaaaagaggtatgctgataatcgaagaacaccattggagtttgaagacggtgaccacgtgtatctaaaggtgtcaccaattcatggaatgaggacatttaaagtcaaaggaaaattatccccttgctttattggacccttcagaatctttaggcaagttggggagatggcctatcagctcgagctacctgatcatctatctgatgtacacgatgtattccacgtgtctcaacgcaagaagtgtctccgtgtccccgaggaacagctaccaatggaagagctcagtgtgcagagtgatctaacttacacggagtatcctatcaagatcatc

SEQ ID NO: 21566 - DNA, 1113 bp, Zea Mays
gtagagacttcgtacggtggggagtcctcggtcaaagtctttgcctagaattattgtctacattggcagaaaaagctgattggtggcaaggtcgcacagtttggtacttgcacattcacggcgaggactagaaagactttgggtgaagttgtggagatcctgacgtgtgccaaaaataaataaggtaactggtgggattttttgttttacgttacactggaggacactaagggttcctgggttgccttcgtctattctgtgcttgcattgctatatcgcattccctcagtttaagctaaagaaggggataatggcgaagacaccctttgcacgcagctaggacaagaagtggccgtgatttggtggagaagtttattgcgtgctggtgtgggcaaatggtggtaatgccggcgaagccggtcgaagagagggcctaggagaaggtcgtgatggctacttcgtcagacccatgggtgcgattctgcgcggttgctgacgggggcgaagaggtcaccagcacgtctgtggctgagggtgtggcgactactatcgcgcggcatctccggtatgtgagtttttttaccgaggcctatgcaatggcaggctgttgtcttcgccgatcaagtggcattcggggcgctagtgaatgttgtgacctcgccactgcgttccgagaggaaacgactggaggacaagatagagagccttcagatgctgaatactgaagctatcatggataaatctgcggccaagatcaagagtcggaaccttttggagaaggttggctcactcgagaaagagaatgagagtcttagtcgccggctgagcaaggagaaagatgctaccaactaggcaaagacagaggcccagactacctgggcggaggcccaagccatccagaagcgagctgctgagctagagctggaggtgaagaacatgcacgcctaccatgagagggtggatgttgccacacgggttggcttggacaggacacatacactttttgttggtgcttatcatgatttgggcgtggagatggctccctttgacaagtcatggggaagtggggacccgcttcctcggctgggtgcaagaggagttggagtccctcct

SEQ ID NO: 21567 - DNA, 602 bp, Zea Mays
gaaaccgaatctaaaagcctttcccaccagagtccttgatgcggcatgcacactacactgcccagcatgaatttcatctaacaactatctccccggtggccgagtggatgcatttcatgaagactcctcctgcgcctcttctgtacagcaaacccattatgatggtgtagtgggctaactgccttgcaatgcgatctgttgcagccttgtcatccggctcttcttcattctttatgtacctaatgataggctctctctagccattggggtctgtctctggctgactcagggcattgcattcttccatctggtctgtgatgatgcttggctatgatatttcttggacgaagatcccaggtggagcctgggcccgactggatcccaccttcgacaatgtatctgctgctgcattgcgatccctttccatgtgatggaactccaattcttcgaacttgtcgccatataccatcagcttcttgatgccgagtgataccgcaatgctcagcccatggactagtgcttcgtactctgctgcattatttgatgctggaaacaatagctggagtgcgtactttagttgttcacctccgggagcaataaag

SEQ ID NO: 21568 - DNA, 317 bp, Zea Mays
gttccgtgatctactgcttgcgttgcgttctggccgttttaatctgactgctctgctcttggtgtcaggtgtggggcccatccttcccgggggcccggggcgaccgccccgcgcgccccccctcagggccgtcgctgtgctcgacacccaggcaaccaatcacatgttatgtgtacaagtagtcatacgttgtcaactgcatggacacggagttgctaagaggagcacgttcatttggactagtgtttagtgtagcctctccttttcgttcgtgctcttttgccatgtgaatatctgatggaccaacggcgacgaac

SEQ ID NO: 21569 - DNA, 657 bp, Zea Mays
gccatcggagtcggtgatcgttgaagagaagacgcaacgactccttctataaaaccatccgtgcagacctggtttctactggaagccatggatgagagagatcgagcagtgcaagggaattgggaccgtatgtttgaatctggagtttatgactggaagactgaaggaggtggagagagtccagcaacaattgttgatgcagtcagagctggcggcagtggtggctgaacaagctgctgttgagaggaatgatctgtaccggaagttggaggaaacaggttgagaagtatctcagttgaggttggaacagatgggaagagagctgggtgaaacatcgccttctactcaggaacaaggaggaaatgtccgaaggaatcaacaacattctcatggtgatcagaatcgtggaaatcaatagcgaggcattagaggtgatcctcgccagtctgctgattcaggtaatcaagcaatccccaaactaccttttccaaaattctcggagggcgatcctgtggtatggttggaccagtgcagagaatattttacaatctaccgtgtgcctgagtctatctgggtttcggtggcctctttgaatttggaaggcatagcatcacagtggtggaagagttacaaattgagaaacggaattgggggttg

SEQ ID NO: 21570 - DNA, 448 bp, Zea Mays
tttgaagtttatcttaatttgacctcttctcataagattcagaacaagttcatactagtgaaaacattggcttcatattacattagcatagtttaggtgtcttcttggtctcattttagcacattaattaggataaaactcttctacatctttatcgccttgtgtgtgaccatagtctgcatccgaatacgcccatcgttccctgcttccatgcaacaatttctccacatcagtttctacacccacctttttgtgcacattctcgccctctagtccaaaagcagctctcatagttcgaagttgcttctcctgttctaggacttggtggctccgtgtccgtgaacctaagaggaatcaccatcttgtgggaaacaaatgcaacgacatgagcaacttcaaacagaacaacaatccaatgaaagatgtaaagtgcaatgtacgttgtgcc

SEQ ID NO: 21571 - DNA, 835 bp, Zea Mays
ttctatgaattatcaaagttctagcaattatttttctattgaaaatccatttataaattattttctctggttttacactgctctggactgggcctcaattacaggaaaggtcagggggctcggggtaagaatccccaagacacagcgcacacaacaggtggatggcgggttgatttctataaacttcagggactcttttgaatgttttcccggccgaaggggtatggacagatctaagccgtccgatcatacacctacgctccagattaaatcgcagtaccactgaaacggtacgcagcgcacgccatcggatggaagatctacggtgcagattttaatgtgacaggattcgatcgcaaccgaccgatcagagatctatggctagggttttaagtagtgcagatcgcgcgacagccgctcgattaaggatctgtggtccaaactgaattgcttgaagggttctaatctgagccgttcgtcccaatccaacgatgtacgcagttccgcccaaccctggcccttgccggcgacgagggtgccccgcacggtggcgcgccatggccggaattcccccgctggcctacaatgcatgatttctcgccgcgctagttgctaaccgatgctgaggccacgacaaattctggaagggagtacttactcgcggtggagttgacgacggagcagaccacagagcgaagcggctccgccgcggtacgcacgaacgacggggattttctgctgacctgagtccctccgagccgatggatcacgatgtccaccctccacacatccaactcctccttcccccaggtccagatttcgggttaatcggcgg

SEQ ID NO: 21572 - DNA, 669 bp, Zea Mays
ttaaaggaacagcatgttccaagcgattcatggcgatataatgcaattggataggtcaaggagcatcacgggtacctgagaatactcaattgagggagcagaaggtgtgagctgactcgagttgcgctggccgcggtgaggcactcttcgcggtggcggaaaacagttttggggaaagtttgaaattagtgctctctggtgaacaactgtgaacgattcttggaggttggattcgcgataatctagcgcagttgccccggccttcaatttatagcgctcgcaagcggtggccggtgaattgagcgagatgagcggcggccagaggaagaaggagttcactggtgcagcggctgagtgtccagtgtcgtggcaattgctccggcgatcaacggagagcgggggtaagtcgcggcgatgcggtggaaaggggtaaacacgcggcacaaggccggaaggcggcggtcaccggcgggcttatcgggttccaccgcggtgagctttgtacggtggccggaatactttaatggccgggcttatccacggcggcgtgctccgagcgtttatctagtcatcctgagcatgacttgagacggcggcggcgcgaatcttagcgcagggaggtcgccgtcgacgagcaagccgcgctggcaacctgatccacatcggcta

SEQ ID NO: 21573 - DNA, 873 bp, Zea Mays
cgtagtggatctgttggggttttgacgatggtggcggcaacacagccgtatcgctctcaggtacgctgttcttacgagttccagttctgccagccaaaatctgctatctcccttacaacccaggcttttgtataattgccatgggctgcccgttagatgggcctaattcatccacacatttcctatatactttggattcggccttttagcccgagtgctctgctttgcttcctgaacttcagcgtccgcctcttccatcacaacagccttcctagtgttcaggtgccctgtgctgctaacatccccttccccttgacagacagcttgtccccaagctggagcccgcgggaactgctgcttgatggtgtgttcatcttcccaggtagacaatgaagccggccagttagaccatcggattaggagttgaggtataaccttgttacctttgcgaagcggccttgattccagcacttctgtgggtattttcagctcctgcaacaggtctggcatggttgcatcggttgtgatacgagttccttcggctgatttaagttgggacacatgaaagaccggatgaatcacacttccttctggtaatgctagttcataagccacgagattcacctgctttgtgatcagaaacggtccaaaatagcgaaatgacaatttagcgttcaacctgctccccatcgaactctgacaaaatggctgcagtttcagaaatacacgttgtcccacttgaaacaccctttcagatcttcctttgtcagcttgttttttcattcgatcttgagccctttgaagatgtaacttggcctgttggagcataagctgtctggttgccagatatgtttgcagatcagcactttgaca

SEQ ID NO: 21574 - DNA, 628 bp, Zea Mays
ttgacctccgccgctcacgttgattcggcgcgagcagttcaccaatccatcgcggatctcgcggcgtgctccgattcggaatttgggtgtcgtcaggggaaggcttgtgccgcggatcacgggaagagtccgggtcctcgcaacctccgcgtctctttcccctgcatataagtagcggagccatctcgccttctcatgccgcggctacaccccgtgctcccatcgctagcatagggaggaaatcggaccaccactcccacatctcacgctcgtcgtgatttggagtcgcggggaactaccagacaacgtggatctcgggcgcgtgaatccttggtcggggaaacctcgcgagcttaggcaatcgctcgttggagttcgaccttcaccctgatccgccccacgtcgcggtcagacctcaccgttgttcaatcaccggtaaaaacccctctattgaatttgctacaatctcctccacgcgtagcaccttacggttgggagaatagtacaccagcgggagaatccccacaactccggcgtgctccggtgttgcctcagccatgggatcctggcggcgcggccgtaatcgtccgtcgggggtagaagaagctacgtggaccgttgatctttt

SEQ ID NO: 21575 - DNA, 539 bp, Zea Mays
ccgaaagatagtgtaaacaatccactattcgctgagtcttgtaaaactcgtttgctagctctcataatctacggctgattgcgagtaggtccctgcgcggggaatcggagatctgacccattaccatctctacgcggtaaaatagatgaatcgctcccagccacccactagtactgacgtgatgtgcagctgggcgggtgatgagcttatcagacatgcacgaagtactcacatggcacactgacactgtctccccatctgccaggcagggcaataacaaccgaacaagcacgcacgtgccaacgcagcacatcggctgttgaactcatcagcacagtcccggcccactggaacacggtagagaatatggctgcgcatctggccacgtgtgaagctatcagctgctgagctctctactgacgtttgccctcacgtcagcacccttcaccgcaccgcgatctgccgagcgaccgagccccagcagcgagcgcaacgaccccgcggcgtgcggccaatccccaccgagaaggccctcgctc

SEQ ID NO: 21576 - DNA, 543 bp, Zea Mays
caacatggtgcaattccgcgaacccagtcaagagtggccggggttagtcgccggcagtcaccgtgactcagttaacttttgtcgcggtgtcacccatgcctcgatctccctcactgtgcctcttccctacatggtatacatgcgccaacgcagttatccgtggccatagatagctagctggaccgccatggctataaattgcaccgtgatccacaacggggtatgcacacctccactcagtgagttgatcgtaatccaaaattcacgctgcctcagctccctcttcccaaattgattgtgcatggtgaaactacagtatcttacggctgtatagccccaatcccacccccaatttcacctagagccgccgcgacaccattttcccccttcctttgtcaccagcaagccaaagtctccgcgctccgtggccagcccactctggtaaggctctacgcctctcgtgtgttgttttagcagctcggtgtgcccaggaaactcatcttggcaaccgtttggtcaattcagccatgattgagcaggaac

SEQ ID NO: 21577 - DNA, 586 bp, Zea Mays
ggggacgatgatatgctaatagatctagatgtggaggtaatagaggctcacttgcatggaggcggagcaccagatccagtgactaggggacacatgagcaagtctgacacaacacttgagcatatcaagggatgagggctaaggttagggttaccagttgcagagaaaaatagatcgagatggagagagttcgagatacatggagaggaaagaatgagagaggaagagagagatagagagatgaagagtcgccagcatccgtcaacggcaacacgagagatgacgtaagggcagaagacgaaagagcggaggacaaaacaggcgagtgaccgaccgagcgctaggattgtggatgctgcctacgcgagggagggggcggcggtggtggggttattcccttgtgccgagctgataccaggcttccctgtttactaggctcgtgctcgtgccaacaccatgggataccctgcactgcacaggtgacgagccgggttggcatgagcacggcgaccggcatgctgggccaggtctaggccgtgcctcggcgtgtcgggccatgtgccgcccgttgggctaacccactatg

SEQ ID NO: 21578 - DNA, 401 bp, Zea Mays
cccacaattgaagcagccagttgatgagctcgagagggcggggaaacgagcaccaggggcactcggctgagttgttgaggtggggctagtggcagggtggatgaatacagggtgtttgaaggggtaggagggtggacaaggtgaagaacggttttgattgaaaggtcggatcaccaacctttgttgctttttaggcccctggttgggcctgtcacctccgaagccctttgacttccctgggcctatgtgcttagcttcaactgccagcgctgtgctgacagccctgctgtaggagagatcgaggcaggtggccatctttctttgtagccggtcattgaggcctcgcataaagcagttcttctttttcaggtcagtattgacctggtcaattgcatactggg

SEQ ID NO: 21579 - DNA, 719 bp, Zea Mays
gtgggatggtatgtcatggcaagaggggggcacatccttatataggcacctaggagctatggatgagtgacacctcaccatgcttgtgtcatctaccactttaatggggggacacttcaccatgcatgtgtcacctccacctttcatggggggacacttcaccatgacacatcaccatagttctagagaggtccaaaaatatctaggcttcgtgacttaccatgattagtgtagggaattctagaaggctatgtacatcatggttatccatggttgttcctagaaagttggcttgcttatgattaaggtttatcatgaatattgtagaagcttctagaaactttgttatgcttattatatgacaattgtttaagtgaggttttccttgcatattttcaatgggcaaatgatggccatgggaaaagttgtcttaattgatgctaaggtcataacttctatagtttaagaatgacttcgggggaggaagaggtcgaagatcgtggtatgctcacctatggctcaaatcgatggtgagggcttgtcctctagtttgaagagtaaggcacgcgttgttcggatgtgagggtgacaatgagatggtggctggactgtgaggttccgcgtcaagggcatcggtatttataggcggaggaacgatagtttataatggagggagtctcgaccgacgtactgtgattggcgacgttgccacagtgcag

SEQ ID NO: 21580 - DNA, 637 bp, Zea Mays
cggaaaagtccaggccaggatccatgtcatcttcttcctcgaaatccacgcgctctgaggttggagtggttgtgagaaggtccagtgttgaccgcagatgatgtcttagatgctcggtgtaagcactcatgtgagtacttaccgaagaggagtagcatgcagcgacatttctcatcccaaaaggaaaagagcgtgacatcgatcctacctcctggattgcgggaggaggggctgaaggacttgtcgtgggatttatgcatgtggtcatcgtcgttcttggcgcgaggatgacaccagataggtccctcgtaagggagtctacgccgcccacctgcccagaagtgcaagctaggcgagaagaactacacgtgatgcggttatcgttgttctgtctctgtctcttctgacgaggaaagcaggaactcaaggctcctaaaccagatcactgtgcaagcgacaaagggcatttaggattttccatccagaactttggtaggaatgtgacgtcaacacgtagtgccccctacccggcgcgccaattattggtgttttaaacccgagcgtcctaaccaactagtaaatttgtgttgtgtggccttgtcccggatggttgatgcaagaagacacacaaaggttt

SEQ ID NO: 21581 - DNA, 554 bp, Zea Mays
taggtttccagttgactcccatattgcagaagtgttatttgacactggagcaacgcgttctttcattactgcatcatgggtaaaagcacataatcttccaataactaccatgtcaacccccattcaaattgactcagccggtggtagaattcgagccaatagcatttgtttgaatgtaagtgtggaaataagggggatagcgtttcccgctaatctcatagtaatgggtactcagggaatagatgtcatcctagggatgaattgactagataagtatcaggcaattatcagttgtgataagaggacaatcaagttggtgtccctactaggagaggaagtggtgaccgaattagtcccgcctgagccgaagaaaggaagttattatcagatggatgttgatagtagtgaagcagacccaattgagagtatcaaggttgtgtctgagttcccagacgtgtttccaaaggacttaccaggtatgccaccagagcggaaagttgagtttgctatagagcttcttcctggaaccgcccccatctttaagagagcttaca

SEQ ID NO: 21582 - DNA, 705 bp, Zea Mays
taagaagatgaccaatgaagttggggctactaggtgttagcccaacagagctatcataccatcaattgaggtacataggttttcaatttggtaaattttaggactaattaggtttgatttgagattgtagctatttgaatgatgagaggaggggcactaacatgggtacctattgtggcaccgctgccaccacgcttgtgagcctaatcgtgagctggaccccgcaccacctttctctcaagcatctcgatagtttcggttgcttactctagtggcagcaaagcagagagaggatgaggaaggggcaacgatgactaggatttggtgtgactcgagccacctcacgggagacgacacatggattggaattatggtttttcactcagcatatgaaatgcatttatgcaggttacatggtagacacgttgagatcgggctcaacaacaagttcaaataaagcacaaattattgtgaaggtttggaacttgttcgaacaactatcccatttaaacaaggtatacctatgtgtaatatagaatatgcctccaatatgaacacatcctttgagatccaaaaatgtgcatcacaacttttagtaacctagttgcctcccttttgtgtaactccaaagagccaccacgtctctccatacagcggcgacacaggaaaaacctgtgtcaccactataatcttctacccttttgc

SEQ ID NO: 21583 - DNA, 887 bp, Zea Mays
gcaaaacaaaggacccagattttatgtttcttgaactaagatggatggcgtgttaattaggtcaaagggcaggggctttttaacatattctctcggttgaaagggtacggagctagctgggtcgttggatcatcaatagacggccacaattagatgctagatattatgaaccaatatcccatgccgaccacacgatcacagatggacgactcatgtgacccccacgccaacacgatcatccaatgtccgatcggatcagatggataggattcaatcacgtgaagggatatctctggatctcattcgaaccgtccgctatacgatcgacgctcccaattttaaaatgtcgagatctaatgtttacccctcaatcgccatcggacggccccatacgactcggcaagggggtggtacaccagccgtaaatctcgtccgctcgatcaaatccaacggctgcccagctatcttctccatccgacgtcgagcccgctgacgcgaccacgacgtactacggcattctcgccgatgagcggctacccattgttcatggctccaaaaccttccccgaaaattcccacacgtagaatacaactagcgaattgggtgaggcaaagattaccagcgattatcgggtgatgatgttcggtcacggcaaagggtggttccgcggtggaagacaagcgcaggcgagcaattgcccgcatttggccggctccccaagctcagcgaatccatgtgtgcactccacacagggaggtggagccccagcccaaactctaagggcaatgagtccacaccaatggaggtcataggcggcggcttcttcggttccctttcttctcccttgatttcacggtggcaaggttgttcgttgggctagtgcgatg

SEQ ID NO: 21584 - DNA, 439 bp, Zea Mays
ctggaggctcgggggataggtcctttttatgccacgcaccctcggtcacctttggcattcgcgaagatgattttcagaggttgggcaaattcatgacctccctaggcctagcgcatgtctccgccaactcctcaacaaaacaccttgaggccttcgaacccctaatgccttcatcatacctttcacctcaatttttctctttttggtcgccgcaactacagccttccctttcgagcagcctacgtctgcctggactgtcaccttcttcccttgttcatccacggcgtcggtagaaccctcctcacggtatggaccatatataccgaaggccattcaattcaaaaacatggttcagcctgacattctaacctcgtatataccaactcctcgtcatctccgtctttgttgagtacttgccaataattttcaccgcgtccgc

SEQ ID NO: 21585 - DNA, 773 bp, Zea Mays
caagatatcaccatccactagggctaggatatcacatgggcgaagcttgacacaaacttctggcgtgggggccacccacattcaatgtgaactagtcgttcgtctgttcacatcagttcacaccagtggtagacgtcgtacgcctcgcattaaatgcaggtggtgtgtgcagtccgtaaggcctggatgcgccattaactcgcgctttaccaaggcaaaggccattgacccactgcgtcgcacatgagcaagtaccatcatgatttctaccattctcgctgcaaaggcagacgaagagacaaacagatgagataagaaaacaccgtttgcctactcacctacagaagtcgacgaaccagccgacgccgcaacctaccccaaacccagtcttcacttacacattgacaagacagggtgaagacgaatcgaccagaggagtctgcacgacgaccaagagaagattcctacccatcacatgtgaagaccttggtccaccagctccatctgatgctccgcgctttatattttagtattcctaggcctggctcctttatacatgtcccccttagtctatcaaagagagggcacttgcgtagaaaaagggatggacggcaccggaatcgagcccatccaaggactcggggatagggatatatacagtcaaactcgctcggaggcatctcgaactagtctcagactttctcaagttctcatcaatacaactcacaaatatagtatagtattacgctctgacggcctgaaccactctaaac

SEQ ID NO: 21586 - DNA, 704 bp, Zea Mays
ggcggttctaggtcgggagctcgtcggagcgatggctcggagctagacggcgtggcgctacctcgtgcatggaggctaggtgacagggtcagtgttgccgggtctactagccgacacaggggagaagaggtgctgtggagaactcgtgcaggggcttgcattggaaaaggcaggatgccatggtgctggtgcttaggtgcccgacctgtagggacaaggacgacgcgcgtgtggcatcgcggcacgacaaagcttctcggctaatgcagtgaatcgaaagcgagcgaccgaagcaggtgcagaaatgacacgaatagaaatcgaaaacacgagagaagaagaaggcctcaccaggggcggagaagatggccaaagcgggcacgagaggcggtgcagtagttccgtggcgcaagggatgctgcggtttcatggaagaagagagagggagggggttagcgacaccgagatgtgtgtatatattgaaaggagaaggcgtgggaggtggttgctgattttgccatggctcgtatcctgaccgagcgagtgagacgattgtgtacacaacatggttgatgttgcgtgacgaggcaagacaagaggatagatgggggtagacgaggttagcggacgtgagcaacatgtcgttcggtgatttcacgaaaaaggacacgagatctggaacaggctcgacgagaggaacaaat

SEQ ID NO: 21587 - DNA, 565 bp, Zea Mays
gaagcggcgttggaggcggcgccgaatccatcaaatacaaagagatggagccgtagcacggctcgcttcccaccctaaagatttggggggcgcgagggatggagctgtggctcagcccgctgtccaccttcacaaggctggcgaacatccttccccccgaatgctagaggaagaagcgggaaggaccgttgcctccacggacatcccacggaggtaggggatgatggccgcctaaaggatgaagcggggcgtaatgtgtagaggctagaggccaagcccctccaacagcagcacgaggaaagacgggtttggcaacgccaacccgctggggagtttggagacgaagaacacaaactctccgacattgaggtcgtcgtgaggagaaacaccgacacggatccttctggcaaacgccagcacaccccatccgagcgggttgcgcaccaagttgagtgccacctcaggctggaggcgcttgggagggtctagcaaggccatggtggctacgacgacataagagcgaggagaactcgagggcaaaagggcgctgatgagaatggctacc

SEQ ID NO: 21588 - DNA, 1105 bp, Zea Mays
tattccatgaattccccacttctgtgccgtccatgtgggtgagccggtaggatcccggtcatgtgacttttgcgacaatgaatggtccttcccacggcggtgacatcttgtgtcatccctcccccgttagcacgcgacagaggaccaagtctcctactgcgaaggatcgatgccgcaccgctttgtcgtggtagcacctcagcgtctgctggtatctggctgactgaattaccacatttagtcgttcttcctctagtacatcgatgtccttagcctggttgcttctgcttcggctatgctttcgaacattaatctgggcgctccgaagaccagatctgctggtagcactgcttccgatccatacaccatgaagaatggggtgtttccgtgtaaagctcggcttggctgggttcgcaagctccagactacatatgacagttccctgatccatttccctgtgagcttcgcgctcttgtcgaacaccttttcctgagtgcatcaagtatcatctcgttggctctttccacctgcccattagctcttaggtgtgccactgatgcatacttgatctagatgctcctctgctcgcagaagtcaaagaactccgaactagtgaagttagatcctaggtcggtgatgatgctgttaggtattccaaacctgaaaattatttcctgaatgaactccactgcctttgctgaggtcaaagaagcgattggcttgtattctatccactttgtaaatttgtcgatggcaaccagtatgtgagtatatcctccttgagctttcttgaagggctcgatcatgtctagcccccagcatgcaaacagccaggtcataataatagtctgcaactattgtgcaggtagatgctgctactttgatagaaattggcacgcctcgcacttctagactaactcggctgcatcattcttcgctatcggccagtagaaaccggatctgaaagcctttcccaccagaatctgtgacgctgcatgtacaccacattgcccaacatgaatctcatctaacagctgcctcctagtagctgagtggatgcactccatggggaccccacctgcacctcttctgtatagcaggcccc

SEQ ID NO: 21589 - DNA, 464 bp, Zea Mays
gcagatgctctccatggaaacctctccctggttccttgatggaaggtgattgatttctcgatttgggccgatttgagcaatcgttggccgaatctaggggtcgaatctggggggcaatctgttggccagattgatttctcgattgtgctggcaagtagcatgcgcttgattgtgctgccgaggagcatgtgcgcgtacatgacgaggagccagggtgcaatctattggctggatcgacgcgtacctgttgaggagcttttgcgcgtggagtgtgctagcgagtagccgcggatcgacgtgtaggctgggattgtggccattgggtttgtgggagagaggagagccggagaggatctgttggctggatcgacgcgtagctgccgaggagcatgcgcgcgtggagtgtgctggcgagtagccgcggatcgacgcgtaggccggcatagcggcagcgggatttgcag

SEQ ID NO: 21590 - DNA, 859 bp, Zea Mays
tccataaagtgcttcaaatggtgccatttttagacttgcttgataactattgttatacgagaattctgcataaggcaaacttttatcccagcttctaccatgctttagagcgcaagctcttagcatatcttccaacacttggtttgtcctttccgtttgcccatccgtttgcggatgataagctgaattaaagtttagcttggtatccatggactcatgtagtcttttccaaaagcgcgaggtaaactgggttcctcgatctgatacgatcttctttggtactccatgtagacaaacaatcctcaacatgtataactctgctaactgggctcctgagtaagttgtcttcacaggtataaagtgtgtcactttagtcaacctgtctactatgacccatattcaatcatagccatcccgagtacggggtagtccaactatgaaatccatactgatttcttcccatttccatttcggtaccttgtgaggttgtagtaatcctgctggcctttggtgttcggctttaactcgctgacacacgtcacacaatgcaacatgagtagcaacatctcttttcaaaccgtaccaccaatacttttccttcaaatcctggtacatctttgtacttccagggtgaatagagtaagccgaatcatgagcttctatcaaaataagttggtgtaggtgttcgatttccggtacacagattctctttttaaaccatattgtgccttgatcatctttcgtgaaatctggggctttacccaaaccaatttgtcttaatttctttgattttctcatcggactcttgtcctttacgaatttcttcttccaaagtagattcaacttccataaccgttgc

SEQ ID NO: 21591 - DNA, 413 bp, Zea Mays
caactagcaccaaaaaggagagaaccaccagccacgcatcaccactgaggaggaggcggaccaaagaattgagtcgccaagttcgccgcaaagttttcttccccaggctgagctgggggtggatagcttcctgaaggatcctgggaggaggatatgaagaggattgacccggatccccctgggggggaggcgggacaaactgctcacgatcatcaaaatattcttcatcttcttcttcatcttcagctgacataaagggcaccccataggcctgctggtgccattcattgatttctggtggcggaggatgaagaggcacatcaggcgagcggggagcaaatggcatacccatggaagaagcttgacgatggaggttgtcgtcagtctcccgctgacgcctagccagctcatgc

SEQ ID NO: 21592 - DNA, 290 bp, Zea Mays
gtggagcgtgccaatgggaaaatcttcacagctgtcaagaagatgctcctcaatgaaagaaaaggcagatggaccgacttgttaccggaggcagtctgggcgctaaacacaaccgagtgcagggcgaccgggttcactcctttccgccttctatacggatcggaggcaatgaccccgcaagaaataaagcatgggtctccgcgcacagctccgtcagccgcccctgacgtggatgagccaacctccaaagatctcattgacggagaccgggtcttcgccctgcaggcctt

SEQ ID NO: 21593 - DNA, 524 bp, Zea Mays
gcacagggaggttcagaggagtgcggcgaacacggctaggggcacaacactagcacaagggcgttggggggttcacggcgaggcggctcggtggcggcgcaatcgtactccggcgagcaatcgcgcacaaccaaggacagactaggggaaaataggcgcggggctgggttgcttacctggagaggagactctggaacccttgaacgacgatagggacacgacgagggcctgggccgacggcggcggtgctacgcctgcgcggggaaagctccggtgagcacggacagagagaaccagagggggagagggcaaatggaggcgtgtctcgagttgtggacaccgaggcggaactcaccgaggcaatgggcacgacaaggcctcaacggtggtggcagaacgtatgtgcgggtgcggtgaacgacagcggtccttcaagctcggggaagaggcagcgcacgagcgaaggcagactgggaggtgtctgcgagtggaggaaatggcagagcggacgggaggggggtttg

SEQ ID NO: 21594 - DNA, 556 bp, Zea Mays
gcatctccaccgcatcgtcgtgatctgctttagccctccattgatcaccggactgaatgccacggttgatgccacgaatccactacgccagtgaactccccctcctctgaccgccgcgcgtcatcgctacaattcccggccaccgctctcgcttagtataaattgagccctccataagctccgcaagatcatcacacacccagccaccaagtattaccctcagttgatcaccagcgagctcgaattttacagttcccccaaatctgctcaaacacaccgcaagaacacctcgccgtggccagcgcaattcaggtcagttcataccgtctgctccctcgtttgagtgctctcgtgtacccgtgatgatcatcgacccgcccaattgaactaggaacccactgatcaccgggaacgcgagtgaatgtccacgatgcccgctgtcttcgtgggcagagctaggtagatcgccaatcgtgaaattgattgaggggaaaccctcgttagatcttggatttgatctctaccaaagtagggcgccagtcctggagcggttcgg

SEQ ID NO: 21595 - DNA, 309 bp, Zea Mays
gaggaaaccgctgccgagaaaaaggccttcactgaagggtgagcctttatattaaaggaagcccaaggccggtcaggatcagtttttttcagccagagccagcgcagcctaagagcccaattcattttttgcaagtcctagatgcccaaccccccaagcttttttggtctagtaaccttgttctaggctaccatacaatgtcctcccaaagcattcttccttcctctccacaagaaacttcttctgattttgtcaattgctttaatcacccaagtaggtagatccatggccatagttaaataaatagtc

SEQ ID NO: 21596 - DNA, 601 bp, Zea Mays
caggtaacccttgcatgtaacatcaggaaccaaggtgtccacatggattaggccgccctcaaaggttgaagaagtatgggaaactgttcgggttatttcttgcccgacaaattttctagctaagggaatgtcatctggcacctctgcacggatgccaggactcccagtttcaggaagttataataaaagatcttctgggataatctcctccagtgcatgatcaatggcagacatcgctaacctctgaagattaaccagccctgacggagcctgaattttggacatcgttgttggtcttgctacggcgactcttgcgaactaaagggggaatttcctcttcatcctcttcatcctcgtcacacacacatccaccgattctagtgccaccatagctctcaatatcatcttcgaggttggcactcgccgggttagcaccgaggactagggcagcagagtcagcccctagctccaattcagacaaatgctgaagtcttatctttcttttcttcccctcggcagacacgactgagtaacctatttgatataatcgtttttgacgggcacctccaggactacaagctccttcatcctcgccgaaggc

SEQ ID NO: 21597 - DNA, 592 bp, Zea Mays
caagatcctaagtaggtgaaacccatcttagaagtcatgctttggccttaccatgcacctaaagaggagagaagggctcaaaccctaattcaaatccctttaggcaaatggagccctagaggggattatagcaaaaaggctatgtaaatcacattgtcatgacttgggctaattataaaagttgtagtacacttaataccctacaaaaaatagacagagagtgaccccaaaaagatttcagaaaaaccccaaaaaggtcaccaaagagaagaacacaaaagaaaaatcagattcttctcactttcaaaaccaaccctctttcaaagatcaaacatgttcacctttttccaaacctcaaaaccaaagggcccaattgacaaaatggcgcctaaagacccctagaacaccctggaaaagtttgaacccaaccctaagtcgtttgacatgacttgacacggtttttgtctgggtctggacagctcagacagagccaacttcacaccaccatatctctcaaacccgatcatatctttgcttggaactcacatggaaaagataggatatggtgcagagaagagaccatacatgagat

SEQ ID NO: 21598 - DNA, 509 bp, Zea Mays
attttgagaagttgcgctggcggccggagagaggtgaaacgtactggcgcgggtgatcgtggctttcaccgtggtgaggcctccggcgatggacgagcttactgttttggttcactgcgacgtgttaaagctactaggcacgtggcgctaggacggtaagcggccaacgctggtgagggtcatcttggccggccgcagacaaagtgggtacggtggccaatccagtgaccgcgtctgagcttatcctggcgccaagatcttttcaccgccggctgatatctgcacacagagcgcacgaatcgcgacgctggcgaggatcacggcgtggagttcaccggcggcacattcaccgcatctgaagatcttttcgttcattgtaccatcaggatcttcttcggtatgtctgacaaagcatattcaggggtgtttttcttcaatttctatgtgacaacttgaccagccctctgtaacaaagttgttaatctataaaccagctataattcgactat

SEQ ID NO: 21599 - DNA, 611 bp, Zea Mays
atcgcttcgatcgccctgatcttctctggattcgcttcaatgccccggtacgaaaccaggaacccaagcagcttcccggtggagatgccaaaaacgcatttgtccgggtttagcttcttgcgggttgctcgtagcttgtcgaaaaccagggttaagtcttccactagggtcgaccctttcttagtcttgaccacgatgttgtcgacgtagacctctactttgtccctgatcaggtccccgaaagtcttactcatcgcccgcacaaatgttggcagggtgtttttcagaccatacggcattacaacatagcagtacagtccatccactattacaaaagcagtatgcttcctatcttccctagacatttggatttgatgaaaaccagagtaagcgtctaggaatgataacagatcgcacccggaggtagaatccacgatcaggtctattcgtggcagtggatacgggtccttgggacaggccttattcaggctggtgtagtcgatacacatccgaagtttcccattcgctttggggacaatgactgggttggccagccatatcgggtgatggacctcttcgatgaagccagcgtttagcagcttgtggacctc

SEQ ID NO: 21600 - DNA, 459 bp, Zea Mays
cggatttcgggatcttggatggggcgcctgagaagggacgtgtgttggcgagggaacgactggtggagctccctgtcgccggggtgtgcttcggtgcgtccaagcgcgccggtgtcgctgcctggtgaagacgacgcaggtgcgccgttggatgcaaaatcgaggatcaggattagaacccgtgtgacgtatcggtatgagtaaatggtagccgtcgtgattcgatcaaacgactcaggctcaagtggggcatgtgcggggctgaaccatggatctcggatccgacggtgtcgagtcagagcaggttttaatcagaccgatctaatctaggctgctcatgggtgatcggacggctgaaaaccctagataccccttcggccaggccatttcgcataagagaccctggaccttttggaaatagaacccgccgtccatcagtgattttccctgtgtctctgg

SEQ ID NO: 21601 - DNA, 370 bp, Zea Mays
cgcgcaccgcagctcagcctcacactcggtaaccttcaccgccaggtgggccccgcttgacaggtcttcttctccccaaaacggactcacgcatggtgggcggtaacaaccccataccggcgccatgggatttctccggatgattcgctaatatcgttgcaacaaccctgcggactccatcctacatctatataagtctgttgcggggttccttgcctccaggaccatgcgtgggaactagcgctcgccaccgattctcttgtcgccgggggcatgtgcggaagttccgccgccgtccatcccatccgtgcgccgccgctgggagccataggaggggtcaggggcgttcgcctgcaaccaaggtgcgtgt

SEQ ID NO: 21602 - DNA, 519 bp, Zea Mays
atggtcaagcaaaaggcagagaaatacaagtgcttccgtcaggacaacaagggaattttatggtttggagaccgattagttgttccgaaggaccctgagctcaaaaagaaaatactggatgaagctcacctttccaaattctccatgcacccgggtagcaacaagatgtaccatgatctcagatctttatattggtggaccagaatgaagagagaaattgccaagtatgtatctgagtgtgatacctgccagagaatcaaagccagccacttgaaggcagcaggccctttgcaaccccttcccataccatcttggaaatgggaggacatttgtatggattttatcgtaggattgcccaatacctccaggaaccatgattccatttgggttgttgtggacaggttgaccaagactgctcatttcttaccagtgcacaccacccataggacagagaagtatgcggagatctacattgaccaaatagttcgtctgcatgggataccaaggactatagtctcg

SEQ ID NO: 21603 - DNA, 466 bp, Zea Mays
acgatttcaacctctatcatagccctgccgttggcacaactgacaatgcccagctccatggccatttcggtctttcacgatgttgtgttcatcacctcgacctcctcctccatgttcataacagtgccttccccttagtcttcctcctccacacatggacgtcctacaagcaacgatatgaattttgtcctccttgacttttgctataatttggactttaaagcacacaaacaacatcaacatggcagtaactgtgaccaccgcttgaaaaacaatgagcaagacgggcaggagaaaacacatccttcttgtagactctaatagcattaataacacttggaagcataatgagaaaatcaataagcgttttatccttgataatttaatgcttgtgcaatagattgctcgatgtttgcaccatcaagaattgcatcgtattttgttgagattggatttttcgaatgca

SEQ ID NO: 21604 - DNA, 514 bp, Zea Mays
ggggcaggtggaggcgaggggtcagtaggaggtgggaggagacaggggttgagcacgacaaccgcatgggacgaaaaggcctgcatgtgtgtggtgagagggaggcatcggatctagagggaggcagtgtgggagagagagacatggcggtgcagatggaataggaggcattgttcttgcggtgtcagtggcgcgagatgcgggaggcgggcgagcagggtgcggtggtttgttgggacgaccacacacgtgcggagtggggaaggggtgggcacacacggctggttgccgcgatgtcagaggcacacacgattgtgatatcctagtggaggagatctggtgcgagcgtggagaagtccttgctttgcgacatcgacgctgaccagggcctgtttcttggagtgccgatggcgtgcgacggagacgtgtgggttcgagaggagaagagcagcgacgaggggaaagggggcgactaggtttggcttctattcatcagaggagggagagagcacgc

SEQ ID NO: 21605 - DNA, 406 bp, Zea Mays
aaacttatattacttgcacctaagtgcttgtagtaggggatacaagccggtcgggagagagaaaggatcccaagtccctagtgattgaggtgagtgccaatatcgttgtggagggtgaaaacctgtgaagtgttctcctcctgtatgaagccctggactcctccttttatagcctcaaggaggaatcctaagagcgccacagtttgtcatgtatggagaagaggcgagtctgagcccctatagccggtatggccttcgtactggctgttaacttgaactaggaggaggacgtctagtccctatatttgcaaattgatcgaacagagagccgaggccaggatctagggcttggacgtgtaccggtgcttatctgatggggctgctgtccgaatcatagttgttgaaa

SEQ ID NO: 21606 - DNA, 595 bp, Zea Mays
tgaagccactagattatgtcgctcgatgtgccattgccgttcataacctttgccacatcttcttgctctgagaacccgcattcacgttctatcttgaaataaagaacttcgcacgagtgatcttgtctccatccaaagcctccatcctggtgattgcatgctagagtctccgcactatcatgccttgcttcgtgccaccatcgagcaaaccaccacctcttgcaacccccaaacccgctctgtcgtctcatgacctcgctccctgaccaactcctgtcatctggatcacaccagcatagccaatacaccaagcgtcgatgatcctccgccacgaccatgtgtgaccactgtagtcggtcgtgtacctcgccctgaacaccctcgacagttgtatcttcattatgttgcccagattaaattggatatcggtcactgtccagacaaaaggggactttgtgaccacccacatgtgtttgctatgtcacccctttccacatgtcgctcgcctgctggtcatccccgttgttccatgttcatcgagctacgatagattggattcgcttcaacagatcaaatttcaatcacgtgcgcccgc

SEQ ID NO: 21607 - DNA, 441 bp, Zea Mays
cgctcggccaactaacctgggcggacagcttcttgcagtcacgttcctctcccttctttttctctcttacttgtggaccccacacgtcaaggctattttcttctccatcgttgcttccagaatccagaccacacgaacgcgccgccgctcgcatggactcgtcaagcaccacgctggctcatccctgcgtctcctcgactgctcgccttacgtggagcgccttcggctaccgtttctcctcttctctccccactcacgtcctcattcaagcgaccgttcctctgcagtaacaccgccaccgcgccattattggccaatgaagctctaccggcgtctgttacaccttcccacacctctacaaaactcgaccgtgcccccatagagccagtccccatccgtcccaagcccactccgagctccccagccgcacctccatcgaac

SEQ ID NO: 21608 - DNA, 836 bp, Zea Mays
gctcgagtatactttttgtctgtgctcattatttcgaattttcggcagaggtagaattttggccttttccctcgactttcttgtgttgtggattgaagtgattttgagctctcaacttggttctgtaaagaacgtctttttgttgccgtaaagcttaataaacttgttctgtgtctgagtgtttttggaataatcaatttggtgcttttagaaacacctttatgatttcgaaaatgaacttttccttttttgtttgggttgcatactgagatatttgtttcgatatgtcacgaggtatatagatgaaagtagtactctggttgggtcctcactgcaactgcaattttggtacaagttgtggtgtcgatgtcatgtgctgttcccagttcaccatttggagcccaaatactcctcctcatgtttgactcgcaactaattctggtcttggctgccggctaggaggccgtctagacttcctactttctaagcatgtgttggaatactagaaatattttagggtcagacactcccaagacaagagattatataaagtattggtttggtgtgttgcatgctgcattagtcttttaacccatgagaggactctgtccaagcctgtagttggacgtgtgctgatggtggacctggatgttgacgtgttcctgacatctgtggcctggactgttcctggtggagatgtttcaattgtagattcggatttttatttggtccttaagtccttgtcatgactcatgataagtgtgacaaggcccatggttggtctcagaaccgaggacgtgtgcggttgtgcaaccactctggaatcacaatatgcc

SEQ ID NO: 21609 - DNA, 489 bp, Zea Mays
gaaaaatgacctggtcgaaagagaagatattaaggctatcattcaacgccctatctggtctcacttcggcatcaggaggccgtctcttgcccttgggaatgacgtagaagcatgccaagctgcgtataacatagtttgcacatatattggcaccagggatttggtccaagagcacattgcgtacagagtgtggcctctctcaagcggctgggagatgccgaacgaagctgcttctgggtctagctaggatggtttagtttacctgaagtacatctttaggtaccgaaatcaattcgatgaggcaaatgatgactggctagattgcattgaggcaactagcgacgagttgcttggtgcctacacgagtgccgaggatgatgccctgacagtggccttcggagggcgaggcaagaagagattgtacatggtctttgatgtcattggttttgtgtacctagactattgttatcccccacgaaagcagggaaa

SEQ ID NO: 21610 - DNA, 725 bp, Zea Mays
tatcatgaggatcacctctaagcaagtcgtaaagtttgtcaccatcattatccattgtttcagggtaccaaactcgattataacggataagggtacacagttcaccgggaaaagattcctagagttctacgatgaatacaacatccatgtcgattgggcgccatgacccaccccatgcgaatggacaagtcgagcgggctaacgagaagatcatgcaagacctcaaatctcgagttttcagttgtctcaagcaactcggataatggtggtttcacttgtctgaagcaactcggacaacggtggccacatgcgctatccacagtcctttggagcctaagaacaactctgaaccgctcaaccaaatacacatcatactttatggactatggagccgaagcagtcttccccaccgacctcgagtacgatgccctgagggtaaagctatatacgagcgagcataatgagtcgaacttgaaagacgcatgggaccaactcggcgaagctcatgatgtagcactcttgcgttcggcaaggtaccaacatgcactgcgaaggtaccatagccgctgcattcgaagaaggaccctacaagtaggagacttagtgcttcaacgggtccatactaacaaagacttgcacaaactgtccccaccatgggaggggtcattcgtagtccgaaatatacttcgactaggcacctacaagttgaaggacgaaaaggcaag

SEQ ID NO: 21611 - DNA, 776 bp, Zea Mays
gttcgttaatctgggactagcacggcggaattcctcgctgctgctcaagcttcgtgacgggatggcgctgcgccatggtcaggcatcttcgcgtcactaaccccggtgaggccttcctccgttgttacgctatgttttcctcttcgcgtaggttctcggcggggagagtttagtgcgtcatagctgctagtctgggttcgccagcgatggagcatagtggcgggccgtggcacgccatgaacggggtcctctgctatgaaatcgtcaatataccttgcccactaagttcgccctcgtctttacctcgcgtagcatcaatggtagggtgtcgggtgtttggattcatcgggatggcgtgtcaccggtgagggcgccaccgcgacctgggcagcgccgccgtgctgactgttagcgtcgacatgctcaatccatggagagaagatggtgccagtgccgtcagattataattgaagggtcgagattagaatcagctcagcgtttcggtacattaaaccgtgaccgttgatattcgatccatcggcccgagtgaacgttgcgtggatggggttgtgccgtagatttcggatccaacgacggtgagtgatgaagaagctgtatccagggccgatctaatccagcctgttcgtgctcaatcggacgaccgaaaaccctagataccccttcgccttggcatttatgctaaagagcccctgtagaatcaagtaaccaaaccgccgtccacccgtgggattgatatgtgtcttgcggatatttta

SEQ ID NO: 21612 - DNA, 451 bp, Zea Mays
cacagtttatacggatgcttctcgtattggtcttggctgtgtgttgatgcaggaaggcagagtgattgcttatggctccaggcagttgaggaagcacgaggggaattatgtaactcatgacctcgaattagccgcagtggtctttgccctaaaatcgtggaggcattatctttatggcgagtcttgcgacatctacaccgatcataaaagtctcaagtatattttcactcagaaggagctgaatttgaggcaccgtctgtggctcgaattgataaaggattatgatctatccattcattatcacccgaggaaggcaaatgtggtggctaatgcccttagcaggtccggggttccaaaagtggccttgcctttgatcgcagatctggatcgtatgggggtcgctttgtgctttgtcagcaccgctagagaggagactcagatgctcattcaa

SEQ ID NO: 21613 - DNA, 858 bp, Zea Mays
ccaagctaacataataagacacacacacacgaaacacagggacatgaatgatgcacgaccgagacacacatacatgcttttgatccattccttgcttacctaacacaaccaacaatagaaggcaaactatagatcatattcagacagggacaacacatacaatttcaattcaatagttaacaataggttcctatgtacattaactgaataaacagaaagcacagagatgaacaacagtggcgactctgaatttgttctagttgtacaagtcccataacatatacaattctaggcagcaaatcagtaaatgagtgaagaacttaactcacttaccaccaagatccgtgaacgccctcggcccagccatccttctaaggggggcatcttgatcacgacaaggcagtgaggaacaggccgtcgaggaagacggctggggcagtggcgccgatgcggatggttgttgcagaggagccgaggcagacgactggggcggtggcgacgaggcgaacggctggggcggtggcgacgaggcgaatggctggggcagcgacgaggaggacatctggtccggcggcgtcgatgtggatggcaggggtggtggtaacgaggagggcgatcgtggcaactgttgaagagaaagttaggtttagggttacgcaagtcatgtggaaaaatctagaaaaatggctggctatgcgaatttttttctaataaaaatggcaggctgtggctagtagtacctcatgacaacaagaagttcatcacaatactgtgattggctagtgttatgatatttttttcaatgttattagtgacgcttgactaaattcgttataaagttatgttgccacaaaaaat

SEQ ID NO: 21614 - DNA, 494 bp, Zea Mays
agtgctcagaccatgccatgtgccccatccgtgaggtggatgaacaagaacaatatgatcaggggatcatccttgatccctggcatgcgatggcgaggcgatagtattccaaccgaacactaggattggttgtctcgtcttatttggtgatgttggtggatgtgtgcaccctggcgggaaatattgccttctagatcacgcaccggaaggcatgtggtcctagcctagttggactagagattcactcgcgccttcctttgggcgcacgtgactgctccacctcatcccgctcccgatgtcgattgttgaagatgtggcgggcgtagtggatgtcaccgaggtgggttctcatggggacccgtgactttatagagtgggagggttgtgcctccgtgctctatgctgatgtggagcgggtgttgagtccatccttgccggcagctaactaccggtcaatcttggtctgctgcacaacggctctctcctttaggttg

SEQ ID NO: 21615 - DNA, 326 bp, Zea Mays
cgacgagaggaagaagataggttagcaccgttgatccggcctggaaccgctaagattagacgtctgggtgccccttcacgcatctaaatccggtctctggatctgatcgagtggtcagtattgactcaagcgtaattaaatcgtggccgtttgatctcgcgcgggcggctcagattaaatcttagggacacccttttggtggtataatcggtgtcatagatcggtgatccggtggccgtgatgttgtatcggttcattgatctaatcatagcccttgatgcaagatccaatgactatggctccacgatacccccccttcgcccgtg

SEQ ID NO: 21616 - DNA, 846 bp, Zea Mays
gccaattccttgccctttattgcaaatcgatccatcaaaatataaagtccagggagtaacagtgaggtatgatatgtctagtttatgagtatcattgatccgatgttctacaataaaatctgctacgacctggcctttcatagatttcaatggttcataggccaagccatactctataagtgcataagcccatttaccaatcctaccactcataatcgggttttgcaacatgtatttaatcacatcggtttgactggtaatggtgccatgactagacagtaaagaacatctacactcggtgcatgcataaaataggcataagcataatttttcgataagagtgtaccttgtttcagcatccactagcctccgacttaggtaggtcaccacatgctcctttcctccagtcacttgcgttagaacagcaccaataaccttgtcttcagctgcaatgtacaatctgaacgatgctcctacttgtggagcttttaatacgggagccgaagacaaatactttctgatgagatcaaatgcttcttgttgttctgcccgccaagtgaattcggcatcattcttaagccgaaggataggggtgaaggcatcaatcttcccggctaggttagaaataaacctccgcaaataatttatcttgccgagaaacttctgcacttcgaccttacaggttggaggtcccacattccgaatggatttgattcggtcagagtctatctctataccatgttcatgaatgatgaaccctaaaaacttaccagccgacactccaaaatcacatttacgtgggttcattttcagaccataccgacacattttatcaaaggctttgcg

SEQ ID NO: 21617 - DNA, 598 bp, Zea Mays
atgaaaagttactactgctattacaataatgatatcacatctcatcacatcattaaaaaagtttatggcttcggagccatgcatcacaagatagactaataataattattacaaaccgatgtttattacataaataaaaggtactgccaaaataagaaaccttctccccctttttggcaacaagaaccaaaaaaggagagagccaccaacacaaagatcaccagttaggaggaggctgatgcggagcgaagaaatggtgcgctaggtgagatgcaaagtgttcttccccagactgatccgggggaggagcacttccagaaggatcctgggcggagggtgtgaggatgattgacccggattcccttagtagggaggcggggcaaactgctcgcgatcatcaaagtaggcttcttcttcttcttcgtcgtctgctgacataaagggcaccccgtaggcctgctggtgccactcattgatctccgggggaggtggatggagaggcacgtcaggcgagcgaggggcaaagggcatacccatagtggaagcttgacgacgaagattgtcgtcagtctcccgctgacgccttgccagctcatgc

SEQ ID NO: 21618 - DNA, 573 bp, Zea Mays
acggtggagttcggcgtttcaaggatctcctcggttcgcgtgcaagacatgcaacagttggggtattttgggaatggagttggacgagttccgggggcggaagagattcctgagctggagggtgagatagttatgttcgaggcattctttaccgccggccttcgcctacctgcgcatcgttttgtggtggaggtcttgcagaggtatgacgtgtagatccatcaattgacacctaatgccgtggtggccctggtgaagtatgtctgggcagtgactttgtatggtggtcagccctttgtcgaggtcttcgccaagaattattgtctgcactggcagaagagaaaaattggaagcaagattgcatagtttggatcatgcacctttacgccgaggacttggaagacttcggcggaagttgtggaactagttccctgcgcccgcaacaagtggggcaactgatatgattattggttttatgtgttgggaggcgaagtcgaagacctcctgggactcccggcggccgtgatgtgctcccactgttatgtggcgttcccgccgtttgaggtggcggag

SEQ ID NO: 21619 - DNA, 1170 bp, Zea Mays
ctcatatctccactttccgatcacacttggatggaccagatcacatcgcacgctttatgaaccggtaaccacccacaaccatctgatgacatcccaacggcctggatctaaaatctctaccttcccaccggaccgttcgatccagatccgctggtaagggttgattgcataaggattacaccgcgcataaatcctggccacacgctcgtaggttaacggcataggatgactcccccacagatctaatcctagccacccctggttagatcagcggcgtaggacccattttccatctcctgacagcgcccggcgacaaagcccgagcgaaccacggcagcgccattgtcgcggtgcccagatagcgcgacccgcacaacaaacttggatctcaatggtgctacgcatagcaggggttggggtgagtccagggggcaaggtcttatcggtgatggtgacgcacaggacgctgcccacgcagctatgcggttgagcggcggaagactgacttcggtgagcaatcaagccgtccctgcgggtccaattcctacaccggtgccacaacagccttccacgagccccggagattcaccccgaccaacaacaggggcaaggtccgatgtggtagatggttaggtgcggcggcgccggtctcacaccgacgagttcctaggttctttcgatgggggtcaaggggctttgattggtccattatttatacaccaagaccgagccgaaggggtcggatgtcttgttgtaacctacacgcgatagcggcgatgaagatccaggcgaattcgatccccaatccttgcgcggaatgcgtatgcacgcagtgacgcggagcttgggtgaagcttctgacagcgggaccctcatggcagcgactcccacaaggaatgcacacatagggtggccgacaggcttggcccacctgtcggcgcggtgactgcgcggaggtgaagtgggccgagtgtggggaatttggcccaagaggcggttttctgttctctttttttattttgttttgaatttctttctcaatttcaatcctaagtttgattctgaatttcaagcatatatttgatgcatcaaacagaaatcccagcatgacaatgcaagtataaattatatatttatttatattgattgctttgtccatgccaaaaaaac

SEQ ID NO: 21620 - DNA, 683 bp, Zea Mays
gacgttgtagtagacttgtctactgagctagtggaaaaggatctccaggttgagcaaatggctaaccacatccgcgagctcgagaatctagtgaaaaccagggataacaccatcgaggttccagaagaccagctctagaacacacagcagcagctcaaggaggcaaaccagcagttggacctgcaccatccggagatagaggctatggaggcagacgaggccgatgaggacgtagacatcgagggaggggaggagccggagcccgcttctagtttggatactaccggctcaactcaccctagaggaccaccttccctgagtctagcgctgcctcttttgctcgttaggtttcagggctagggtagaagtgttaggaagtagaactcctaaaaaatagcttagattttgcacatcggatgtactaggctagagaattgagtcctttgaacctgatgtaacccctagaaacttcttttgggaaagaagaatgatggatggttttaagtttaagattatgaatcgaattttatcctgttggcaccagtcgtgaaaagagaggcgaaattggaactttgcaaatctcgctgcttatttatttcattgtgttacgcaattacgtattacaaatataacgacagaaactcataaatttcagatggcaggaagagcgcgccgtggataga

SEQ ID NO: 21621 - DNA, 344 bp, Zea Mays
cctggatccacatcggacggccgagaagagttcaggccgaaccagaatccgggatcaaatctcagcccttcatctgggattgatggcccatattccacccccatcgcccaagcctggtaacggcggcgctgcctgtggccacaacggggcatcgccggtgagcctgctggatggcggtcctgtgctctagatcccaatctggggagcgctacaaggagacgagatcccaacaacagatatagggttcacgtaccaatggtgaggatactgatgttctccgaccatggcgctagtggtcccgcggcggagcaacggcacgggtgagaaattctggtggccatgag

SEQ ID NO: 21622 - DNA, 498 bp, Zea Mays
tgccatcctacgctcacttaggcttctgttaagggcaaactgggtctcatgttcatgcggtctttttctgcaaaataatgaactaccatcatgtgcttttagtactccatggtgctgttggtgctgtagtctctgctccttgatgaatccttcggccacagacaaataactatttgttgaactttcaacaaactggatttgtctgggctctaacctatgcacacttgaacttccttttacatctgtaattgcattactgaagcattcagttgatacttgtgaaactaactgtgatatttttatttttgcatcttccaggttcgcaggacccaaattctgttttccaagtgtttcttgtgcctgctccaaaactgcttgtaggtatttcccttgtgcttcaattcgtagttgtagatgcctttgcacctgtttccaatttgaatttcagatcagaatcactgcagcagcagcacaactccattttatagacactataag

SEQ ID NO: 21623 - DNA, 492 bp, Zea Mays
gccgtccggctctagcagccggatcgtccaagctcagtgcggaccgtccaacccctgagtccggaccatccacgcctcgccaggaagcctccaaagacgtgccaacacctatggatgaggacaacatcgaggaggacgacctactgggagaggatctggtcgactatagagcctcgcccgagcacccaggtgtggatgttaatgtgattacgttttcagccgattacactattatcggtgatgatgaacctatcgttgctcaatttgattttggtcctaaaggggccaccttcaccaagccaaaagaattggtcaaccatttaaagtccttctttgtgcgtggtcatatcgatggaataccgattgataagatgttggtagatggtggggcggccgtgaatttaatgccttactcgttgtatataaaatttgggatacaggatgacgaactagtcaagactaatatgacgctcagtggcattgggattgacg

SEQ ID NO: 21624 - DNA, 858 bp, Zea Mays
ctgggaactaggcacccaaagtaggcccatgattcttgacggcccgcccaaggaacatgcccctagccgagcaaccctgcaaggcgggtgtcgccgaccaagtccctaccgggcaaccttatgagatagggcggctgaccaagtcttagccaagcaactatgtgaggcagcttggacgaccaagtccaagtcgagcaactctgcgaggccagacagcggaccaagtccctacctagcaaccccggcgaggcggagcgaccaaccatgcctttgtcgagcaactcagcgagacggaggtcccaaccaacccgtaaattggtacacgtttgacggtttgagggccccgcctcttaggcccacacgtcactcattggatgagcacccacatatgcctagattcaccctgtactaaaaaacgtactgctgacccacgtcagccatagaacgcacgacgcgtcacacctaaggcgtaccgggaagtctctatcgacatgacgggtcatcatcgtgtacagtcttaggcattccctacctctgccttgtaggaccattcaaccccgatcttggaggacctaagcatcgaagcccctacaggatggagctatacaccatactgggtgtacgtttacaagatgacacaagatctctagcgaagaggcaaagccatgccgcacacgactccaagacataccctggctctaccatatgggacaaaccaagcatcgctacagggactccagcatcggactcgctatagggacccgtataccgggcggatgagacggtacccatgcctagcgtacaactacgcacgaccttgaagacgacgtcaagaagactacgtcagtaggaccaccg

SEQ ID NO: 21625 - DNA, 311 bp, Zea Mays
cgccgtgaggtcctgtcggcaactccaggggtcccgaaggctgccccacatcaacgatggaggagcaccaccatctcctttggggcacccgactgccccgacaacatggcaggggtcggcatactgccactcatcactgcccctgtcatcgccaacatgcgactacaccatgtgttgattaacggtggaccaggcctcaacgtcatcagccatgctgcgttcaagcagctgcaaatcccggggtcacgtctgggaccctcacgcccattctccggagtgggcccacagccggtgtatccccttgggagcat

SEQ ID NO: 21626 - DNA, 617 bp, Zea Mays
atttgtctctgtattcacttactgacatacctccttgtttgagggatagaaactccttcttattaatcttcaaaggccaacaggaatatggtaattcctaaagtgagtggagaattctgcccaggtaatggtgtgagcagcggcatgtgcaacgcaatatgcatcccaccaatctgcagcgaggctagtaaggcaacccgatgcatatagcactttctccttgtcggtgcactaagctatattgagcatcttttctatagactttaaccagtcgtcaacctgtagtgggtcggaggagttcgagaatgtaggtggcttgtgactcataaactcccagtgcttatccctgggcggagctggtggtggtggaggtggtagttgatgtcgttcctatcgttcttggcgcatttcttggcgttcttgctacatttcctatcatttttgacggatctgggcttgcatttctatcatcatgttagccatttgttgtagtaatcgcatttgagcagcagtcacgtcatcaacgggcgggggattcggaggaggattcatttctagatccggattagctacagcccttctttggcgaatttgtgcgggtagatcaacacttcctc

SEQ ID NO: 21627 - DNA, 860 bp, Zea Mays
atgtagacttactaatttttatacaagttatttcgcgcgctagaactaacatacacatttaatcaacgcattcaccacaatcatcaatttcggcatacatgtatatcaaaacgcttttcacccactagttcgcattttagtttagacaccatatgagcactacagatttttacccgcgatcataaccatgcgcatttagactacaacaagtaaatcactgtgactacgatcttacccaaagacatctattaattcggctaactagcgcaacaacataggccgctatacatcctacacgtcgacttgcctcttattatcgtaatctgagacaacacatttataacgaacacttaacgaaatcgactcctatttaacttgagctagctaatcatagtagaagacttagcgaaccattttagacatcgcaactcaaaaaatgggtgggagcaggttacttaatgtttcttaaccttttctcaacttaaactggacaacacacaagtcacttaaaacaccatattttagggggtctaacataaaggctttaacacctggcctaaaactccgtaagacttacactggctactgaaggacctacagcacccatgtgcatatgttatcggactgttcttcaattttagcaaggattgactcatgaacgctactcgcctccaataattattgggctgcgataactctcatataagacctctaatcgatcaacaagatatttatttatccaaagggaatggaatgcaataatttataaagctaagcatcgatctgtcatacaacaaaaatcatgacaacaccgacagatactatccactattcgttgaaaaattaaacttacttctcgc

SEQ ID NO: 21628 - DNA, 580 bp, Zea Mays
gcctttaagagttaattcagttgggggaaaagttcagtccgatgggatttgtccaaatctaaggattgaaataaggggggtagacttccccgctagcctagtagtaatgggaactctagggttagatgtcatcctagggatgaattagctacacaaaaaccaagccactgtcagttgtgacaagagaacagtcaaattggtgtccccatccagaaaggaagtagtaaccaagctgtacttacctgaactaggagcctgtcaccatttatcagtagacgacaaggagtccaatccaattgaggcaattaggattgtgtcagaattccctgatgtattccctgaagagttaccaggcatgccacctgaaaggaaagttgaatttgccatagagcttatcccaggcaccgtccctatttctaagagagcttatcgagtgtccggaccagagttggtggaactcaagaagcaaattgatgagttgttagagaaaggctacatcagaccaagtacctcaccttgggcagccccagtgctatttgtggagaagaaggatggtacgaagaggatgtgcattgattac

SEQ ID NO: 21629 - DNA, 534 bp, Zea Mays
tacatggaaatttgagatttgggcgctacaaaccgttctctcagatgctctgaatgactttctgatggtacagtaaactgaatgagatcacaggtgcagtgcaccttgccgccggcgaccctcgcacctggattcacgtcggtgatgcgattcgtgcccactggtgctcggataacgcctcggggtgaaaagatcttcaccacggatgagcttgagacactgttccgccccggtcgccgtgtccgcttgactcacggccggttcagataagctcactgaagttggccgcctattgatcggttgccacgtgcctaggtgctctaccacgtcgcagtaattcgccttggcgtgtccatccatcgccggtgaccttgccgtggtgaaagccacacatctcttgcgctagtgctctcccctctctccgaccgccagcgtgccattccaaattcatgagccaccgccctcgagccctataaattgagcgtgccatcagctccgctaggtagtcacgcatccagcacacccactcgtgtc

SEQ ID NO: 21630 - DNA, 503 bp, Zea Mays
gttcaagtcattaaggaaatgctcgaacaaaaggtggataagtacaaatgctttcgtcaggacagcaagggagttctatggtttgaagaccacttggttgttcctaaaaatccagaactcaggaagaaaatattagacgaagctaatctttccaagttttccatgcaccccgggagtaacaagatgtatcatgacctcagatccttatattggtggaccaggatgaagagggaaatagctaagtatgtatctgagtgcgacacttgccaaagaatcaaagctagtcatttgaaggtagcgggtaccttacagcctcttcccatcccttcttggaaatgggaggacatttgcatgaatttcgtggtgggattgccaaacacctcccggcaccatgattctatttgggtcattgtggataggttaaccaagacagctcatttcttgccagtacataccacccataaggcagaaaaatatgcagagatctatattgaccaaatagt

SEQ ID NO: 21631 - DNA, 767 bp, Zea Mays
ccgcgcacggcccgacaaaaccgctaggcgtgggggccacgtacctgtcagttgcggggacagatgtggcagacggcatgactgaaggcgggttggcggtgactacgtcagaaagtgcccgaaaatggcacgcaagctttggccccacctgcaggcttgtaacctcccctgaggtgggcccaggggccactgtcggtaccctataacaggggtaccctatgctatagtatgaaggcacggtacccatgtgtctatccctagacgcgtgataaacaacgcccgatcccaccacatggacgactccagggccgccatgtgtcaaaagaaagtaacatatgccacgatatcaccagtggatccggaccccagcatacatagcctagacccccaggtacgacccaggacctccacgatatcccgttgggacccggaccccacgacaagatcctaggacgatgcataccctgacctaggtcagggacgtacaggggtccggcgcttacgcttgtcaggactttgaccaaagcgtttccgctccccgcttagatagagactcgatgctgccacgtggcctagtacccgtgacgtaagccagcgggcagagcatgacataaggcctctgggccacacaatctttacatttattgcggaaaagacgtgtcgcctatctgcccttctgacaggtgatgtgccgccttggcatttaatgtgccccgtccactccgctggcaggcgacgaccaggccaccctacaagcggtgtgcctg

SEQ ID NO: 21632 - DNA, 770 bp, Zea Mays
atagaaattggagataaataagtgtgaagttgtgctgtcagaagtaagttgggcaaatatgaaaattggattcagaaaagtatggccccaaggaaatgcagttgatttgagagcaccaaatctgagaatctatacagaattgatccatgaaccctataacaaacacaaaagactgttgtttggggaacaaattttattaagggaggttaccctgttcttaacaagaatcatgagaaagtggggatgataggtggtcggttcagtaaaacgctgaagatcaaaacactgtaaatatctgaagaacgtggataaagatctgaggcacttttgaaccggatgtgctcgagtgatctggtgaaggagtcgatcgcggagagataacttcggacgtggcaccatcccgcgaacccagccgtgcgtggtcggagatatcccaccggcggtcgccgtggctcggtcacttccgccgtggtgtcacccatgcctcgttttccccttactgtgcctcttcactatgtggtaaccatgagtgaacaatgcaatctgtggccgctgatcgttagtcggaccgccgtgcctataaatagtgccatgggccacggcgaggcactcacaatttcaccagtgaacttggtagaagccaaaattcgcactgccttctccacctctccccaaattgagtgtgcacggtgaatcggtagccctttgcgactgtatagccccaacaagacctcctaattccactcgagctcgtcgcaacgacgttttcc

SEQ ID NO: 21633 - DNA, 384 bp, Zea Mays
ggtgttttacttgagtggacacaaataccatctaggtatgcgttaaatagaggggattataggaatcctgctatcacaaaaggtcatttgctagcccaataacgtcttcatccactagttgtactctaataccgtctcgtgtgaatacaatgccctcaatatcatagaaacgtcatttgaggtttaaaaggtgatctattgttttgaattctttatattccaacttttcgcaattgtatggtggaaaaaaggtgccttacaaccttaacctatgtttggacagttcactcacgtaatttggctaaattttccatggtcatttatttgttttgagaaacgatgtggcttattgatgtgttttgtttttcttgagtggacataaac

SEQ ID NO: 21634 - DNA, 602 bp, Zea Mays
acgaagtagtcgaagatgagatgacgacgctggcaacaaggtagtgcgggaagaaggcgaagaggtaggcatggcgacgcatcgaggatccggagtcgcggtggtgagagccacgacacacacgaagaagagactcgacgacgcgcagggagcgtgacggtggtacttgtcggcgaagaactcgatgacgaacatggtgcagaccagcgatggagggtgtcaacgcagcatagatacaacaatgggggtcggcgacgctgctgcccgaagaggcgatgcagcggcaaccctcgtgcttggttaagaaactcacgccatacgacagacgtcatgggagggtgaggtcgcgcacgatcggttggccagaccgacgacgtgctaggcgaagacgatgatggtgatgacgatggcaaaacctcctggtcagtagcggcgacgatgaaccaatagagatcgacgtgccggcgaagaggcgcagaaacagcatgcgggcgtcccctggcacgctgctatccacaccatgcagcatagtcagagaagatgaaggagtcgatgttgtctaggccgatgtcgatgacgcacgagacaacgggcagtgggcg

SEQ ID NO: 21635 - DNA, 500 bp, Zea Mays
catcactgttgtatcaaatgcaggctccagcgaggccaatacccaaatattattacctttgatacttttttcaatctgtaacaccaagatctccctcactgcattgacttcagtcatatctccaactaactgtaccggctctcccctatcttcaaaagtgaggactcagttaccctaatcacagttcatgggactgtgtgactcaagccaatcaaaaccaagaataacatcataagcaccaagctccaaaactctgagatcattataatatgtgtgaccatttgtccaccaagccaactgttgtacctgggctgcactactgaggaaatcgccattagccacctacaatctggcgacagaacatgaatgagtttgcaaacccaaccggtccacaaaattcttgctaataaaactggtggagctaccggaatcgaccaaaatcaacatggtctgattacccaccaaggctctgaccctcatacatgcttccttagcagtac

SEQ ID NO: 21636 - DNA, 527 bp, Zea Mays
attgtggactgctgttgctgctgtgcttgaagtatggatgtatctgtgtatgatgcctgaagcagaaactttctgtgtttgtggggtgtggacagtggagagtggactgctgcagtgctgctgctattgtgcttgctgtgtcttatttcatcgaagcgaccaagccaattagccaagcactcaactgctatgtttgtggactactacctgtaacctgtgtgactgtctttgtgaaatgaactcttttatgtattatctgtctttagtctgtgtttaattgttttattagtggactcgcctactgtcttcagtctgtgtttaattgtttattagcgcagtggactactggactgccttatgcccttatgtatttgtgtgcacttgtattctcgcgggctgctttatatatttgtaatttgtggactactgtcagtgctagcctgtgtattgttgttttttctgacttccgattatatttttgctgttgaacatgctatattgctacatactggaaaacccgacgggga

SEQ ID NO: 21637 - DNA, 333 bp, Zea Mays
tgcagctcagatgaggatgatgcaatcaatggcggacaatatggcagatatgtgtgctcagatgcagcaagaacgccaggagatgcaccaggaacgagaagagatacgccaggagttgcgccaagaacgagaaaagatacgctaggaaaggagggcgcagcagtaacagcagcaacagcaacaagtaccactgcctccaccaccaccaccagttccaccccgagataagcaccgggagttcatgagccataagccaccgacatttgctagttctcctgatccactggacgaagatgattggctgaagtccatagagaagatgttgaacattgc

SEQ ID NO: 21638 - DNA, 880 bp, Zea Mays
ccaccagaatgtggtggagaagacctgacgtggacatccatggaggtatgagaaggggagcccgctcggacacctcggggctgggttgcagcttgcgcgacccacccgagccggatcattaccggcaacaccctcgggggctgggcaaccgccagcaccacccttgaagactgggttctctggaacagccacctctaaggctgaaggattctcagtcacctccatgggaattgaacaaccttaaccagcctcttggctccgaagaccgccttccaaggtcgacgatgcacgagatgctgcccgggatacctctaatcccacatctagagtgtcagagcagacgtccatcatatcaccatcagttggttctgacagcagatcttcaggaacaacatcctcgagagcctgatcaaaatttgctatggataattcttgcagaccaacaagagcagacagagctggagaaggaatatcgctactcccccactggctctgtaacgccgactgttctttcgaattaatgggacttcctcttcttattcttcgtcctcgtcaacaatatggacaataaacgacacatggtcacacccattgggatcagctctggcagggtcacacccattgggatcagcatcagcagggtcacacccattgggatcagctctggcagggtcacacccattgggatcagcatcagcagggtcacacccattgggatcagctccagtaaagagttccaccggtacttcttcagcagcatgagcagaagggccagtatcctggtccaagcacgacactcgccgaagccgtctctttttctttttcttcccctcggcaggtgcagttggatgactgacctggcggagacgtttcgggcgag

SEQ ID NO: 21639 - DNA, 719 bp, Zea Mays
aagagatgatgtagcagcttgttcgaggccatcacagaacagatgaaaatctgagcggcacggagaactgcatttttgttgtcgccaaccttcaatgcaaagatcgccacttatctggcccctttgctctgcaaattggcttcaccactctgaaaccatattcatcaaaactgattcaaagcaacaaatcaaaaaaaagcaacaacagaataaaggtaaccccgataaccacaagcagcaattagatttgacctcaaataaaattcagttcacatcatagttggatctgtcgacccacatcatccaattctcaagaatcactaactccacaaaactcaacgaactaagtatcacattaagcagcacacaaaaaggagacagaagaaagcacacaggtaagtaaaggctcagataaacaatgggtagaaagtttgcttgtcagcccaaagagagaaaaatccctcattcagagtggtgcatgactttgcatcatcattgcccttataacctagctttcctctgcatcacagaaagaaaggggaacaacagaagagataacagataaaaaatcaagcagtaacacacgatggcaatcaaaatataggacacaaaagagaaaacagatccaaatcaaacaataaaaacacatgcagaagaaatgacgacttggccggctccaccagacagacatggtgacgtgccgaggcaaccttagccgc

SEQ ID NO: 21640 - DNA, 751 bp, Zea Mays
aaggtaggaggtttgtcgtcgatcaacgctaactccatggccatcatcttcaagagcaagatcacctttagcccgggagctattttctgcttcaggaccatcccgtgcgtagcggacatagagggaactctgcatcgcatagcaacgccaccccagaagaaaccctcctcggaagttccatgggaagctggagtgaaaccgcgagccatgcccccactcatagctcggcaaggcatggccccgcgcaagtctgagctcaaaagtccccgaaggatggaaggccagtcaaccagggcctccccagcctggaaaactccattgtccacctcacccactaaggagtggacacgaatcactcggagaagggaagtgaatgttccgtatcggggaaggagaacacaacgagcaatcctcccaacacctccgccctcaaaggaggatgagatgaagcacaccacagtacctgctcctttctaccccaacatcctcttcattcagggaagattgaagtcatcgcccacctctgacgatgaacccaccatgctgggggaggaacctccccagcgtgatgaccgacgatggagaaacaggcaccggaacacaaggcaacatcacaaagtcgaagaatgggacccaacacaacctgtctctaaggacaaagcctcagagatgggggaaacccccgacgaaagagcacatcaagaacggcgaaactcccactgtcgcgatcgccgtcaggctcaagaacgag

SEQ ID NO: 21641 - DNA, 477 bp, Zea Mays
ggcccatcctagctcggccagattcaggcctcggtcgttccggcgtcaacgtgaggcatcggcatctgtccgctcaccctcagtgaggggtgcacagactgacgacctgcgggaagaactcaaccgcaggcgtgcgggcgaggatgctcgagtctctctagagagggcgcgtgagcaccgacaaaactttgagggtcacaacctcgaccaagacactgcaagggatgcccaaatccaggcgggtgtcccattggtcggcgtgggctgtgccgcactagcagatcatctctacgcagtgacttggccacccaagttctggccacacctgccggagtatgacggtacgtcgaacctgtcggaattcttgtaggtctacatcaccgccattactacaattggtggaaacactgctgtgatggcaaactacttccatgtagccttgaccgggtcggcctggacctagctcatgaacctcac

SEQ ID NO: 21642 - DNA, 599 bp, Zea Mays
cctcaatatccagagaagacaagggtctctgcgcaaatatttctaagacatagagcacagcaatgcaagacggcgggtttatttctgataactctaagggttgctctataaattgtcatggctgaaagggtatcggtgatcacggaccgttggatccaaaccgagcgtcccggataccgtttgatcgcgcatcaacggctcggattcaattaaacttgatctactctcgtccaatcatttccaatcctacggtcccagttaaatcgtgcgaaaaggtatgcgcaaagcaaacgtagtcgttcaagaaccgatcgacgacactcggtctttcttctacccccagccagccgaacagcggcggcgcggcgacaaccgcggtggggtgctgatcggcgaaccccggacgggttccctagtgccccaagatcgtcatagagggaccctacgaaaagcggagacaaacgcgaaatcactggagggatccttactcgggatgtcggtgaaggtggtgctgcccacgacgatgcgcacgatggggattccctccggtgttcctcgcagcgaacacccgcacaccaccggacgtcaagacgaaactc

SEQ ID NO: 21643 - DNA, 596 bp, Zea Mays
ctcggagagccgcgcttccatcaggcgcatttcctcgagcacctgacggttactggcgtcggtgtactccatagctgcggtggtggcacgagtacgccgtggacagttgttactgggatccagagtgcctgagtctgataccaaattgttagcgcgtggtggagaagggagcagcagagggaagaatcagaggtagaagaagaagactggggaggaggcggcggccagaacagccagccaccagaggtagtatattatcttcttctgtttcatcatgctctcgatcgttcctagggtctgattatttataccacttcattacaatacggcccatccagccttacacggcccattccggcccagaaactctcacgttccggcgtttcacccgtggcgtccgtgtagcagctccttcctctggctcgccaccagctttgttgtctgctcccacgttgtcttgggtgtcggtgctgacagatcgctagacgccagagctactcgttcgcgcttcacagaggttgttggcactctcgtctccgccaacaagagcataactgccatccttcagacttgcccagcgcagcttcctatccttc

SEQ ID NO: 21644 - DNA, 408 bp, Zea Mays
ggccccaacgatctagtattaaatatatacaacattgagcagtaaatgttgcggcggacaaagatcttctcctcggtcgccgtgtggatcctctgactatgtgtgtcttctgccatgtttgtcagctcgagccagccgcggagtaaccttgtatgctgatgtatgtagggaccgcccctgctgacgtgcgtggagttaatgcgatggatgtcgcacgctctgctcgagctaacaaccgctcatgatggcggcgccaacacgcgcggcgtagtgacacaactgccagtctcggtatcacacagtgcattgtgttagccctacacgtgacactaacacacaactacccacatcgataatgcgtggagcagtcattcgtgcctgcatggcctgacaaaagcctacatacat

SEQ ID NO: 21645 - DNA, 595 bp, Zea Mays
cagagagctgccgtatgttgtttgtagcctgagaactcaacctagtcgagctctgcatggaaacacacctttcttcatggtctatggtttggaggcagtgctacctgctggtctcaagttcggggcatcgaggttaatctttgaaaacatagcagaagctgaagctactaggctggaggatgttgatgtactcgaataagagcgactgaatacggtgattcaatcagcacggtatcagcaaactctgaggcgctatcatgataaggccatacggcatcgatccttcgcagtgggagatctcgtcctccgccgaattctaacgggggagggacggcacaaattgtcacctctatgggaaggaccattcatagtacaagaagtcactcggccgggatcatatcgtctcactcagatggacggcacggaaattgggaactcatggaacatagaacacctcaggaaattttacccctagctatatctcaaaggctgccgggatgccaatgaactctgtaagctgagaaatgtatcatcaataaaaagacttcaaaggcactcgaattctttaactgtcaatctgtgtactcgcctagct

SEQ ID NO: 21646 - DNA, 464 bp, Zea Mays
caagaacaaagaaccgggagcagcaggaagcgctcaccatgttgcgccgccatgatgctgaggcggagagggagaaggcaagcatggtgtcgtcacgcatggccggctagaggtggtcaaacacaaggtggttgcggtacaccgaaccaggctgagcgtgagagggcgtgttcgtgaggttggggagggtgtaagaccctcgacaactccagattacacctctatagctaagcactctgacaagcacgaatttggggatagcgagcaccgctccagtgctctcctcctctcacgaagatccagaattatcaggggaaatcagagtgcagggaacaggtagtgattacaaggatcgagcgtagggctctgtctcccgattaccggacgcagccgggttcagtcttccgttcaccgacagcgaaaaccctccctcccccgatggctaaaatacaagactgtttcac

SEQ ID NO: 21647 - DNA, 905 bp, Zea Mays
aggttttgatgttttttctctcgatgcttcactgctcagtccactctccacctgagccattcgattctcttccctagcgcaagcccactcgtggctcactcgcttcttcggtcatcgactgaccagtaagttggtgacctaacccacccactgcagcgccaccttgccttctcatcactcgtcagctcgtcgcgatcctgcacacaacactgatactttgcctcctagtccacaccagcagatgggcaagctgttgttgggaccgtggcatcacctatacctcgctaacttattagggtcccaccacgccgttgcaacacggcaatggttgtcgcttgccgtcaccgtcatctatcgctacctcgcctcctgcactcgctcctcccacctgtcgtcgtctcaccgacgccatctcacgtcaaattcgatgactcaccacaactacgcgtcgatacggctgctccaccccaacgcctcgtcctcagccagtccacctattttctctctctagctctcctttaggtagccaaaaaggtcttttttggtattcatatcattttgtaaaaactagatgttatcatttaacattcatgttattatcatcaatctacatttaactagtagtctagtccgataatttgtcttttgcactgtcggccccacctagaattttgttctgcgtccgccacagggttcagctctggggtatgtatatgtagcccagaagttaaaacagaagcatccaacgtccaaacccgaatttccttacttgcataacaaggaatcaaaacaagatctccaatagtttaagcatttaatggcgagacccagagaatgacgctgcaaatggcctaaaggcttcgagcaactaccaaaattcaatagcacacaaaaataaggacatg

SEQ ID NO: 21648 - DNA, 491 bp, Zea Mays
gattgttgttgttgttgaggcaatagacagttcggtcatgtagtttgttcttttaattatattagtcggttacataagattgtcttctaaactcgtcagaaaatttaggcacaatttttttagcactttgccatgacccatgatcccctcccctagcattaatttgtttgcagaaagatgagatgtgcgcgctgtactagttgggtacacatggaagcgcgcgccactgtgactgtgagtctcaggacggacgatgatcactctccattaattcaatagggaccatggtttgctttgtcttgtctctaacgaatgcatccacggaaggacggaccaaccacttgcattcgacagcatgcgcatgcgatctcgtcgggtactgaagtagcgtccacgcctcctgcccccgcaatcacttccacctccctgctctgctttgctgtttgcatcgcatcgcgtcgcctttgctgaatcccagcgacggacgggcc

SEQ ID NO: 21649 - DNA, 312 bp, Zea Mays
gctcctgaatcgaaaagcatagtagcgggagtaaattcaacaaggaactcaccgagcactactcccggagcttactgagcctcctgagcatcgacgtgatttactcgtgcccttccttgatactggttcttgttctgctggctgatggaggagggcgtcttgggggcaggtgcggaggtattcttggggccattcaccgagttggagtaagcaggtcctgatggcttcagctggggacagttgttcttgaagtgactgggatctccgcagtgccaacatgcatttgctggtggttggttgcttgcaactaag

SEQ ID NO: 21650 - DNA, 577 bp, Zea Mays
gtcctatcgggatttgaggcggtgacgaggccggtcgacggtgaaccacggttccgagaccaagcccgactctggcgagaaatttgcccaactcctctcggcttccccggactttatctgcaacggtcatgatccgcgtaactttgcgagttgccaagacctcctgtagaccccagaacgcgcggcggaagagcgaatctacggcggcagcctgacttggccttttgcgtcggtggagaaggtgtgaggtttgtatggtcgctggctcaaaaggggtgagaaggtgaggatgcgctggtacttatgcaggggaagaccaaagccacatctgggatctcggagcaccctccccacgttcaaccaccatgccctgccattgtcacgttctgttgcgccggcccgaaaggatgtagctgaggagctggtcccgcatgtcattgactgggatcaacacgcacgcgcgtgtggacggcctgccatcgggacccacccgacggtgtccgagagagagggagaggcattgtgtggctgctcagtgtgcccgctgggtcggcgcgtgcgggcgcgagaaggggtg

SEQ ID NO: 21651 - DNA, 419 bp, Zea Mays
tacagtatatagataaggaagtggaagaagcccagcgtatcgtgatatggattggcttttggggctccctgcccatattggtaaaactagttggccgttcgtgcttctggatgaaccttgtgtttgcaatcgggaattatagcagcacgtgcccatctacaatcagttcacagtgcacactatgcctacctgtactgcacgcttgtggatttctgtatgccgcgccatgtgcttcggctgacatttgatggaagaaaatggcgaaaccacttgtgattcctcaggccaggtgatcgaggttaaaaacgaagaactgtatttgatgtgagatgggccaatcagccgacattcgttgtatgacttggattgggtttctcaaatgtttctgtaccccagtagttctatttctacttttttgg

SEQ ID NO: 21652 - DNA, 955 bp, Zea Mays
ctaaatataagatttcccgagactcagattactgctacatggactgcaggttgaatctcaataaacccaggggttctttaataaaaagccaaggccgaaggggtattcgtggatctgggccgtcgggatccgaaacgaggcgcccagattagatcaagttatacgcgaaactgtatgcgacgacaggcgtaggatgcgagatctacggctgagattttatgcgcgatggggtatggttgcaagtaacctggagcgtcgatcagagaatcaacggcgcaaaacccaccatccccagatctaatcgtatccgtctccggccagatcaacggctgaaatctccccacgcccggatctaatcataaccgttggcgtcaacatcagcggccagggaccttcttcaacctcacgacgccaggctgagacggcgttcaccccagcgaaccagcgccccggacccctggcagtacttcggtgctcgattcctagcgaatccaggtgctaatcatcgcggtaaccatgggaagacgcgagcgaggcctcaccgagacttggagcgcagatccactcgcccgcggtgatgcaagattccatgacgagtccgaccgacggtggcgctgaccctctcttccttgcggcagacctgcccacggtcagggcgagatcttggccagacacaacgcgacacgtgatgctctcagcggtgctcgacgacgatgggaagcagggtcgagttgcgtacgaggggaaggagtcgctgccatacatatactctaaacgagaggcctagcctacagtatgaagttcggatccggagttgcaggggcggccggtgacttaccacggcagaaaccgcggacggcacaggagtttgttagcagcaagcgaacggatcccaaccattacgcccgagttccacggatccctcttccttcgcatacggcggcggcggcgatga

SEQ ID NO: 21653 - DNA, 591 bp, Zea Mays
tctagccagaatctggacttatctccacacttagttgtggtttgtctgcctttcaggtagaaagctctgattttcatcaagtctttccatacaggggagtcagagtttctcacttttatattgtataagtcttttccatgaaagtatttcttgacaattatcttttgccaaagactcgattcattttcaatcttccaccaccatttacaaagaaggcttatgtttaaagcttcaagatttttaatgcccaaacctccatttttctttgtgtgacaaactttgttccaatttaccaagtgatacttttttttctccaccaccttgccaaagaaatcttcttcttttggcatctagctttttaatagtagtttttggaagaagatacatggacatatgataaataggtgaattagtcaagcaagcatcaataagggtaattctcccagccatggataggcaatttcctttccatgtttcaagtctcttatcaaatttttcttcaagcccaatccagtctgcaatgcgaagtctattggggttcacagggacacctaagtatttcataggcaaagtaccaatctggcatttgaa

SEQ ID NO: 21654 - DNA, 303 bp, Zea Mays
tatgagctgatggttattatgcatgcacaagtattagaccagtataaagatgcatgtacctcttcatcaagcaaaacaagatcagtatgcaggagcctactgtcatcctgaggatgaaggaattcccaaagcctagagacacgcacacacaggctgtgggagcagtctccaaccataaggctaggaatgagtatgtcccccatctgcagtaaagaaacagtggtcagtcatttccagcgaaataagcaaccaacaaacattacactcaatgttgataagggcagtatggccacccaaaaaaaa

SEQ ID NO: 21655 - DNA, 969 bp, Zea Mays
aaaactcctagacgtttctgggctgaggctatcaacgccgcctgctatgttgctaatcgcatttttctgagagcttttctgggaaaacatcttatgagttgagatttggtcggcctcccaaagtttctcactttcgagtctttggctgcaagtgttttatattgaaaaagggaaatttggataaatttgaatcgcgctcttctgatgggttatttttggggtatgccttgcaagggcgagcgtaccgtgtgcttaatcttgctactaaccgcatcgaggagacatgtgaggtcaccttcgacgagacaatgtcttgtttctcttcagtttttgagtgtgcaggtgatgatgagattgggcagaatatttttgaggaagagaaagaggaatacagatgtgatgacgacgatgatgatacccagcctgtagcgcaggaggagcctgacgcgcagactgagcaggagccctccacttctttggaagatggaccatcgccgacacgtacatccacagcagagcccgcagcttcaccgactgttgatcatgtaccggctgtagttgagggggaggcgatttcagaacgtacagcaccacgacacattcaggatcgtcatcctcccaagaacataataggtaatttggatgagcgcacaacaaggaacagaggtatgaaaaataaaaattactgtgtcttcgcgcatactgcttttgttgcctcttttgaaccccgagatgttggacatgctttatctgattctaactgggtcaatgccatgcatgaggagttagaaaattttgaacggaatcaggtttgggtttttgttgatcctccaccttcttgtaaaccaattgggactaaatgggtttttaagaacaaacaaggggaagatggtcatgttgttaggaataaagctaggctggttgctcagggtttttctcaaaaagagggtattgattatggtgaaactt

SEQ ID NO: 21656 - DNA, 736 bp, Zea Mays
gccggcactgagagcaataggaggctaaagacaagctagaacaagagaaaaatgggcgagtactgacccgaggagggctgcccacgaagaggtcggtggcgctaagaactgtgaggaggagattatggcctatctgagtccctaggtggaattgggtattttgcgcaagcactcgtgtgtgtgatgtggtgaagaagcaacgctcaggctcaatttatagggggttggccggaggtggatgagatttaaagattttccagtgcgctggcgagctcacccgcgcggccagagccacgacaagcgtccggtgaacaccgattaactggacagcgccacgtcgcggaagatttttaccgcggccacagtccgatcctcagccgcggtggcgatcttatccccgacaagatttgctgaactacggcgaacagtacgcctgccaggccgaattcaaatggctattgcttcaaattttatgtggttgcttgcaaacgaatctgcatcaaagttgtacctggactaatgttctttcattttggtataacgaccatgtcaaaaatcctcacggattaatcaggccaggacgctcaagttggcgcaacaacactgaaccctgacctagatcagatgcagtgattaaatacctatcaggccgactgacggcgccttttcaacctcatatatctcccatttttgtgtaacactagtgtttgattacttaagcaaatttgttctccat

SEQ ID NO: 21657 - DNA, 663 bp, Zea Mays
agcagcctttgccatcgtgagttcctcaagagccaggtcatcgtggacctgcagaaaactaggaagtgggttggtgcggcgcagatgcagaccgagagcatggaagcgctcgttaaggcctctgacaatgttaaggactaaagtccggtcagaaacaggttcgctgagatcacgcagatcttcggcgagtttattgtagcggcgacagtattcggcgacgcggagatcgcctcgggagaaggaccgaaattcttggtcggcataaagagcacgtgtggtgcgatttccaagaaactgggactctatagagagccagagggtgcgggcagaggcgccgcgctgagaaatgatgccagcgagggcattggaaagagtgccaagaagccaagtgcggatgacggcattcatgcgaacccaatcgggtgactcgggaaaaacagaatcggagaggatgtggcactccaaggagaatttggtgagggtgagaaggaaagattcacaccagcgggcgtagaaggtggagttggtgtcaaggagtagtggaacaagagcccggatgttggttactgcaacagcctgggcatgaaggtttagcagcgcggctgcctcgtggtggagaagagcagcatgaagaggtgcaggtgggatgtcgtcggcggcggc

SEQ ID NO: 21658 - DNA, 597 bp, Zea Mays
gtgtgtacttttagtggcacaagagacctagttcaagaacacatcgcctacagagtatggctgcttgtgaatgaatgggagatgtcgaaggaggctactgccaggtctagtcagggcggcttggtctatttaaaatatactttcagatatagaggcaggtttgatgagccaaatgatgaatggttaagtagtattgaggcaaccagtgacgaattgcttggggcctacacaagggccgaagatgatgcaatggcattggccttcgaaggtcgaggcaagaaaagattgaatagagtttttgacgtcattggtttcgtatatcctgattattgctattcctcgcgaaagcagagaaagaaaaggaaaactgttgcttcgtctatctctgttgtgccgaagggcaaaaagattaaggtcttaacacaccggctgagatacattgagacggccacagtgccgaagcttggtgaagggacatctctcgctgtcaaagcagagcaacctgctcccaccatccctggggaagacctaactatattgccgaaggttcctgcagccggtccagccgaaacgccaaaacatgatgccgaaacgaaa

SEQ ID NO: 21659 - DNA, 663 bp, Zea Mays
gtggaaagaatagacagccataaggaggacctaattggaacaaaggcaagacaggagtagacaacaaggtcatacaccgctgaccactcaatagcgacctctcttttgccaatcatctctaggaggtgcttaccatcctccatctcggtcatctcaaaatggaggtcatcaaaaaagacaaaggaggggctagacatagtcagcgccatggttgagtcattgctacaccatgagagcgcatcaacggtcatgttggctttttccagaaagcactcaacaaaagtcacatccaaacaactttctcacccaggtatgttgtgaaatggtggagaggcattgatctagcaagaattttagtgcgtggtgctttgtttgcaccataaaaggacacatctagatgtagggccgctagtgccacaccgccttgaccaatctaatgagctctcttttgtatgaggccaatttggagtattgtgggtgatgggtcaattgtagaaggcaatgaggctaacatattgatggatcatgacaccaaagctaatgttggaggcattgtggtggacgatgaacacgacattgatgtccagaagctatagaggaggcccaacgactagggtctgcttgagggtgtcgaaggcccaccaccaaccctaccaccgcctg

SEQ ID NO: 21660 - DNA, 591 bp, Zea Mays
tatgcagagtgcccatgggttcctccctccgagacaaggcgtctgcagcaccattcaacttgcctggacgatattctacagtcaaatcatagccaaataatttactgacccatgtgtgttggggaatggtggagagccgctggtccaggataaacttcaaattgtaatgatcagtgcgcactgtaaaggcacgcccccagagatatgggcgccaattacgcacgaccttgacaagaccgatcagctcgcgctcataagcggacaacttctggtgatgtggcgcaactgctcggctgaagaaggcaattgcaccatcaccttgatggagcacggcgccgaaccccacccctgaagcatcacagtccatgaagcgcttggagaagtccagcatttggaggagtggcgccgtcatcagtgagtgtttgagttgcaagaacgctgcatccgcggcgtccgaccagcgaaaggcctctttcttcaagagggctattagcggggcagccaccacgccatagcccgctatgaatttgcggtagtagccggtgaggccaatgaagccccgcagcgcccggagagactgcggtcgcagcc

SEQ ID NO: 21661 - DNA, 610 bp, Zea Mays
tcgtgatcttggtggagaacaaatttttgttgttggcatggaggagcctgggtcactgatgtaggctcaacaagaactatgttggtgtcgggcaatgggggaggaattgggtgccatcaaggagaatgattcctggacactcatggagcgcacacctaggaggcatggtattaggctcatgtgggccttcaaggtcaaaagggatgagcatgggcagtggtgcgacataaggtgcaacttgtcgcgaaggcatatgcacaacatcatacgatcgactacaacaaggtctacgctcctgtggcgatgcgacataaggcgcaacttgtcgtgaaggcatatgcacaacgtcatgggttcgactacgacaaggtctacgctcctgtggcgtgtatggaggttgtgcacttgctgttggtcttagctacacaagaaggatggcaagtccaccatatggatgtcaaaatagcatttctgaatagtaacctttaggaggaggtgaatgtgcaacaggcgccaggatttgcccaacctaataaggaacacaaggtatacaaacttcacaaggctttatatggtttacagcaagccgctcgtgcctagaatcaaaagt

SEQ ID NO: 21662 - DNA, 340 bp, Zea Mays
aaaaaccccgcgcggcccacattcactctccctcgcgcgcggcccagtttcccctgtgtctgcttgcgctcacccggtgtcacttcctggtgggtcccgcaggtcagggcgagtcttcttctcccctagctgaagcagcgaccgcggtggactagatgctcaacgaaccgagcgattctctcgcttcggccgaactcccactgcaacggcctccccgtacccgccgcacgaatctgcggacccagctcctcttgaacctccccataagaatcacaggctcggcattcttctctactcttacctccttctcccatcgcgagctatccgaacgccgccccgc

SEQ ID NO: 21663 - DNA, 540 bp, Zea Mays
gacaatttgtgatcgtgcgtggactgtccgaccgtgcctagatccgatctaccatgcagtgaggatggtgactgcattttccccggatatgaattcatcgacataccataatatggctgggactgagaagccccatttgttgtcgatgtttttgacgcagttattttagtgcccaatttatgtgacaaaaaatcaggtgtatgagtattttctaatacatgggtcatattctctatatgctccattataattttaatctgattatcaaaagaaattttaacatattgaatatcggctaatggtgtggtgttacttagaatggggagctgatgcaacaaggctgccagtgaatcgtactttacttccttctccttgacgaccttctggtggtgatttaccttgaagtgcgagaggtaccattttttcgccaccttgcttaactgagcctgttgtcgttggaattccttgtccagcctttttatgtggttttctaatttctcatcctcagcgaccggcgagttagtcagccttatgttcatg

SEQ ID NO: 21664 - DNA, 531 bp, Zea Mays
tggacgcgctcgcgctcttcaccaagagcagcgcgacgccgtcggccggaggcggatcaggggttcctgatcattaccaccacggcgtcaccatgggagggttcaacttcaacccgttcgatgatttcgacccaccgccgccggcggcggcagcggaaggtgagacggggagcggcggcggcggcagccatggtttcttctcctccttcgccaccggggacaagtacggccgccactagctagtacgtaacccatctctctcgtgctgtctggtaattcagctagcgtgtgcgtgcgtgtctgtgctcatgagagagtttgtgtggagaatggagagagagagattgagaaacacaagcaacaaattctacttcggccactgctgctatactgttttgcattataagtatttagcaagctgcataattgtgagttttccatttcttggttttgggatatggcgatgccttattatgtacatacataaatctgagttctctttgattaattccaagctcattttgtttggcg

SEQ ID NO: 21665 - DNA, 373 bp, Zea Mays
caacactcagggcccgcaacgaccgtgtaccttcaaaccacgacgaccagagataggtacgtggaaaactaatacggcaaaggcagctggccgactggtaagatctggcccgacctttagccagttattgtctaaatatgtaaaaaagaaggccggcccaagtgaccggccagcaaaagcatcaacaggtaagaccgattggaccacctcactaatcggaaagaatggaaggtcatactgttcagttaaggtctaacatacccgcatggacacctccactcccatatctacctatgccatatccatatacatacataccaccaccatacgccccgagtcacatgtggaacatgccacaatatccattagggat

SEQ ID NO: 21666 - DNA, 533 bp, Zea Mays
caagagcagacctgggagtggctggccacggagtgtggaggattttcgctcgctggtgactgaaaggggaaaaacggcgtcgcgacgggtcctggtggaattaggaggtgaggttggggctacacgatcgcaaaggactatggtttcaccgtgcactaccaattttgggagaggtggagaagattccacgaatttggggttcaaccgagctcactagcgaagatatgaatacctcgccgtgggtggcggggctatttaaaggcgtggtggtccggctagcgatccacgaccgcggattacatcattcgtgcatggttaccacgtaaagaagggacacagtgagggaggagcgaggcatgggtgacacggcggaaatgaccgagccacggtggccaccggtgaattatctctgactaggctcaggctaggtccgcgagatcgcgacacgtccaaagctacctccccgcgaatatccacggcgtgccaagcacgaatcacggcgaccggcacgaattcgggcacgtggatcaccg

SEQ ID NO: 21667 - DNA, 523 bp, Zea Mays
tacgtgcacaaattcacagagttggctcgttacgcgcctgacgatgtcagcacagaaaccaagaagatggcccgttttctgaaagggctaagaccagaactcaagaccatccttgccagccaagatttccttagcttctcgcacctctccaacaaagccatacaagtggaaagggcaaaaaaagaagaaaaaggtcacctcaagaggaaattccaagttctccgagctcagcagcaagaccgacaccagagagctcgatccttcgggcttccacccaagggaccaagcttcaatagaccagctggacccactccatcacgttttagctagcagagtcagagttcctttcaggccccctcggttgcaagcaaccaaccgccagcaaatgcctgttggcactgcggagaccccagtcactacaagaataactgcccccagttgaaggcacccggacctacctactccaactcggtgaatggccccaagaatacctcggcacctgcctccaaggcactcccctcca

SEQ ID NO: 21668 - DNA, 489 bp, Zea Mays
taagacacagaccaccttgcgcaatggaccgcaggttcattcactaaaagtccgagggctctttaacaaaagtgatccacgaaggagtatggagcgttaatggtcgtccgatcaaaactcaatagcgcagaccgaatgcggcgaagggttacgcgtcgttctaatctgaaccgtatgttacagattcgatggttacgacgctcctctgatctccaccgtccagcagtcgatctatgactctggagtcgtcctcctcccccggtatagctagctagcgtcgcagagcaccgcggtggggctctccaccggcgcatgcacacggcgcgccccgacgctccagaacttccaccagcgacgaggaacgccaccagttgttcccccgccacagttagaatccctacggctccgacacagcccattgctatacaccgagcggccccaggttctacctcggccacgcacgaaatgaatacgaggggagagaaagtg

SEQ ID NO: 21669 - DNA, 582 bp, Zea Mays
gtttgcttcagcccaaatgatcttggttaagctaaggataactggataaagggcgttttgggcacccttacaaaataactgaacacagcctgagttatccagcacgtgaaaaaatgggctttctggtgatagtttccatttgagttgtcgcctgtcgaaactctcaattaggccacaaagaattctatgaagacaaacacatcagttgatacggctgggatccctaccggagatgcttcggagattgtacggatgagacacggagggctgaggcggtgcacggcacaggggcaccgtggctgatctcgagagagatgagagagagagagagagagagttggtggctagggttcgccctgcttcctgagggaagcgggcaatggtaattgcttctgcttaattccattggatagcatttacaagtatttatttcccctactaatccttatcctgatctaggagatctaatctgggatcccctctaatccttatccaactaacttgatccacctaatccttatctcctactgctgccctgcgcctataatggcgcccagtcataacatcagtatttcacaaagc

SEQ ID NO: 21670 - DNA, 461 bp, Zea Mays
tagttagtctcgatggcccggagttacccaaccactaaagaagtattgccacaacttctagtgggggtcaatccccaggaacacctcgcacagtgtgatgaagcatgccatgtgtaggacagagttgggatgaagagcagcttgtagaagaagagcagcccccgcatgaaggggtgtagggggagcccaaacctgcgctcgtagaagggcacgagcacgacaacctcctcatcctgggggcacggcacaccaccctcctccaatctccaccgcgagattcccttggggggagaaacaatttcttctccaggccgaggaagcgactatcctggatcgagcagactgggaacaacaccattcacacgaaactagtaaggcgggcgtgagggcgtaaggagctacaaaccaacggaaagcttccagtagaaggaagaaagcaagcgctcgagtgcaaagaaaca

SEQ ID NO: 21671 - DNA, 457 bp, Zea Mays
tggggatataacagtacttagggacccactacctctcgtggttacatataaatacccctaccctatacatggatgggacacgcatatataacaagacattacagttccctgcctactgcctcgttgtgcacctgaatcctcttgtctcctgagtgttgggcccacctgaccacgtgtccaacatattgatcgcatttcatgaactcttcaggctgttgccatcgaagattcaatggagaggaacaaacatctcggggcgtgctcgcccttaggcaccgttgatgttttgaccgagaccgtcggtactctagtcgttcttcaggatttgtgcgaaccagtcgtgcctatgatggccgttgaacctgccccaggacggttatgtcatgctcctttaattcatctgcgttccccctgtcctgatgccaccttctattttgggtttttccagggctttgat

SEQ ID NO: 21672 - DNA, 478 bp, Zea Mays
gcgatcttctccagcttcacctggaacaacactggtcttactttctccacgtggatgtagggggagatgtatgtactccgtgttgtgcagctgctgccgataagtgtggttgacggaccacatagctcttttagcagcattgctcaccgaagcagcataggtagacagtgacatcagagactcatgggctgatagagtcctaaaacctctgtctcctgcatccatcactctgatatgcacccgagtgaggtagtaacaagcccgaggaggctcagacactcgccttgtgtcatatagaggtcgaacataggttgctagagcatgcagtacattatgtagcatgtttgggaagtgtcccatctcgaacattgaggtgtaatgcttagtgacaggccatatcccaacaaagttgtcctcctgctcatcgttggcttcttcattgttgttttcttcttcttctgcctcatcgtcatcatct

SEQ ID NO: 21673 - DNA, 743 bp, Zea Mays
atgtgttcgacctgagctgagtgcgctctgaccacgacgtgcatgccacgagctccgatcggctcaccgtcgttcccgtgcccaagccctcgcccataagaagccccagccctcggccttgccctcccgcatgccccatacccttttaccggtgagtgaacttcggtaatcgccagaacaccgagcacggtgtcgcccgcaaacttgccgacgcgtcgaccaccgtagaccagccactctagcccaaccctatccaatctagtctcccggccagcttccctagaggctagcaaagcttcctagccactcggaccgaacagaacctccccagagaagccataacacctcgccggacttgttccgtccgctggctccctcggaccaggtaatctaaccgtccattcttcgattccttgcgcacgcacactccccaccacctagtgaacctccctgtgtggtctgattgagttctaccgccgttgtatggccgatacatgttgcgccgacaagcttcgtagcctagattcgtggatagactagctccggtcaccagagacgctgaccagtacctcgacgtgaccgccagagactctccatcctcgttcgacccttcaccggaaacctaccaatgctagtaagccgctccgccgtcttcttcgccgcagttactgtgtaacctagtcagggaccgcggcttagaggctaagaaaacccaggggttatgcgcaaaggactagactcag

SEQ ID NO: 21674 - DNA, 645 bp, Zea Mays
ttccggataacggtcgacggtgaaaagatcgtgtgcatgcatcatcttggggcactgtttggccttgtcgccgtacccacttgcaccggcgatgtggccgcgcgaccgtctctgcagtgccaccgtttctcacagttacgccacgctttcggtcgtttcaccatgttgtcgcaagccgtgaaggttagccagtgacagtcgtaagtccttgtcctataaatgccacgatagcgttcgccggtgactcacctctctctcctgtcgctagctttcctcttcaaaattcggagccaccgttggcggtggctataaattgagtgcacaggcggctctgttatcttatcacgaatctagagcacccactcccgcctccgattagccatcatagcgccctaattctgttattccccccaaatcggtcgtttgtgccaccgtgtgtcactccaccgtggccagtcgctctcaggtccgccctcgccctccttgtccgtgtttcagcactcttgtatgcttgtgatgctcgttggctcaaccaattaagctataccacaccagatcactagggacacatcgggaatgtctcaaacttcgcgggtatacgtgaactgagctctagggtggcgttcgagttaaattagtgattcc

SEQ ID NO: 21675 - DNA, 825 bp, Zea Mays
aaaatttggttcacatggattacatgcgattggaatttttttacgctgcattgtagtattgtttcccaaactatgttttcgttgttttgttaggagatttcacaattttgagtccgcatactaagcttttttttaaacgatggtgcacatttattgatatatggtaacgttgtttccaacttctttactacaagtaggaagcaatgcttccaatttaccttgtcgtaaagattcccaagtgttgatgatggttaatgggaatttaatggaaacgaaaaacttggttgattattgatagaaaggattttcataaggtggtgttgtcaaacttgcttgatttgcttgattttgtcgaccttaatggtgaggtttctattcaaaggcattttttctgtaatccatgaatccatcactaatgtgagcgcctgtggtctgttccttgtaagccataggatgcccagatctatcttgttagcattctattcaagtagttttagctccatctgtcatagtttgcagttaagtgcagagggtggttcaagactaattattcagctctgcacatgtccagttggcagcattgcgtgttagtagctttgaattatttggccagctcattcagttcatccttgcctgcattgttaggtttgtacaattggcattagttcggggtgggttgtggttgatcagcccactatgggactgagagttgttggctaatttagacaagaggacagctagtctttactgctggtttctcttttcttaaatgctgaaaatatgctgtttccttaaaagttactctttacagttgtctcctataat

SEQ ID NO: 21676 - DNA, 590 bp, Zea Mays
cggacacttaccagggacacatacccacggtcgggacgcatcgggggctggctgagggcgccagcatccagcctccctaccgtacccgctacccgcctgaggaggtcgtcggtggagagggaggtcgaggacatccgcgaaccctctagatcgacccccggcttcatctctgaaagccgcaactaccgctctgccaaggggagcaccctccgacgatgtatagcggcgacgacccccgcagcggtaaggcccgcggcttgtagcttctgcaaggcacggagaatgggttggagcttctcctggttctcgcgtgtgccccccaacgccagttatcaccggcgacggtcaccactcgttgagaaaacggcggaagcatcccgtcgtcgttccggagataaaaccactagttctgccacccctttttcgaagatacaagggaggtggggatgtactgcgctgcccgccccgacctcagctggagggtgcagcagctagcccgcaccgccatacggaccttcttcacgtccgtcgacgcgacgaagaactccgcggagaagagatgggtccacaggtcccagtgggggtcaatc

SEQ ID NO: 21677 - DNA, 447 bp, Zea Mays
gtatcctcaagcaaggccgattcgacagaagctacatcgtttcacgcctgataaaagagaagctattcatgccgagttagcccgcttagtgtctgcagggttcattagggaagtactgcacctcgagtggctagtgaatcctgttcttgtactaaaaaagaataaagtggattggcgcatgtgcgtcgactatactgatctcaacaagcattgtccgaaggatcccttcgagctccctagaatagatcagctagttgacttgactgctggttgttctatgctctccttcctagactgctattctagatatcatcatatcagcttagcaaaagaagatgaggagaagactggtttcattaccctgtttggtgctttctgttatacctccataccgttcagcctcaagaacactggagcgacttacaagagagacatctagacatgctt

SEQ ID NO: 21678 - DNA, 437 bp, Zea Mays
aatccatcccttagattgtcgccattagtggatcgggtgcctgcgcggagagggtctgcggggtccctacgccgccaccaatcgcatgagccccttccggattcctcgccaaccgactcttaacctcgagtatacaacccgaggccgtgaccccctcgtcctcgctcgcaagcccctgttcgccgaaatccccgtgcccactaccaccattgttgtggatagatagtcaccgtcgtgagcctgctcggtcgccgtcaagaaggcatcatcaaccaccctggggttttccgtgggacacaaaaaaggtgtccgcgctgtcgctgggccagttcagcggccagagtcgaactaattgctcaccggagaacccactccgtcttgttgccgcatcctgccaagggcatcatcgaatccttcgctgccgcctataagatacc

SEQ ID NO: 21679 - DNA, 528 bp, Zea Mays
gaatgcataaaaaatttgagaaacaaaaagacatgtcgcaagggcctccactgctgcccatctgccattgcggaaggctgtcgagtgcacacaacatctttatatggtctgcatccccacacatttccatgaattgaatgtgtcaacatatttcgtttgtaaagcacacaacaaattttgtaaagaagcacatggcagatctacatgtccatggtctgcgtctcgcagtggagacaaaactatagtgatgtatgcagttgttgggaatgctaaagttttaaaattctccaataatctaccttgcacaagcgaaaattcccaatatacatatctatagcgttggagggggagaagaaagagagattaatacctgtaatatgtcttgctaatgaagtggtgatgatgtcttcttccttgagcgcaactgcacgcacccctgctggagctagtggctaccggtacagcacccacccagacctcagcacgtgtgccgtccttatccaaatatcgcccttgtgcccacaccgg

SEQ ID NO: 21680 - DNA, 530 bp, Zea Mays
tgctctgccctggtactgggtcctgctctgctaactgttggaggggagtgccttggaggcaggtgccgaggtattcttggggccattcaccgagttggagtaggtaggtccgggtgccttcaactgggggtagttattcttgaagtgactggggtctccgcagtgccaacaggcatttgctggcggttggttgcttgcaaccgagggggcctgaaaggagctctgactctgctgactgtaacgtgacagagtgggtccagctagtctattgaagcttggtcccttgggtggaagcccgaaggatcgagctctctggtgatggtcttgctgctgagctcggagaacttggaatttcctcttgagatgccctttttcttcctcttttgccctttccacttgtatggctttgttggagaggtgcgagaagctgaggaaatcttggctggcgaggatggtcttgagttctggtcttagccctttcagaaaacgggccatcttcttggtttcggtgctgacgtcgtcaggtgcgt

SEQ ID NO: 21681 - DNA, 1192 bp, Zea Mays
ggatttctggagctttcgaaacgtttacgagtattaaatatgaattttagtttttatgaaattattttaatccctaaaattcatatttatggaaactaaaatattctgaaaaactgattaaatatacatatatatctcttccttttgacgagcccgttctagatcaggtgtccttttcgtgagatcgtcaaactgcattttctccttgcaaatatcgtgttgctcgtgtctaccccgtcatctatccagaccactatccctgtctacccccgtctaccccatcaaccaccttaccgcgccgcgcaacaacccacacaactgcctccttgtaccctccgctatatatatatgcacaccccagctcccacttacatcatcgtcagtgccagcaccgcgtttgcttcactgtaccacggggcccacctgccagtggcacaccagcgcccactcttcatccctcccagaaaccgtctgtttcgcctaagccggccataatgtgacacacccgttaaccacccacttccttgcccatttataaatcacctgttctccactctcccaattccataaggtgctacccaactctggctcaacaaccgcagcaccctgtgccttctcctctgtgttgagcgcacgactgctattcatccccatgcctccctgttaagtggctagctggaaagcagtcgccctccaggactgtgccccagtgcagctgctacttccggtaggcctcggtgttcggtcgtgctttgacaagtctcgcgcctccgacaaacctcgcgtccgtcgtgtccttgcctctatgtcgtttgacatgcataggtgagaatcctctacctttcaatctccctctctccatattacaatgttgcgctgcttcgagccgtcctggtcgctggcgtgcctccccgactagcaagggactgccggcccaatagtccatgttccagcccaactatatgatgacttgtgctacaaaggagcaaggaaggagaggaacacgggaggaaattattttcagataacacaagagctccttcctccagaagccacctcctctactattcttcttcttcttcttcctctacacagtgatcttcttcctgcagatctcctcatgaatatctagccctcttggactcccttgcttctctacatatcccaaactctatttcacctcatatttgta

SEQ ID NO: 21682 - DNA, 574 bp, Zea Mays
ttgcggcaaggcaagggaaaccttggcaccgggctgatggcggaagcaggggcgcgacagaggagctcggccgttggagggagctcgccctggggaacagggagagctggtcgtgcagccctggcagggagcccccaccgtggatgaacgacacccgcccagccatgggagagtctgttgggggaagctctgggattatatagcatggagaaaagggcaggcaaagtccgatcgatagcaaccggaaacccacgacttcggcacaagatccgcccgcaatggtcggagatcgatgaggggttgttggcaggttctacggtgctcgcaaggatctccacggacatgatgaatccgacatagcgggcccacccatcagcggttcaggccatgccagcccaatgccatgcggcttcctggcgggacccacatgtaagtgagaacaggcgcggcaatggggaagaagctgggccgcgcgatggggcttagtgggccgagaaggtgagtggagaggtggttcagctgattactttcggcccatgagtacgaatttgctttattttttttctgaagtctt

SEQ ID NO: 21683 - DNA, 1151 bp, Zea Mays
acttctgaaggatacttctaaagatttgtaaaaatattcatttgggcaaggatgaataattgctaattacttaaatacgtagcacaccatttaaaaacattacaaacatgcaatgaggttgagatgttattattcttttggtttaaaggcgagccagatcctgaactgaaagtatcctgccgtcaaatatctccatttattccccatgattaccaggagagcagccttcctacctctgtttttgtatacactgtaagtcttcaatttctttgtcagagtaaattttatgaaaatacaacattgactatttgactttatgtttcatatagccgtgaatctaaaatctttgttttatatagtcctatgtttctctgcatagcaacttatttttgttcatggagccagtgagagtatccataaccctctttaaccattgaggcatactggcatagtcactttgcaataacaattgtagttagacttgctggtagcgcagtggttgagcacccaaggtgcggagctccccaccagagtttgattcctggtgctgcatggttgtgtgcccattccctggttgaaactctttggtggtgcatggttgtgtgcccacctccctggttgaaacaacgcagatggttccttggccgccaaagaagcgtgcgcacgtgaggttcctgcatgtttcccaggttccgtatgccccttgttaaagtcaaggggatttatctccccttgataatttttttaaatattaatcgtagttatttgcttttttctctcgagtacactggagagttgtgtatcattatattaaaaagaaaggttttagaacccatacaagcccaacacactcacagtttaacaaagaaatacacatgaccttgatctatgaacagcagcctccaagatctagcctgcaattcgagtaagggcaccattcttacttttactgatattttgcagctagtgaatactggaaaggaaagagcaaaagttagcctattgatgacttgggcggtactagctactacttttcctcgagtgtttgcaccaaatttgtattttatgatatattggatctgatcatgttttattcttgatgctatgctagaattctataggaggactttcacatcattctggggatcatg

SEQ ID NO: 21684 - DNA, 663 bp, Zea Mays
atcggtgtgcaacttgttcctttttggctcttatggattccacatattgaaaatgtgcacataagagagatgcacaaatacattgtatgattgggtttgctcaacagaattgcagtgcttgctgtgatgcatgatggtcatcttgtttgatttggacatttggtgggaagaggatgttacactcacacatatactggatacaatactcagagtagattcagagtaaggaggaagaaggcaggaagcagagagcacaatgtcttggagaggaagatgagttctgattattcgctaccctccccagcgtacatatcgctctcacgcgcactcgctcagcccattaacccaaaccggcccaaacgtcttcacgcttctcttccttagctttcctgtacgcctcggcccgtctgcgactagcccctccggcacgatcccccctcccgctgattgcccccaaacagctgcattaggaaactgacgacgtaaatcttcaacatcttcccatgtagccaactcctccggcatgaaagaccaatgtaccaacacttgcggacatggattctgatggaataagtcttgagcatctagaggacagcagtcgcttttgactgtcctctgtagtctctttagcatctagaggacagcagtcgctttttgactgtc

SEQ ID NO: 21685 - DNA, 420 bp, Zea Mays
gtgcttgggggtggtttgggtggtggatgtttggctgttgcgggtgtggaggtgggagtgggggaggtacgatttgtaccccctggtggtattggtatgcgtggttaggtggatgctgagtggggccgtggttgtatggttgtgggagttgttgatatgtgtgcgcgacaacccttgggttgtcggctggttgcgcctgagacatcctatctctggtggcctttgtttccgggcagtcccttgttgggtgcgcgcagtcttcgccgtgaaacaagcagtaaaatctgcgcggctgctgcgcccgtccgcggccccgaccacgagttccattgtcgcggccctaggggaataatcttggcggcgaggggcctcaccagcggggtcctggttggtgatgttgtgcacctgctactgactgcg

SEQ ID NO: 21686 - DNA, 563 bp, Zea Mays
aatttattatcaatatcatcagtactaacaagtggcataatagccctggcacgttcttcttctaagcacttgatcatttctaagttatctaatctttcattatcatctttcccagattcactccaagttttttagctatatcaatcaacaagttattttcagaatttaagatggagaaggggttggggttgttacctttgttcaagaaggcatccttcgcttcagctctgttgatggctttgtccgtaatcctgatatcgtcatttgcctccagtctgctacttttccttgtgccttcaacttgatctaccaactttgctttacctttgttatccttaccggtttgttgttcatcttgaaatttaagaagttcaccctcatccatctccaattcctgctcatctgctatctccacacccattcctttcacaaagttgttaagctcctgagaactgaggaggccttcatcactatcttcaaagtctaccttctcattgttttcatcccccagatttcccccctcttcattgcatttgtcattttcattggtatgaggatctgaa

SEQ ID NO: 21687 - DNA, 274 bp, Zea Mays
acacggtacatcagctcagccttcggaataaggcctgcctctcgaaagttaaacaacatcatcttcaactcctcgccctcaaaaagattccgcagatccccctccccaatacacgtaccggacgtcgaggacagcaaatctcgttggccgcctcagtctagccgaagacgggatcgttccgtccccatccgtcgatgccttccacttcgcgacatctcgccaacattgtgcttcgacaccacctttcgccggcagtgctcttcggccatcgccc

SEQ ID NO: 21688 - DNA, 608 bp, Zea Mays
tcactgccccccaggccgattgagataagaattatcccggattgcagtctcagcggcactaaccaccacgatccgcggccatggtgtagcggcggtggtgcccggccattcggtctaccagaattcaaattctaacacagctaaggacaagggagcgcggtagaagtcttgagcaagatggaattgctcaccggttaataaggtcacgcaggatccggttcttgacgccgagatgggtgatttgctccggccacgaatttcggcccgccagtcggttaatccaccccaccgaggcaacgtacacgtcacacgtgccctagtactgcttcggtagatagccgtcgagggccaaacaacaggccaatcccacgccgacgttcgcggcactcaccttcccttctccttcaccacgacactctggtgattaatttggtcgccgcagcttggatgtgtttgcgagtggaggatgaaggacacaacgaaccagcttttatctacggtcaaggcctcccgaggatcccacggtggtggttgagctcatgcccacggagcccgcggcgtccgccaccatcaacggaaggaaggcagcttctgacctaggtaaaccg

SEQ ID NO: 21689 - DNA, 1044 bp, Zea Mays
ctcgtaacgccatggacggtagaagagagagtgaatcgcggtcgtcgcggggttccatctcgccgtgtccatgatgtctagccagggggaaacggtcgtgaagcttcattggagcgtgtcgtgcgtcctccactcctagtcatgctcgagggagtagccgaggtgcatgttatccctcgtcggagttacacgtcattgtggagcgcctctatccgtgggcagtaagcgtcgcactgccatcgggggtaagtgaccttggaatctgattgttttgcaacctccagggcgtgagccgccgcagcaattgggtcacgtgcaccagtggtcatcggggtgtcggtggtccggggctcggccagggcgccgccgcggttggggcaaggcgtcgcccagctcggactgaggaaggagaatagtgcgtgaccgttagatttgggatctgtggccacagttaggttttgtggcttgaatagatttgagccatagggataggaatcaaccgtcgcgattagatctagaggggacaaggggttcagccttcggatcaaatctgggcgcccgagatctaattgcgcgaaacgcttcggtgtgtgcgcggtaagccatccgatttagatcggacgtgggagaatctatcaacctgtttttaggtagtgtccgtccatcgtggatccggcggctaggatagcgtactgattcgtgcgcgctatgatttaatcgagaccgtaggtttccaatctggcggccgaaaaccattcataccccttcgccgcaccattttcgcaaaagagcccctgtctttccctagaataaaccctccatccaaccataacgcacgaatattactccagggtccctgaaatttactttttatagcctggacttctagaaaaccatacccaccacccctggacttttataaagcatataaacgaatctgaaaaaatatttatagtagagaaataaacccaggaacttgtataaatcatagatcccccattttaactccgattcgattcgttccaactgcattagactcatgat

SEQ ID NO: 21690 - DNA, 525 bp, Zea Mays
aaccatgctgtcaggtgctctgaatgactccctgatggtacagtaacagaaatatccctgggttcagtccccctcgccgctgattattcgcgtgcccggattcgcaccggtcgccgtgattcgtgtctggaatgcagtggatatccatggggaggtaaaagatctcgcaggggagcagatgtggtcgcgggggaggcttatcaccgcgcctgtagccgttgcgacgtggccgcaccgccgggttgccgtggaaactccggtgacctcggttgtgccacgccgtggcttgttactgcgtggtagtaaccgtggcacacttaagagtacaacctttgagccattgcgctggtgaacgccacgcctcctatgcgctagtgctcttccccctctccggccgccgcgcgtcttctccaaattagtcgccaccgctcacgaatcctataaattgagcgggccatcagctccgctaggtagttgtgcatccagtgaaccagctctcacttccaatcatcccctatagctccc

SEQ ID NO: 21691 - DNA, 732 bp, Zea Mays
agcaataatgcgccagtgttcagggaagccctcacgtggcaggcctatggccggacgcccgtgctctccatggtcgtcacttcgtatggtcagcatgccatttaccatcctcattgcaatgcaaatgcatttctgttgccacaaactcacaattgcgttgcatccgcacattgacatcactgcatgtgaactacaaattaaaaatttctgacgaaaatagtatgtgttgctgaatctaataacaggtgagatatggtcgggttccgagggtggaatgataaaggtgtggccttacgatgccattgccaagtccctgtcattgtcaccagaagagaaacatatggcggctttgttggttgagagagcctacatcgacctgaggaaccattgcacagttggtaatgtttgctcattgcccgcttctgatgttaagtacatgctagcggatcattcccgggcgaaagtttggaccgtgactagcatgacatttgcactctggtatgcctcacatacacagatgaaagttgctatttttttgaaagatctggaacagatgaaatgtgttaattagatcactgttctccccagcacatagtaggtactttaacatgccaattctactgaacaacttgctacagggatgctcgtacaagggagttgctgaaagtatttgggatggatggccaagttgactcagcaaagctagagacacctgtcatgccagagcaacct

SEQ ID NO: 21692 - DNA, 418 bp, Zea Mays
ataataatctttgaaagggatcgaaggtggcaggtgcatgtacacacatgtaattagatggactcacagagcttagaacattaaaggggactgtgccttagtagatctatcagttaggataaaattgccatttgaatagcatgtaaacagtaaacaaaagttgctaaacaacacatgagcactacagtgccaagatttaagtataatcaatttccacttatgaagctaacatagcgagtgcattgagttatttgcagtctctttccaacatttctctgcactacataatcacatgttcagtagagacatgctacacttaaaccagtagcctttagtcgagaaagaaaggcaccatcctagctcataagaactgaaagagtcatcacctgtctctataaggtgaagcttcatctttgct

SEQ ID NO: 21693 - DNA, 962 bp, Zea Mays
aaagggactcttttgaaaaagctacattgtcagcgttgtttgactaggggttgatgggtaccgagggacatcaactgttggattacactctgatgagcaattgggagctaggcagagagtgattggttgaaaggaggagcacaaaaggtttgttaccttttggcgaagctcatggtatcgagtagagggatggagcttgaccgaagacgggtagacaatggcgcagcagcgtggcgagggtcggctaccgttgaccgggtggtcagaggtggtagagttcccgccgatgcacgtcgcaggcgtcctgggtcttggcgaagctatagagctcggtagcaagggctggagtgctcgggtagatgcagaacgtgctccaatgatttggcaatagcgacgacaacacgattgcagggcacaaggtttttgtgtagattagagcttgaggcaaggtgagtgaagggtgcaggccggccggctttatacttaggtgcaactcaattggatggaaaaggtgagacaacaacgacacaacaagagaaatttcgttgatctctgagatgcggtcaggcttgattggcatgcaaaaggtagggaatcgatcgggaagaggaaggaagagatgcgagagatctaggcacattttgacgatggtaggggatcatgtcgagtaaaggaaagagaacagtggcaaaggaaaggcggtcgcccggtcggcatcgggaaggaaagaggtgcagggttagggatgacagaggggacccacgtgtcagagagaaatggagtgcgctgtgacagtggtggcttgacaacgtgatccctcctgtcagcgttagagagagcggggagtgcaggcgcgctgtggctaatgggtgaaaagccactggccctgcactgttgtctattaatttccagaatgggatttgaagtttaaaatccaaaatccaatgcaaatgatgtcaaaa

SEQ ID NO: 21694 - DNA, 556 bp, Zea Mays
gtcttcgcctagggttgctccgactgagttgcggggcaagaaaaagatcggtgtatcaaaatggagtgtgggagtgttgggcaagccttcacagggcatcagggtcccccggaggcatcgccgtatgggaatggagaaacacttgtgctgatccagctaaacccttaggcagctttttcttggatagaaacatgtgtctcttggacgacttcacacccttaggtgttgtgatgcacttgttttgttgatccagctgcacccttaggcgacttttgcttggatagaaatgtgcgtctctcagacgactccgcacccttaggtgtcgtgatgcacttgttgagttgatccagctacacccttagacgactttcacttggatagaaatgtgcgtctcttggacgacttcatacccttaggtgtcgtgatgcacttgttgtgctgatccagctgtacccttaggcggtttttgcttggataggacttgcttgtcgggcgcaacggctgtttagacttcccattgtggtgactttcttagtgtcgaatgctgaagactgta

SEQ ID NO: 21695 - DNA, 675 bp, Zea Mays
cgaagtcttccccaaaaagactatccgtgcaaaagtcgcccaagggtgcagccggactagcacaacaagtgcgcaaaattgaagtcttccccaaaagactatccgtgcaaaagttgcccaagggtgcagccaaactaccacaacaagtgcgcaaaatcgaagtcttccccaaaagactatccgtgcaaaagtcgcctaagggtgcagccgaactaccacaacaagtgtgcaaaatcaaggtctccctcaaaaagaccatccgtacaaaaaccgactacaggtgcagccggaccgacataataaacgcgctagatcaagtgcacaagtcccccacgggcacggccaaatcagcgtacgcacacagcctcatcatacaaatcatcataccaattaaagttacacacatacagcgagggcatcacaccttatattggttcaaccttcgagatgatgcccatctccctgtagttaaacagcattatcttcagctcctcaccctcaaagagacttcgcaacgccccctcacctacactcaccctaactggcgaggacagcaattcccgcttgccagccctatccacacgaagacgctcttcctccacctcactcactctacgcttcgccaccgcccttcgccgcctacgcccagcactcggaccaggaaaaacttcagca

SEQ ID NO: 21696 - DNA, 408 bp, Zea Mays
aaacgaagctgaccttcgaacgaagcaatggaaagaaacttcgtccacatgcatacaagcggcgaaggcgtaagcggtagccatcagtctcgacatggataaaacttcaggcgcaaagtgacgaaagaggagtctaagacttgtgcaacaaggaagaaagagaaaagacaacaatgtccctgtgtcatttgaaagggtaatgacttttaccattttctctctaaattgattttgatgcttgatgaccatcacaatctaatagactaactagtttacctagttaggtatttcacaggtgcataggtccattcatctcaattctaagtcgattgtcccgaatgacgtagattaatctcggtaggaaagctttgaactccgatatctgtctgctgatcagccattatttcc

SEQ ID NO: 21697 - DNA, 316 bp, Zea Mays
gagaagctgatgtcattctaaacatcaagcttgttagagaaggtgatggtggggtaactctgttacaatctcactatgtggaaaaggtattgagtcactttggttttagtgactgtgatcctgctccaacaccttatgaccctagcatgctattgagaaagaatcggagaatagcaagggatcaattgacatactcccagatcattggctcgctcatgtaccttgcaagtgcaacaaggccggacatctcatatgctgtgagtaagctgagtcggtttgtgtcaaaaccaggagatgatcactggcgtgctcttga

SEQ ID NO: 21698 - DNA, 590 bp, Zea Mays
atcagtagaggaccccagccgacggccttcatgcaccggcttgtccactcctggagcaacgccatcagcacgatcatggtcagtcgtcgttgtggtatgaggccaagccagctggttggaaataggctcaacccatcggcgtcttgtggattccagcgcctcttcctacataagagccagagcgcaggcaacattgaggtttgggggatgatgtaccataattacagccttaatgtcatgcctaagaccatcaacgaaacgcatagtgtaatacaatgggtcggtgcgagattcatatgctgctaactcatcaactaaggatgcaaattgttctacatactcggacacaggacctagctacctgatatgaaacaattgtctaatcaatgattcatgttgctccctacaaaatctttcatgaataagctcacaaaattcttcccgtgacataaaacgtaattgacgctctactgactgcaaccaacaatgagccttgccttcaaagtgcattgatgccactttgacccacatatgatattctgtttcgtacatctcaaagtagttctcagcttgcactcgccacaattgtt

SEQ ID NO: 21699 - DNA, 428 bp, Zea Mays
cgaggacggcccgtagatggcggaggtgatcggcccacgtgctgctgtaaattaggatgtcatcaaagaataccaggacgaaccttcggaggaatggccggagcacgtcattcatcagtgcctggaacgtggcgggggcgttgcagagcccgaacgccatcacgaggaactcgtacaagccatcgtgtgtgcggaacgcggtcttgtgcacgtcttctggccgcatccggacctggtgatagcccgaccgtagatccagtttggtgaagaatttggcgccgtggagctcgtcgagaagctcctccacgaccgggatggggaacgcgtctttgatggtgagggcgttcagggcccggtagtcgacgcagaagcgccacgagccatcgggcttcttgaccaggagcacgggcgatgagaatggggagtcg

SEQ ID NO: 21700 - DNA, 2328 bp, Zea Mays
atttgttctttgactatgaatcactggctcatcttgttgatgcgtctcactcttttcacttctactacttgaatattgcctgatgagattcaacttcatctgtatctcagccttttctgttgtgctttgtaggccgttctccagatttcagccctctgattatttgtgttcttcagaaatgccttaggctactcgacacagcatctagaagtacaaagttacacgagaagtctacaatttcattgtatgtgtgcaacacgatccaccttattcttcagtctcaggtatattggacattccctatattgtctataatacttttaccacatttgcatgaagaattgactagactgttgattctaacaggtggacatgcatttattgcctgatcttataggtactattctaaaagaaagatttgataaattttcatcccaagaactgaactctaggatttatctggctgagtggaggccgttaacaaatatgctgcatttcttgaggaaaatttctgaccagcaaaattatagcctgttcaacacgctggaacattctcctgagtttgatggtaactcgttgtgctctgtatctagacaggttgaagaattgttgaatcaagaacaaactaattcgctggatgatgtagcaaccgcattcttattttcaatcatatgtgcacctccaaaagatgttatcagtgcctttccagatcttcttgatttggtgaaagcacattttccatctcatgttgctttcttgtcatcggttctttttctacaacatgattatctggctaaagttgctagttgttggccagatatattcttcagcagcatcagactgttcaaggatgatatcaatgctgaccatgcaaacacagttgaggacgaatgccagaacctctctgtttcaacagaatcagctccgctaagtacatttttaagtgtcagtcccttctgtgcgcttttaccttcagtattgagccttgcatgttcttcgccagatgaaatcatggaagcacataaggatgcacttctaagactccttgaagttaaattgtctgactgcacattcagtgagcttaccttgtatctgagagtcatcttgttctggactcatcacctactgtcatcatatactattaaggattcaaattcagatgatcttgagcaagtatgtcatttgtgctttggtcttcttgatagagtatttgagcgtattcaagttttgactgctgacccttcacagtcaaattctgaatacccgtactatcccgctcaacatatccaagacattgttgattctgttcttcggcatcctgttattaccctgtctttgtcatgctctttatccaattgccaaaatttagcagatgggagtttggaacatctggaagaagctttggctatttttgcgacggaaaatctgcaccttatagaccgtttcgttctaaaccttttgggtaaattgtatgaccttttgctaatgtttggtagctatggtggtaactactctacagataatgggccatcccatgagtcactgtttgctgctccaaatcttctgctggagaacataatattgttgttcaaggagaagtttgagctctgcgtggacaaactaaattttgaattgcttttgccaaatttctacatggttcgcacactgtcaaagttcttttctcctttcaaactcctggagcttgcaaattggatgttctcaaaattggatggtcacaacttcagttcacctgcttttgtttctgctgttttgatgtgcctatacattattgatgtcaccatggaaatgctgtgcttttatctgcaaaaaactgatcagagatcacaatcctatctatttcggcacttggagattcacaattctgatatcaatgccattcagcaagcctatcacatcattcttcattttgctactaaatggaatgttgagtttgctgatcattgcttgctgaagatgctgtgccatattcattacacagaaagatgcgcaggatggaacactgactatattgcattccatatggtattatctacaatggccatcaatactcccattgacattcttcatcactgcattttccccacatctaaggttaaagcaaaagcaatcctgttgcttttggaagcaagtcctatgcatctgaacctttttagccagatattcttggaaattttaaataaagacacttatgttttgcaagtcaaggattctgattccaacaatttgtgggctcaagaagatggtgctatacttctgttgcctgccgctttatcatgcttgaaatttcacagcaatgacaataggcag

SEQ ID NO: 21701 - DNA, 1095 bp, Zea Mays
cttcttactctcttaggcgttcccgctggaacggtggcaatttgcagtttcgctggcgccttcgacaactcttggacttttggctgatctaccagttccaagcgaataggttccgaagcattcacttcagttgccagaggaactccttcgaccttttggacaatacctgtttcaggtagttgagcagccctctccaagaagtacgattttggtcgatgggttaaaaccttcaccttcttctcctttggtgcgacagaagaagcttccagcgcacttttcctttttagccccattttctgggcagggaagcggtaatcaggataaacaaatctgatagcatcaaagaccctattcagtctttgcttcctcgagcaccgaagacagtatacatagcttcatcctcagccttcgtatagccccctagcaattcatcacttgttgcttcgatggcatctaaccaatcatcatctggttcaccaaattgattcctgaatcgacaggtgtacttcaggcgaaccagactgcccattccgacttctatatcagcttcaacaccctttggcatttctcaatcggcagccagggggcataccttgaaggctatgtgttcctacactaggtctctagaaccaatgtaactacatacacattgattgatgccaggcaaccttgtgatttttctgtattcacaatagcaggcctcctcagtctgaagctggatcagataggccactggattacatccttaatatcgcttctttgactcaaatcattcttcacatagaaccattgcttcatccatgaacccgccatttttccgaaaagttggcacgagacaccttgcatcagaccggtacacgaaggtataacatccgaaattgttatgatactgctctttcccagtggccttcgtcggataagataactcgtgaatatggcaaaagcaattagcattcggttccaatccctggctccttattgcccaaatgaaaacctcaaccttaattaatgcgtcaggggtgagttgatgaaggaaaacctcaaacttcttcaaaacttcaattagaaacttgtgtaaggggaaccatagcccag

SEQ ID NO: 21702 - DNA, 586 bp, Zea Mays
caaaatttagagaaaattcgccccaaacgagctctgtcagaccatctaatgaagcctctgatggtacagtggcaaaaaaatctatagattctatcaatctcacggccggtgacccttcaccgtgattggtgctgatcgccatgattcgtgcttcaggtctgtggattgagctcgccggtgaaaagatgacgctgcggataggtccgggacattgtggccgcgctatccctctgtcatttgcaccgacgacgtggccttacggccgtcaccggaatctgtgttgttcaccgcgattgcgccatgccttaggcccttaaccacgtcgcaatagctcgggtcatctgtatctggtgatagccggagagccgccacggtagatgccaccaatcacttgcaccagtgatctcctctttctccggccgccaccgtgcaagaccaaattcactggccaccgcttagcgcccttataaattgacggcacggtctgctgcgctaagttatctccaagccaaagcacccatccctgccctcgattatccaccatagccgaagaatttccttcttcccccaaattggtcgactgcgc

SEQ ID NO: 21703 - DNA, 316 bp, Zea Mays
gtaacacctagggtgttacagtattcttgcactagatccctggtgctgatttgttcagccaccactctgaattctgctatggccagctggcatggtgaccctggcttcatgttgcacaagggtctggtcatcccgaagcttaaagacagtgggataatgaccatcgtcttcagtttctccctcttcttctcatcggcctcgatataaaaccactcactcttctagccggttggccacttggtgcgatagctgaggacgagagccttcgtatccttgcgatacgcgaaattatagcagccaaaatttttgtgtagcc

SEQ ID NO: 21704 - DNA, 583 bp, Zea Mays
ctcgtcgtggtgaacgtgatccagctcatcgtcacctccactgccgtctaaaccactggtgaggtcacctacctcccccttctgccttccgcgcgcccatagcagccgagtccctgtgtctgagaaagaagatagagtttgtggcgtggggtgggaaatggctgttgtgtcggcgtgctagtcgtcgtaggacactgtgcgcctccggttctggtcgtctggggaagaagcctggcagccgtgggatgggtagttgacggctaggaagggatctggggaggatgcatcgtggaccgttgatctgcgggcatgtggccaggattagagttgggaggggaatggctatgggccatgggatccatatcggacggtagagaatggaaaataacgtttcaccactgcgttctgatcagggccatccagaattgatcggacggtcagaattgaatcatacccctttgcccgagagattttcacttgagccccttgactagttagatttaaacccgcggtccatatctcagtattctgtgtctcggtatgtttagcgccgaggaccctgtgctctttaataattgtgcgc

SEQ ID NO: 21705 - DNA, 632 bp, Zea Mays
cctgaatttaccgacgctgaccccaatgggtgtgatccatctgtcgctgatcccagtgggtgtgctccatctgtcgctgaccccaatgggggtgctccaactgtcgctgaacccaatgttggtgctgcctgtgctgctgatgaaaacgagggggaggaagaagatgaagtccctttgactgggaagaacagtcggcaatatgtagctagtggggaaagtagtggagttccttctcctgctctgtctgcccttattggtctacaagaaaagtctctggcgaactttgatcagactcttgaagatatggttccagaggatctattatcagagccagcggatggtgacgcgatggatgtttgtgctgatgtgttcgacgccgggttgggatcgtcccgggcagcatcccgtgcctcatcgaccttggagcgcggtcttgagggtcaggaagctgacttgaatcgtcttgctcccatggaagtagctgagggaccttcagccttagaggtggctaccgtagagaacttgggcctcgaggatggtgttgacaattacccagcccccgagggtgttgccggggatgattcagctcgggtgggaagtgtaagccacgacccagcccccgagggtgttgc

SEQ ID NO: 21706 - DNA, 509 bp, Zea Mays
cccgagggaaaacacccgaggtacctcttcaaccgaggaattttctcgagagtctcccgtctcgggcataactccgtctcgcccgaggtcaccatcactccgtccgtctcgcccgagctgatctccgacaggtaagacaaaagcgcctgaaaacaggaaggaaacaattgcatttaatgcgcatacctaccccacgtcgtgacaacaggcgcacagtggctgacaagacaacaatcatatctaggcacaacagcatgattacgtctccgctatagtgcatgccgtctaccatctcctaataagacacctaatacgacactaggaaaccagcgagcactagtcaacaatgcagtgcaccgtcacgttggctggcagggcgccaatacatctctcctttgaatacaacaacaccaggcttcactgcggacatccccttcgtatataaaatagggcactagagttcctccagacggggagacaagcagaacacgcagacgaacactcacttc

SEQ ID NO: 21707 - DNA, 417 bp, Zea Mays
attagcagcaatgattgttccagtttggtgtatggtgcttataagacaacgggacatgcatgtctaaaagcaaaatgtataggagtattgtccattggatcaccgggggtttaattaaaacagggcttactaatctgacgacgacatgaacttgtatatggtgactcttgctggccatcaacgtacttttgaaacggcaaggcattgtcttccaatcttctcaacaccaccgtgatcgagctcaacagcaggttactgtcttagccaaactttgctttagcacttttccgaccaccatcctgtttttattgccatatgcctatgccatctagaaacacttctttctgattatccaggtaggcatgtagtgttcacaaataatggcaactatttgatgtctaagacattcagttcatc

SEQ ID NO: 21708 - DNA, 474 bp, Zea Mays
cagcggtgcgtcgttaggtcaattggcaccagaggagcggacaccatctcaccatgcccctcacgccctgctaacacgttgggagtcgaagacagcccggtcgcccctgacgtccctttgcgggcttcatcggcatggttggggcgggaggttcagcagcagcaccctcccaccgaggcagggcactggagctcgcctcgtcatcatttgggcagggaggatgtccactgatggggattcccccgctcaaccagaggccgtagaggtcatatcctctgtgtctgtcgacggggtgatgctctcccctggactggcgcgagcaagatgagcatgtttcttctccctctttctcttatgacgatgcttcttgtgtgatgccgccaccacttcctccgcctcccgctttcacttcttctccgccttaatagcagtttcttcaggaagagggggcacaaaaatcgtgacgttcccaag

SEQ ID NO: 21709 - DNA, 505 bp, Zea Mays
agctcgaatgtcttgtcaaaatcaggaagttgcagcagtggtgcttgtgtgagcttcgacttgagggcatcaaaagcttgttgttgtgatggtccccaacgaaacgacactccattctttgtcaactcgtggagaggtgctgcaatggtgctgaaatcccgcacaaatcgcttgtagaatcctgcaagaccaagaaaacttcgaacctgcgtgaccgtggtcggaagtggccagctcgtgatggcaacaatttttgcctcatccatctcaatgccctatgatgtcacaacatatccaagaaaagacacacgaccgatgttgaaggtgcacttctcaaggttaccaaataaacgtgcatcacgcaaaacatcaaaaacaacacgtaagtgttcaatatgatcatcatgagacttactatagataagaatatcattgaaatataccaccacaattttaccaatgaaagcacgtaaaacctcgttcatcagtctcatgaaagtgctag

SEQ ID NO: 21710 - DNA, 406 bp, Zea Mays
ccgagtgtcggggatcggatccccgggcccccacgagaccacgagtgagagataagatagggagaagctcgcctatgtgaatctgcacccagatgacccctatgcaccgcgccagaggtcggacgaggcgaagcctggcaaggagatcagacgaaccgccagagagccactcgagtggattccacatctggccctagggctgctctcaccatcaatactacgcacgccacattaactgcgcccagcaccgagccgcggtgtaggaaggagccagtccgcctcccacccacgaccgacgagtcgagtcctaggcctgagtcccactcatgacctacgggacctaaaggccctaggcctgagccccccgacgctccacaaagcacacaagactacgagaggaagccag

SEQ ID NO: 21711 - DNA, 617 bp, Zea Mays
aacaacttcaaagatgggccttaaattttcaagagtagttcttctcaaagcaaaaactgcacaaatcctgattaaagtgtctatgcaccttaggttgtctccatcagcttatccatcttatctcttatcccatcctcaatttcaaaacccactatgtgaaccgtgaagtctatagtgcaaaacaatattttgtacgaccatatatatgatccggagacagccttaaagaattctatcggaaagaccagcttctgatctatgtatgtgattcaaaatgtgtcctccttgttttatgctaacccagagcagcatcaactttgatgacggattcgaagcctgatccagtgatcccagatacaaattccaaatcatcgttcacttttaaaagaaagttatacacgggtcaggggaagagtcagtctgccacaagaaaagatgatgattctctagcgcatgatgtgcatcctggcttttacccaataatgattctcactgatgggttagaaagttggtatgcacaagtagaaaaaagaggtggtgttgattcaggtaatactgacgtgataaagggaaacagggaaacgatcggtgtacgttcatatgaaaaggctgaaaag

SEQ ID NO: 21712 - DNA, 495 bp, Zea Mays
gggttaagtgcccaacatgactaactgctctcttttcgatatctgaaaggcgagcttgactcaattcctaactcaaactcattattaatcgcatactacctcatagccagtctgaattctttcatatccttgtacaaactaccaatcttcattattggattagatctgttgcaaacaaataccctttcttgtggtatgcaatcggtgcagggcaatgcagctgtttcatcatcaaattcatcgcttcggcggacaccaaatggtctactggtaaaagcatcttgcctttcagtagtttcacgttcatcttctgctagcaatcctaaccgatcatacatcactgactcagaggcaatctcttgttctcctttttcttcccatctatcatcaatctgtattgccccccaatcaatttctaaaacctaaaaccaaaggataagacaactatgaagtactcggcgcaggtacatcagacaataaattgctggatatttg

SEQ ID NO: 21713 - DNA, 343 bp, Zea Mays
gagagcttgtacattccagtttccagcagaagactacacataacctgactagtgtagtgctgaccggtaacacaactaacagatctggccaatgctcatacagattcatgccacagaaccagcacgagaagatgtgagctcgacattggtctaagcttcatggccttgcttgaagtgttccttcaggatgtgatgttaattcttagtcaagatagcagcatagaagccaagatgtcaggatgtgattagctcaattctgtgcgatccggccgggaagctcggggagcatcgtctggatcctcgcgagctcggccaccacctcccgggcgtcgggccgatcgtc

SEQ ID NO: 21714 - DNA, 782 bp, Zea Mays
caggaaaccgaagaggcaaaaggagcaggcgagcagcatccttgggccgcacaggcaacagtagacgatagcccaccgagtccactacgcacaccaccgggaccatgcgcgacaggagcgggggcacacggagaagaaggcgccttggcccagggtgcttttcgccttttttcgccatcgtccaccaatcagagatagtgcataggataaaaacctctcatctatcggggaccactgaccaacaggcgagaaggggaaccgtctaccctagaagcgtccgcctcaggataaacccaaaggcagcgagcccggggttttgcatggaagagctagagaggggtcgtgcgaaccagaggaaagccactcgagtggattcctcgtctggctgaagactaacccatcgtaagtggttgattgcattagctatgcctaacactgagccacagtagaggaccggtccgcctctcactcttgacctgcgaatccctcggcctgcagcgcactcatgacctacaaaccacttgggttgcggtgcactcatgacctatagagactaggcctgagtgtgtcggtcatctatagggtcgcaatgcgatgaaccacgctgagacctaggctatgaggtcagggtcggcgtggcgcatagacaataatgatggcaccagggcccatgttgtccacatcgtccatcataatgagcacaatgcatcttcaccagggtaaaacacctggttttaccatggtacagtggctccttctcaatgaatccatcgacgactggc

SEQ ID NO: 21715 - DNA, 380 bp, Zea Mays
ccctgaatagctgctcggaggtagttggcgccttttgcagtatggctcggacgaaggctgagtcattagatccccggtagaagtcctcgatcatcgctgcttccgcaacctcggggatacgatttctcatggcctgaaatcttttgaagtatggccagagagtctcatccactcagcgcctgatggatttgaggtcccatggctgtgccggcttgtcggagagggattggaagttggcgataaaacaccgactgaagtcgctccaatcgtcgatgcagtgtcggggcaggtgtcgtagccattgcagcgcatcttgcccaaggacgatgggcaaatacgcagtcatcacatcttcagttgccccagcggcccaggcggtg

SEQ ID NO: 21716 - DNA, 752 bp, Zea Mays
caagatttgggctcgggttccgactacttcggtcgtgctcctcggagtataaaatcgggggccctcctaccaatgccacgcaccaggagagcaaaagaagaacacgagcgagagaaaggcgccaccgcgtttggatctggtcttcaccgtcggtccggcctcggggactcgcccagggtggtgcgtgatgcgcctggtgatgttgggaacacccttcaagtttttggtgccacgggtaagtcgcaattccttgttggtgtaccacaccgccccaaatctgcacttcgccgtggccaaggcgtataactggacgattcgtggtttgtcatccaccctctagtttgcaatgtcgcctgctccctgttgacctaatcgattttgagtttgggatcttgttgctcgggtttggcaccgtgggtgatggtgccgccgcaccggcgctgtgctccgccgcggtctgatgctcaggtggccagaggactgggggagtgctctggtcgttagatcggaggggaacggttcagattagataaatcacgtatcgcttcgaggaatgaatctggacggtgggtttggatcgggcggtccctggtcaatctcgcctatttaaaatcttacctggagatctggaatggtgcggtattgaacgcgtaccggttcgcgcgctgtgcgaactaatcggattcgtctgttttgaattagacgacgcagatcggcgcgtaccccttcaccgaagaatgtttgcataagag

SEQ ID NO: 21717 - DNA, 536 bp, Zea Mays
tgggggttaatctggcgctctacgtccaacataggttccgaggagagggtagggttgctctaggcctgaattcgggctcggggaggggttgcagtggctggatgctgtgaagaagcgacggtgcgatgaagcgggctccgacaagatgaaattcaccacggtaaagcaaaattggtgcaaaatagggacaagggaggatcagttaccctgagacggcgcttgggcggcttggaacggcgtggggaggctctggttggccggtcgtcaaagaatcgcggcggcggcgagctccaacctgcgtagggaagaggctgagcgcggaccaggcagtagagttgaggaatggggaaaccacagcgggttcccgttgcaccaagctcaagtgaagctcaatgtggccaaagcgctggcagaagtccaacggcgacggcagaacgacgaagcgaaaacgaggggaggcggcgctgcggctgggtgagtgcgagggcgtgggagcacgaatgtgaggcatgggcaggctgggggagtgtgtgggg

SEQ ID NO: 21718 - DNA, 324 bp, Zea Mays
tgctacctatgatgatttggtgattaagcctcaaaaccatctatcaacgattttgcggttttggccttaaattttgatggcgcgatttctgagggaattagaggttgaacatggagccatcacgaaggttgtgtcaagatgaaggaaattcgtgaagtgagtgtggtcgtcagatcaatggattaggagttcgaccgttacacatgtagcttaggggatgtaaatggagtacgctacctatgatgatttggtgattaagcctcaaaaccatctatcaacgattttacagttttggccttaaattctgatggcgcgatttctgag

SEQ ID NO: 21719 - DNA, 726 bp, Zea Mays
tccctcaattgcacgagtctagctcggagttcttctaccacgacgacggcgagactcgagggaaacccgaggtgttcccgacgactaggcgtggtgtagcttaattggcggggtcgacgagcatcataaacacatgagagtgacaaaacacgaaccagaagggtgagagcggacctggagatggctgaccacaacagagtgactcacggcggcgcggagagtggatttgggggaaattccaaattaggacgctacggtggacgattggaggcgagggctggtgctctagcttcgtaacaaccttgcagagctaacggtgcactaaatttatagcctccgggagcggtggctccaaatttgaggaaggaagctggcgggcgaagagagggggtgagtcactagcgagcgctattgtgccattcacagtgcaaggacttacggctgtcactagttatcccacacggcttgtgacgacgtggtgaaacgactgagagcatgtcataaccgagagaaacggcggcacgacggtgatggtcgcgcggccacgtcgcggcgcaagtgggtacggcgaactgagcggtaacagggtctgagctcatcccaacgccaagatcttttatcctaagtcattatccacgcgccattgggcacgaatcacagcgccgacgtggatcgcggcgcgggttcaccagcggcggggttcagtgaatctgcgatcttcttcag

SEQ ID NO: 21720 - DNA, 436 bp, Zea Mays
agaatgaagagaaaccaaatgacaaaaatgcggccgagcgtatcgccagacagtcggctcactacacactcattggggagacattatacagaaggggtgcatcaggtgtcttcatgaagtgcattctctcatctaccgggaagtaacttctggatgaggtccatgctgggcaatgtggaatacacgcggcatccaagacactagtcaggaaggtcttcaggtcaggattctattggccaacagcgaagaatgacgcagccgagttagttcagaggtgcgaagcttgccagtacttgtcgaagcaacaacatctaccagcacagcaattgcagaccataccggtgacttggcccttcgcatgcgggggactggatatgattggacctttcaaaaaagctcaaggaggatacactcatgtactggtagcaatcgacaa

SEQ ID NO: 21721 - DNA, 806 bp, Zea Mays
gccctcactctccctgggtcactcttttcaatattatactcaaattcagatttgatagcatgttgatttaatgccaacttaaattctcgcatgttgggatatatgttgcctacactcattggagggtcatttctgtcataacaaaaaataggcataggtggtataagatctttcccaactaacccatcctcttcatcgtactcttcatcagattcagaatcagactcagagtcactctcttcactcgcaattttttcagcagtcaagtaaaagccttcctcgtcaacaccaacatgttcattatggggttcaggatttgccaaataaccatcatcgtcattgttatatgtgctaggttcacttgtacaaggttgtgtgggaagctttgctataggttcggttatttggctcactggtggtagagatggacaagccaaagaaggtatgcatgggatatcttcttcagtgtagcaccactctagaaccgggacaacatcggtgggcttagtgtatgtaatggtcatgagcactatcttgctgccaacatgtttgctaaacattttcaggagttcttggtctgttttaatttgtgggaaggttttttgggcaacatcatagtaaaaaacatgcactgtctcattgtatccatgcgggtactgatcaacaatttcttgaacaagatccttgaaattgcataaatcggaatctacaaccttgctgcattcaaagtatgaaaagtcctttctatgctttttaggattaccagtaagtctgattttcagcaaataacttgacttagggtccat

SEQ ID NO: 21722 - DNA, 876 bp, Zea Mays
gtctgcgagcaaccacatgaaatttggagcaatagccgtttgaaatcaagccggttggcgtactgttcaccggagttcagaaaaatcttgccgggataagatcgccatcatggctggggatgggtctgcggccgcggtaaaaatcttctgcgacgtggcgctaatgtcccgaggtggcactgcccggttaatcggcagtcgccggaccatcgccatggctctgcccgcgcgggtgagctcgccagcgcgtttacagctccgcgagcctcatccaactctggccatcggcctataaattgagcccgggtcctgcttcttcaccacatcacgcacacgagcacttgagcaatcgactcaatttcaccggagaaatcacacagtccacaaatccattccaccctgttccgagcgccaccgtgaaggacctctccgtggccagccctcttcgggttaatactcgctcaattgcctcgtgttccagcatgtccttagcttcctgttgctctcgacgccaatcaatcaaagtttaccaaagtcccaccaccggaacactccgttgctctgaagaacgtcgtcgtatgcaccctctctgtcgatccgcttctctatccccgttcggcctaaactcaatcatgtacctagttcctggtgaacccgtaaagccttcccaagcttcaattttagcttcgatcccattaatcatccggaaagcgatctccagggtcggtccgccgccgtgacatgaacaagcttcaaattaggtcaaatctctcaaattaaatgagggcttttgctctgaccggctagtgctagatgtttgtaagcctattactccttgtccgggtcaccttcgccgttgaatcacggctccggttt

SEQ ID NO: 21723 - DNA, 836 bp, Zea Mays
cgtccgcagcatcacgttcttcgtctcttggctcctccgggttctcttccagaactggttctattttgtgggacatcgtgggtggatggacaataatcaaaataacatacatcaataccttacaatagttcacatttaatctctaattacttagtgcatggtaggcggcagagccagccatattttcttcccagaggcagagcactcctatagatggagctggcttctgggaggcagagcactcctacagatgaagccttgtgatcccgggaggcagagcactccttcagatggatcacaacttatgcactaagcaaatagaaattttacagcataacagtatacttacaacaaggacacgtatgattatgcaagggttcctatacttcaacactactttacttctaccttgcccttgaatgtgtgtggatgggagtgggatggtatgtcatggcaagaggggggcacatccttatataggcacctaggagctatggatgagtgacacctcaccatgcatatgtcatctaccactttaatggggggacacttcaccatgcatgtgtcacctccacctttcatggggggacacttcaccatgcatgtgtcatttaccactttaatgggggaacacttcaccatgcatgtgtcacatccaccttacatgggggacacttcaccatgacacatcaccataattctagagaggtccaaaaatatataggcttcgtgacttaccatgattagtgtagggaattctagaaggctatgtacatcatggttatccatggttgttcctagaaagttgtcttgcttatgattaaggtttatcatga

SEQ ID NO: 21724 - DNA, 728 bp, Zea Mays
gtcaacacagtgaaaatggttaggccgtgtgtataggaaatggaaacgttcactcagggtgatgcatagaaaagttgccgctgcatattagatgtgagtgggagtcaaaacagcgagagctgttgggaggcaaaggtagaatggagggaattgaagtgaagatatgccacctaacctttggttgggcatgccaatggtagcgcaaacttgatcgctgcacttgtaggaatccccatgagccacagttgtgcgggtgcatttcttgcatgcattgtaccgccacctatcaccaatcttttttacagtgactgtcaccaagaattccctatcctgcacgaacatgtaaatatacgctcatgctatattcccaaatccaaccaactgtggcatgactgcaggaaaacaataacagaagaccatggcagttggtaaggcaacagtgactaagtgaacgaaacatggaacataccttattctcaaatgggtgcagatctctgatataagtgattttctgttcctcaggaacatgaggcatatgttgattcgaagatagaacctcgttccacttaatgggactatgcgcttttctcgcactggtttatacatacaatgagtcaagctcaggttagaacagagcgaagacaaacatcagtctgatacgtgcaccaggcatagcagaatactacctagccatgagggcacttgcttcaggaacatcaggattaatg

SEQ ID NO: 21725 - DNA, 516 bp, Zea Mays
catcaccccattagatcgtggtggagacgacccgacatggacatccatgtaggtgtgggaaggagagctcacttggacaccctcgggggctgggttgcagcttgcgccacccaccagagctggatcactaccggcaacaccctcgggggctgggtcgcagctcgcgctacccaccagagccagatcactatcggcgacaccctcggggactgggttttctgcaacagccacctctaaggctgaaggatcctcagtcacctccatgtgagtcgggcaatcctgaccaacgtcttgacattggagattgccttccaaagtcgacgatgcacgggacactgctcgggatacctctaatcccatgtctggaatttcagaacaaacatccatcatgtcgtcagcactcggctccgatagcatatcctcaggaacgacatcttcaagggcctgatcaaaatccgttattgacagttcttgaaggctgacaagagcgaacagaactgcagaaggaatatcact

SEQ ID NO: 21726 - DNA, 714 bp, Zea Mays
gcctaaccgaaagaaaaaggtccgatttgtaataatctttgaatgcgtgtggatggcgggttcatttcatagaagttcaagatctctttagtaaaatgaacatggcgaaggggtatcctctaaccacaaccacccgatcatatcttgacggcccagatcagattataacctcttcgaaccggtatgaaatcttgatcatcagatcttcaatcgacgaccgagcttccccatgcttgcaagacatactagcccttagatcaaggatctacgaccaagatttaattgatcgaagtgtttcacacgatccaatcatgacccttcgttcctgatccgacgcaccctaggtcgtcttcctcccctggacacggcaatggcggcgcgagcaccaaaggtggcggcttcaaggtcaatcccccagccctcccttcgatttgttcactgcatttggccaaccatccagatcattccacagagccccacgctgttcttcttcccttggctgcctagcaccatggcacgcgcgggccgcagcagcgcggtaccggcgacccccatcccgttgcacgactacccatgtggaccacccgcgcgacagcccaggtgccccaagacagcgtagaccgggagccacaacgtatgtccactctctccccacggtggcgcaagaagatgagaggagagaggagggcggtgcccagttttataccccgaagt

SEQ ID NO: 21727 - DNA, 695 bp, Zea Mays
cgagggtcctactatcgataaacgtgatcattaccgagagcaggattttgccgaatgctcgacagaaagcactcggcaaagagtcgaattccggtagtgatatatagattcggtgattcaatgataaagaaggactacagtagtcaatcaaattaataataaagacgcgaggcaggcatgtgattaatcaaggaaaaaccaagcaaacggccaatgagatatagacaaaaggacgataggacaatgttgcctagcttggccatgtatcacattacatgcaatgttcgctagctatagctctccggccagggaacgtgatgacaagagagaaaacaacgatgcacaaagaggctgctgcgctacttttgttagaacgtctatatagctgctagctagctagtctgcagacaacgtctgcacatgtacatacatacaccaacgagaaaggcccaagagcgagatttgcattgtacctaggcgcgcaattacatatatacaaaatgcacacggtaagtagctgcatatatatatatgctttgtgagtggtagacgacaagtttggagcatgttgccatatggagagtttgcctgcgcagccttggacgtgcgtcggataagaaagaaacaattatctgtgcgcgccgcaggcaaagagacaagagctgggtggagtgcacaagagcagttgtcgttga

SEQ ID NO: 21728 - DNA, 687 bp, Zea Mays
gtcaaattgcaacctggatgacggacttgcgtgaccagtttcccactcaatcccctccaattctcacgggatcccggatcaccaaatcagctctaatggtgtaagctgggacgaaccagctgccgctaatcactggtggagagaaccgtagcatcgcaattatgcccacatcatctccccccgtgtcataatttaatttcgtggattccgctctaatgacggtcattatagctctattttcaccgtgaaccggcatgggtcgtcaaattgcaacctagatgacggaatggcgtggccagtttccccctcaatcccctctaattctctcgggatctcggatcaccaaatcagctctaacggtgtaagctgggacgaaccagctgctgcaaattactggtggagagaattgtagcatcgcaattatgcccccatcatctccccctgtgtcataatttaatttcgtggattccgctctaatgacggccattatagctctattttcaccgcgaaccagcatgagtcatcaaattgcaacatggatgacggaatggcgtggccagtatccccctcaatcccgtccaattctcctaggatcctggatcaccaaatcagctctgacggtgtaagctgggacgaaccagctgctgctaatcactggtggagggaaccgtaacatcgcaattatgc

SEQ ID NO: 21729 - DNA, 422 bp, Zea Mays
tggccacatagtaaaacttttaaagtgctaaatgaagaaagtgttgctacagagggtaagaagacgtcaaagtatcgtacaatcaaactttgcagtattgttgaagatctgaaaatcgatatgttcaccccgagtggctggccaacagtcagcggggatgcattgagaagtttggctggtaaaatacctacagaatatatttacacaatagatgatattcaagatgatgatgaatataccagtggttcagaaaacccagatgggaattcctcttatggaacagcatatgaagcatttggtggaggaaagaatggaaaagaagcatgccatgcaattgcagctttatgtgaaatatgttctattgattctttgatatccaatttcattcttccgttgcaggttagctagctgatcttattagt

SEQ ID NO: 21730 - DNA, 349 bp, Zea Mays
cgccggagcataataccctactccactgtgcgttgtattgcttgagagcttgggttgagtgtaagcctggatgacttgcgtctgagtcccccttgtaacattgcatgctccccttttatagctcaaggggggcatgtacaagagtgctgagccccgacatgtgggcccaggagcatgatggatgtaagacttggggcagcaatagttgtctgctggagcaatcttcccgcgctctgacacccgtgatccgcgtagtcttggtgtgctggggaagcttccctagtaatgcacaagtgctcgtggacatagcatatctgcgtatcctacaggacggacatactgttcggat

SEQ ID NO: 21731 - DNA, 498 bp, Zea Mays
ccactgacaccaaagggaggagaacccacgacaatgaaggatagaaactaggttgtcccaattcatcgagtcaaaggctttgtggaagtcaatcttaagcacaatggatggaattttatctttataacagcaatgcagaaggcccatagcataagaataattctccgcaatggacctctggtggacaaagccagtttggtccccgccaacaaggtcaggaatatgaggctgaagtgtacgggaaaggactttggaaatgattttgatgggacaattttggaggcagattgggcggaagtcagctgaacgcctagtcatgtcctttttggggaggagaataatataggatctgttgattctttctaggttggcctatcgattgcaaaaagaagtgaagagatcgctaagagcaggagaggtgatgttccaggtggctaagtagaagctaggaccaaatccaaccgagccaagactggaggtcttcttcatttgtcttat

SEQ ID NO: 21732 - DNA, 368 bp, Zea Mays
cgcactacaacatagggcattagttgaagaactctctctctctcatgtaaggatcgtcccttgaagtataaaagacagtcctcgttctatgacaagaccgacgtccaggatcgcctcaccctaaccaccattctgtcggtccccgaccctaggacctaggaggccctaccagggctagcctcggagtttacccctatgatagagaggatccatagctggcgaccgtcgagatgtcaacaatgatagtcctctccaacttccttaacagatggtttctcccacttcattagcactctcgcatcgcgtggatgttcattatggtgaatgaactcacacggaccatacgagatgacaactatgagttacat

SEQ ID NO: 21733 - DNA, 553 bp, Zea Mays
gttgcatgtgcggatgcatgcgcacaggctaccaatcacgtccatagtgacctgcaaaattggtggttgggatcgtcgctagtcggctccttgttaggatcagctcgctctgtatggcgggagggttttctttttgcaagtggatagacagatgctggaaggaggtgggattgtgggaggggaaaagtgaaaaatatctatgcgtggttcgatgaggaatgaaggcaccagatttaatgtgctcatgtgagcacgagagctatatgagcacgggatacgttctcctactcatttataccactagtttaaactttgcaaaactcacccaaccaaatcacctacacattgataacatccactgaatctaccaaacaaattgcacacagactcaacatatcgtcaaaaccaacgattcagatcgctggatagttcacttccccttactcaaatccattaatccaatggacaacattatttggatcatcctcatctctcatccctccttcccctcacccatgacctcgttgctgccatcgtcgacgcctcctctccc

SEQ ID NO: 21734 - DNA, 1190 bp, Zea Mays
agcacgtgcaccacttgttatatctttttcgctcggcttcgagtgataggtccaataggaatggttgtcaaggttgacgatgttggtatggtcacatcacagggttagtcactaaactgcacaaacatcgagtaaacctcggagcgattctcatgaattgctcggagactcgggggctacatctagcagatgcactcgtatgcacccaagatttcgaccggcggtagtacctgaacaaaaatggacccatgcttagtgcgtgatgaccaaacgttggcaaggtccgtctttaaattgcgcaataaaaccctaagcaaattaaaattgtttgggggcttggggactactatcaggtacctaggaacgaggtacccaaagtgagtcctataaaccttctggccgaacagtctccctgtcgagcacgccagcgaggcgatgcagccgaccaactccccaccgagcaagccagcgaggcggagcgaccgaccaagtccccgccaagtaagccagcaaggcggagcaaccaaccaagtccccaccgagtaagccagcaaggtgaagctgccaaccaagtctttgcatccacaaggtggaaacctgaacccagtgatgcgagcccacatccaccgcgacaagacgtgtcatcaccacgccacgcccaaacatgcgctcactgcaggagacaagccctgggaaaaccacaacatatgagtcccacagtagcgcgcacatggaaaagatgggacaacatgccataccatgcgtatgtaccgtgtagaatggcaggagacgcaaggcatgcggtgggcggagccacgccacatatgaccacgtccagggacagaatcgtggcaccctccacatactgccaccgggacatcagcgacggactcgctacagaaaccagcgcagaggacggagccgtgttaggagtacatccacacacagaaaaggggtcagttcattgacccaggcggataggaccacccccccccccctcactcactctctcggtctctcttttctcttcaacaaggaaggggccccactgtaaggcttctctcttgagatataaaagagagagtcccatccttcaagcgacatacaagcacacctgatgtaacacgttccatagcaatactacgattagcactacattggactagggcgcaaacctgaaccaatataac

SEQ ID NO: 21735 - DNA, 813 bp, Zea Mays
gtccttgatacgggccggaggcctcattgcctcaatcgccttgatattctccgggattgcttcaatgcaccggtacgaaaccaggaaccccagcaacttccctgcggagacaccgaagacgcacatgtccgggttcagctttgtgcgggttgcccgcagcctgtcgaagaccagggtcaagtcttccactagggtcgaccttctcttggtcttgactatgatgtcatcgacgtatacttctaccttgtccttgatcaggtccccaaaagtcttactcatcgctcgcacaaatgttggcaaggtgtttttcagaccgtaaggcatgacaacatagcagtaaagcccatccactgttacaaaagtggtatgcttccaatcttccctagacatctggatttgatggaaagcagagtaagcatctaagaaggacaagaggtcacacacggaggtagagtccacgatttgatctatccgtggaagtggatacgggtccttgggacaagccttgttaaggctggtgtagtcgatgcacatccaaagcttcccattcgccttggggatgatgactgggttggccagccacactgggtgatgaacctcttcgatgaagccgacgtctagcagcttctgaacctcctttcggatgaagtcctgccgctcgacggactgtctgcgaggcttctaactcaccgacttggcgtcagggttgatctttagatgatgctcgatcacctccctggggatcccaggcatctgcgacggctcccatgcgaacacgtcggcatttgcctggaggaaggcgatgagcgcgag

SEQ ID NO: 21736 - DNA, 499 bp, Zea Mays
cgagaatggtcttgagttctggtcttagccctttcaaaaagtgggccatcttcttggcttctgtgctgacgtcgtcaggcgcatagcgagctaattatgtgaatttgtgcacatactcactgacagatcttccaccttgagttagttcctgaaattcatcttccttgagctgaacgatcccttggggcacatgatgttctcggaaagcagtttcaaattctgcccaggtagcatctctgatggtcatgctgaaggtatcccaccaggatagggccatcccgaaaagttgatgagcagccaattgaacacgctgattcttagggcatccaagggcttctaacttcctttttatcgtgcgcagccagtcatcaacatcgaggggattgctggatccagcgaatgtgggaggcttgagcctcagaaaatctcccatcctgtcctgtggtcttccaccattcgggcgctgattctccagacttctagtgaggatttcaatgag

SEQ ID NO: 21737 - DNA, 329 bp, Zea Mays
gaggcgtggcgtgctgaggctcaccgaagcctagtagtgggggccttggtcctgcttggtggttggtggaacgtttgcttgaagaagtcctactaagggtctgcccccaacgggacaccaggagcaaagatcaaattatcgggggtgaggatggccatctatcggtctggagcccttctggaggtggtccgaggcctagcaggaccttgaaaacatgtgactaggtcggaccatgctgcatctacatggtagtcggcccacgtggagcaagtgaactttgcgtacagggctacgaggatcgttgcggaaggaatcctgataaaagatta

SEQ ID NO: 21738 - DNA, 349 bp, Zea Mays
ggctgactcagccagacagttcgcccatggccagaggcgtcagcgtccacacaaagcaaggaaagagacgcaagggcaaagccaacatgatgcacatggtcgactggtaaaagccggccctactttcgatcaattgctagtcaaatatgctggcaagaagaccgttctatgcgatcggcgaacaaagaaaccccggccacccactaaaacggtccagaagacgacgcaaaaagcatcgcctgttcatcctgtcatgccaagatgcttcccacccatctactcatcgtcgatgtattgtcctgttcaaatatggaatggtacgacgatgaatccatggtacatgcacact

SEQ ID NO: 21739 - DNA, 558 bp, Zea Mays
ttgagcatgcacttcaaccgttcatatgagcggttaaactacaacgaacaatatcaaatcgctaatctctaacaatgtttgtgacaaatgaagataatctaagtgttgcaatcacttaaactaaaatgtacccaacgaatgatacattagataatcaagaacgcgtaggatcgagtacaaggaaataaaaaagggcaatacctcgatccggagattgggtcaagaactcccaacgagatggaggaagatgatggaaaacgccgggacaaacggatctccaacgactcttccaaaagtgtgagggcacaagagagtttttggagtggagtgtgaaggtgagagaggagaatgagagggcggcggcggctggaaaatgagactgagaaggggaggggagagaggaagagaaataaaagggggaaagtcggccgccagaaaacagaaaaaccggttcaatcggttcaaaaaccggttcaaccggtttctggtcaaactgcgcagtaaaagcgcgcagaaaactgtgttgactgcgcgaaaattctggcagtctgacagcac

SEQ ID NO: 21740 - DNA, 429 bp, Zea Mays
ccgaggctgggggcagggtttgttcaatggcttccagtatattcacatgcgtcgtttcttctggcccccgtctctcccatcagcagctgaagatatttccttttctgtaagaggctagtcaattccaaccgcagaggacttagcggtgtgaatgggaaagactcggtcattaccttcaatattttcgagacctctgcaagagaagacgaagggctagcagtttccttcggcacatcttgcatcttcgacttctcagaggatttctcggcaagctttcattttttaggagccgatgccttcagctctagcacagtttttatcttcttcgaagtctcttggtcttccttgatagaccggatagcttgcctactcagaatactgacaaccctttttctcttgactcctccggccccttcatcaagcctttcg

SEQ ID NO: 21741 - DNA, 509 bp, Zea Mays
ttctttttcgccatgcaacgtttgcgagccaggcggggtactcaattggtttaatgaattttgcatccaggagccgctggaccttggctttggctgtctttgtcttctcgtctgacattttgcggaggtggtgcttcttgtggcggacggaggggttgatgtgcagtctgtgctcgatgatactttggctaactccaaccaggtcgaatgataaccaggcaaagacgtcattatttcgacgtaggcagtcgagcaagctggcctcctcctgcagggctaagccttcgccgattaacacaacatgattgggtagggccgtgtcgaggggtaatttcttagccccctcgtcgctttggatcgggttctgttgtctgtcagtcttcgctgatgtatctagattgtgggctggtgtgtgggcatccaagcaatggacattccgctgcccgaggatgaggtctctttctatgttacaggccacttgttgatcgccgaaaattgtaatgactatg

SEQ ID NO: 21742 - DNA, 1305 bp, Zea Mays
ccttaggaatgcaggacgggtcctctgtccaggcccagagacagagggcacgcgtgtcctccttcctcagcgactgaagctcaacatagtccagatcgcaggccctcgccaccacacgcttggcgatgctctcgttccaagcgtgaagggggatcccctccaggcagagccggacgtgatacttgaggtctacagggcctgcctgggtcatcggtagccaccgcctaacgcggatgtcgaggttgccggagagaaattccctgcgctccaaagccgtctccctgtggtgctgatgggagaaggtgacgacgaagtccgctggatggtgtcttgctacggagatgtcgtcggggcgcacgcagaactggtggcagaacgccctcttcatcctgtcggtgctcacctcaggtcggtcccgccccagccaggcgacgacggcgtgggtcgagagcctctctagctctgcttccatgtcgccggtggaagcagcgacggcgaaggtttcactggggcgtgtccctggatcgcctggtcgaggcatggtggcttgaacgagcggagggaagtcatcgctgtggagtctggggggcggttgcggggcagtcgtatgctgggaggtcttggccttgggacagagccaagctttatggtcggggcctccgcatccgaaacaacgcagagggtccctgcaggaggaagcacgatgtcctctgcccaaacaacggaagcatttaccgctcagtcttaccagcaagttgtctctggccgaatttgatggcagcgacggcctggtggttggacgtcttgaatgctcgcgggcaccatgtgagcgcttgcgccggaccgttgtccatccatccagtacatcttcggcgacgtggtcaggcctgccgcagctcgcggttgtcccatggacggaggacagacgcgatgcggtcggagtgaggggggccgcagtgaatgtgggtctactgccagatgcgcgcggcgcggcggagatgcagtgcaggggaggagtaatggcgaagcgcacacgtttggtgggagcgggggtggccggttggcaggggacatcagcgcaaggttctggaaccacaataactgaggctgggcggggtctcctctgtgttcctgccggcggcggaggcagaggtggacagggcggggcgcgtcggccaaggcgaaatagggcttggaagggaggtagcgggctgatctatcgatctgcggtggaggaaagaggtgggaagctgggtcgaggtgggggggtcggctgcaatggcggggaggaggcactcgctcgcc

SEQ ID NO: 21743 - DNA, 364 bp, Zea Mays
gttagcttgggaatatcacatgacatttttgaaccgtactgttcgcacgatgtttagccgaatatttcctgctacattccggttaacactacagtgatgtgcttctgttttgatggttttcgtgatgccattagcagtttattagcaccgtaatcggccaaaacgagctaagataactattctgcatgtcagcttgctgctttagacgctgcgatgttgcatgcttgtaatgtggttgcgagtgtatcaaatatgcagcctagaagtctgggcaaggcacggattgattttatatcttcacttttttttgctacttgatggttggtgctgttctggtagcatcagatcagatttgatgcttgac

SEQ ID NO: 21744 - DNA, 454 bp, Zea Mays
caaagaagtgatattaaggatgtaatccagtggcctatccaatcttgcttcgaactgaggaggcctgctattgtgaatacagagaaatcgcaaggttgtctgtcgacatttgctgttgtgtgtaactacatcagtactagggacttagtgcaagagcatatagctttcaaggtgtggcccttgactgctgagtgggaaatgtcgaagactgttgatgctgatattaatataggaaaaagcagtctggtgcgtctgaagtatacgtatcgattcaggaatcaatttggtgagccagacgatgattggctcgatgccattgaggcaacaagtgatgaatttctagggagctacacgaaggctgaggatgaggctatgtatactgccttcggtgctcgagggaaacgaaggttgaacagggtctttgatgctattggatttgtttatcctgattacc

SEQ ID NO: 21745 - DNA, 558 bp, Zea Mays
aggtcgacctccacataatcagtattggctgtaggtcattccactatcatgtactcaatggcagcatcaacatcaccatccatttctcccaaaacctgtatggtggtagcagatttcacactagaagaaaaatggctaataacaaggaatataaatattctcctgcgtgttctagaaaaacaaggaatctaaattaaagacacaactgaactgcaaaaaaatttgatcgatcatatagttcatacatgctcagctatagcagtgtcagaacgttcagttctagtcatgaccaatttgactggtgtgtggtcataggttgacctgtgtgaagatttcttcacctcctttcttctagcttttggtgaagttggcgtcctgctcgtgtagccttaccctacctatgtactcttacgcattagttttgcaacacaggtcatgcattttgcctgtagtcaaggatggtgaaggtccaatcatgtgcatatttttggttttctcttgttaggatgaagagatctggattcaatacttgatttttcatttgtttttaaatatttg

SEQ ID NO: 21746 - DNA, 320 bp, Zea Mays
cgtctgcaactgatccatccgcttctgcatctccttgttgcctccattgattttgaccatgagttgcatcatcggatctttgattcgcgtagacgccatgtcccctgccttggcttgcaacctggtgaagtactcgtgattcggaaactccagctcgggaacgaaaacttcgaataccaaatgttagaacacacacgatggtgggaatgggacaagcaccgctcccggcgctcggatcctctctcgaagattatggggtgtggcggtatagtcatacacgacgccacgccgtctgttcgccagactcagctggatccaat

SEQ ID NO: 21747 - DNA, 359 bp, Zea Mays
cttctacattatgaaccagcagtcaaataacagaaggaacaccatgccaaccacatcatgcaaatctcatatgcagggactaataatctgcttctagaattgagacgtcaatacccagagatggcagaatgatgcaggaaactaatacactacatatgtagcaacaatcaacacaaaaaatagattctaaacagattcctctagtgtatttacctttttctcatgccccggatgagaatactggccaattgtgtggttgtcatgattcatcactcatgccgtcaaatgagctctcacattaccgaaagtcaaaagtcttgcacaagaaataatattactggtcataacctaatcagtaa

SEQ ID NO: 21748 - DNA, 663 bp, Zea Mays
aatccatgcctatttcttccacttccattcaggccctgggaggggttgcaataggcctgcaggcttctggtgctcggccttcgttcgttggcaggtgtcacaccgggccacatactgtgctatctccttcttaatccctctccaccagtatctggttttgaggtctaggtacatcttggtagttcctgggtggatggagtaggctgagttgtgagcttcctcgagcaggacttctcgtgcctccccttttggtacacacagacgattcttgaaccaaagggctcattgttcatctgtcctgaggttcggaagttgttctttgcgagctttttccacaagtcttgctgtctctgagtctaggcgttgagctttgcatatgaggtcttccagcattggtttgacttcgaggctgccgttgtctcccaaacatgcattcaattgagctgattccttcttccaatcttctaagaagttggtccccttcatcccaaagggttttcggctgagggcgtttgctaccatgttggcctttccgggatgataatgaatctcaaggtcataatctttgatcagttccaaccatcttctctgacgaaggttgagatctggttgagtgaagatatacttcagactcttgtgatcggtgaagatgtgacatttgtt

SEQ ID NO: 21749 - DNA, 503 bp, Zea Mays
tagaaatttaaatgaattgatttggacttcatatgcattttctataaattaaacaagttctatggattgtttttatattaaaaattcgttttctaaatcatttatccactttaaatggtctctcgactgcacgtgtattagacagaaatgcaggggtctcggtgtgaaagattccaagacacagggcgcccctgtcacggacggcggtttggattcctgaaaacccgagggcttatctgcaaaatgcacaggccgaaggggtgtgagttgtttctggccgcacgatctgatttggacggtgctgattagatggcatcaacaccgaaccggtatgcgatcatggccccaggattccagatcaacggtcggatcgcaataatgaagggcgcggtatgttgtaatctggagcgttcatcattcaactaacggtccatgcctatcctagccgaaagggtacgcgagatcaatctgtgccgtccatccatcgaacaacgacccctgcg

SEQ ID NO: 21750 - DNA, 536 bp, Zea Mays
gtcgccagtggggaaagtagtggagttccttctcctgctctgtctgccctcattggtctacaagagttgtcactagcaaactttgatcagactcttgaagatatggttccagaagacctgctgtcaaagccagcggatgatggtgtgatggaggtttgtgctgatgtgctcgacgccgggttgggatcatcccgggcagcgtcccgcgcctcgtcgaccttagagcgtggtcttgagggtcgggaaactgatttggatcgtcttgctcccatggaagtaattgagggaccctcagccctagaggcggctactacagagaacttgatcctcaaggatggtgtcgacacttgcccagcccccgaggatgttgccggggatgactcggctcgggtgggaaacgcatgccactgcccagcccccgagggtactgccggagatgatccggctcaggtgggtagcacaaactatagcccagcccccgagggtgtccgagcggggtctccctcttgtacttccatggatgctcacgtaggatc

SEQ ID NO: 21751 - DNA, 337 bp, Zea Mays
gctcacatgccctaatctagagcgcaacaaaacttatagtagcaacttcctttcacaccgcatatatacaataaggaacaggccgatatgtgaatcaacgtatataatatacatggcaagtatgtgaatcaacgttcgtggtgccgtctaaacacatacgctagagatccgatcagtctctatctagttgcccctggtaccgagcgttaccgtcctagtggtgtatcctaacaacactgaaggtataaccttcatgttcttgcgcatctaatagccaggatttacaaccaaggtctccataatttaatgtctaccacacctcttttacatgttgatt

SEQ ID NO: 21752 - DNA, 296 bp, Zea Mays
ggctgatgttggcgccgacgtgtggtcccgcttcgtcagtcgcacgcgctgccctcttctgtacgctgacgggtggaaccatctggtcggcgtctccctgcgcacgatgtgcatggcgatgacatatggggcccagttgtcaggtatccccttcacccgggtttgtcggcactgcaacagattcctccgtcccggtcgcgaccgatatggccttgcgcctcgaccataagacccacggaacccacgccctatcattcccagggctcgcgaagccgagtcaagaacctccgccgccg

SEQ ID NO: 21753 - DNA, 299 bp, Zea Mays
aaaaaatttccagagattatcgatgttccatgacagttctaagtcttcgccggatgatgttgccaacctgtaagcactgggggatgccttcgtcttgactatgaatggaccttcccacttcggctctagcttgccccatgactctgttcaggtggttcttacgagtacgaggtccccttcgttgaattctcttgggatgactgcattgtcgcgccaggccttggtttgaacctgatatttgtcgagggcctccagggcgaggacacggtcttcgtcgatgagatctttggaagttggtt

SEQ ID NO: 21754 - DNA, 739 bp, Zea Mays
gagcaatgtgcttatagtcgaatgaagggaggaaggacacacacatcctatccaacatctagtatacttcctcagcgaggtcctcagaccctccaaggtcagataccctcagctccagaagaaattgtacgcagtgctcctcaccggacgaaaattgtgccactatttcgacaaccacaaagtcatagtggttacatatttcccaataggtggcatactccaaaatagagaagcagtggggagaacaaccaagtggtcgtgcgagctcggagctaatgacatagaattctgaccccacacgactatcaaaactcaagccctagtgtttttcatatcagaatggactgaacaataattgctcgaaaacctcgagctaatagaagtatggaagatgtactttgatgagtcgctaaagctgcagggagtcggggcaagtatcttctttattgcccgaaaggagatgaactcaagtatgcgttgcaactcttgttccctatctccaacaatgatgtagaatatgaagccttgatatacaggctcaacattgttgtctcactccgcataaaaaggctaatggtatatggggattctctagtggcgataagccaggtcaacaaggattgggattattctatagaatccatgaacaattattgtggaaccatcaggaagattgaggacaagtttgaagggctagagttccatcatgtggagagagatcacaacatttctgcacacg

SEQ ID NO: 21755 - DNA, 584 bp, Zea Mays
ctgctgcggttacaaatggagaagaagtagctgctactgctgctggctgccgccttgaatcaaaatcaaatcaaatcaattgaatccctaagtgaaaaaaaaaactaaaggagctcggctgagctgacaaacggaaacccagatgagatggagaggagagggaaggaaaggaacacgcaaataaaaggggaagggaggggacagggggattggtcgctctgttcgtgcgtggtcaatatatgctttgcttagtacaacaggataggagattaggaggagcaacagctttcttgttgcttggaaagctccgcgcagagaccaagaagaagggatggcatggcccggccgcgtttggcagccagggggagactgaatcaaatcaactcaaaatggaggaagaataataagacgaggcagacgggggaggggctccgtctctgtcccgcccgccaaacggacacggagtacaaaccaaggggtagtagccaaccaacccccccaaatggcagatgggaaatggcccacctctcgtgcgtttgcttggaaagaatttgttgaatccggagtgctccctctcctctccc

SEQ ID NO: 21756 - DNA, 415 bp, Zea Mays
gaactttggaagcgattttgattaggaaccagggagtatttgattatggttgctatagcagaatcaaggctggtttatagagctacaactttgctacagatggatcaatagctgtccacatgaaaaatggagaatggagcttctcaatttgctctgtcaggcacactgaatggagtcctcatggtacagtagactgaaaaagatcacaggttcgctgcacctcgtcgccggtgaccttgcgctcggattcgcgccggcgctgtgatttgcgcccagtaaaacgcggataacgaccccctggcgaaaagatctcgccgtggatgaagttggagcactgtggccgctctgtcgcccatccacttgcgccgcgacgtggtagcgcggccgtcgcggtgacgatcaccgttaacccgag

SEQ ID NO: 21757 - DNA, 333 bp, Zea Mays
aagagacctcgcgaagaagtccacgccgccggaccagctgcctctcacgcccgaggaggacctcgaggaggcgaacgcacgctggacgacatcctcgacgcccagtgcccgtaccacaaggacatgtgccacacccttcggaactgcagagacttcaagcactccgtcgggcatgaccgacccttccaacctctacctccccctccgccacgaggaggaccatgagaaccgcgacaaccccagcagcaggaggagggaggaggtggagccttcccgcgtgtcgacagagaggtcaatgtcatcttcggtggacacagatcgcaggagaacaag

SEQ ID NO: 21758 - DNA, 288 bp, Zea Mays
gtcgacttgggcgattagtcgtccagtcgaacacttgctggtcgtttttgtcgtcgcaattttggtactgagcttcactctattttttggcccatctatagtagcccgcccctctagaagtaaatcagccgccagaaaccctcccagccgccacaaacctgctagaaatcctcccagccgccagaaaccctcccaaccgtcagtaaaccctaatcctctcctctgtcctctctggtttctgccgacgctctgctccaagtgctccagccgtccaacatctgccaccgg

SEQ ID NO: 21759 - DNA, 540 bp, Zea Mays
gcatcgcaaggcagttagcccgctacatcctcatagggggcacactgtacagaagaggtgcgacaggagtcctcatgaagtgcattcactcggctattgggaagcaactgttagatgaaatctatgccgggcagtgcggagtacatgcagcatccagaactctggtcgggaaggttttcagatctggtttctattggccaacaacgaagagtgatgctgctgagttagtccagagatgtgaagcttgccaattcttatcacagcaacaacatttacctgcacagcagttgcagaccattcctgtaacatggccatttgcatgctaggggctggacatgatcgaacccttcaagaaagcttagggaggctatactcacgtgctagttgccattgacaaactcacaaaatagatagagtataagcccattgcctctttaacctcagccaaggcagtagaattcatacaagacataatattcaggtttgggataccaaatagcatcataaccgacctaggatccaacttcaccagctctaaat

SEQ ID NO: 21760 - DNA, 757 bp, Zea Mays
tctacatcagcgcacctgtttgggggtaaccaggttcttatccaggggatgtcagcaacacaacaagggaaatagttgaggcggcacccctggtgctcggacgacggagtattcgagacaagcagccgaatagctggttttctgtcccggaatgggttctggaagagaagcaatgacagaaaccagaacaattaccgtattccagttctcctccacgtctactctcttcttctctatgcatcccttccttctagttacatgttgtcacatggaatcatgatattaaggggggttaaagatgggggtttgatggcagcagtgatgtcctcatcatcccagtgaaacgagtccgtgcacgtaaatggtgaagggggtcgctggtgtggttgtattgatggcagcagtgatgtcctcatcagggttcaatcgggtggtgttgggttcagtttctggcatttgaaacgtaatttagactctccaaaatggaaaagatctcaaccccaatgctatgccccagttgcgccagtccaaatgagagatgtggatggaatttgcgaaggtgataacagagggagaattcaatggttcaaaagtgcctgagcaaagtggggtcagtgtttatccacgaccggtgacctctctgcctgcttccttgccgtcggtcgtgccaccgcttaattgtgacgtcaatcgtgtgtgtgtgtgcctatgttagagccacgtgtccatgttcaagcagccgctggcagtgcgcgag

SEQ ID NO: 21761 - DNA, 474 bp, Zea Mays
gtgatctcattaccgacacatgaacaggagaggcagagaaggcaacagctagcaacagtatcatcctgcttcagatggtacgtgattacaggagcacctggatgattacctgaaacggagaagacagcaggtgcatcacccggtactattccgccccgcactaccactaattgcccgcgcgatcgatctattactgttttactgcctcctcgaacccgatcggcctgcatgcagtcgaggatcgagctctgcctctgcgtctgcctgcttgggagagcgaagaggagagatgcctgtggctcctctcatttatggttgcgtcgccagggcactgtgggcgtctcccgccgttgctgcagcgtgcagcgcagtgcagccttctctctccagccatcatccttgtcaatttctcatggtgcgcagcgctgcgtgctcgtgcagtggcgggggagacttattaaatgtgcattgaac

SEQ ID NO: 21762 - DNA, 322 bp, Zea Mays
ggcaaggtctgtccttgtgtgaaaatgggagcaaaagagggatgaaattggctctgcagtcgaactgaaggagattccaggcagtgccaaaatatctggggaaaaaatctactcccactagctgctctagttggttctagggggtgataagcctgagggagttgtcttgtgggagggggataacctggcatccatgcatcacacagggaagggggtgaagaggtggaaactctatcctaactgctgactgtgcagtgtgtctgttgggtgttggcacacatgcagtgaactgaatcacatagttcctgtgctttgcctcgac

SEQ ID NO: 21763 - DNA, 502 bp, Zea Mays
caggggcccgacaatgtccaggccctagcgctgaagaggccacgtgtgggcgattagcttcgtgaattgcgaagggcgcccgagcgtggagaaaatttctgacaggcttcgcaggacctcgcgacctgatttgcggcgcaaatcatggcgggccagtagaaaccttgacgaatcacctttgccgctagggccctaggccctgcgtgggagccgcaagtcccactgtggacttcgcgcagaatttggacgccttcggtcttggtgacgcacttaagcatcggctgactgacccccttcttgtaaagttggccttcgatcagtgcgaagtcccggcttcgatgtttgaggcgcttggcctcattgttgtcggttggatgatagtacccctgcaggtacagggttattggtgcccgccagtcttcggtcatgatgaggttgactatgcggtgaccctcactgtcattggttatttggagcccctctgggctgcggacggctggtg

SEQ ID NO: 21764 - DNA, 284 bp, Zea Mays
caggcatgtggcagtgctcatcgtggtcggtagcccacctccatcaagttgaggttgacgaaggcgtagcccttagtggcttgtttgctaagctccaccggtatggatggagactaagcacaccacatggttaggtcggtggccagcgagggccccttcgtgcaccagtgggccaaggcatagactagtgcagtggaccacatgggccctggtacaacccctaccaatagatctctggaaggagtccatgttaacaaaggcatagcccttgttgtcatggcttc

SEQ ID NO: 21765 - DNA, 643 bp, Zea Mays
ccacagtttatgcgcactggttctaaaagttgcctaatctctcgacagattaacccatctctgccactaactgaaaatgctggtcgtagatggatggagtaaagaaaaaccgacaaaaggataccaaggcattaaagaggagggcacacacaggtatggtatgaatgtcgaggggaaagattccattagtcggcccgcgaagtctgcgatcgcgagcgacaagctatcatggggttgaccctttaattagctaattagagctggagcggttgaggtcactggtgacgtccacggcaacgcagaaggcagaattgcactcccatccatcacaagctgttttcatgtctgcagaataatcagaccgagttgaagcaatcgccgcgtagggggccacatttttcgtgccatgttgacacccgctggaacagaactgctcgcgaaattctttagtccggccaaagtttagatcaggcgtaggctggtcattttggttgttttggcaaaccactggatccgtccatcgtcttctgctgttttcccccctgcagttatggtgtcatcccctggttggctggaaaggatttgggtgtaccacggctctaccttccttcccctgcatacccccatccatcgtaaatacgac

SEQ ID NO: 21766 - DNA, 531 bp, Zea Mays
tttcactctggactgcgcgcccaatatttgaaaatgcaggggctaatctataaaacttcagcagactcagacctaccccgcggtggacggcgggttgaatctatattattttagggactcttacgcaaaacgcccagccgaaggggtatggctgcctcaggttcgttggattagagcccaacggctcagatttaattaggggttttaataatcaccaagcgctcaggaccagaggatccacgatcgacgacttggatcacttagacgtctggatcgcacgcgaacacatcggaactgctcattcacagatctacggttaccatctttcttctcgatctaaaccctaggcgttggattgccatccaacggttaccaacattccccgctcccatctaatcgtggccgatcagccgccatccgatggctcccctcgtttcttccccaatcccgcgcccagacacagtggcgccggcgacccccatggagacgcatcgccggagcgcgacgaattggcgcccaagtgccccaccg

SEQ ID NO: 21767 - DNA, 827 bp, Zea Mays
tcggtgcggccaccgcgtcctttccgtctctgttgcacgccattgtgtgtcaccgcatgcaacacttgtctcgtcgaacccagtttctcttctcgcggcgcaggcaatgcccgcgcccccttttccttccctagtagcaccatcaatgttgccctagcccccctctgccgcatcgcaccctacctccaccatggttcttgagcctccctaccgtgtgcacgtctcccttcacaccgtccatctcctctaggccacattcatggcccttgatcgagtcatgaaccctattctccgtgactacatcgagctctaatcttaggcgagctgccacactaccgggccgtttgtgtttcccagcatcgtgattgtctacatgacgattgaggccttgtcctcttccccatccatgattgtcgtcagcatgctcaccgctaacgactacatcacccttccggtggctctaagggggtgacaccgctggctctctcatccttctccatatcattgccaccgcctcctcccactaattgggttgccgactaggcgcctcattccataccacttctgaccccgagttctgtctttacctcatcctcctagccccacattcccttcctccatcattgcggtaatgggtcgactctacctatcaccttagtaggtgacatggtccttcctagtcctttgtacctcaacaacattcttgtggcccccaacatcatccagaaccttctcttggtccatcacttcaccactgacaaccattgttctatgaagttcgatccatgggggctcaccatacgggatcttactactcgtgttgtggt

SEQ ID NO: 21768 - DNA, 348 bp, Zea Mays
gatctaactagtttgctaagtgtataagtgaatgttcataagaatcaaattgaaggattcaatacaacatttgggacttaggctggctccagcaagagccggtaaatggttctctacgctaaatctggcggtcagcgacctcctgtatccacccaacaacgaacggcaaaaggtccggtaaatttagagcgcgtgaccagagactgtaaatgtggcgaatctcagacgtccgctatacactgtctctctccctcccgcgcggagacggaagcttcctctcgcgccctcttcctgtagcaaagctctcgtcaacgacgccggtaggatcctggcggatgtactcggaca

SEQ ID NO: 21769 - DNA, 333 bp, Zea Mays
agacgacaaaaatgtagccgagcgcatcgctagacagtcagctcactacacactcattggggagacactatacagaaggggtgcatcaggcgtcctcatgaaatgcattctctcatctactgggaagcaacttctagatgaggtccatgctagacaatgtggaatacacgcagcatcccggacactagtcgggaaggtcttcaggtcgggattctattggccgacggcgaaaagtgatgcagccgagttagttcagaggtgcgaagcttgccagtacttgtcaaagcaacaacatctactagcacagcaactgcagaccataccggtaacttg

SEQ ID NO: 21770 - DNA, 314 bp, Zea Mays
cttgcccatgtggcatcggaatatgcatgaagctgaagtgggctatcagaggcatagagtaaacatcttgatcttgtctcgcgtaagtatctaagcacacgaagcaaatgaccgtaatgaacttaggtcggtgtggatacaaattggctcaaaatatgaacaacatgagcaatatcaggtctggtgatagtgtgataaacaaggctacccacaatatggcgatatcgagttgggtctgctagtggtgtaccatcctttggacgaagttgtaaatgaaaatccattggtgtcgcaactgtgcgtgtatcagtaag

SEQ ID NO: 21771 - DNA, 730 bp, Zea Mays
ctgtctcagagctcctcttgttccaatatcaatatggcagaatccctggacctttatgtgggaagcaaagcttcctgctaggctaggtgtgggagccatcacaaactagtgaatatgtatgatgttgcccctgaggcagagtggtcgcagagggtacgacattaggaccatgtttgtctataatctagacgatcatatggtactgatggtttgaatacgactctcgtctatctcatcaaatatgatggacgatattgtggttaaggatgtgcactattaatgtggtataggcaggaagcgtagtcgagagcactatttgatacgtgccatcgctcttatagccacacttaaataccatcaagcattacaaagtacaaactggtacaccggttaccaactatgttgtatccaacgacgtggactccatcgcttgtgactataacaaatatatctgccactaaagcaggatatactcaacattgtggaatgatcgagacatgccacagtgtacgactccacgactatggtaagataagagttgttacccctttgctagatgggacctaccgtccaacagacatgcaagtctccctcctttcttgagctataaaagggtctctctcgctccgacctagtagatcgattcatttaggttcgattcaaagagaagaactaaagaactaggactcggacaaagatactaaatggtatacatagggatgaactagag

SEQ ID NO: 21772 - DNA, 589 bp, Zea Mays
aagctttctttcgtattgtatccatgatactgcacatctcttaggtgtactgtcgtttgcggtccttgcatcctggtcttgtcttgtgtgccttgcattctctgtattgttatccactagcatcttgttatggacactgcagttcttcccttttggagtcttgtaagcaaatgaatgtagcatttggaaccatatatgattctttttcttgtagttgacactcataaaaggtggacatggttcagtgtctgcaacagcttgacatgggtagcttgaaagtatcactgcaatatgtcgatctgttatgaatctgcatatggaaactgcatgctgctgttactggatgtgtttgggataattggacgatcaagtttttctccgtttttcgttttctttttatgcagatgagtgccccctcctttgtgtgagtgtgtgcacgcgcgcgtgtctgatggtcttagaattttactttccagtttggtttggtgtcagtttaatttaggatttgacttggcgaggatgcagatggggaagtgggagtcaaccacagcggctgcacacattttcttatgtgtgtgcagctttagcc

SEQ ID NO: 21773 - DNA, 400 bp, Zea Mays
ctagccgagccctgcatggaaacacccctttcttcatggtctatgggtcggaggcagtgctacctgctgatctcaagtttggggcgccaaggttgattttcgagagcatagcagaagctgaggccaccaggctggaggacattgatgtacttgaggaagaacggctgaatgcggtaatccaatcagcgcgataccagcagaccctaaggcgctatcacgacaaggctgtgcggcaacggttcttttcagtaggagacttcgtcctccgccgaattctaacgggggagggacgacacaagttatcgcccttatgggaaggacccttcgtagtagcagaagtcactcggcccggatcgtatcgcctcactcagatggatggcacagaagttgggaactcttg

SEQ ID NO: 21774 - DNA, 348 bp, Zea Mays
tattaaggctctaagggtagcctgccgttctgccttcgttcaatctggatcgtccatcgctgttgttcaatctggatcgtccatccgcgcccgcaaaaatttgattgtagcagggacgtttattaataccactaactgattacacaagctgactgctttctctgtagcaggcacgtttataagttgctaccgtactcttttgctggccaatatggtaccatttatttgcgccgcggtagagaacatgtgtcgaatttatttggctgaccgatatgaggcccatctatcaattcaattgtataccgctaaggcccaatcgctcagtcagctccactcccgcggcatccc

SEQ ID NO: 21775 - DNA, 428 bp, Zea Mays
ttcaacttcgcccaactgcatatcataccacatcttcgttgcacctggtacgaggaaaccctccaaatatatcccatctgtggaaatttggatgtgcggtctacacccctgtatcaccgcctcagcgaacagctatgggacctcataggaaattgggcatctatgtgggatatcaatccccatcgatcatcaaatacctagagccccttacaggggatttgtacacagctcgtttcgctgatgcatctttaacgaggaccattttctggcattagggggagaattcaagtatcctaatgaatgccaggaaatcaattgggatgacaaatccatcctgtcctcagatcctcaaacccaggaatctgaacttcaagttcagaaaattatagaattgcaacactttgctaataatctgcctgatgcgttta

SEQ ID NO: 21776 - DNA, 502 bp, Zea Mays
ggggtcagccaatggtggcttcctcagaagtactcaccaggcgatggtaaaaccaagcgttctacctagggtgaagccacatgcgctcgtggcctcgggatcaccttactgtgttgtattctttatggtggatggcgggagcatcgtagggcccaagcgccatcatttaggctatgttgactcctggccttcatagcctagggctcaacacggttcatcgtgttgtgccctgccggtggtctgtgcactcaggcctagtcctgataggtcatgagtgtgccacaggttgaggagcatgtgggccatcaatgcgttgtagtccaaggggttcgtaggatatgagtgcgatgtgggccgagggactcgtaggtcatgagtggaaggcagactggtgcccctgctatcgcttaacgtcaggcgtggttaatacgacatgtcacttatgacgggtcgatcttgggccgggcgagggatccacttgagtcatttccctttggttcgc

SEQ ID NO: 21777 - DNA, 349 bp, Zea Mays
aattctcctaattgtgctaagaactggcctatgtgttcgcgcgtgttttttccttggtcacccgaaaattttgcgaattcggctatcctggttccctgggggtatgagtggtgatcaaatcggctatcataagatttccgatatgattgccccccaggcaccatgcttactccgagcttatcttggaatgccccggctatttcctccctcactatatcgatggtagccggtgcgagaccaccggctctctggttaaacataggtggggttggctggatattagcatgttgtcttccccccccattggtttgagctatgtggtgcattgccatttgccctatatggctca

SEQ ID NO: 21778 - DNA, 421 bp, Zea Mays
gcgggaggcagcgttggaggcggcaccaaagccatcaaagccaaagagatggagccgcagcacggcttgcttcccaccccaaagagttggggggcgcgagggatggagacgtggctcagcccgctgtccaccttcacgaggttggtgaacatccttccccttgaatgctggaggaagaagcgggaaggagcgttgcctccacggatatcccgcagaggtaggcgatgatggccgcctgaaggatgaagcagggcgtaacgtgtaaaagctggaggccaagcccccccagcagcagcatgaagaaagacgggatcggcagcgccaacccgctagggagtttggagatgaagaacacaaactctccggtggcgaggtcactgtaagaacagacaccgacacggatccttccagcaaacgccga

SEQ ID NO: 21779 - DNA, 429 bp, Zea Mays
gtgctgaaaggaattagaagaaatgggctgcagcaacccatgctcctcagccttgataaaaagcacagtgaggacatccataacaattataaaaagcagcggagacaaggggtcaccttgccgcaagccccttctatgagaaatgaaccttccaggcaccccattgagcaagatctgggtggaagaggtcataagaaaaccacttatcacatccctccacacgggaccaaagcctaatttttccagaacttcaaaaaggaaaggccgagagaccgagtcgaaggccttggaaatgtccagcttatcttatcagccaccttgtcaatgagatcaagaaaaacacttctaggtagctttgtaatagaaaggggcaatcgcaaatacttacatggaaagtccacgacaatgcaggggaatagatcttgtgct

SEQ ID NO: 21780 - DNA, 560 bp, Zea Mays
gtgacagtgaagctaatttactgaaactgatatgctaaggtccgctaaactcatatgctaagatctcacactactggtgctagtagctagcgcaaccagactgtttttgcctggctcgtcatcgaagcagcgacctctctacatcgcatccagttccagaccgcgctgtcgtcagaccggcgaacatgtcgtcctccctgttcttggcccacagcaccacgtacagtccagcgaacattacaatcttcatagtcatgttgcccagaagctctcaaattttcttggtatttctgttggagccattaacatttttaaagcaagttgtattattgagcatgccaaaaactgtgatctagagtaattccttgttagaaactgtgatctagagtaattccttgttccattttgatttttatttccagcaataaaggcactgactactagtattttgtgcactgtagtattccttgagctattgatctgtcaacaataggaaattccttgagctgaatactagacgcaaagcacctgacctaacgaaagttaaatactcctaaata

SEQ ID NO: 21781 - DNA, 319 bp, Zea Mays
ccacggttactagatggctctataaaatctttgtcctgccatagcatgcagtcctcagatcaatcaaccagcaagtcgccttcttcccatccctctccatcaagcaaaagactgacaggaaagctaaaccccaacaatcaccatgggattcttccaaggcaagacctccaagcagaccacgagggtcaagaagcttctcggactcgccctgtcgcgcctcgccattgcacgccgtccccgccttgctcgcaggtccatctgccgtaacgatgtcggccagctcctctccctcggctacctccatcgcgctctcctccgc

SEQ ID NO: 21782 - DNA, 389 bp, Zea Mays
aaaaaaggtatgccatgaacatctgaacaatcattaacattgtagcaatagtagatatcattttgaaaaccttattcaattcaatgtgcgataaacatagtattatgtctatggataagtaaattctttccatggtaaatatcatgatttataggagaagcttgaccgggttgcttgagttttgttctctctatgctagggtagctacataggctcgctacatgttcactgaagtggaatgatggaatttttgtgattgtaaatttatgttactaattttattatttgtctacacattctattttattatgtgcagcaagtagtagatggtgcaagggtgggcaactgggcttgcgttaacttttgtcaagagttgcgtgcagatggtg

SEQ ID NO: 21783 - DNA, 468 bp, Zea Mays
aaaagtcgcctaagggtgcagccggaaaaagcacaataagtgcgcgacaccatccaaagggtgcgaagtcttctacgaagatagtcttagcaaaagtcgcctaaaggtgcagctggataagcacaacagatgtgcggccacctagcaagcgcagagtcatccacgacacatagacgcccatccacgacacatagacgcctaaacttgcagcaagctcgcaataggcacaataaattacatagcgcaatcgcaaatgaatgaacaaacaagcgaagggctcaaaggcaccatcccacaactcaatagcatacactttacaacattcaccccacaagtgtcaaggacaccaaatccccgactggccggaccccggctacataactcgtagccgttgtccatcacgccggcgaggttatacccctcagccgttggtttgtagagaagagagggagattaggaccgacttat

SEQ ID NO: 21784 - DNA, 788 bp, Zea Mays
cgcagtcgtagcatgtgtggccattgcaggcttcctcggatggtgtgtctactactcctggttttgtagtccagcgcccaaagcgcgaggtacgtccagcaggtccacccctgaatttctgaattaattaatcattattacaaccgcgcgcatactaattaaatcagcacaggtgaaatggagatgtcgcgtatcctctcgtctcggcgctccacgtcagctctcttgtgatgtgattccccctccctacagctacaacttgctcaagcatgcggcaatacagcaccagcgtagccagcaggcagtgctgctcttgggctggtagtggtacgataatgatgagagtctgctgctgctgggctggttgtacaatagtactactagtgatgagagtgacgctagctagctgctctcctctgcattgctctactctgctctgcgttcctctgcactgctctactctgtgtccccgatcaaacgagagagggatggcccacgcagacgcaacaacgcccggatgtttgcatgggctataaaatggaccaccacctcaatcgatagggacggctgggtcacaatcgccactaccctacccattagtatatactagagtagccgatggcctcctcctccgtttcgctgctcgtcaccatcatgctgcttctgttgctgccgccgtcacctgcttgttcctcgctaagttgcaggcttgacttcaccagtctggcgctgctctcctaccaggagacggtaccacaaaaccctactacctcatgctgcgacaccct

SEQ ID NO: 21785 - DNA, 414 bp, Zea Mays
agttggtatgccatctccccaactctcctaaagatcaagaatggtccaatatagcgaggggacaacttgcccttgactttaaatctcctcattccacgaagtggtgacactttgaggtacacataatctccttcttcaaattccagtggtctccttctattatcagcatagctcttttgcctggtttgagccactctcaaattctctcgaattatacgaacttgttcttctgcttcttgaatcagttcaggaccaaagaactgtctttctccagtctgatcccaatatagaggagtcctgcacttcctcccatataaagcttcaaaaggtgacatcttcagactggcctggtaactattattgtacgagaactcagcataaggcagacttttatcccaacttcctccatgctga

SEQ ID NO: 21786 - DNA, 341 bp, Zea Mays
aaacaatactgtagcagagtatattgagcagtttgacattttaatgcatcagttgctagcacatgaaggacagttaaccccagctatgatcactgctcggtttgtggatgggctaaaggatgaaattaagtcagttgtggtgattcaacgtccagttgatttggacactgcctgttctctagccatgttgcaagaggatgtgttgatgcacactggaaagagggaaaataggagggtggagataagtgggtattcaaggccaccgggaaaacctaattcagtgggagtaaattcagtagcagtccctgtaagtcgtgggtttccaccatatggggaacatc

SEQ ID NO: 21787 - DNA, 536 bp, Zea Mays
cacaaaacccttcaggtactgcaccaaaacggcagaggggtgagaggagaagaaatcatgtaaatggattttgcccaaattcgctcggattcctgacctatgggcgtttgatactgactaaaccaaactagcccacctattcgaccagaggcctgagctacagagcacgccaacccacgctcagcttgtgctctgtgtcgtgtcagacagcgcagcgtcgcacccttgaccatgcctataaagctagcccaaccccatggatacaccctctacgtttccccaaaccctcagccgagcgccctcaccaggatttcaccaaaaccgggagcaccgccgccggccattgtcaacagagccggtcacattgaactgccacacccggctacatttcactctaaccagaaccaccaccaggtccccctaagtcccatagagttgttcaaggcctgagccgaagctctacttcaccgcagcagcgaaatcgccatcgctggagttcggaatttccagcggtgagcgtgagccgacctccacgg

SEQ ID NO: 21788 - DNA, 700 bp, Zea Mays
ctaagatatctcggacaacacaccactcaacacaaaaagtcagccttaccaaactagaatatggcctgatttaagcaaaacatgccaccgaccccaccaggcttcgacacagcgacaggaaggtagcattacctagtaatgcctcttgaggacaataacaaagacctacaggctggcctagacatcgatatcaccaccgaatagcaactcctactcaagagccttcacattcgtaacatcaacctacagaagcaaagaagcactctagcagctaacaggcaccacagcgaggtccaaaccaagacaaacaacttaagccaacaggagaaggagcacctccaggctatagaacaagaaatctctcggctgcaagcccaataggaacaaggccacccaccgcacagcagagcaggacctcacaacatcaggaacattagagagactgcacataacaacatgttccaagccttcaatttcatcgataaaagaagcccactatcatccaggttacaagcaacaccttggtcgtgcaactacagagcagggggctggccaaatacaatggaaacatcgaccctttgcaattcattatgagttatcaagtcactatggcatcatcgggaggggacgacaaggcaatgcgaagtcactcttaatcaccctcaaaggccctgccctgacatggtacactagtctaccc

SEQ ID NO: 21789 - DNA, 652 bp, Zea Mays
ctggtcggtctctcgcctagcgcgccggggagggtttttgggtcactgtcatatggggccgatacgttagaatcacccccaaccccccgtgaacgcaaacagaatcgatcggctccctcatgccgcgcgtgtgattcggagattgttgggattcgccccagggttgttaggattttgtgggcccgggtgattgcctcccatggatatataagtgttaccctggtcgtggatcgttcatctgtgcccctgccgagtagagtacgaagagcgcgcccgtgagggagaaagggagccgccatcgttgtgggtcggtcctcgtcgccattggcccgggacaagtggtctgtgaggatcagcatcggccgtagaacgtcttcaagggctcggccaagtgagagatcaagtgggcgattggtaattcatcgctggggagcagggcggcgcctctctgctcgaccgaaacgaggaagacgcccctcagtcgtcgatcactagatgggcgactgagactagggataagaaaaacgattcgccccaattgcttatgaccatcggatccataacggacgagggagattatatcatggcgtggatggttcagggtcgttgatccatcgatgtgcgcccaggaataaatgagtagatacccccc

SEQ ID NO: 21790 - DNA, 317 bp, Zea Mays
atcatctcgtggatgaactccggccactattctactccgatcgccgtacccgcctaagtcacgaccactttggataggatcgccggagttagccacctcgcaaccttgcgccacatgcctcggtgctttaaccacgccgcagtgagtcaccttagcccacccgatcgtcgccggtgagcccgccacggtaaatgccaccaattacttgtgccagagcacccccttctcttcggccgccgcgcgtctttccctgaattagtcaccaccgctcatggatcctataaattgagcctgtcgtcggttccgcaaggtagtcc

SEQ ID NO: 21791 - DNA, 466 bp, Zea Mays
ctaatcctccaccaggcggagttgacccactgattgcagctcagatgaggatgatgcagcaaatggtggacactatggcagatatgcgcgctgagatggagcaagaacgccaggaaatgcgtcaggaaagagaggatgcacgtcgggagatgcgccaagagcgagaggagatacgtcaagaaagaagggcgcaacagcaacaacaacaagcgccactgcctccacctccaccaccagttccacctcgggacaagcaccgagaattcatgagccacaaaccaccaaccttctccaactccgcggatccgctgcaagcagatgactggctaaagtctgtagaaaagatgctcaacatagctcagtgctcgaacagagagaaagtactctacgcatcaggtcgtcttgctggtcccgctgcggattggtgggatgcgtactgtgctgctcatgcggctgtcgacacaat

SEQ ID NO: 21792 - DNA, 357 bp, Zea Mays
taggctatcaggcgcactgaatagggattccattgtacagtgactgaaagagatcgcagattcacccccctcgccgccggtcatattgcaccgggattctcgtcgccgttgcgattcgggctcagcaaagtaccgaatgtggctcagggtggtaaagatcgtcgtgtggatgaacttgagctcctgttcactccggccatcgtggcccgccgcggacgatcgcgctggcatcaccggcgttcgccgttatccggccaggctacgtgcctcgatgctttaccacatcgcggtgagtcaccataaaccgctccatagtcctggctcgtcgccggtgggtctgccacggggaaggccacg

SEQ ID NO: 21793 - DNA, 912 bp, Zea Mays
aaagacctcatcaacaaggatgatggaacacccctgacaaactgaacaactactaatggagccattagcagaactaaccaaaattgggtgacccaacctctgcaccgaaagaccagcacgcgacacaaaattctccgaaataaacgaatagctagctccagagtcaaaaagagcatgggccacaaacgaatcaactaaaatcgtacctttcaccacgtctccttgctctctgccatcggcagcgggtagcacataagtttcggaaatacccgcagaagaggaagctcccagagtgaaattaacagaagaactccactaagccgacgggtgaggcagacgcggagctccaaactgagacgacataggagtagtcggtgcaagagtaggcgtagccagatattgaggaaaaccctgcatcggcacgaacaagaagtcccaggcacatagaactgctgcggaggaagtggaactgaaaattgctgctcagcgcttgacatcatgttgacagtgccctgagaagaggaggaagtcactggctaccatctgagcttcccattgggattcctcctacacaccacatccttatggtcttgactgcagatagaacacctgccactccactagcactctgcacggcgatgcgcatcaccacaacggaaacacaccagccctagctcgggcttagggacagcccgaaacctctgagtacttcctcccgaagtacccaattcagaggttttgccacggtaggggtggtggcgctggtactgagacttgcccctcttgtgggctggacctccagtgttgcccctcctcgcgtcctggccacgaggctgatcaacacccgaagacttctgtgactccatggtgtactggtgttgcatctccacacccaatgcctgctccactgta

SEQ ID NO: 21794 - DNA, 518 bp, Zea Mays
gccggccgcgctggctgcggatccggtggcggcgtgcggatctggagcggagggatgggatcggggaggaggagcacgggatgggacaatttgagatccggacgtggaatgcgacgaggaggaaggaagaattgctggagatggaagatgtgcttcggtgacaccggatttgcgccgctcgggttaatcgaaatcgacgtcactacggctggacctcggcttcctattggtcggggctcggggctcgcgggttttctgtctacgagaagagcagattagtagaaatgcttgcggcccgacggcgcgggtaggccggctgggttcctaccgtttgcaaatgcagccaggcagggaagctggttcaactctggactctcgaggcgggagggtggaggcaccagggatggcagcaggtcggataaagtgcgagtaagttatttattcgtccgccaatatattcgcgtccctagtgtttacccgtgctcgtgagagcttgcgggtaaaattttcgccccgta

SEQ ID NO: 21795 - DNA, 914 bp, Zea Mays
agcagactcatagcagctaatcagctatcaacttcatagcagactcatagaagcaacttcatagcaggaagccaacaagccctccaaagtagactccacaatccatgcggccacgccattgcagctagcaaatgtaaacaacatatacttcacacattttataaattttattgagaacgaacactcacaatgcaactagttagcaactaggatgtgctttggtgtgtcgacttgctagctttgcttgattgtgaccatgcaacagagccatcatgttcttgcccactacctctgtgtttgccttttcccttttcaccatgttcttcaatcaactctaaaagtgtggtgaaggcattacacaacatgcgaataatatcttaatttggattagaattaacctatacaactataaagtataataaataagatgaagccatggttacctttttctaattcagctaattgctccatgtcctcctggatattaattggagtggtccttcgcagccaatcctgagtgtaaacaagtgcttccaccatgaatggagtaagagatgtcctgaagtcatcaaggattcttccagacgtgctaaaaactgattctgaagcaacagttgacaccagaattggtagcacatcacgagccaagcgtgctaataccgggaatcttgaggaattcaccttccaccatcctaaaatatcaaacttattatcttctggttcagtatcttcagcaaggtatttttcaagttcagatttgttgttgccaccgccatagttgtgttgttttagttattgtgcaattaaggacttcatcctcccgcctttggactgtcttacttcttgagaatcattggttggtgttgttgcatcaggtggagcataaagtctcctatattcttcaaacaattgtc

SEQ ID NO: 21796 - DNA, 543 bp, Zea Mays
gtccgcactcgcgggcactcctcgctggctcgtcacttggtgtgaaaggcggcgcttgaccgcgcggcgttttcggggctttcagttgctggatttgcctccgtctttggaacttggcgcccgttggtgcggtcacttttcgtattttctttggcgctttctatctcaccacgaattcacgaaaggctgtaaataatgtgagtcattgcgagtcacgaaccctgataggccaataaaaacgaaaggccactcatgcccatcccaaggctagctcgttcacgattgaaacctggttcacaattgaaacctggtagtaggaaaaccacaaaccgacagagagaaaagtttttaaacccaactgaaacctgagtgcagtggaacctgtgaggtcggtacggtagagaccaaatcatggttccccttcgtttttccccaactcatatacgtccagagagcgcatcgcacgcttccccagcgtcaggctcgagattcacgtcccgacaccgccattgcttattacaaatatctactagtactgttgac

SEQ ID NO: 21797 - DNA, 416 bp, Zea Mays
cgtaagatggcggacggtccgcaacatatccggacggtccggcgtgatgcaccggacggtccgtgatggggccaaagtgttcagggttgtatcctgatggtccgaccatgtacggtgcgacctgagtgttttgtgtgcgggcctgcatctggtcggacggtccggcgaaatacgccggacggtccgcggtataaccggactgtctgagatgatgttcggatggtccgaccgcgtccagtacttgccgtgtgcctagtggttgtggctgtggtggtggcgcgaaagcgtgcatcggcataccatatgatggctgggtcaagggtgacccatttatagccgatgtgtttgacgcgggtggcactgtattagactctcgcgatggaaagttaggagcagctgatttctcgtatgcacgt

SEQ ID NO: 21798 - DNA, 555 bp, Zea Mays
gtaaagtgcgcccttttggagagacatgaacaaacaatgcaggatcatgttcattagaagagaaaccagcagctgtgatgacagagatgaatcactcaaaccaagcacgagaggcttgtttcagaccatacaatgcacgacgaagacgagaaacgtgtcctgagggagtatcaacccccggaggaggatgcatatacacttcttcatgtagatcaccattgagaaaagcattcttgacatccatctgggagatagtccaagaagatgaggctgcaactgcaatcgaggttcgaactgtagtcatatgtgcaacaggtgcaaaagtctcatcataatcaagtccttgagtctgttggaaaccacgagccacaagacaagctttatacttctcaatggaaccatttgattttgtcttaattttgaagacccatttgcatgtgataggaacaacatgcggggtaaaggaacaatatcccatgtaccagtgcattcaagagcacccaattcatcaatcatagctagctgccactcaagaatcctagaagcttcatgata

SEQ ID NO: 21799 - DNA, 818 bp, Zea Mays
ccaaaggtagatttccctttcaagtcttcctaacgtcatatgtagggtcgtgcgctgttgtacccctagtatggtattccatcttgtccgtttggtacatgagtccctatggcttgcttggtgtcagcgttgtggtacctggcggattccgcagagttggcttatggtaaggttcgaggttgtgtctggtaatgtttcatcttctgtcataccccttgcatcattatatatcaagcatgcgtaggtatacgcgtggtatggggtattgtttcgtcctttccggcgtatgggttattgtagagactccagtgttgaggtctccgtgactggagttgaccggccccatgagttagcgagggcacttccgtaggcgcatgtgggggtgttccatcgagtctgcctgaggcctttcggtactgtaggtacagtacgatcgtgatttggtgattttgtgtcttgtcgtggctgtcgtgggccgacaacgtcggcctggattccttctttgtgaccctgcctgatgggggtttggttgtttgccccgcctcaaagacttgtttggcggggacttggtcggtcgtcccgccgcgcagacttattgtctgggcagggacttgatcgatcatgccacctcgtagacttactcgacgggagtttggtcggtaaattggctagagagaggtttatagacctcgctttgggtgccactttactagtacccgataacaacctttcggtgcatggagtttgcagtcgtaattttgatttgcgccttcgaagactagccaatgcggccgcaagcgagctgtttgagtcttctt

SEQ ID NO: 21800 - DNA, 549 bp, Zea Mays
ctcacctatccttcaattggtatcagaatcggtcaatgatttcccttcccgaatcggtttgaaatccatgaatgcgacatagaacgtggttggcaagccattgttcttcgatgggacaaactgtcatggtttcagaaactagggggaagtaagatatgtgttcgatagggatgctagcgcggactcactccaaatggtaaatcgctgggatttgaacgagaggtctgagacatcagaggtatagtggttcgggttcgcaccctactccattgtagtgctgatcgtagtattgcgatgagtgtgttacaacaagtgtgcttgtgtgcctataagaaagaaggcccacccttttatagttcaagggtaggaccttataggggtgacttgctctctacttggtatgaggttggtccattgccctagcttgacgttgggcacctcgtgttgtgctatctgtagggtcgtgcgtagtcgtagccctggtaaggcacatcgtctcgctcattcatcatatgggtccctgtagcgagtctgctactaacatcttcg

SEQ ID NO: 21801 - DNA, 423 bp, Zea Mays
aggcaataaggcaagcttttgttcaaatggtcatagaggatgagctcccttttatgtttggtgagaagtctagatttagaaattttttgaaggtagctgccccgcgttggactccaccatctcgaaggacgtgcacaagggacatagttaaaacttattttgaaggagactttatgctccacctgatgcaatagcaccagccaatgattctcaagaagtaagacagtccaaaggcggaaggatgaagtccttaattgcacaaaaactaaaacaacacaactatggcggtggcaacaacaaatctgaacttgaaaaataccttgctgaagatactgaactagaagataataagtttgatattttaggatggtggaaggtgaattcctcaagattcccggtattagcacgcttggctcgtgatgt

SEQ ID NO: 21802 - DNA, 648 bp, Zea Mays
agaaaagtaaaaatgaaaatagggaaaagaaaagaaatggcgaaccggccaattgggccgaatttcatcagctggcccatttccaccgccgtgctccactactgccgagtcgttgacatgtggggccaccccgtcggtcaccttttctgtcgcatgggcgggtgcgcgcctggttgagttatcactggctcatggggcccacctcgtcattctcacgcgcctccactcgtttctctgtcatgtggggtcgcactatcagacttccttcaacctcccaccgccgagtttgccgcgcggattcccctccccgtatcacgctccggccgggtatatcggacttccctgaccctataaatgtcgcccggggtcgcctccgcattccactgtggccatatcggttcggttcgtggagtcctgtgggtaccggagggagagaagggagctttggaacgccgcttgggagctgtcgtcgcgccgccgccaccatcgtcacgctatctgggggccattcggtgtctagtgtgggtataggattgatcaccgagtcttggggaagctttctccaccaccaatttgaggaacgacccctgtggcggccgggattcgtcgtcgaacgctgggatccgccgctccccgtggatgacccgg

SEQ ID NO: 21803 - DNA, 276 bp, Zea Mays
ctgttggaacctgcagacgttgatgcaacagaaacttgtgcggccgcaccagatgctgggttgaggtcgtcccgtgcctcgtcgaccttagagcacgatctcgagggccgggatgatgacttggatcgccctaatcctatggaaatagctgaaggcccgtcgaccttagaggtggtcacggcagagagcttggatcctttgaatagtgctgacatgtgcccagcccccgagggtgtcgccggggaggactcaactcaggtgaggagtgtaggccac

SEQ ID NO: 21804 - DNA, 695 bp, Zea Mays
cgcccagaactcccaggcaagatccctgtagtgtttattaagatggataaatgttgcttagaggtttggttgttgtagaagtttttcgatcatgtttgttatgtgtgctatgggtaggattagttatctgctatctgctaatgtatttccaatttttagaattgggttcaaatgtaacatgtctcttgcacatttgctaaggtagaagtactaatagtgtatcaatatagtttaatgatctgtattcatattcatatacttaacatattttttgtacaatggatacacctttatttacatctgacacaaatgtgatgagattaaaagtcgaagtgaacaagtataaatggatacactttagatggcttcccccatggtgttttctttgagcgtgcatagagttttgcttcggtttacatagtattctttgatgctgctaatgcctatattgttttcgaatataattatgtacaatgggtactgatggtgctaattcaataggaacaaatgagttctgagtcatcttctgatacatctgggtcatcaacttcagaaacctctgggtccacaagtagctcatcttccactagcttgcattcagaggacattgttgaaaaaggttcttgtacttctgccaggcatagaacgaaacgaggtcacgccaaatgcaagaagctagaaaaaggaggtccccg

SEQ ID NO: 21805 - DNA, 653 bp, Zea Mays
ccaccccatctcacaaaaacggaaaacataatcgtacgactgtgcttggcgattttcttactcccggtcccggctctgcccctgtcgcgccgtcgcctcggtgcctcctcccaccgtcgtccatcgacagccgacgtctctggtgctccctgaatccctctcctccctccctctgtctccttgttcctaaccctaatcccattcggatctggtgattggtgataccctaaccctaatcccattcggatctggtgattggtgatgctcgttcatcgttggtgctcctcgctggtcggctggtgctcctcgcctcctcggatcgagttgtagcttgatagctggtcagctggtgctctgtgtggtgcgggtgcgtgtgtcccttcctgattcttcactgtctccagtccagtggtccgtggctccgcgccttgtatggtcactggctcactgcctcacttgtgcggtagtgcactagtgcccctgctggctgcttggacatctataattttgttctgttttcaatttactcccattctcgccctccttctaacctgtccggttgtccgactttctctggtgctcggctggtccttgcttgctgttgctggtcgctctgctcggctgctcctcggacctcggctccgttccgtcgt

SEQ ID NO: 21806 - DNA, 688 bp, Zea Mays
tcatcctcttccaccagaagttttgcttcaaatctctgtacattttggtttcgccagggtgaacggtgtaaggcgttttatgagcttctctcaagatatccatcttcacctctgacttctgaggcacacaaagatgacccttgaaacgaaccaaatcattctcatcaatggtgaactcacggggtttaccatcgccgaccctctttcgagcttcctgcaacaaacgatcctgctgttgagccacgcacactttctcgagaagggaagattgaatgagcatccgagtctcctctctagcggtgccgacatagcacaaagcggcccccatacggtccagatctacgatcaaaggcaaggccacttttggaaccccggacctgctaagggcatcagccaccacatttgccttccccaggtgataatgaatggatagatcataatcctttatcaatttgagccaccgacgctgcctcaaattcagctccttctgagtgaaaatatacttgagacttttatgttcggtgtagatgtcgcaagacttgccataaagataatacctccacgattttagggcaaagaccaccacgaccaattcgaggtcatgagtcggataattcccctcgtgcttcctcaactgccttgagccataagtaatcactctgccttcctgcatcaacacacagccaac

SEQ ID NO: 21807 - DNA, 409 bp, Zea Mays
gcggcggaaaaccgatttgggggaagtgagcaattcggaggctctggtgaacaattgaaggcaagtgctggtgctttggatgggtaattaccctatggagctcatggcatgctcaatttatagagtccatgagcggtgttgtccaattcgaagggattgcgctggcggccgagaagggggggtgagtcacggcggtgatctaccgtggcaatcgcagggcaattgagctacgacagttactggatggtcactacggctcatgatgacgcgataaacgtcctaaggcgtggtgccccaacggtgaatggcgaacacgccggtgatggccgctcggccacgtcgccggtgcgaacagatgaatagccgagcgcatagtacttccaagctcaactgcagcaagatcttttac

SEQ ID NO: 21808 - DNA, 403 bp, Zea Mays
cgaggaactagaatgacaggaaagattctcatataagataaggcaaaagtggtcctatgtcacatgaatgtgtaatgaacatccagtgttgctgctataaggccaaaataagaaaatgaacaaaaacacctgtcacaacaatctggagcgccactgcatctagtaaaacaaggcagcaaggcatgaagcacacacatactacagactccagtaacagctgattcagcaaatgaaagagcaagcacagaatttatcaccgataactgcatccactgtacaagcactgcaggatcaaagagaacacttgtgttgcaggtagcgatataaaaaaaagcgaacatattgagcagtaaaatactgcattcaatcaaccatgcccggcgatccttatgctaggtcccca

SEQ ID NO: 21809 - DNA, 509 bp, Zea Mays
caaagagtcagcttgcaactgatgcctcaattcaacaacataacatacgatgttctcatattgacatgataaggaagagggggaagaagtatagtacttgtggcggcaacatggcgccctcaaagagcagcgcgtccaagcgctcgacggtcgcagcctacttgctccagaagcacctgatctctcaacggcaggtgtagacgttgtcgagcgcgatggggatccacatccatcccttgacgagcgccccgatgtggtgcgccgctagttctagtacctcacagctcctccccaagcggaatcgccagtgatggataccgcctccgcgcgagacgccagagcggatgaagtccatgagcatcggcccttcttatcacactctccatgggcttcctcctcgcggactggaacaacctcgaccgtgggacgctcaacatcttctactggatgctggccaggcgatggggggcatacccagagtcgaatccttgcggcgacgacgaagcgat

SEQ ID NO: 21810 - DNA, 502 bp, Zea Mays
cggtgagtctcacccaatcggtacgtcaggttagatctgaaccgcacatcgcacatcgacggtcagaaaacctttccccttcgcggacagaggaacgcggcggcgcgcgtcgcccgcggcggaagacatcgccggaatccggttcatgccgatacggcgatccaaactcgatggggcttctgctacacaatgctatacgctagaggaacaggacggttggaatcttaccccgcaattcctcgtcaacagccacggcgacggcaactggcggttcaccgacgtcggtgaaggattactcggcgacgcagacacctttgcgcccgcggttgctttggtgtggccccacgagtgcccaagaaacgcccagcccgagaatggaacccaggcgactacgaccggcgaaatccagtgaccgccgactgcggtggagaagtgaaattcggttccgcccacgatggagatggtggctcaagaaaaatcctggggaggtcagcgcacggcg

SEQ ID NO: 21811 - DNA, 827 bp, Zea Mays
agctcaatgaccatcacatcccagtgcaagattgctcttcgccctggaaccatgttctgcttcggaaccatctcgtccatagtggatgagaagggaactctgcaccgcatagcagacccgccgaagaagaagctttcctcggagatcccaaagaaaaccagagtagtgggtggcgcagccgcccgcatcccgagcgaagatgacctcttacaaaccaaaaatcgggagcttacctacccgaagaactccgttgtccacctcgcccataaaggagtggacacggatcactagaaagaaggaggcaaacgttccgaataaggggatgggacctcgccaagtcatctttcagacaccttcgccctcaaaggaggacggaaagaaaagcgacgtcgagacaactcctttctaccctgacatcctcttcatcagggggagattggagtcatctcccatctccaacgacgagccaaccatgcaaggggaagaacctcccaagcatgaagcacgacgacggaggaacagacgccggaacgtgtggcgacatcacgaggctggggaacgggacccggcacagcccgtatcccgggagaaagcttcaaaagtgggagaaactcccgacgagcgagtacaccgagaaagacagaattctcgccgccgtgatcgccgacaagctcaggaacgagagcgggagcaagccgagcaaggtgcaaggctgcgccgagagaaccctctctttgctcggaacctgtaccccgactttgctcacgcaatgaacacgccgattgaagtcgaaggggtgctggcccagatagcggatggcctcccgc

SEQ ID NO: 21812 - DNA, 350 bp, Zea Mays
ggagcaggaggtcaaactccacctcggcaggatacgagtcctcattgtaaagtctacccttgagctataaaagggcaagacaacctcatcctcacaacacatcgacaactacacacaaacactcaactgtaacacgcttcaaataatactacgatcagcactacactgtactatggctctggcctaaactaatataaacccttgtctcagatccaccttcgagctccacgtggctcaccattcgaagtgagcccgcgttagcacctctgccgaacataaatcttattcacctctggtttccgaaaccacgacaattgtgctgcaattaatcccctctcggcttcgacagg

SEQ ID NO: 21813 - DNA, 761 bp, Zea Mays
cacgtttacgctaaaatccattcgagccagaacccgcgcacgatcggtcgcacataattttcgtgccgtaatctcgggacctatttgttgttacgaaacagataaatgatttacgctaaatttcatattaatttacgctgttttagctcacgttttacgctggaatccgcccgagccagaacccgcgcacgatcggctgcacgcgattttcacgccgtaattttaggctccatttgctgttacaaaacatatataggatttatgctaaattttgtactcatttacgctattttagctcacgttttacgctggaatcggcccgagcaaggacccgcgcacgatcggttgcacgcgattttcacgccgtaattttaggccccgtttgccgttacaaaacagaaataggatttacgctaaatttcgaactcatttacgctgttttagctcacggtttacgctggactccgcccgagccagaaccagaaccacatactgcatgatttatgttgtcaagtacatgtcattatgcagtcgtaaacgctgtccacagtgtcatattcattccacgtgattcgggcgtcaaaagattcctttatgcatggtttacgcatctttatccatatatatatgcattcgtatattgccttacgcgcttatcgtcctggattcttggctgttaactgcatggctgtgcgggtgctgggttgaccgcgtcctggctggggcttccattagtaggggaagcccagggcttccattac

SEQ ID NO: 21814 - DNA, 377 bp, Zea Mays
ctctggcccagcgccatggccacgcccgccgtgacgtcccgatgagcacccatgtcggcagcgccttcgttacaccgtcacaaagttcggaaaccacacgaaaaccaccggccgagaattctgcaccgaatcttgacaacgtcatctcgaggggcatgccctactcgtgtgcataaagcttgcgcaggccaggattcacctcgcccttgcgcagaactgcataaaaccccaccccatctgcggcgagggttttcctcgaagcctcggatctccgccgagaaagcatctccaggtgaggtacagtctctcgagcttgttgtcgtgcctcttccagtcctcgtagtctcacaatctatccgtaggaaggcttgttcctt

SEQ ID NO: 21815 - DNA, 712 bp, Zea Mays
ctagcccaagttctggccaatcaaacccgactcattgaagtcctcactcgaagtctggaaaaccagcgcccaggcggtggaaggccccaggacaggatgggagaatttctgagactcaagcctcccacgttcgcggggtccagcaatcccctcgatgcagatgactggcttcgcacgatcaagaggaagttggaagccatcgcttgtcctgagaatcagcgtgttcagctggcagctcatcagctttcaggaatggctttagcatggtgggacactttcagtgaagccgtcagagatgctacatgggcagaattcgaagcagccttccgtgagcaccacgtaccctaggggatagttcaactcaaggaggatgaattccgggagttaactcaaggcggaaggtcagtcagtgaatatgtgcacaagttcacagagctggcccgctacgcgcctgaagatgtcagcaccgagtctagaaagatggcccgtttcctgagaggattaagacccgagcttaagaccatcctcgccagccaagacttccacaacttctctcacctctccaacaaagctattcaagtggaaagagcaaaagaggaagagaaagggcacatcaagaggaaattccaggtcctccgagcgcaacagcaagaacgtcaccagagagctcgaccctttgggcttccacccaggggtccaagcttcaataaac

SEQ ID NO: 21816 - DNA, 808 bp, Zea Mays
ttggagtcagcgcccatctctaacgatgagcctaccatgcaagggaaggaacctccccagtgtgatgcccggcgacgaagaaatagacaccgaaatttgtggcgacatcacgaagttggggaacgggatctggcgctgcccgtgtcctaggacaaagcctcggaagtgggggacactcccgacgaacaagtacaccgagaaagacgcaactcctgccgccacgatcaccgacatgctcaggagcgagaatgggagctgactgaacaggatgctagacatcggcgagagaaccctcttctcgctcgaaacctgtacctcaactttgctcgagcgttgaacacaccgagtgaagttggaggagtgctggctcagatagccgacggtctttcgtgaaccctagacgtagaaagctaccggcggctgctactcaagcggccaatcattttctacccctagcgcatcctgcaaacgacctgtgtcacgccatcaacaatcgacgagatgcacgaagcaccatcagcgcttcgtgtgaccgacgacatgaaaatgagataaggcgtcgggaggagtacgaccgagatcacggtgtaccggcacgaagccatgccacacgaatatagttggcagcagcttcgaccggtggcccattccggggacggtcaagacgacctagtaccgactcccctcctcgggactgacgacacgaacatcggcaggaggatatgtgtagagtctccgcgcttactcctaatctccgagccatccaatggcctactacttcaaggtctttaatgtcaacaagtatgag

SEQ ID NO: 21817 - DNA, 489 bp, Zea Mays
gcggcccagccgtcccagttctgaactatgaaccctaatggtcatacaaaagatttctggtgacgtgttaaagactctgtagtgctgtaggccagattgtgctggactctagttctgatatgattctgtagcattttattttattagccttgaacgcggtagtcgatacagtataggcctgtttcaaaggttcatcggaaacagttctgttcctgccaaaattggggaatttccagcaaaaacattagatatccatcctgtgagcagcccatccccgtcatgatgtctctgtctgctctcctgtcatctcatctagttatttttggtgcttcagtttattggttttttgcatcctgaagtgatgtgtttctatgttatgttcgtagttttaggttgtgttgctggtgtgcagtgtggatttgagttatacttgttgggtggttagagtaattattttcgtcttacaccataactttggattgtgattgg

SEQ ID NO: 21818 - DNA, 627 bp, Zea Mays
tttctaagagacgaaggctactagcaaagaaaagtaccacaacaacttctgttgttatggatttattgctcgccccaatgcaagccacccggtgccaacattccggaaaagatggcccggggcctagatggaggagtggttttacgttaaaatgatttaaaggcaagggaagacatcaaagaaatcattcagtgccccatcttgtctcgcttcggcctccgaaggccgaaggtggaaattgatggcaatgttgaagcatgttagaaggcctttagcactgtgtgtgccttcattggcacaagggatttgattcaagagcatatagccttcagggtatggccacttgtggagagctaggatatgccgaaggagaccaccgccgattctagtgagggtggtttggtccgattgaagtataccttcagatttagggagaagtttgatgagccagacgatgactggctgaagtgtattgaagctatcagcgatgagctactcggggcatactccaaggccgaagataatgctttgtctgcagctttcgggggtcggggcaagaaaagattgaacagggtatttgatgcgattgtcttcgtataccctgattaacactacccgctacgaggg

SEQ ID NO: 21819 - DNA, 614 bp, Zea Mays
gtgaattctcatccattaagaaccccgacgacaacaccgtgatggccttcacccgagcctcgatctcggtcaatgtaagcaactcgagggaatggcgctcagggtcattgatgccagaatacttgtacatcggcttctaacatgccatcagaggctaaacccgatgatgcataaatgtgcgcaccagccacacgccagtgaggcattgttgcttcaacgtattgatcgcttttcaaaaggtgctccagcttgctcttgaagctcacctccatgccataataccacttctctgtcgataccgactcccgtccagtgaacggtagggcgctgccgaccacattcttggcgtagaaccactcgccctcgtaccacacagaggaggggagcgagatcttgaagtactaagcctttcggtcggagcgtagttggatgttggccaacccaacgtacaactgactgtcatgcctcagggtcacccatgcactgaagaaataatgccacaacttccagtagggatcgatccccatgaaagcctcacatagtgtgatgaagcacgctatgtgaaggacactattggggtgaaggttctggatctccaattggtaataatgaag

SEQ ID NO: 21820 - DNA, 497 bp, Zea Mays
gcaggttgtcatccaccgggacatcaagaccagcaatgtccttctcgatagcgagatgaatgcgaggctaggtgattttggccttgcaagatcccatgatcatggtgctgatgctcacaccacgcatgtggcaggtacgtacggttacattgctcccgagttggccaggcttggcaaggcaaccaaagcaactgacatctttgccttcggcgtgttgatgatggaggtcacctgtgcaatacggccaatatgggtgaacaccaccgatggggagcctctggccctagcagactgggtgcttgctgcatggcaaggtggttccatcaccgatgccgtcgacccaagactggatagttatgtggatgaggagatagagttagtcctgaaacttggcttgctttgttcacatccctcgccaaacgcgaggccttgcatgcgcctcgtcatgcagtacctgcaaagcgacacaccactcccatcagactttcaaccgaata

SEQ ID NO: 21821 - DNA, 430 bp, Zea Mays
caatgtttgtagagtgaagtttgaaatagaagatacgatagaggatctgctctgctggagatagcattagagccaacatatcaagcacacataaaatccaatttcagatatgcaaggacctgctatttcttccaagaaaatttatggagcttttctgcatcttcaaaacaagagtacagtctgttggataagtgatagtgatctcaggcccatggaataggtatgcgccaaagagtcatcaacttcttccccacctgagtcctagatgacctctacttccgactaccgatggcggactaccctgaagatcacgattagtcatcaatccactaacgcgttcgagatcctgtggcttactccctaatttctctaacacaggcttctgctggtacccgtacctccatcacagttacagttacagccatgtgac

SEQ ID NO: 21822 - DNA, 696 bp, Zea Mays
tctactacgtcaaagtgctttggaattatttatggtagacaggtcaaactttttatttgatttcgaggtacatccttgatgagactctaatccaagttgtttgaacctcatgcatgttataggtgaataaccttgtttgaaattgtatcttaactttatttaggatataggatcacgtacacatgcttatcgggcccttgttcacaccaaacctccttatttgaacaccgtttccgttgctacccaagtaagtgctcagtgcagttctgaaaccagtaggttttttgtcctttcagagccactaatctgttagattctttttagaggcctgaacaaatcttcaagcagacacagttgatggagcgctgggctaaatgggaggtacatgaacacagtgatttcatttttgcagcagcacatccctatgtgttagatatcaagatctgaatatactttgcttgtgcagattagcaattttgaatatttgatggaactgaacactctcgctggccgcacttacaatgacattactcaggcatctttttttactacatgatcctaagtccaaaatgttttttttgctactactctttatgttcaatatacttttctgcagtatcctgtttttccatgggtaatagcagattacaagtccaaaactttggatttggaaagtccgtccacataccgagatct

SEQ ID NO: 21823 - DNA, 927 bp, Zea Mays
cgtcaacccaggtcctgcacccgctccattcatcgtctccttaatctcctatgtgggcccggttcgtcagcgattccctggccactctataacaaaccttgctgaaattctcggaggccgttgcagctggatttgcccgaatccaccgtgcgccggtatcctggccagccgtgcgatcttggccgtggctcggtatatttatatgccaggtcattgctgcctcgatgttggactcaagtaaggcaacaccactactagtcaatctgccgagcgaaaccggcagtcggagcagagagaaggaagcagcgctttgggtggaggattgtaggaatcggtggatcatgtgcgagaaatcgacggcgcgcgtgaaaccaaggtttgaccgtgattccccgtcggaatttgggagctgctgctcatcagggacctcgcgattggcgtcctgatccttggtaagaatatccccgtctgatttgccctgatctccacatcgtttagatatcctacctgttctgtttggaccactggtgggccgggcgccttgctccgaccatggcaccaccacctgccagtgcgcgccgccacggcttgggccgtctaggaagaaacgcgtacaccgttggatctacgtaggacggatgggattagatttgtgagagagtcatcatgaaccgttggatccatgggcatcggtcatgatcagatctgcgtactggtagggattggatggttctgcgccatcggatgtgaagtggacgagtgggattgaagtagtgttctgatttgggcaaatgaatcggagccgtagatctcggggcgtgcggtatggatagcgtaccgattaataatcacgctcatctaatcttgcgcgtacaaactgaatcggacggtgcagatcgtcctgtaccccttcgatttacacatttt

SEQ ID NO: 21824 - DNA, 401 bp, Zea Mays
agatttgggtcgtttccatcccgtcagcccactccaaaccaccaccactcggcccagtacacccgctagcccagtcctcgcgcccatgcgcgttagcgccacttgcgaccggggcccacgaagtccatctcactgcaccatgaggcctgctatctggatgggtgctcacaccgcgtcatcgtccctgtgaggtggggcctgcctgtcatcatcgacccttcctcacaacagattaccccgtgcgctctggcgagtccacgctggggaactcaccaccgtgtctccctcgcaatgatcatgcccccctgaagtataaagttgtcccccttatgcatatccttcccctgcctcacactcaagcctttttcctctcaccgtcacatcgcgacgccataatcgat

SEQ ID NO: 21825 - DNA, 592 bp, Zea Mays
tgaggagattaaaccatcagaggctatcggtgtagtatcagatttcacagatgtgtttcccgaggagttaccaggtatgccacctgaaaggaaggttgaatttgccatagagcttataccaggcaccgcccctatttccaagagagcctatcgagtgtccggaccagaattggtggaactcaagaagtagattgatgagttgtcggagaaaggttatatcagaccaagtacctcgccttgggcagccccagtgttgtttgtggagaagaaggatgggacgagaggatgtgcatcgattatcgagctttgaatgaagttactatcaagaacaagtaccccttgcctagaattgaagatttattcgatcggttgagaggagccagtgtgttctcaaagatagatctgaggtcaggctaccttcagctcagaatccgaccctcagatatatcgaagacaacattcatcaccaagtacagactgtatgagttcacgattatgtcattcggtttgacgaatgcgccagcatgtacttgatgaacaatgtgttcatggattatctcgacaagtttgtagtagtgtttattgatggtat

SEQ ID NO: 21826 - DNA, 373 bp, Zea Mays
cgacggtcgtgattaggccagggcatgacttttcgcgaaatcagatgtggaccatggatctggaatctgacgggtgaaagtcgactatgggtgttgttaaatccgatccacagtttcttcatctaacggctatggggagaatagggtgtcacgaaccgtggactgtggatacttgatccaacggacgtagtgcaatgatgggacctgggaggcccgatctaatccacaccgttggtgtgtgatcctgcggccgagaatcatccaaaccctttcactagttcgttttacacatgaaccctccgggaatttaggaactaacccgccatccagtttgactgttctccgagtctaagaaattttgcgcagaaccccc

SEQ ID NO: 21827 - DNA, 410 bp, Zea Mays
ctattttcaacaatctaagatgctggtgccggctgccggaatgcgcagctcgacggcaatcggcaacacaagaatcttgcctacgacgtcgcacaatcctctaacacacgtgaatgcagaagaatagcgttgccaagagttgcagcctttccggttccatttgttcctcttatatactagtgtttacacggtctgagcctcacgatcctccccgccatgtgtgctcatgctgcgtcatgcccgcctaaagcacgaggatgtttcatgcacgatatggcgatgaccactcctgcccgcaccgtgaacgcaacacagttctggcttcaacaccgctcgttctcacatgcaactagctaaaaatagttaagcaaacatgcactaccaaattacatgaatgggaatgcaaatca

SEQ ID NO: 21828 - DNA, 2709 bp, Zea Mays
ggtgacggcgactcggtctccgctttggagacgatgaaggcgacgacggcaagaatctctagggttcggccgtcgcggtggagcgaaggcggctcggtctctgcggtggagaagaacaaggagacggcgacgagaatctctagggttcgaccgccgcgtgcgttgcgggtgaggtgagctgaataactgcgtgctcgtgggtggaatcgtgggcccgatacacgtacactgcggtacgaaatctacgcgaaggcccgtagaccgacacgtggattactatttcataaacagaaacataaaacatcgtaataccaatatttgtgtggggactagtacggctgcccagattgcgggaacacaatcttctcgtggtcctggatgcccggaacatgcgcataccataagtgtataaactggtacacaaattagcataacacatattataatttgacataagtagttaggtacagtaagccaaaaagtgtccggtgcggtctgcgcacctggtcggtgggtggtcggggcttccaatagttaaagagagcccagggctctaaatacatatactatatagggttgaggtaatggaagccatgtgcttccattagtaggggaagccccagccaggacgcggtcggcctagcacccgcgtgcttgcgtcagccatgcagtcgaaagccaagaatccaggacgatatgcgtaaggcaatatacgaatgcatatatatatggattaaggtgcataaaccatgcataaaggaatcttttgacgctcgaatcacgtggaacgaatatgacactgtgtacagcgtttacgactgcataaagacatgtaacttgacagcataaaccatgcaatatgtaaatcttgatcggtttgagataaggaaagacgtgatgtacaatcgcgaaaataaagggacagttaccggattctactccaggttacgatttgagtggcattagtacaaggaaatcaaattttctttacagactttggcgtagccttgttttagcctttcctgtacagccacagtagatccacgatcgtatccgtgtgttcttggtggcggttaacggcggcggaagggacaacaccagacgcgttttggcatcggttaacggcggcggaagggacagcaccggacataccgtctgtgcatcgatcaataggtacgtctactggcatgtacatcgaacctgtaccgtctgtgatcaccagatacacagacggtgtatctgttactcccccaacggcgttgagggcacctggacatattgaagacaacacaagatcagcaaacatggtaggagcaaataaacgcatccacatgggacatattggggcgcatgaacagggcacacctcacattcttcaaagccatgtaagttctctctaatatgataatatcagttacgtacatactttttttaatgttgtagcaatatttcgttaaatttggtcgtcattgattcgttaaatttctgtgcatagccggacaatattgatataaggttgatacctaaagtcggtatgacatttagtaacgtggacgaggcgtataatttttatagtcaatatgcatatgaggttggatttccattgaagaaatattcggagcagaagaattgtaaatggttgaattgttcaatggaaggaaagaatgctgaaaggggagctggaaatccaaggatgcgtaacacatgttcgaaacgaacacagtgcaagggtgggatgaaacttaaaaaaatctacgatgatgctaaagagaatgttatttccgtttgaattgatctgctaaactatgagcataatcatgaattcttgaagaaagatacagaaaaagggcaattgcaatgcaacaaaactcatgatcgtgattatatggagttccttagtgcgatgcaagaaagcaggatttcacaacattgcattatgaattttgtttccgaaatgcatggtggtctggaaaacgttccaataaccgtgcaggacatgagtaacctataagtgtattattcattgacaataatggttattatatattaccgaaacaatcgacatgtgttaaaaatatgtagtgcataatcattatgtttttacaggaagaaagcatggcaaagggaaagaaatgcaaatgatgtgtcgaagctattatctttttttcattatgcaagaaaaataatccacaattttttctgactttcaactggacaaagaagggaagattttaagcatattttgtcccatgctagctagcaagacgggtacaatgattttggtgatgcatgagactgtagaacaacgataaaatcaacgaatcaaatataatgttagagatttagaacttactgatagcagctcctccgatgcgattatttggtgcttccttcaaatgaagttcggcgaacaggatgaagtctctctgcggtggagaagatgaaggcgacaacacgaatgttcttgagaaaatgaaggagatggcggtggaggacttaccagtgtgtggaggggaatgaggaccggccggtccctctgcggtggagaagaccaaggcgacgatggctcggtctctgcgatggagaagctgaaggcgacggcgggtcggtctatgcgttggagacgatgaaggcgacgacgacgagaatctctagggttcggccgccgtgatggagcgaaggcggctcggtctctatggtggagaagaa

SEQ ID NO: 21829 - DNA, 363 bp, Zea Mays
tggcggcccacgacgagacggctcggcggcggcgccaaccgacttcgacaagaaatcaagcacaacagagagcaagggagggaaaaggagagggcaggggaggttccttacctcaaggcgtaccccaggaacctctcggtggcggtgaaggcgcgacgatggctcgggtcaatggtggcggcaccgggactgcgcggaggacggcgggtgagcgcgggcagaggaaatcagggagggagaggagaaattggagcgtgtcctgcggatgtcgaggtagagctcaccgtggcagagggcacgaccgggctccgacgtcgacggggaaacgagctcgggacggcagcggacaacggcggctcctcc

SEQ ID NO: 21830 - DNA, 965 bp, Zea Mays
cgcggctggaatcccatcgatccgtgcaaggcgcggccgggcgacccgacgggcataacggcctccgcacctgcgggatcgggtgcgcagtagatataaaccctcccccttgggtcttgtcacctcgtcgtgcccaaatcaccgtccgccaccattgaccgacgttctaccgtgagcaagagagggagctcgggagccggggggagtgtgtccaggttcctcaacgcgcgtggcgcctgcggcgttcctcgtactgtggacgtcgtccccagcgtcaccacgttgggcaccggggcctcgccatcgacgctcgcaaaagcaccgtcgtgcggacatcttttgggggcagccgtatccttctccaactgcgggtaaggacatgtctctgtagttcgccatcgttcgcgttatacgtaggaaatatccacgcttccgtgaccttggatgttggtcgtcggacacgggcttccgcattgcgccgtagcccgggctctacacttgacatcggccgaaattatttgcagcagtgagttcggagagtcgtcaattgcgtgtgggacgagtgaatcgggttatggcgttcgtatgggccgggtttgtgatctccggcgcgcgccgccgtgcggtgtcctgcacctcgtgtgccagcgtcgaaggaaggtgaaggtcctctaaccgtcgattgaggagaggacggcgccgattagaattgggataccgttttggggtgtggaatcccgaccgttgagatgtaatccaagggccagtagcggatcgtggatcataaaactgtagccgtagatctcagatcatgcgatcctggttgcgtaccggttcgttatagggttcatctaatctgaaccgcgggcttctgatcgaacggctcagaactattaatacctcttcgccgatctcttttgcataagagaccttaggttattagaaaatgaacccgcggtccatcc

SEQ ID NO: 21831 - DNA, 837 bp, Zea Mays
gagcacatcaccttcatccgttcacttggctgttcgttcttgcattcgaacgccgcctgctgcctcgacaccgcgctagctcgcctgtaagctgtctcctcgcctccgtgcgcgtctcctcgcttctgtggagcacgccagtgtgcttcgtcctgtcctctgctctcccgcactcatgcgctgctagtaactgccatacaccattgatgctcgctagtgccgcttgcctcctctgctcagctgtcgtgctgcctgtccgtctcccacattgcatttactgcttcgcgcgtaattattggtggctggcgcaaccgttctttctctccggcgtcctctcctcttcttcccctccccttctctctcttgcgcagccagggaacaacccgccccaacgccgccaggagcccacgcgccagggcgcgacccggccttccgcgcccgaagaccttgcgcccatcgccgcctagccgcgacgcgccgaccctgagcagcccaggcgcccaggtgcccgaccgcggccatcctgcgcgtgttcctccgtccggccatgtgcccgcgcgccaggagaagcgcccgaccgagcagagcaacccccaaccgcgcagcagccgaccgaaccgcgcaatcgaagcccgaccccgcgccgtccatttcatttctacgttaatggagattcactgcttccgttactctctcccccacttattcttccttgaagacacgccattgatggtgttaataccgaccgttcctcctcagcgaccctctctctccctctcctccctctataaattggagccggacctctctccaagcatcccgagctcactcctgttg

SEQ ID NO: 21832 - DNA, 997 bp, Zea Mays
tggtgcgtggattactatcgatcgggcaggtggacagggtgtgcgaggcttgccaagccggcaagcagagaaggacctcattcccgatagaagcagagtaccacgctcatcagcgcctcgagctagtgcacgcggacctgtgtggtccaatcacaccggcgatgccacgaggtaacatgtattttctgctcatggtggatgatttcacccgatacatgtggatagccgcaatcccttcaaaggattgtgctgcggctgccatcaaggagatacaagcacaagcagaaggtagatctggggcgaaattgagagcccttcgtacataccgaggaggagaattcaccacaactgaattcgcgaagtactgcgcagctgaaggtatacatcggcagcacactgcaccttacagcccgcaacaaaatggagtcgtcgagcgcagaaatggctcagtcgtagccactgcaaggagcatgctcaaggccaaaggtttgcccagctggttctggggtgaagctgtaagtaccgctgtttatgtgttgaacagatgcccgacgaagagcgtggacggcatgacgccattcgaagcatggcatgggaagaagccagcagtgaagcacctcaagaccttcagatgtcttgtgtatgttcgaaacacaacgccgcatctgaagaagctcgaggatcgcgggaggaaaatggtgttcatcggctacgaacacggctccaaggcgtacagggcatacgaccccgtcacgaagcgtgtccatgtgacgcgcgacgtggtattcgacgagcgcgcccagtgggactggggagctgttgaagaggccggggaacccagtgggggcagcgatgtattcaccatcgagtacactgtcacaagtccggcggccccggctgttgaagcaagggcagaacaagttccgggtgaaatcgaagacatggtggagacagaggccagggcagatgatgatgacatggatgcagaccacgacga

SEQ ID NO: 21833 - DNA, 502 bp, Zea Mays
aaaaaatcctacagaaagagatatgcatggttatacatgatgaaggatgaaagataagatagtactgcataactctctatgggcagacgtttgggtgcatatatagctggaatggcaccctctttcaaagattgcacataataatgtttctgtacatacattcttcagttggtagtcggcattgcagtttcagagacagacatatcaccttaccactcttggaaggagaggaactaagaagttgtgtgcagcaccaatgctcgagcgcttgcattgctgagttggacaccacaataccttttggcacatatatcttgtcattctagcaaacgtcagccagttggccgcatggagagatactacagcttctggtcaaaatcggtgagctacccgtagacacctctatgcttcttgtcctccacgtccgtgagattggcctatagaatccagaagaaaggaaaaccaaggcgtagggaggagcggagcatgctggcaggcagac

SEQ ID NO: 21834 - DNA, 750 bp, Zea Mays
ccctactcaggttagctgcatacccatcagggaacatcaatatcttgatccactgaagtacttccttcctctgggccctgcttaggatgaaatcggccttagaccttctccatgtctttccaccacttggcgacttcatctcttggtttggtctatcacataatgttgccagatctactcttgcctttacgttatcctttgacttatcaggaatgtccataattgttgcccatagtgcctcgacaacattcttttcagtgtgcatcacgtcaatgttgtgtggaaggagcaggtcgtcataataggggagccgagtcaagccagacttatgtgtccacatatgcttctcaccatatcccacaaaaccaccttctgtattagccacgagcccatctatctgttgacgaatttcggcaccagtcatcgttgcaggtgggcggtctgtcactacgacacctttcataaagttcttgatgtctaggcggaatggatggtcaggagggagaaattgtcgatgtttatcgaaggacgaatatttgccaccctttttcaaccaaatgaacctgagagcttccttgcaaactgggcatgggaacttaccgtgaacacaccaggcgcagaatagcccatacgccggtaattcatgcatggagtactggtaccaaacatgcattctaaagttcgtctttgtagctcggtcatacgtccataccccttcctcccagggacgtaccaattcatcgatcaaag

SEQ ID NO: 21835 - DNA, 706 bp, Zea Mays
tgttttacaccggtggatgcatgggtacacatgacatacatcgtgctgcctcgaaagctaatggcagacgctttacataatgctcctttttcattgtagctagtgacatgcgtgcttccgaagagcaaaccatatggaaatacaatctttttttttgcagaaattggtgtgaaatgttccttctccgcatttaaaatttgagttacatcggtaatttacctatatactagctagattagaataattacggtgattccagtacaagtatagagacaagtttaaattcagcataagccggatagaacaaaaaaaatggtgtgcatgctgtttagagcagtttcaaaaaaaactattcacatccgatccttctgtgtgtcactacatattcagttagatttctaactattgatcatcatacactctattcggagttccccactagaaaataaaagagtgagagtggctctccagagtgcatgcgaaatatatagaaattgtcggaggagatgaaaagatatgtaggaagtgattttcacttaaatggctgagtatttagcgagagtggacccgataaagactattgaggacgcgcttttatagaaagcagaaaggaaaagaaagcatcttttatgtacaaagcaggaaggaaaataaagatgaatattacggtgctgagaatgaggatttccacctctcggcgccactg

SEQ ID NO: 21836 - DNA, 582 bp, Zea Mays
agcgcgagcatgttgcaccgccttacgccattgccgacttaagccgattgctccgttagcagggcatagtggtcaccccgagttaagtaagcgcgagcatgttgcaccgccttaagtcgttgccgacttaagccgattgctccgttaggtagggcatagtggtcaccccgagttaagtaagaatgcaagtcaatcgtgaacaaactgagtatctttgaagccttttttattgatgacatatttcccattttacagagtacatcgtcgtcccgatagtttttgaaatacggctagggataaaacttcctgaggtgttctatattccaagagttcccaatttctgtgtcgtccattttagtgagacgatatgatcccgggcgagtgacttctgctactatgaatggtccttcccataagggcgataacttgtgtcgtctctcccccgttaaaattcagtggaggacgagatctcctactgaaaaggatcattgtcgcacggccttgtcgtgatagcatctcagggtctgctggtaccgtgtcgattgaattactgcgtttagccgttcttcttcgagtacatca

SEQ ID NO: 21837 - DNA, 462 bp, Zea Mays
cacgaagagaagggaaggtcggcgtggatcgatttcaccggcggcgcggcttgctagacctacggtttcacgagcagtggaaattctcatgcaatttcgagggtaagggtatgacccgggacgcccacgtatctatatacccgcgcgcggccatgacttcaagatccgaccgacgccagaattccggaggagtagttgcgggcgcggcgtacggagtccgagctaggaatccgcgcgttctgttggctatgacggaaggaagaagatatgcctgacagacggagcccacatgccagcgatacaaacacacagcgcgtaacagtccctgcccaagtggcccacctgtcagctcgcgcaacagaaaaaagaaaaggggagggagtgggctggcgcggagatgagaggtagtgggccggccaagggagaaaacggcccatgcacaggttttctttatctttttct

SEQ ID NO: 21838 - DNA, 943 bp, Zea Mays
cttgagattccccttaaagacagtattaaggggtggcgtctagagtggttcatagttgataattatggaaattctctcccctcccggtcgggaagacagccagacgttcgcaccccaagctggaccgagtctcccacagatgaggaggtagctgaggcgagtgtgttgctagctgaagttgggctgctgaaagagaaaggtctaactgcggaagctatggtcactgactttgttttcaagaacattcagccactgaaagatagggcctacccagcttatctgtatcgagggctagccgactcaactcgggttaccaacaggagaatcccttccacagacttggtgagccgacttgaaatgattctcaggggcaaggtgtccaatgttggtgctccagtggcatactcggcctggaacttgcctcctcccaaagccttcacccttttcgtgtcaaacccacctgtaactaatggcaatttgggccttagagtgcgaccctctgctgaagaagtcagtactttggttgcttcgcttggggagattcctgatgatgaacgacaggttcattttgaagtgcccctgaaccctagtgatgcggacataaatgatatgcttgatctgttggctgaggattcctccgacgctgctcctgttggtacgttggcagtggtgccccttccagaggttgatacaactttggatatcccgaaacctgtcagtactcgcccgaggcgtcctagccgaaacaatcagcctgagccttctgctgatgagcaaaagaagaaaaggagacgcctccggcgagtatccagttttgatgaggacgctggtacctcagtttttgctactggaggagtgcctgcgactggacttactgacgccgaccccaatgggtgtacccaaactgctactgatcccaatgtgggtgctccgtctgttgctg

SEQ ID NO: 21839 - DNA, 353 bp, Zea Mays
cggggtcggcgagccgtagtcccccgaggagaattcctcctcagagaactctgagtccccaaaatcctcagatgggggactcggaaggagcttatgtttcccctccgacgagtgacacttccccttgcctcctttgccttcggccattgttctcgagggtggaggggaaaaaagagggagagaagacgagttagcaagtgcaagtgacaaaggcaaccggggcgagtgggctatttaaagaagccaggagacgaccattcattttccgcccgttcaccgaacagtcacaagacttcaatagcgtctcaactctccaagaaatgggtcaggcggctggcaccgtttcatataac

SEQ ID NO: 21840 - DNA, 460 bp, Zea Mays
ggtgctttaacggcggcggtaaactgatttgggggaaaacagcgattctccgactagggtgggcaatcgagtggaagaacgggtgtgtgggcttcgtgatgacctaacgcagctgcctgggggctcaatttataggtagctttgtcggtggcgcttaatttggccggaccgtgtgggcggccggagatgaggaagaaccttggcgcggtgaatacgtgtccagtggcgtggcagttgttccggcgatcaacagggagttagagggagtcacggtgatgtggtggcgcggttgggacacgcggtgaacaacggcgatggcacgacgacggtgagcagctttacccgcgggcggtgagcaagggggaatgagttacggctagccggagtggcttccaggtcaccggcggcgaagatatttgaccccgcgacgttatcgacttaccccgagcgtgaatcttga

SEQ ID NO: 21841 - DNA, 312 bp, Zea Mays
tcaccgtgcggggcgaccgccccgttgcgcttgcagctgtcaagaagttgcacgccctggcggtagaaaccgctcgcccggatgacggggggagagactcctcgacttcatgtaccaaggcgcctaccaaggtgcctaaggtgcaaccatctggagcagacgacggtcccgtcaagactatccagctcagcgaggattcctcccagaccactcgcatcgcgggcaatctggaggagaaataggaaatcgcgctcgtcgccttcctctaggcaaatgccgacgtattcgcatgggaaccatcgcagatgcctg

SEQ ID NO: 21842 - DNA, 431 bp, Zea Mays
gagtttttatccatctaataccagctttcagatacccattgtcatatcttactcactctaccaagccatgtaccgagccgacgttgacgacgaccgggtgccgtatttcctatgcgattattttcgcggtgtcttcctccgacacttttgacgtagcgtcctcgtcggaggcactatttttggaggtcccatttctacctttcctgccttctcggcaacttgtcatttggtggcgacggtgctttagattgccaacttttcagttgctcaaggggcatgggctatcgccggcgtcactcgagggtctcgggtgcattccttctctcgcctcttgacatgctacacaccggtgttaggaagttagtgttagagtaactaggttttggccgctatatggaggtgacatctcgtccgaggaaaagaggagaggc

SEQ ID NO: 21843 - DNA, 528 bp, Zea Mays
gtcacaccggtcaccgtttgccacctgcagtgctggtaagaaccttgtaagagcggggtaagacgcttcataatttgtattccaccacctccaccaccaccctgagagatagttgtagggttcacattgtttgttgcctttttgtctctgttttgtgctaacaatgacaggaccaaagaatcaaatggacaaggacaaggggcctaagattaacgacgatgagtgtgtctctcaactggaattgaaggatatgatgcgcgtgatgactgaagcttttaaaaaataccaggactctgtggagacatcctatgagcagcttgatcgacgagttgctgatcttgttacatgcatggatgtactggaggctcgtcccccaccaccaactccagccccagctcactctcctgaggacaatgacgacgatgacgatgatgtttatgtaccgctgcgacaacgcctcatgcgtaatcgacaaggtatgggaggtaatggtagacgttgtcatcataatcctgaactagaccatga

SEQ ID NO: 21844 - DNA, 514 bp, Zea Mays
aggagaagaataagtcaacttcagctcatattttgatgtacaaataacaacagaaaagttcgcatcttaaataaatgcattgactatatgtacaaataacaacagcaaaattctggtacctgcgcagacggtgcttgaacaatcctggcaatttgattcttgacaatttagtcgaagatgtgtctcaaattaatcctgaaggcaattaatggataaagcaaactttgataatggacacttccgcagctgtgctgatatcttcaagagttttagtagaaactgctttgtccgaaaatgcaggggaagacatgacgtgtactatctcgcttatgctatcgtgtgaccacaaatgctctcttaaaaccattttaaccttctcttaagatcattatgactgcagttgtacctatgccttcttattggcatggtgcacaatacagttaatttgcatgcacgtcatggactaatgtgaataaaaaagaattgtctacaagactgaaggatggatgatcac

SEQ ID NO: 21845 - DNA, 309 bp, Zea Mays
aaagaatttagactggctatcaggcaatatgcgattaataatgagtttgagttagggattgagtcaagctcacctttcagatatcgagcttattgcaaaggaggtgattgtccatggagaatcaatgcaaggctacaaaatatcgggtctcccacagtcgttgtgagtaatgttgtatcacacattgtttatactttcgatcctgaatgaaattagggaagctcacaatgaattttatattgtttgcaggttacagttatcgtggataagcacacatgcacttctagtggtcgtcgaaaaacaacaaca

SEQ ID NO: 21846 - DNA, 622 bp, Zea Mays
gattgggcgggtgggtgagcatcaccagcatacaaagatgctaaaacgagaacaaagagggcatgatcaaacctgtggagggctggccacggcgagggtgcgctttgcggtggcggagaccagtttgggggaaactaaaattcaagctctctaacgaacgattgctagtgatttttggtggctgggtgtgtgatgaacttgcggggctagcgggggcttcaatttatagggatcaacggcggtggccgggaatttccatggggacgcgcggcggtcggaggaggaagaagagtactggcgcagtggcttggtgtccagcgccgtggcaattgctctggcgatcaacggggagctagagtgagtcacggtgatgcagtacataggtagagacacgcggcggacaacggcgacggcttaacgatggtgagaatccttatccgagggcggtgagtaaggggagaggtaccgcggctagccggagtggcgtccagctcaccggcgacgaagattctcttaccccgcgatgttatccatctgccatgagcgcgaatccttacgccggtgacatgaatcgcggcggaggagcgatcgtcggcggtgaggtttattgaacctgatcgag

SEQ ID NO: 21847 - DNA, 373 bp, Zea Mays
ttctaactcagatggtcaataccaggaagggtggtggaattgatctacctcccaatcgacacattcagaggatatttagacaaccacaacaacaacaacctgagatggatcctccaccacctccaccagcagaagttgacccaactgttgcaacacagatgaggataatgcaatagatggctgacactatggcggatatgcacacgcagatgcggcaggaacaccaggagatacgccaagagcgagaggatatacgccaggaaatgcaccaagagcgagaggagatacgccgggagagaagggcgtagcagcaacagcaacattagcaagcaccaatgcctccaccaccaccaccagttacaccccgggacaa

SEQ ID NO: 21848 - DNA, 400 bp, Zea Mays
tcatcatggtgaaccatggggtacatgtccggtgaaagccacctgtttcacacaccgagctctttttctcctccagccgccagcgctcctcgaccgaattgatcaccaccgctcaagtatcctataaattgaagcctcagcatgttctactaggtaatcgtgcgtccagtgaaccaactcgtagctccgatcgttccccacagctccccaatttgggatttcccccaaatcggttgaagaacgccgcgaaatccagctcgccgtggccagcccaaatcaggtccattctcgccatctgcgttcttgtttcggcattcttacttgctctggatgatcgtcgacccgtccaattaagctagaacctcgttaatcactgggaacgcggccaggtgtacgcgat

SEQ ID NO: 21849 - DNA, 494 bp, Zea Mays
cttagatcgggcagaagagtgcaatgttttgagccagtcagagtcagactctaatgactggagggagcccatcatcagatacataaagaatgaagaggaaccggatgacaaagctgcagcagaacgcatcacaaggcagtcagctcactacaccctcattggggaggcactgtacagaaaagggcgcaacatgagtcctcatgaagtgcattctttcggctactgggaagcaactgctagaggagatccacgccagacagtacgggatacacacaacatctaggactctggttggaaaggtcttccgatctggtttctaatggcggaccgcaaaaagtgatgcaaccgagttagtccagaggtgtgaagcttgccagttcttatcaaagcagtagcatttaccagcacaacaactacagaccatacccataacatggccatttgcatgttggggactggacatgattggacccttcaagaaagctcagggagaa

SEQ ID NO: 21850 - DNA, 419 bp, Zea Mays
gccaccgtagcgccacaattcctttcttcccccaattcggttctccacgccgtcgtgagccaccgtgtcatggaccaccgtctccaggtcctctctcgtcctccttaccctcgtttcagcacccttgcatgctagggctgcttatcgacccaaccaattgaactagaccacgctagattaccaagaacacctcgggttgtcctcagttttcgctgtcgtcatggacagagggatttcaggctagaatcgtgcaattgatagagggattatggtcgcctagggtaggatttggtgttagccgagttagggcaccggccattgcgtattccggccagtacaagttcgcggagcgcgcatgccgccgttccccattgtggacctgggactgtgaagaaacggaaatgcgagggcctaactat

SEQ ID NO: 21851 - DNA, 468 bp, Zea Mays
tttttcaggttagtgtttacttgatcaatcacatattgggataaatgattaaacttgttgagatactgcatcacagtatcccctccctgttttagtcgaatgagttcatcttgtttcatgtgaagcactccttctggaatatagtgctcacggaatgccaacttaaattcatcccaagtgacctgatgtccggcttgttgaatcgccacaaaatttccccaccaggtactggcagaacctcttagttgttgggcggggaacaacgacttttgtgtttcggtgcagcggatgaatccgaacttctactccattaccctgatccactcatcagcttcaagaggattttcagctttaacaaagagtgggggacgcatttcagagaagtccaggtatgaggtttcatgcggtccctggggaggagcccttccgccttgctgctggaattggttacccgccatttcacgtagg

SEQ ID NO: 21852 - DNA, 351 bp, Zea Mays
cagagaacggtctgtggctgtgcatggaaatatgatggtggcgtcggtcctagctctggaggatggtgctgctgtctgtgttggtgatgggctgctgacctcacctagaccttcctcgcctcagcacagaagttcggctgagccgctggagaaggctaggttgagctcgccccttcctgccactcaagtgccatgcatgacaaccttgaagaatatcttagctgggccgtctgggtcggctgctgtggggtcgctggattctgtcctccctgtttcgccccagcgacacaggactgttgctgggtcgctggaacaggctggtgcgaattcgccccttcctggtggttcatc

SEQ ID NO: 21853 - DNA, 452 bp, Zea Mays
gagggagctgactgatcaacatcatcgccaacaacaaactcttcttcatctttagcagtcatgaatgggacaccataatgatattggtgacactgatcaatgtcgatgaaagattgatgatgaggcacatcctaagagcgaggtggtatctgcacactagggaagctgattgaaggcatatgttgtcatcagtcgctctctggcgcctagccaactcatgcatgtcgacagatatgtcacggcacatagagaatatgaccgcactaccatgcgccaaacatgatcccaaacctcgaccacgacctcttcctcgcccatcgcggtccataagacgtgttgcagtagtagcatgagaggaaaggggatggtgaggagtagtagaagcaggttcttcaaagctagcaggagcccactttaaccgactggtagggtatagatgtacattcgagccg

SEQ ID NO: 21854 - DNA, 753 bp, Zea Mays
gggaaatacaaaattagagctctcgggtatacaattggaggcaatacttggtggcttggtgcgtgattatcctacggaccagacgacgtgctcaatttatagaagacaagagcggtggccgatgaatttgggagagacgcgcgacagccggagaaaacagaaagttactagtgcagtggatttgtgtcttccgttgtggtgaactcaccagcgatgaggaaatatcacaagccgagccactgcgacgtggtaaagtgctttagcacgtggcgcacggcggcaatcggccaacgccggcgaggtcttatcccgatcgatcgatgagcaaggggtacggtgagcttagccgcggccggactcaagttgatccaggcgccaagatatttacccgcccacagttatccacaatccacagcgcacgaatcccggcgatcgacgtgaatcacggcgcgacggtcatcggcggtgaagttcaatgaacctgatccgatcaggctactgtaccatgagagtcatcttcagagtgcctgacagaggatggttagggtagattatctctaaattttctatggcaatatcatcacccttctacaccaaagttgtagtcctatcaaccatcttcatctttgttatagcatccctagtcaaattctcactggatcattcttaaattcgagccccaagttcggccaacaacactgacgaccacttctgctatcagattcagattcagttgttcaataccagtctgac

SEQ ID NO: 21855 - DNA, 685 bp, Zea Mays
atttgccctttgagcttggccaacaatgcctggatctccctattcatatcatgtgttgtatccttagcctggaaaacatggacaacatttttccaagtgatccaactgtgccctgggtccttcttgatcccaacattcttcatctcctttctcacatcggttgcttctgcccacctgggacaattaaaaacttacattaaatctgaagcacaatttatgagtgagtgcagcttgtttgaaaagaagggtatttaagttactttacctgccagcagatgcaagcatgtttgagagcaaaacatgattgcctgaatcctgaggatcaagttcaaacaacttctcaacagcaatccttcctagctctgtcttcccatgcatcttgcacccccaagtagtgctccccagacagaaatggaaggtctcattggcatcccctgtatgatctcataagctcgctcttccattcctgcacggcaaagcaagtccaccacacaagcataaggctcaattcttggttcaatcccaaacctccacttcattgtctggaacaactcatacccttcctttgtcaaacctcctctgctgcatgtggtagtcctctaagtcaatcgataccaaggagtgttaatactatatttgtgttggtgtggataggcagctagacactacgcgaattagttcaatc

SEQ ID NO: 21856 - DNA, 411 bp, Zea Mays
cgagagtcgtgccgaccatgcgacagcgatccctgtgcaggaatgggggcagaggaggtactcggtggtgaccgtgaggtgccgtaatcgccctaagctgctctcgcccccgtcgatgcgtcgtggtagttgtcgtcctctcccctcacccactcactaccaccacctcggctgattcgggtcgtccgcccgcctgacggtaggcatgcacgcggaagcctccaacacactcaacccggcggtgctcccccttcattgagcctggctccagcgtcggcgtctactctctactaggactaggatcccgtacaccaaaagccgagccccgccgtgcgcgcacgtcagagtcgcaccaacctccgtcccgctagacctgcttctgctgggctcgcccagcctcaaggtgctcat

SEQ ID NO: 21857 - DNA, 749 bp, Zea Mays
tgtcattgcgcactagacgcgatcttccccgaagcgctcctaggatctaatccaaaccgttctccttggaatcgacggctctagttgtttccccccgaatgagcgaccagggacggtggcgcgctcagagccgcggggagaactccggtgaggtcagctaactaaggcacaggtgctccaaatcgaacgcagacaggtgctacacgaagactaggaatctgtgatttaagcgaggcggacttaccggctaatcgtgatgcccagaccccccgcccacggcgaggcacggaaccagggtgacgaccctcctctggcgagcaattgagggatgtacggctaggtcccgccctcccgacgtggtcactcacgagcggtacgattaggcgaatctcctagacagtactacaagggcacgacgacggtgtagggagtggtcgacgacggcgacgctctctccctcactgtacacggcctcagcagtgctagcgttcagatgccaatggaggctcggtctgagggttggggacgtcgcaaggggctcgattttatagctagggcacagtcgggtcggtcttggacgcggtcagcagttgggggaggtcgcgaagatcagattctgttgcgatggaggaagatctacagtatcggggtcccaccggtcagtcggtgtgaggaaggcgcggagatcgcacggcgaagcgaggctgacaacgcgggaccacgcggtagtggcgagtgcatacgtgaac

SEQ ID NO: 21858 - DNA, 385 bp, Zea Mays
gttcaatcatttgtcccagtacgccattgaccaggtcaacactgacctaaagaagagaaattgttttatgaggggccttaatgaccggctacaatagaaaatggccacctgcctcgacctctcctacagtagggctatcagcacggcgctggcagttgaagccaagtatgcaggcccaggcaagtcaaagggttatggaggtgataggtccaaccaggggcctgaaaagagacaaaggttggtgattcgaccttttaatcaaaaccgttcttcacctcgtccaccctcctaccactttaaacaacctgtattcatccgccctactactgcccccacctcaacaactcagccgagtgcccttggtactcgtttccctacactcccg

SEQ ID NO: 21859 - DNA, 495 bp, Zea Mays
ctcgcggtagaagacatcaacagaggagtcctgctgacgaatagagctagcgagcttcagagtggagatgtagagagcagtgttgctcggctggtagagagcctgcgcccgctcccacatcgcctgagtggtgggcagagcagatagatccatggcaaattccaccttcatactgccaagaagaatctgagtcgcctgagcctcatcagcaagccaagcatcataatcagctaagtcagccatgtattgttcaactgcctgagcataatcctccatgacctgagcaggaggaacaccatcagccccgacagtgggctcctcaggacgtggcgggaccggacgagaaggagacaaaccggtaaggtgaccccaaatgtggtggctattgagacaaacacgaagcatagtggaccactctcgaaaattggttccattaaaggtaacagagggaagttgcacaagaggggcggaacgaggagccgccatgctgaggga

SEQ ID NO: 21860 - DNA, 556 bp, Zea Mays
gctaaagcaaaagtgactaagctttactcacttagcagctaaatatccaagcaggaagagctaaaaagtgactaaaatggtaaaaaaatcacttttgtcagggatacgacccccggtccctaggagccaccggtgagagagcgcattgggaaaaggcctctggcaagtggggttcgttggttacctagaagatatggataacgtctgccctgaaagaacctgccccggtcaaaccacgcgacaccgagcctagggtcgagcatggcggaacctaataggggatgggcgtgtcggaggcaaaccactcgagtggatcccgcgctcggcccctgactgactcgtcgtaaataaccgaccgcattaactactctagacaccgagccacaacagaggctccagtccgctttccactcaagacctatgaacccctcggaccacacagcactcatgacctacgaacccatcgacctatcacatttatgacccgcgcacccctcgccctgcgatgcattcatgacctatctgtattaggcctgagtgcgcagatcgctggtag

SEQ ID NO: 21861 - DNA, 318 bp, Zea Mays
ctgatttccagtctcccatcgctaacacactccctgatgtagtaatatcttgtatcaatctgcttactcctctcatgataaactggatttttactcagctattgagcagatctgttgtcaattcggaggttgaatttcttcacttcagtgcccaacagatcccctataagtctgctcagccacactccctgacaggctgtcgtggctgctgctatatattctgattcacaagaggacaatgatactaccctctgctttcgagatgaccaggtgataatgtttttgcctagaaagaaaacaacacttgtggtgctcttt

SEQ ID NO: 21862 - DNA, 575 bp, Zea Mays
ctataacaaagttgtagagttattaaagaggaataactttgttataggtgtttgggtttggtaccacatggaattgggagaaaatggagctccaaagtgctctatcagccgctctgaatgagctctcccatggtacagtgctgaaccagattagactgccagcgtggagttctcaccgccgatgactccctccgccgcgattcgtgtcaccggcgtcgggattcgtgcctggtggatggatagcgtcgtgggtaaaagatcttcgccgccggtgagctggacgccactccggctagccgcaatccctctccccttgctcaccgcccttgaataaaggttctcaccgccgtcaaaccttcgccgttgtccgccgcgtgtctcagactgtctaccgcatcacgtgactcacccttgctctccgtcgatcaccggaatagccgccatgacgattgacacgagttcacttgcaccagtaacctttccctctctggccgccaccgcgccatcttcaattcaagcgccaccgcccctgggatctataaattgagcccgcagcgagctttgcaacatcatca

SEQ ID NO: 21863 - DNA, 607 bp, Zea Mays
gatgatttatggcatcatcgcaaacacattgaatgaagcactgcatgaacacattatcgaggcacttccgttggcgaaagatttgtatatatcggaacatgtagcacaatattcatcatagtctaatatgttcctgtgtacattttgataataaacaatgagtaaatgactatttgtgcggcagtatatccacaatggtgaattgagtgtactttatacctgcttgtcggtaccctaaatcaggggtaccctctcctacagcatgaagacaccgcacccatgcgacgtatcctagccactcggaggaccgcgcctgaccccaccggatgggcagatcaaagggcgccacgtggcagggaaagacaccacaccccagtaagtctggacccccgcagaaggacaccagactcctatatacatacaagtctagagcctccgggtaagtccgaactccagcagggtcccgaaacgagaaggaccctggtgtgtgcaggggtccggtgctgacacgtgtgcgggccttgccctccacttcccgctcaggcggagacccgctgcttgtggcccatgacataagctaccgggccgaacctgacgagaagtcgtg

SEQ ID NO: 21864 - DNA, 719 bp, Zea Mays
ctgggagcactatttacaggtaacacaggggtctcggggcaaaaatctctaacacacagagccatccgcgctggaccgcgggttgaatcccagatgctacgagggctcttacgcaaaactcccacggcgaaggggtatctagcatccagggctattggatcaccaaccgatggttaggattagatctttactgtaatgaaacggtacgccataacggccgtgggatccgaaacgcacggcccagatcaacactcgaatcgttatgcgctcgtgtaatcccgcacgttggccaaagatccaacgatccacgatcgcaatagccaaaacgcttctgcacatctaatcgccaccgcacaacataaatcggatggctagaggatcgtctccctcctcccggccgcgacagggagagggtgcccggagctccactggttagctcgccggagcacgatgaatcggcacacaagtgccccaccgcccgcgccaatacgttctacgcaaagccgagatgacgctgaacatgaagggaagtttcttaccagcagttgggccacgagaacgcccaccgacggcgcggcgcggatttatggcgacaacgagaaattccggtggccacgaggttcctcgccgcccaccgacacctagcgcttcgtggcccgacgtcgatccctgtagagcaataaccgagccccgaacggcgcagcaagtcgatgaccgcg

SEQ ID NO: 21865 - DNA, 637 bp, Zea Mays
tctgggatgtagctaggggtaaaacttcctgaggtgttctatgttccatgagttcccaatttctgtgccgtccatctgagtgagacgatatgatcccggccgagtgacttctgctactataaatggtccttctcatagaggtgacaatttatgttgtccctcccccgttagaattcggcggaggatgagatctcccactgcgaaggatcgatgccgtatggccttatcatgatagcgcctcagagtttgctgataccacgctgattgaatcaccgtattcagtcgctcttcttcgagtatatcaacatcctccagcctagtagcttcagcttctgctatgttttcaaagattaacctcggtgccccgaacttgagatcagcaggtagcactgcctccgaaccataaaccataaagaagagagtatttccatgtagagctcggctaggttgagttatcaggctccaaaccacatatggcatctctctgatccactttcctgtgaacttctcgtttttgtcgaagactttttttctgtgtgcttctaatatcatcctgttggccctttctacttgcccattggctcttgggtgcgccaccgaggcatatttgatctgaatgctcttttgctcgcagaaa

SEQ ID NO: 21866 - DNA, 773 bp, Zea Mays
gtttcatgttaaaacagtgttatcaagtagtaggcaatattaatacaaaattatgggaacttgattggactgaaaaggagttaaaatgagttttgtatgaattaaacaagttttaggattatttttacactagcaattcattttctatattcatttatttctttctttcgagtcctggatggcgtgcataatttgcagagagttcggggttaaaacgcgaaggttccacagactcagtaaacagtcacgggggactgcgagttgtttttaaagaaagacagggtcccatacgtaaaagtgttgggctgaaagggtatggaaggttcacggccgcaagatcaacaacggacggctacgattagatcttatctattatgaaacgttacgcgatgacgtccctcggatcagagactgacgatcctgattttaagtagccgaggccctgtcggatccgctcgatcgtgatccaagggccaacgctgatccgcgcgacgctacatcccagattgaattcgcaccgcacagcagcgaatccacggttcactctacttcgaccctacatctaatcatggtcgttagacatgagatcaacggtccaaagcccatcgtctccacaacgcgcccacacgcggcggcgccgccctgcccgcggcgcgccctcgccggaggggtgactaatccgcaagcccacgccccgatcgcacaatccgagagcacctacgcgtttccgagtgaaaagcgaacctaggagagggattcttaccaggggtcgc

SEQ ID NO: 21867 - DNA, 721 bp, Zea Mays
cttgggaggttccatgacatcggtctttccccgcggcttcggtgctaccagggccttcctctcttttcttccaagtgatctgggtccgcaggcgggtgggtgatgtggacaatggagtccgtcacaccgagggtgctgcttcggtcggctaggtcacatgtgccaatatagccctgggcctggccgacatgaccgtgatcctccattggacgaggactggctgaggtctttgtgctttggagttcatcggagtagtccttgctaaggttaggtggggtgagcctgtgtccatgatcagagccatcagaggagattcctcatctggatccgcgatgcggtgcagggctccattttgttctgcgttgtatgggagggatccaaagtggaaaacctccccgatgttgaaggtgatcgtggtgttgaagatgattgccatgaagtcgttgtgaatcaacgtcgcaccccctaccgggcacaccaaatggtggtgtttatgctccgactgcgcactacaaggtagccacgtagtgtttttgggaaggacgatgtagttgatcgcgactcgatggtacttgtaggagcacatcgaaacacaaggcaattatacaggttcgggccgcctgaatgtgcagtaccctacgtcatgtttggtgttgagtatttagtttgatggtggtgcacagattacaaattatttgtgggtggtgatggatgagatctc

SEQ ID NO: 21868 - DNA, 1133 bp, Zea Mays
tcggtggataaatttaggtgtccacatcactgcaaactgccttgagaagtctgatcacatcgccatccgcgtgcattgagcatgtgagaaaattgctggaccaaacatggaaaacatctacaaaaaacagtttggagacaagacaagatgaggtaggaacacagtacacgagataggaacacgagaccaattcaacgacccagtggggagaaaatttgtggaaaaaaggggttacagctaggatgcaaatgcaaatcacattcgagatacctttccttgtctacttgctgttccgcatggcaatactatccacttgtcaaattccttttccgcacaacatacacatcgatatgggtagtaatcaaactcctcactgattgttaggatatgcacatagcctatcaccctcacacacgttgcaggcgcactggaacagcaatcatgtttcaggaaacatattttaggctggattagcagaatttcatatgtgatcatgtctgacaaggttatgcagtatgtttcaactaaaacgactgcagaaatttgcacatctcaacttctacacatcaatcagcattggtagtgtgacgttgaacaataaatatggagaatggggagataatgaccattacctccatttcagaagtacctcaacaactctctatcttgctataaattccctcaacttcatcaacttgtcagtaagtgttgccatgatcactacgagaagactatttccttgatgcttctcataattaccaaacttctgttgtgttatactcgtttcagctggtctgtcacttcagcactccaactggttatttgcttgtgcaatcatcaatcattgattatggtgtttgtacaaatgaaaacttaacattgatgtcaaatccatgggctccaaagaatcaaatgatagcttcaactcacaatttccaaacagtgagcttaattagaaaggatccgtactaaaatcttcagtaggaacttggctactaaatgatatgacaaaaacagagccgaactgtagccaatcagccataaaagtgttctagagactgttgattctctacaccaaatcagaccaaaatcgttcatgatcagcattaacagaaaagtaacattggggaaat

SEQ ID NO: 21869 - DNA, 671 bp, Zea Mays
tgagcaagccgctgggcaatctgaagatgagcaatctgctgggggtctgtcccctctgacccctcatgttgatgcagggcatgtatcggaagaggagaatgagatgcagggagtggagtttgcttaaccaccggagggaaatattgatgaatatctagatgcctatcgagcagaagatgatccactcaggttccgcaagattgatggactacttgaatccacaactccacccggttatgcaacaaggaggctgctagatgaggagttacatgcagtaagtgctgatgaaccagtctcctttggtgaagcagaaaggagtccgagctggaggaaagcagtcatggaggagatgaaatcaattgaagataaccagacctggacacttgcatatctcctctagggcgcaaggcaatcggtctcaaatgggtatataaggtgaaaagggatgagcaaggtgcagtatccaaacacaaggcacgactggtagtaaagggatatgcacaacaacatggtattgactatgatgaggtatttgctctagtagccaggcttgattcagtgaggttgcttattgcacttgcatcacatgagggttgggtgggaagtgcatcatatggacgtgaaatcaacattcttaaatggtgaattgggtgaagaagtataggtgtagc

SEQ ID NO: 21870 - DNA, 654 bp, Zea Mays
agcaatccactcgacgctaatgactggctactcatgataaaaaggaagttagaagccatcggattccctaagaaccaacatgttcatctggctgctcatcaactttctgggatggccctatcctggtgggataccttcagcgttgccgtcagggatgctacctaggtagaatttgaagccgcttcccgagaacatcatgtgccccaagggatcattcagctcacggaagatgaatttcgggaactaacctaaggtggaagatctgtcggcgagtacgtgcacaaattcacagaactagctcgctacacgcttgacgatgttagcacagaagccaagaagatggcccatttcttgaagggaccaagaccagaactcaagactatccttgttagccaagatttcctcagcttcttgcacctctcaaacaaggccatacaagtggaaagggcaagggaataagaaaagggtcacctcaagaggaaattccaagtcctatgagctcaatagtaggacaggcaccagagaattcgatcctttgggtttccacccaagggaccaagcttcaacaagccagctagacccactccatcacgtttcagtcagcagggtcaaagctcctttcaggccccctccgttgcaagcaaccaacctcca

SEQ ID NO: 21871 - DNA, 592 bp, Zea Mays
aaagaaagaaagaaagaaagaaaaacggaagcacgtggactgaagactgtgaaacaagcgccaccaaactttcgaggaagcgcgggtgcggaaagtgcgtcttcgttatgtccatgtgctgagcatcccttcaactcgccccgtttcttagtctgttgcttctccgtcttctcctcctcgcctgctccccgaggtaggccttcttgctctggtgccaccaagcgtggagattaaactcatcgttcctctcgctctgctcacgcgtagagtagagcggagatttacaatccgtaggccactggacaaaggccagatcccgggcgctcggtccttgggtgccgtcagggatacctgaaattggagtccaacctcgtcctcttacgaattcggtagctggtctgagtacgtgaatctttcttgctaattaattatcccgcatccgtttcatgcttcctctgttaggactagtgtttgaccacctaatacccctgatcttttctgacacaaatttgatgtcttcctatttctaaatacttgcttatgatgatatgttgtgccatgcaaataaaatatcagtagagtgagtgattgt

SEQ ID NO: 21872 - DNA, 343 bp, Zea Mays
caaaagctaactattacactgaatgcacatccagtgcccattcaacaccagcaggactggcctacttcatctgacgatccgaaagctcttcagaattgacatcatccagtgcccattccccaccgcccatatgttcatcttcagcaaattggttattgaaatactcagataatggtggcgacggaccagcttcaagatcttctaaacgatgtgcttcctcctcaagtgactgagcaagctcatacacgcgccacattgcaaagttcactgacacctctttggccgtatctggcgaatccataatctcgtttccggccaaatctttcaactccctcccaactac

SEQ ID NO: 21873 - DNA, 647 bp, Zea Mays
gtccatagtcatgttttctattttataatgccttttaaacactaataacaaagaaaaaatcgccacatttgacataatggttggatcatccatgaccacatatgaattggaagaactctaacatctaaaacatgaagtgcattaaagtttaccttgtctattttctccgacagcatatatataaaagtccatgactctaagatcaacacctgcaagagggccttgaacatatgcagtaacattggatggctgcttttcaagcttgaatgctgctttgatttcataccattgatccccatcagcatccacttgcccacaattgaccaattggtttttatccacagcaagactgacaattacaagcatcatgaattggaagaattctaacatctaaaacatgaagtgcattaaagtttaccttgtctattttctccgacaacatatataccatgactctaagatcaacacctgcaggagggccttgaacatatgcagtaactttggatggctgcttttcaagcttgaatgctgctttgatttcataccattgatccccatcatcatccacttgcccacatgaatgcgctgcaggaagttctgttgcgagcgaaagcatgtgatcagtgcttcatgagcaaagtatgcaa

SEQ ID NO: 21874 - DNA, 717 bp, Zea Mays
ggaaaattctactcgtagctcttcttctctctaccaagtagcttcatcttcactatgatgactccatttcactttgcacattttgatcactttattcctcgtgacacgagtcaaagtatcaaggatcttgataggatactcagtttaagtcatatcatcctaaacactaagatcctccataggcaattgctcttctggtatccttagggacttcttcaactaggatacatggaagacatcatgtacatccgcaagatggtcgggtagttctagttgataggcaacttcccccactcgctttaggatcttgaagggtccaataaagcgaggggacaacttccctttaactttaaacttcctcataccccggatcggtgacacctttagatacacgtgatcaccctccataaattccaattgtcttctccgggtatctgcataacttttttgccttgactgcacagttctcaagttctcccgtatcaatcgtacttgttcttcttcctcatgtataatttctggcccaaagaactgcctttcaccagtttgatcccaatacagaggagtcctgcattttctgccatataaagcctcaaacggggacatcttcaaactgacctggtaactgttattgtaagagaactccacatagggtaaactcttatcccaactgccaccatgtttaagagcacaagctcttaacatatcttctagtac

SEQ ID NO: 21875 - DNA, 462 bp, Zea Mays
ggggtatgagaacgatcagaaatgagagatttaggcgagatcaacatctgatacttgagaacaggttatagcagataaccagataacggggcagaatcgatgaaggatccagggattcggatgataagccacaacatgattcataaaggtaacggtttactagatccaggtgaaaagagaggcagtcgcatgagatcgcttaggatgagcagcagaaaggttatgaagatttagggcaggatctatggaatgaaacatggcttggtcatggtttgcgcaactagacacaaacgatgtttttttgacataaccacgtgcttaaggaagtttcggtttggctagctgttaagctatgggggtctacaagttgtgtaggtgcaacttcagggtaaaacacacaagggttagaaaacaccgacacaagaatgaatttgttttttttaagattttacttgctaacta

SEQ ID NO: 21876 - DNA, 415 bp, Zea Mays
cttgatttcttgctctaagctttccacctgggagtttaggtggttgcagcgggaggaaaggtcatcatagtggttatcgagtgtgtggagatatccggccatgtagactatggtggggtcatcttcagtaggatctcttcttgacagggcctgaagtcttctcctccaggtaggggtattttgttgctgggtggaaagtaacaaaggggtgtctcaaagacttccctgctgtagttttggcatagctggtggagggcttttgggcaacattcaggcaagtatctgggaagcggtgtccagtgaaggtgacttggaaaggagggtgatttgggtagtttcggctttctcccaggtagactgccatagagcatttctcaattccattctcgcggtattctttcaagacatattctag

SEQ ID NO: 21877 - DNA, 480 bp, Zea Mays
aatttggagataatcatgctcaaactttggctgtcaggctgcttaagtctgaaaatcagactgacagtgggcggacactgacttcaaactcaattctgagcatgatccaatgaaaatctaccttgggctgctatggcaaagttatagctggttggtagcactccacttttgctgcagagggtcggacctggtaccatagaaaatctggagaaaaagagctatgaagttgctctgtcaggcatgtatcaagaaactgaaactgaactcctgatggtacagtgacccgagtggatcagaactccagcatagcctgctcgccgccagcaaccctccctgcgctaagagttgcgtcgccgtcgtctcaattcgtgctcaggatgacttgataaacgctcggagcacaccgccggggataagcccggccattaaagtatcccggccaccgtacaaagttccctgcggtagaacccgataagctcg

SEQ ID NO: 21878 - DNA, 488 bp, Zea Mays
atggtgttgatggcaaaggcgaccatgcccgggatcccttctgtgacaacgacttccatgaagacggctactgtatgcccttggcgaccctagcgatcatcgtttccctcacggacacgctactatttcaccgagtgcgaccctagcgaacacgcgtatgttttctctcgtcttgaactatggtccttctcttcctttagaccaaggtgatagaaggatcccgttacatgattcgaagggttggttgaagcgagtgaaggtcgggtgctgttgtgcagcttgtcctccggggttcccgccagccaagggataccgtatatgatgcctccttcctccatcagggtactgtagccacgccaacgccagcccgaagcttgccattatacttcgtcacgtctcattgtggtttactctaggggtggtaatagacgacgatctaaatgtttctttacaataagttaggacccttaaataattttagttcaaaa

SEQ ID NO: 21879 - DNA, 572 bp, Zea Mays
ggctagaggtggaggggacccaggagggagaggatgaccagtcacggctgcataacgacgaagatcctcatgcagccagtcggtcctgcgacggcgcacagactcctcgaccgcccgggtgcggcaaatggcgaagacaccaagaaggcccttggccagacgaatgaacagtcctcggcctcggccctgaccctggcccggaccacttcctctcccgctgcggtccatcggacgtgaggcagcggcggcgcgagaggaagatgggtgatgaggaggctgaggaggtggctcatcagaggaagcagggctgccagaccctgagggagcccgcttcatacgagcagctgggttggaggaatcaacccagtagggtacgtagcgggagtgtttgacaggattttccaagtgagtgtgggtgaccacttcgatcatcttcatgataaagggtgcatgaagacaccctttgagaggagaccaggaagcacggatgatctcttcctagatcatgtcaaacacattaatgcgggcgagactgtttggagcaaggaggagaaggaagacccgactctccc

SEQ ID NO: 21880 - DNA, 636 bp, Zea Mays
gtaagcgacttttgcacggagagtcttttggaaaagacttcgattttgcgcacctattattccggctgcacccttaggtgacttttgcacggagagtcttttggaaaagacttcgattttgcacacttgttgtgctattccggctgcacccttaggcgacttttgcacggagagtctggctgcacccttaggcgacttttgcatagagagtcttttggaaaagacttcgattttgcgcacttattgtgctagtccggctgcacccttaggcgacttttgcgtggagtgtctttgacaaagactgattatcgcacttgttgtgctgttccggctgcacccttaggcgactttcgcgcggagtgtctcacgcgacggtcgtcagcgctgcccctcgtagtgacttcggtgtggtcgaatgccgaagaccatcgatgcggtctttttcgacatattgtgtcttagtttttgtgggggatttttgcgggtatattacatggctccgcctcattaaaaacctcacccccgggaggaaaagagtgcgggccggaatgatactgtttggcgaattacaagggcgtgttagccctgaggattcaaacaaaaaatttgcggagattgtcgatattccaggaatgc

SEQ ID NO: 21881 - DNA, 374 bp, Zea Mays
cccgccgctgcagccactagtcatcatccgtcgtagcctgggcgagtggaccatcttcgtcaatgcaacatcctccatgtgctccatcacgccatggcccctgcgcccgtatgggagccccaccgctcgacccgacgtgcctcaaccatctttgtcagcgcgacatctttctacaccactctctgtcgtgtcgtggcccctgacccacgcgggagcccttgtcgctcgacccggcgcgccccaatgccacgcaactccacccggctacaactgatccctcataatcggcgttgcgtcaggacatgaacgaactcctcgaggaccgcctcccgacctccactcctagcattgcctctgtcgctacgacccctccg

SEQ ID NO: 21882 - DNA, 1009 bp, Zea Mays
catgttccttactttcacctacttcacgttctacgggatggtggcggtaggcttgaccccaacacaacaagttgcagcagtagtgtcatctgctttttactccttgtggaatcttctctccgggttcctcatcccccagtctgtaagttactgaatagcccaaagaagcagagtatattacatcattatgcttccaattgttccaagttttgaacatacaaatcttgctgaacctattcttgtatttgtaaacatgatgatatatagtttacatgttaaagtagctttcaagtaaaaaaagaaacaatttttcatagttattgaacgtaaccagattttttatttcacacatcagttttgagtcaatccagagagcgtttcagtatgatgctgtttatctgtttctaaacgtcgtgcttgtcattcgtgatgcagaggatccctggctggtggatctggttctattacatctgtccagtggcctggaccctgcgaggcatcattacatctcagctgggcgatgtgcaggccaggatagtcggccctggtttcgatgggaccgtgcaggagttccttgaggaaagcctggggttccaacaggggatggctggtgtcacggttgcggtgctcattggcttctcccttttcttcttcgccgtctacgcgacttctatcaaggttctgaatttccagagaagatgaccagctgcctgagctaagtaagcctccgtggtttgcttttgctactgtgtggtgccaacatcaaagtctacttgctagctactcggcggatgccggatggatgaagcacccgttggtcgtaggattgaagttttcacacgtagagaggatggtagataattaaaggttcatgtctgtatatgattactatcgcaaatataatgagaaacagtagtgatgcatttgtgctatacgtaagatatacagaagagtatgcctcatctgttgccttgacaatagccaaccatgtgactatttatctggtttt

SEQ ID NO: 21883 - DNA, 824 bp, Zea Mays
aagcccgattcgtttgggcaacacataaagaaagatagcacgaacatgggagaggcttccttaccctgattagcgcgatgcaacaccctgcccactagtcgcggtggatctcgacgttcgatgaagaattccgatcaccctcgtgattgacccctccacccccagccacgaggactttccaagccatcctgcgaaactcccagacccaccatggatccctgaacgctggttggggacgagtttcacgctggcaggctctctctattttgctccccaaaccctcacaagctctattggtcggtgatggctagggcggaggaaagagggatgggttcatggtgcacagtttggctgggttcgattttgtagcccgggggcgagggcacaacaaccgcggccgaatcggccaggaggttggtggagatcggactcgcgacgagctaaaatgggagcaagctagaggctgtcaaggagggcccacatgtctgccaaaggtggtttcacgcgcgtgtggtgttcaactgccaagcgggacccaccaaccagagggcattaggtcgcgcgcgtggctgggagtctgatctgcgggacccacatgtcatagagcaaggaacggtcaggcgcagatttgcgtggagaatgggccgaggctgggaatttggtggaccggctagtggaaaacggcctagccacgtttttcttaatttctttcccttttcttttatgaattatgtttggtttattttcaaattcaaggattcaaactacctttgagttcctgttttgaaattcaaactttcaaatattaaatgtactctaatgtg

SEQ ID NO: 21884 - DNA, 323 bp, Zea Mays
atgggaagctcagatgggagccagtgacttcctcctcttctcagggcactgtcaacatgatgtcaagcgttgagcagcaatttgcagttccactccctccgcagcagttctatgtgcctgggacttcttagttcatggtgatgcagggttttcctcagtatctagctgcgcccactcctgcaccaactactcctatgtcttctcagtttggagctccgcgtctgcctcacccgacggctcagtggggttcttctgttaacttcactccgggagcttcctcttctgcgggtatttctagagcttatgcgctaccctcggcagat

SEQ ID NO: 21885 - DNA, 408 bp, Zea Mays
gaacctgctgagtgctgactggcttggtagctacacctagtgatgtgggggctgggactgggatcattgaaggcacagggttgatcgctgcctgcgtcgccattgtagtttgcctcaccatgaatccttgcgctgccacctgtagtcgcacagttgcctccatttgagtgcagaagcaggcaagcattgctgtccagagatcttcctcgtcagccagatggcgggaacactcaaagatggcagcaattgtgtggttcaatgatggtgatggatcactggcagcacaagtcatgagaaaggagccctgactcatgataccagatgttatgaaccttagttaatttggggacaaccatagtcaggaaggtagctgggtaaagttggcttggcgggagactagagtatttg

SEQ ID NO: 21886 - DNA, 1180 bp, Zea Mays
cgctgtatctgaagccgagctcgcgcgcgtaacggacggggcgagagctcgggattccgttgagatccacaaccacccgcggattccgcgctcggcgcggccatccttccccccccacggatctcgccaacggaaatccgaatcccgcttctgccgccatggccgaactccgcgcgggctattacaatcttggccggcgggctacataaatacggccacgttcctcctttgggttatggctcagctagaagatagcctaagcgcgcggcgccattcagagaacagacagagagaagagagagaacagcggggtgattcgccgtcgggtgtcgtgggagctggagcttgctgctcgtccgcaacgcgttgatgtgcagcgtgggtggccggagtagaccaatttctcgccgaagctatggatggtcgcggctccgccttgagtcgtggccaggaggaattactctgcgaatcccggtgagaaccatctccactgctaacccatgttcctaatttcatgtagcatcgtttgattaggaaatggagcattcgggtgtgcgggctatcacccgaccatggcgccgccgctgtgcctgttcaccgctgtccctggatgcaggcacgggttggggggatgagagagatgtccttggaccattgatcggccagcggacggtttagatttgaactagtatgagccgtcgatcttagggtttgcggtcgagattgaatgtgagattaggactaatttgagccgttcgatcaggtcagtcgggatcggatcgtgaatgttgtagggtcgtagatcctcaatccaatggctgagttcgcgtaccggtttgggtgggcaagatctaatcctagcccttgatttccaatccagcggcctcgattcactgataccccttccttggcttatttgcttaagagcccctggttaatgcctgaactaacccgcggtccagtccaggattcgctgtgtcttgggaagttttgcaccgagacccctagctttctctgtaatagtgcgcccactccagagacccaggaaactcaataattaaatgtagaaattgatttttatgtataaataattgctagaaacttgatttaatcatagaaaatccattctagctccaaattagtatattccagttcctaaaattttgtaataatgttgttt

SEQ ID NO: 21887 - DNA, 611 bp, Zea Mays
ctaagaacacccatttatttgacctaaaccctactgggaacagtctgtccacgatcatggcggaaaccgagttcgtgaacacgcgttcccgccaaaccatggccgaattgagtaaacgggcgccacagtgagcttcacaagcgtgcagagtcatgaaaacaatacgtgaattggacagtgtcttaccagagcgggctggccacgggcgggctgttcttggtggcgcggcagaccgatttgggggaaattggtgattcaccgacaatggtggctaatcgagggtgggagcgggtgcttcggcttcgcaatttagagacgaagagctgtgcttggttgatttgaacagagggggttaggatgcggtgaatttataggcgcagtgagccacagccatggccatggtgataaccatcgccggccttagctggcgatcaacagcggcgtcgagcgctatcctttcctacgagcttgccacgttcccgtcgcgacagtaacgcgctcaaatcagtgagggcgtggatgaacgaggaggagcggcgccgatgaccggatatggccggagtgattagtggccgcgtggcggccggaatcatcacgctccaccgcggcga

SEQ ID NO: 21888 - DNA, 540 bp, Zea Mays
ctctgagcaggtagccaagactccacatgcacgtgtctgaaccgacgtacccgggattcagtagcacgatgaagatcaactagacaaggatcggcagccaatggtcgcacctcggtctcgtcttgctctcagaaacgggctggtggaatgggtggaacggaaatgggagcaggaggaggaatagtggaagcgggagtggtggaggtggtgggtatgacagaagtggtggatggctcgggagcgattggagctggcgaagtgggaggtggagtggtagctgtggcaggagtagagggagcggaggagcgaggctgagacgcgagtcgacgaactctttatgcaatctgatctgacgatatctgcagctatccacctcgctctgcctgcttcgctgctgttgccgctgcaagagctgctcgagatgctctatccaaacacggcttcttgcggccttcctgctgctctaagtacacggtcttgccattgacctgcctgaaggggcgaggagggtccttgtcgtctcctccccctggcgctgac

SEQ ID NO: 21889 - DNA, 462 bp, Zea Mays
gccgggtgtcaaggagtgtgtccgtggactgcacggatcggggcatcggcctggattgccggaattgcgcgtcgaacttccttctccgccatcgtgccgcaagccgctgtggactgcacccgtgacactccaatcttgggtaaggactaactcattcgattcgttgcacgccctagatcgtttagcacctggttgggttgtgggaccggcttggtagcgccaattcgtgtgttgccggcgatgcgccgccgcacagtttcgtcaccgccgcgctcgactgctgggattggggaagaaaagagcgatcgtcaattggctgatgagcggctatgattagatgtagataccgattcgtggagaatccagcgcggccgcgagatcttgatcctacgcgcgggagtgtccctcgccactttaaatccaaaagtgttgatctgcaatccgaggactgcggtcgttcgc

SEQ ID NO: 21890 - DNA, 402 bp, Zea Mays
aatcgaccgtgttctgatagtttcagagcccaaatttgggaattctctttaagaaaaacttttagtttttctaagtaccttttaatgggtatttacttgtaattgcctattaaatagattgggagaggtggttgtccggatataagtcgaatctctgatgtgcagtatctcaggttgagtttagctgtaggtcatgcagagttgagggttataaagataaatttgggtgcaactttattgcaaaagtcgtggacaatttccaaacttttccaacgcatgttcgttgtagttttaagttgagtatagcaggagttataggattttgaattttagttgtccaatatttctatcctatcagttttgcaacaaagcagttgcattgttttattggtttggaaacca

SEQ ID NO: 21891 - DNA, 532 bp, Zea Mays
ctttaggcttatgtccgctagtcaacttattgatcatgattgtcgtgtgttattcttgatcttgattcttggtctaaatatgttggacatgaactaaagaatgaactaacctaatgaataagttaatgggcatgagcgcgagtactcggactggaaattggtatcctcatcactctgttcccctcacttttgggctgatactgtctctactgccacgtatctcactaagatttagctttctttgactctttagggtggtgttccttttgggcatctttgtggtaaggtgccgactactccaacctttgtctttttggctatgtgtgctatgtgcctcttgcaccttgtgagcgcactaaatttactacttagtcagttgagtgtgttttccttgggtatagtgctgagcacaagggatactgtggttgagatctgattgctcgacagatgtggatgtctcgagatatgatttttgatgagtctcgtctttttgccctgtccttctactgttttcccaacatctcttgtcgac

SEQ ID NO: 21892 - DNA, 618 bp, Zea Mays
ggattatcagccaaagatcaatacgatatttaacatgagaagggactaaccaagagatcgagattgataagctttttagagacatgagcgatccaaagataacaacaacatccattactccacatggatatgtcgtttagagataagttgataaaacaagcatcatgatcctcggagaaggggtatgagaatgaccaaaaatgagagatttaggcaagatcaacatccgatacttgagaacgggtcatagcagataaccagataacgaggcagaatcattaagggatccagagattcggatgataaagcaaacatgattcacaagaaaaaggattattagatccaggcgaaaggagaggtaggcaaacaggatcagctaggatgatcgacagaaatgctatgaagttttaggggcaaggatttatggaaagagacatggccttgatagggtttgcgcaactagacaccaataaaaattttttttttgacacaacaagtgcacaaggaagttttagtcgatttaggggtcaagctgtgggggtctataagctgtgcaggcgtaacttgaagcgtaaaacacacaagggttaacaaaaataccagctcaagcatgaattt

SEQ ID NO: 21893 - DNA, 635 bp, Zea Mays
tacttcattagtgaagtcctcggaccctctaacataagatacactcatgttcagaagctactatacgtgatactcctcactgctcgcaaactatgtcactactttgacgaccacaaagtcatattagtcataggtttcccaatggggatatactccacaacaaagaagcagtcgggaggacaaccaagtgggcgtgtgagcttggagctcacgacataaagttccgacctcgcaccgcaatcaagacacatgccctggtagatttcatatcagaatggactgagcaccaggttccagagaaccccgagttagctgaagtttggaagatgtacttcgatggctcactgaaactacagggggcaggggcaggaatccttttcatcgcccctagaggagaccaactcaaatacgcgcttcagctcctgttcccaacctccaacaatgcaacagagtatgaggccttaatacatggacttaacatcgatgtgtcactgggcatcaagaaattaatggtatatggtgactccctagtagtcattagtcaggtcaacaaagactgggattgctccacagattcaatggacagtaactgcaccatgatgcgaaagcttgaagacaaattcgaaggcttagaa

SEQ ID NO: 21894 - DNA, 624 bp, Zea Mays
agtgagtccaaaaagcaccggtgaatatcctgtctcggtcactgaccatcgacttgggcagtccatgaagtctgacacttgatctaacatcacctgagcggccttagctgctgtaaaagggtgtttcagagccacgaaatgagcatattttgtaaagcgatcaaccaccaccaagatcgtgtcgtacacttcagatttgggaagtttctcaatgaagtctaatgtgatctcttgccacgccccttgaggcataggtaggggttgtaataaccctggtggatgaagtgtttcaaccttagcatgttggcagacctgacattgattcacgtaatcctccacatcaactttcagacccctccaatagaataacttcttcaggcgctgataagtggcttggaccccccgagtgcccccatatggcactatcatggagggcagccaccagtttggttcggagggcagaattgtcgccaatccaaatgaggtctccttttcggatcaatcccttgctaagatgatacccttggccatcaggactatggacattgagctgggccaagagttgttgggcctctgatttgtgaagtatgaattcaggacctcctggatccataaaggctgaac

SEQ ID NO: 21895 - DNA, 690 bp, Zea Mays
gcgggaggtcgcgggcgggggcacggagccgggatccggggccgccccacccaccgccctcgcggatccaccatcaacgccgatcccgtcgatggaaggtgagcggggcggccacgttgatggcggggagcagagatcgaggagcgttgatggcggggagcgtagattgcggatcgaggatctcggatcgagggtgcatcggccgcgctgctggggctccggttcgcaggatcgacgttgatggcggctcggcgtcgcgtggatggcgggcagcagagagacggtgggtgggcagagggaaccggcagaacaagcacctgtgcacgcctacactacacaattaagtagtagtagagatatatatattcttgtctatgttgcagccttgagagaggccatggcccctggctccgcccctgccccctatcatcttgcatgctgtgtaggttgtcgaaggacttgggcctagggtccataggtcgtaagtggagctcagactagaacacgtaagccatgagtgggagacggaccggctctcttccacggcacagatcaacgctacacgtagctaatgcgacatgtatgcacaatattgatgacgagagtagtccttcggtcagatgtgaaatccacttcggtagctccctaacgtatcatctgacgactctggtctaggttgcacctagtccg

SEQ ID NO: 21896 - DNA, 460 bp, Zea Mays
ggcgaagggtaggtcggccacggcgcggtgcggatccacgatggcgatgaactatgacgagcaattgccgcccactggcaatagaatccgacccggagtcggttcctacacctgcggcggaaccttacagtgctctcggtacacaccgccgcggccaaggaatcgacagcagcagcatcgacggcggcggcgtgatttcacggttaaggctatggcgtcgggatgtcttgtgcttggctcaaggggacgagagggggaaatgtggtcgggctatataggggcggagagagagttcgggcatgcacggccaaatccgaggtccctggcggcgggattttaccggagcccaatgaatcacgcggagctcaaccgaagctgttcctggccgcggaacttatggcgaggagggtgcgccaaactccgatttatacccagggcaggattcgcccctaccccgcgg

SEQ ID NO: 21897 - DNA, 767 bp, Zea Mays
gcaggataagatcgctgcggtgggggggtgattattccggccgccacgcggtcactgatctttccggccatgcttggtcaccggcgccgctctcctctgttcatccatgccatcaccgattggactgctttatggtcacggttgaacgtggcacaactctgcgaacccagccgcatgtggccggagttatctcaccggcggtcaccgtggctcgattatctccgccgcggtgtcatccataccctgctcttccctcactatacctctcttcaacgtggtgaacatgcgctagcaatgctatccgcggccgatgatcgctagtcggtctgccgtggctttaaatagcagcatgaaccacggcgaggcactcaccgcctcaaccgcaagcttgagaagaacccaaaatttgcactgccttctccacctcctcccaaattgattgtgcacggtgaaactacagtctcttacggccgtatagccccaatcccaccccccccaatttcacccagagccaccgcgacaccatttcccccctttttctgtcaccggcgagcacaagactccgcgctccgtggccggaccactctggtaaagctctgcccctctcgagtgttgttctagcaggtctgtaggcacgtaaagctcaccatagcatccgtttgaccaattcgagcgtaagtgattgggaacacgggatcaacatcacggtttccgccgtgcacgtgggcagaccgttctcaaagtgttcaagccaaagtgaagctcgt

SEQ ID NO: 21898 - DNA, 764 bp, Zea Mays
cttgaagttctgagcactagctggaggcatggctttgcagtgccttgtagactggaagggacagccagttaacccaaaaaggcatggtggggtcaaagccaccatgttcatctactgtaagtatgaaaccgtgcatatgcatcttccttttggttttgcacaggactactgtgcgtctcatcatgcatgatttttaaaaattacttactctcctctcgctgcaacaaatcttaaactgattagtttatttacatcattctgaagagatggatgtgaataatccaatccaataagcaaaggcatatatatacgcttgcagtcctggttgtgatgacaaacattggaaacatcccgatgctgttgaacgtggtgagctacttgcatgggaagatgcacatggacatcgccgacgcctccaccaccgccaccaacttcttcggcgcagtctgtgtcttcaccttcctcggcgccttcgtctccgactcctacatcacgcgcttctacactatcctcatattcgccccgatcgagattttggtgaaccatacaaatctatatatatagatccatgcatgcatgatgcatggtcttgtaattaaagcgcaaaacttaaatattttcgatgaactcgatcgatcttgggttaatatatataatttgacatgcatggccatggacagggttacatgctgcttgcatgccaagcccacctgccgtcgctgcacccggcaccgtgcgacgtgaccaacagcagccccagcgag

SEQ ID NO: 21899 - DNA, 603 bp, Zea Mays
gctggatcggcttcgggatcataaggctcgggtggcggtgaaagttcagctacagaaaaaagtagtaagttattaatccgaagctagaaaaatactgaagctatgaaacaattaaaatacctatgcgccttgcgcactcagcagcttctttggctcgcttggcttcctctcaggcttcatgggattctttcttgttcttctttatagcttcgtcggctaattctcggtcgcctttcatctaaacgtcggagtaaaatttcccgcctatcagagtagcctcagccgagggatccttcgtgttttctacggtgaagacagcctccgtctaggttgcagctttaacatgttcacacccagatttttctaaaattcctgcaatccctctggcaccagcaaaggctcagaaatcaccacggtcgctaaggatctcgtcaaaggcttcagcttcttcgccgatccattccatgattccttcgggatcgcctctaataaatttttgcttagatgagtatgcacccaccttcacaaaactatctttcaacttagtgcaatccaaggatttttcataatacctctccttcaattcccgaagctcatctacat

SEQ ID NO: 21900 - DNA, 752 bp, Zea Mays
acgtggagcaccttcctcacattggtggagagggagaacggctccgcttggaacagatgaagccataagtcccaatggggctcgatccccaggaacccctcgtagacggcggcaaagatggccacctgagcgatggagttggggttgaagttgtgaagctccaccccgtagtagtgtggaagtgctcgcatgaagcagaccgccgacactccgaaccccctctcatgaaagggggtgaagctcaccacatagcccggggcacgagccggcacctgcttgtcacctggcacaatccactctaggtgtggcccatggagatgagggcagagcagcccggcgtccaccaacgcctataggtcgttgtcggtgatggaggagatcggccatgggtcacgaggaggaaggacacttactttctcagccattggagctagggaagaagacgaaaggagagcacgagaattttttgtggctaaggaagaaggcgactacgacaggaaggcgaaagcagaatgtaaagaaccaaacatcccatctcgagtgaatttataagggtggatggagtcatcgaggcttaggtcgagccaccttgatacaaaacctagagtgggttgtgtcgcttcgaattccacacgcacacgcgccacaacggtcggcctacgggctaaagcatctcgtcgcattaaattccctctcttcctgacgtcagccggccagcgccgcttcatgtaaagcctcaaaaggtgtatctc

SEQ ID NO: 21901 - DNA, 630 bp, Zea Mays
tagcacaactgtcgggaaccattacaactggttggcaaattattaggaaaacgagccactttatattgtctaaaacccaaatggtggcaagtggcatccttgttgtatatctagattgaatcattgaaggagtgggagacaataaacttaacaatgtactgccagtcaatttagctgatttgtctgacttcatgttacattaatcaccctaatgtcgtgtaataagctaaaaatgatgagccaaatcataataacttgttgattcagctgtgcttccttttcttcctactgctttatggcttacttgtctctctggatgacagaacataagctaattatttatctagtttctgtttcctaagcttcgatagttttgtattgccagcattggccacaacttgtgctccatgcaatcttacccagcttacattttcattgacacttgcatgtcttgatctaggataaaataaagtaatactgagctttctgtttcatgggcatttgtcctctttcgggttgtcaaggaagtatgcttacatgccagtatttgagatggataatgtgaagacttatgcatcgcttggataatgtgattgcagttttgagatggatcttcatccaattccttat

SEQ ID NO: 21902 - DNA, 839 bp, Zea Mays
catatgctaagcttcttcttagttttctgagttagctccttttggcaggctgagttggaggaaaaggtggcaactgtacatacagacatagttaatcatgtaagtgcacctagcagttcagtgaatgccattggtttgctacttcatgcttgtgtatgttggaagggaaatgtatgcagatagatataaattagaagtttaacaggcaactggttctggttgtttgatcaactgaaaatgagtgctttgtaactcgtactgaggacatagtgcttttcatgtgttagaatatagaagtgtcatggttttgggaaccaggggacaataagatttgtgttcggaggagagaatgctagcgtggactcaatctgaatggtgaatcgtcgggactcgaacggtgggtttgagatagtgggtttatactggtttagcctttacagtggagtctcgcccttgacgagaaaatagagggaaagagagaggcctatctccctaggtcaacgagctaggtcttctttcccgtgcatggccgtacccccgatatggtgttgtccatcatgttggtccctgtagcgagtccgttattgacgccctggtggtagtacgtggcgggtcctgcgagtctgtcctagggcgtgatcatacgcggcgtggtttcgcccgttgtatgccctgcgtcaccttccatcatacgtggtacatacgctcgttatggtgtgttgtcccgtcttttccaatatgtgggccactgttgagacccctgtgctgaggtctcccatgactgaggctgaccgaccttacggggcaatcgggggcatgtttgaactgtttgcaggggc

SEQ ID NO: 21903 - DNA, 525 bp, Zea Mays
tgtacacgggcgaagaggtacccgcacattctggtcgtccgatccgagacacacgaaccagattagatcttactatctccgaatgggtattctaccgacgcccttggatctggatcctacggtacggatataatgaagccgagatctcgccgcagccctcggatctagatcaacggtcaccattactcgtggcgaaagggtacgccaactctaatcctgaccgtctggcccgaatccaacggccaacataaaacccccccttcctaagtcatccccaaaccccgacggtcgtgcccaccgcggcggagcgccatgaccggagcagcacccacactaatcctgtcgccatcccgcaatttacttgtgctacactgacataagaccatggcgaacacgaaggaggtgaagaataccggaaatcgggtgcgcagacaggttgttctcgcgttggggcggctcggcggtgctctatctactccagcgaggaattgctcacgcaccgcaggtcccaacctccaatagtgg

SEQ ID NO: 21904 - DNA, 737 bp, Zea Mays
gcctagagcagcaaatcaaggaattgaaggaagaaaaggcggctcttcaagatagtctcgagatggcagaaggcgaagaagccaacactcgtgaggcataccggactctgaagatggactatgctaggaggctgaagaagctcgcccctgcaaagaagatccggaagcgtttcaagagccagggatgccagactgacccaagggaagaagccccgctagcactaccctctttaggaatagggaacttttccgacgtcgaggaagtgtccctggctagccttgatgatcttatcagggagtttggggacaccttagaaaacgctcatgcgtagtgtaatctgtggtggttgtatgcttgcaatgaactagagtgctgaataaaataacatgtttgagaaaaaatatggcatatgcatagtagtaatcctttctcccctgtggcagatggcctcggataaaaccacacctaccgcctcaggaattggagcaaggtctcccctaggtgtcaaaggagaagtcgatggagaagggagagacccacctccccgcgcctccagagctgccattagacctagcccaagttctggccaaccaaacccgactcattgaggtcctcactagaagcctcaagaaccagcgcccgatggaggaagacctcaggacagaatgggagagttcctaaggcttaagcctcccacattcgccggatccagcaacccgctcgatgctgatgactg

SEQ ID NO: 21905 - DNA, 402 bp, Zea Mays
aggtatggttgaggtggttgatggcgcatgagtgactggagcgggcaaagtgggaggtggagtggtagcagtggcgggagtggtaggtgcggaggagcgaggctgagaggagagacgacgaactcggtaagcaatctgatctgatgatatctacagctggccacctctctctgactgctcagctgctgctacggccgctagagctgcacgggttgctctatccaaatgctgctttttgcggccttcctgctgctccaaataaatggtcttccccttgacctgcctgaaggggcgaggaggatcctcgtcgtctcctccccctggcgccgacacattcttcgtgcgcgacatcctgacctgaagactgcatatgtgaaggaaaaactaagcacgagatcagag

SEQ ID NO: 21906 - DNA, 431 bp, Zea Mays
acagaagccaaggttctgcttgctgaaatttgtttgttgaaggagagaggtctgaccgctgaagctgtggttgcagactttgtttttaagaatattcagccactgaaggacagagcatatccggcttatttgtatagtggtgtcaccgactcaacccgggttaccaacaagaggattcctgctgtggatttggtgagccaactggagatgatcttgaggggcaaagtatcaaatattggtgctcctgttgcatattctgcttggaatctgccaccttctaagtcctttttcgattttgtgtccaatcctcctgctggtgatagtggtttgggtcttagagtgtgaccctctctcgaagatattgaggtcctggttgcttcacttggtgatcttcccaatgatgagaggtgttgggggccttcgtcttccga

SEQ ID NO: 21907 - DNA, 830 bp, Zea Mays
aaaaaactaagaaaccatctccccctttttggcaacaagaaccaaaaagagagagagtcgccaatccaaagatcaccagttgggaggaggctgatgaggagcaaagaagtggtgcgccaggtgagaggcaaagtgttcttccccagactgatccgggggaggagcactgccagaaagatcctggggcggagggtgagaggatgattgacccagatccctatggtagggaggcggggcaaactgctcgcgatcatcaaaataggcttcttcttcttcgtcgtctgctgacataaatggcaccacgtaggcctgctggtgccactcattgatctccaggggggaggatatagaggcacgtcaggcgagcaaggggcgaagggcatacccatagtggaagcttgacgacgaaggttgtcgtcagtctcccgctgacgccttgccagctcatgtacatcagcagaaatattccggcacatagagaaaaatgccgcaatcctgtgggccaagcgggcacccatcccttggccatgacctcgaccacgaccacgaccacatggcgtgagagatccgcggccaggggagggacgcgaggcaccggcagcagcagcaggaccagcagacggaccagcagaggtatgagcacgggagctggaaggggctttccttaagcgccctactggattgttgggatcaatccagaaaggggtataggattgatgtcttgtacctttatcatatcgaaattgtgtcacaacttcaatcatcttcatgataaaaggtgcatgaagacatcccttcagtggaaagcaggcagcatggatgatttcctg

SEQ ID NO: 21908 - DNA, 520 bp, Zea Mays
caactcttcttttctttccttgctttcgtgaaggatagctgtaatctaggtatacgaaacaaataacatcaaaaaccctattccaccttttcttgcctcggcctccgaagaccgctgtcatggcatcatcttcggcccttgagtaggcgccaagaaactcatcgctggttgcatcaatggcatttagccagtcatcgtttggctcatcaaattggctcctgtatttgaatgtatacttcaagtaaaccaagccaccttggctagacccagcagcagcctccttcggcatctcccacccactgccgaacggccacaccttgaaggcaatgtgctcctggattaagtccctggtgcctatgtaagtgcatactgtgttataagcagtttggcacgcttgtatgtcattcccaagggcaagggatggtcttctaatgccaaagtgagaccatatagggcattgcataatccccttgatgtcttccctctcaaccagatcgttcttcacatagaaccattcttg

SEQ ID NO: 21909 - DNA, 424 bp, Zea Mays
caaagaggtaggccggcggtggcggtgtgctggggcagagtggccgcttcggtgcgtcagtgtggcgtgtcacgtgtcaatgaatccaacgtgaaacggtgacagtgaggtgacaacagacgagggttagcgagggcaggcgatgatgcgtcggtaaatggcatcggcagccattgccgtgttgcaacgacatagtgagacccagtgagatagtgagcatagatggtgtcatggtaaggagtgggctgagctagcgtcatggtaaggagcaagcgaaccgtgagtgagctagcgctagaggaaggaatcgaacgactgaggtaaggagtgggctgagcagtggagggtcgagaaaaaatagatcaaagtctagtttttattaaatttggtccaacttactatataaaaatttgattattttatt

SEQ ID NO: 21910 - DNA, 531 bp, Zea Mays
gttctatgtgaaaaatgacctgtttaaaagggaagtcattaaggggattattcaacgtcctatatggtctcacttcagcattaggaggccatccactacccttgggaatgatatacaagcatgccaggttgcttttaatacagtatgtacttacataggcacaagggacttagtgcaggagcacattgcttatagagtgtggccactcacaagtgcgtgggagatgccgtaggaggctgctgctgggtctggccaaggtggtttgatctacctaaagtacacattcaaatacaggagccagtttgatgagccaaatgatgactggttagatgccattgaagcaaccagtgatgaattgcttggtgcctactcaaaggctgaagatgatgctatgacaacggccttcggggcttgaggcaaaaagaggctgaatagagtatttgatgtcatcgggtttgtatacccagattactgctatccttcatgaaagcaaggaaagaaaagaaagactattacttcagcgacttctag

SEQ ID NO: 21911 - DNA, 984 bp, Zea Mays
agaagtctctcagtcgtgtggtcagccccaacggctgggtagcgtggaacatgaacaaggtcgtcgaggataacacccggaccgtcgtctaccttgaatacggcaacgacagcaccgttgccgacacgtccagcctcatcaagtggctgggcttccgcgacctaaacggtgctgctgaggcggccgtgtacacggcggacacattcatcaacacgagcaagtgggtccctgagcctatccagtacgaccacaccctcagcgtggcgccgtcgccgcgcgcctgacattgctccgctcagcacgcttaatttagtactgtactacgcaggctggcgttccgtttcgagatcccaccaccttattactatgacattgtatgtctctagtatccatccatgcatcattgtatgaattaaggcatattatggcatgcatgacgtcgtatatatcgtgtatgcatgcatgtacctggacctctacctctatctaccatttctctaccgttattgtatgaactctctctgtatgtatgcctatatatataatatgtatcctcgatctatataaatggattatatctatgattatttcatatgagctaatacacacaagtaattgttgatataagctctacacaagttggtaatagtactactatatataagtaagtcaccggccgaccgacaaaatttatacaataacacaactgtacaaatagatttgaaaaaatatttgctagtatgaattttgactacgttggttgctatgcttggccgcggacacacaaatcgatctgaattcttgttgcaatgataacattttagttttatgcggtgcataggacccacaaaaaaatcaagggcaacctacaatgttgtcttcaagaacgacgtgccgctaccaaagctaggggaaagaaaggtgaggcaccagcactgcgagtgatgggaacaaaggcaaccttctacaattgcaccatcgaag

SEQ ID NO: 21912 - DNA, 964 bp, Zea Mays
attgccttgtcggctatggagtcagctgaatccatctgatgtggatttattaggtcgttagtatagcagatatggggactatgtacacaaatttggcttacttttccagggcctaggctatagcaaacattaactactaacttctgtacttttcacactactaacacagtttgaatggagtaaacaaaaaacgtcaacatatgaacaattactgcttaacatacacaatggtaatgatacgaaggggaaaataaatgtgaacatcaccttcgttggagtggagattctgtgatgcaacagagagacaatcaggtaacaccccgagatctgaacatcacatatacatgattttcgtaaactgtattgtgcgaaacaaacaaagaactagtcctcgaacaagtactaatgtgtatgagagtaccttgcttgcactgcaaattggaacctaagacgaagacagcgagttgataagggcaaactgcaggcaacattgaacatacaattagatagtgcaaccatcgctaccctatttcgtcgaatgaattaactgcagattaggcggccttgtactcaattaaagggtacgacgaacccttgctacactaccggaagggggaggcgagggtttcgatcgattcgagcaccaccgtacctgtgcagatgacgacgcaaagggtggagcagaggaagcttgacgacggacacacggcgccggtttaggtgcggcaaccctaccaactgtttactgtcaatgaacgacggttgcggcggtggtgaatgagatggtacacggaccgaggagagagatcgtacctgcgacgacgacgacggggggagagcttctttcgcgacggggatgaggctgggtcctcggagcgcggaacctacggaagatggaaatgagacgcgtcgtaggataaccggcgcggcggaggttcgccgtacgtacctcgatgcggggagg

SEQ ID NO: 21913 - DNA, 559 bp, Zea Mays
cgccaagagatgcgctaagagtgagaggatatacgccaggagacgcgccaagagcgagaggagatacgccaggagagaagggcgcaacagcaatagcagcaagcaccactgccaccacctccaccaccagtttcaccccaggacaagcaccgagagttcatgagccataagccaccgtgctaactctcctgatccactagacgcggatgattggctgaagtctgtagagaagatgctgaatattgctcagtgctctgtctgggagaaggttctttatgcttctggtcgtctgacaggtcctgccgctgattggtgggattcatacactactgcccacgatgctgctgatactatcacatgggcggaattctttacttaattcagaaactaccatattcctgctggactgatgaagattaagaagaaagagtttctgtctctgaattaggggagcatgtcagtaagcgagtaccgcgataagttcattcagctattcagatacgcaccggatgaagttgctgaagatgagaggaagcaagagcgctttattgaaggactc

SEQ ID NO: 21914 - DNA, 451 bp, Zea Mays
agcgaaggcacacagtcttatcatacaaattatagttacatacatgcagcgagggcatcacacattacatcggctcaaccttcgggatgatacccatatccctatagttgaacagcattatcctcaattcatcgccctcaaacagacttcgcagctctccctcacctacactcgccctagccggcgaggccagcaattcccgcttgccagtcccgtccacacgaaggtgaccaccctccacctcaccacgatgacgcctatcacttcgcgacaactcactcaccctccatttcgccaccgcccttcgtcgcctatgcctaacactcgcacctggaagatcctcatcacccattacacgctgagaagcctccgccgcagccaaatccaatgccgcaaagtaatccaaatcctcatccgaagactcctctgtccacacaatcgaactcccaga

SEQ ID NO: 21915 - DNA, 297 bp, Zea Mays
acagccaatcattatccgccccaataatacccccactaccccaaaacagccgggtgccccaggcactcgatttcctgccttgcctagttcttcaactgggtgctttaattgcggcaagtcgggacacttcatcaaagactgcccatatcctaggcaaaatcaatcaactgcttcgcaaggatctgggaaatcaactcagcctaaaggaaatgttgtggggaagaatacaaagaagacagggcgtgtatattacactcaagtggctactacaccggaaggagagccggtgatgatggg

SEQ ID NO: 21916 - DNA, 609 bp, Zea Mays
acctgcacagttcaggtggatgtatagtcaagaaagagaattgaaaaaaactcagaggaatggtgcggaataaggcaagggttgaggggtgtattgcagaggcattcgcagccagagagatcacattattctcaagcaagtatttttcagacacaaacaacgtgaatgcgcaaacgacacggtaccatgttgccgagcaaactccaatcactgatctaagtgcttttaagtgggacagtaaaggtgtcggagcttacacatcacatcttcaagggaacgatagagcgtaacaagaccttgcttttcttgtatgtcaatatgtcagaacttcatccttatttccaaatctttgatagcatatataaacccaacaaacaacttactcaaaagcagttggatgacctacgcttgaaagggttacacggtggcccgtcctttgtgcagtggttccacgagcatgtaatttcctccatgcctatcttttttctaacttaagttcagatgttgcatagtatttatttttatccgttcctcatttttgtagtgtaagaaacctgaagccagtgtctccaaagacttgctacaaatatcacatggtcaattgaccgc

SEQ ID NO: 21917 - DNA, 603 bp, Zea Mays
ccctttagaaattacatgagtgcaatgatcatatgaagactagactctttgagatgtaccggcaagagtacaagaactttgtgcaattgcctggagagaccatagacattatgttttatcggttctagtcgattgtgaacaatatgtgtgtcaacaaggcacaacttccctatgatgatcatgagagagcgctgaagttattacatgctctagatcggagggtttgggaggtgcatgccttggcgatcgttgagtcgcccaactatgagaccctcaatgtggatgagcattttaataagctcaagtccatagagattgacaaccagacctggggtaagattgagaaccctagtgcacccactatggccttggtctctggaggtggttcctctctaacccttcacttgctatttttgcttttgtgacaccccaggtattcatttcgtgttatgccgtgagattggtcctaaagctcagatcgtcagtggaaattttgatttcttgatcgcgtctatcctcgtttattaagattgtttatggaagtttcaccggattcaaaattatgtgatctcgagaaaagccaaatctggagcctgttaaaac

SEQ ID NO: 21918 - DNA, 894 bp, Zea Mays
atattgtaaacctatcaaaggagaacaattttgcttaagagtgtaagcaaggttgttatgaagaatttggagataattaaacctaaagtcaggctgtcaggctgttaaagtttgaatttcagactcacagtgcaactgcagtgactttgggcatgaattcaagcaggattgagcaagaatttgcttaggatttctataacaatattgtagctagatcttagagctaaaactttgctaaagggtgatgatcatgttactgcacaaaatcgggagtaaacagccctacaaatcgctctgtcaggtgactgaatgggctttcccatggtacagtaacctgaaacggatcaggacggcagctcaactcgccgccgacgatccccaccacgattcatgcaggcgccatcctgattcgtgcctggtgaggaacggataacgccgaggatggataactcgtacgtggcgccatctcccgagtccagccgaagttcttcatcggcggccaccgtgactcggtaactttcgccgcggtgtcactcatgccgcgatctgcctcactgtgcttcctatcgacgtggtatgcatgcgctagcaatgctatccgtggctggagatcgtctgtcgggtcgccgtggttataaatagcacggtggtccacggcgaggtgtgaccatcacacacatagtgagttgaatcgaagccgaattcgcgctacctctgccccctcctctcaaattaagtgtgcgcagtaaaactagagttctttgctaagccgaagcacccgctaccaccctcgattagccaccatagccggagaatcaccaatttcccccaaatcggtcagccgcgccaccgagaatagcccgatcgtggccagcccgctctagtaagttccta

SEQ ID NO: 21919 - DNA, 477 bp, Zea Mays
ggtttatatacaaagtctccatttaattctattttctttttaccgaaaatggacgataggttgattatttagaaatccaggggctcttctgttaattcgccacagcgaagggggtaacatggaatgtgagccgcccgatctaagtcaacggatcagattagaagccaaacatcacgaatcggtacataactacggtcgttcgatcagtgatcgatgatcaggattttatgaatgaagtgttacgcgaagatctaatcgtgaccccagatccagaaatcaacagcctggaatccttaccggtttgatgagatcacgatttgaactagtccgaccactatccgatcaacgacgcacaatcccctcgagctaaatagatattccaatctcgatctccgccgttcatccgttgatcagtggccctgctcacatcgtcaaccccccacccaagctgcggcgagacggactgcccgctgcggc

SEQ ID NO: 21920 - DNA, 344 bp, Zea Mays
gctagcgagcagagaggaagcgatattgcaggagagcagagaaagcctggatgcagaaaagcagaaactagggcacggaatgtggaggcgtgcgacagtgcagtacatatggggttttcccgggccagacgccatttctaaaaagtgcccagtcatcacccgtcggttatttctaaaacgcaggtgtgccatgtcatcacctagcggttatttctaaaacgctggcgtgccatgtcatcacccagccattatttctaaaacgctggcgtgccatgtcatcactcggccattatttccaaaacggccgacgcagcccaaattaactcagttgttatttctaaaaa

SEQ ID NO: 21921 - DNA, 801 bp, Zea Mays
aaatcctgttctctccgaatctcaagtttgcacagagtccgtctcaccgaattccctagagtccgtttctccgtctctccgggtctggtggccacacctccgaaaccggctccttgttcctgtcgcctgccatcggcgacagatgcaacgagacgcagcgggatgctagctagagcgcgcgccaccactgtttccgtcccgctcagggccgtgacttgactgagcctcaagattgctgctgctggaatcattcacgggcttcggtctagatgatgactgatgagcgacgactgggacttgtgcgtgttcgccagatctagctagcatcccgttgtcagcctgttcctaatctaaacggagcagcaatggacagcattcttggacgacgacgtggggcacagtgggcagctctgtccatgtatttatctgactggaatagccaaagccagctctgtccatcagctctggatagctctgccatcagctctgtccatgtatttatcctcaagaactcatttgatattcagatttatcctcaaatctgaaaccgactgcagtgagcagccatgtcgtctgtttaatttatttgatgtgcacaatgatatccagatttatatgaaactcatttgttgacctccagatttattctcaagaactcgacgaaggaatatggcatttaggggtatcttgagttctctccttgtcacgtactattatgtctggttgctcatgggattagcatatagaagaaaatgtctgagaatagaaagaaggttaagaaatagagagcgtaggatggag

SEQ ID NO: 21922 - DNA, 1118 bp, Zea Mays
cccagggatcgtcttctaccttggctgctactgcttctcagtacgtacgtgataccggcctacggcctctaccgtagataccacacggtggcaaccaaggcatgggagaggagggactcaccgcttaaaggcagagccgaccgacgacggaacacggtgcgcagcgaggcacaggagccaaacaccgacaagcagaggattcgcggcggcggatgaaatcctaattacccagcgctctatactctaatccgaagagtactaatcgtagcgcagataaagccgaatttagggagggagccataccgagcatcgatcagaatctatcatggagacgatgtcccacggctccgcgcggacgcgacgaaatcaacgagaatcagccgttcgcccctgtccctccgagctcagagtcgaccttgattgattacaatccccgcgcagctacgaacaccaccatgtcccatactgcgactaatttcagtcgagccgcggtgaccaatggcgtggcgacggcgctcacacaccctcctcacggcggtgggttaagcggggcttagtagcttggcaccaggcgtggatcatggtggaatagcgtcgcgcttcgaggctcaggtcttatactcaagaccgatggcaaccaccatgcgaaatccatggagttccagtgccgcaagtttcggtacagagttgacagcggggatagatatggtactgaccaacgggacccacgtgccattgtcttcacagagtgacagaacgaacgaccagtccattgttgcctgctagcttgatgccacgttgatgtcatgatgacatcacccgcggcaagaaaacatataataatgggaaggacgtgggctatgctgcaaaagggaaggtgggctttgtgattgggccggtttcctattccctatttttatttctttcacattttcaatttctatttcaaatttccaccattcaactcaaattcaaattactattttaaattcagatttcctcatatcaaatatgatccaatcatggttattaacactattattttccctattagtatttattctccttcccattatctagtaataaagaaatttaatcacaatttctctcctcacatt

SEQ ID NO: 21923 - DNA, 648 bp, Zea Mays
tcaaaacccaatttaaatttgaatagttagaaaataggaaatagaaatggaaatagaaaaaagtaaagaaacctgcgcatgggctgtttcctcccttggccggcccattcccttctccctctcggcccaccttctctacctcgcgcctgcttctgctgccgcagcacaacccagcctcatccctcctcccaacgcgccgtgacactggaagtgggtcccggctgacagtgttatcttcttccccaattgctcgcaacagcagcgtgaatgccgcgggcgccaacaaatcgcaggaatctctcaacccgtggcgcggctggagaactccgagctcgcggccaactaactccgcccaacagaacaccaagtgccgcgcgttcctcgtaaccacctccgtaacaagcgccgatcaatcctcaccgctccggactcgttcctcgccctataagatgaacgtaaccccctgtcagctccatcaacggactccgcagctcgcagatcacgcaatcctcaactgctcccgcaacggccgccgccagaccaggggatcctcagccgggctctcggggtaggactccgccatcgggtatatgtgccgtggttgtgtttccttggcctccattgccgcactcggggagagagaaatcc

SEQ ID NO: 21924 - DNA, 1372 bp, Zea Mays
attctgggggttcggttgtgtggacagaagagtctttggatgaggacttggattattttgcggcactggatgtggctgcggcggaagcttctccgcgcgtgataggtgttgatgttcttcctggtgtagtgttgggcataggcggcgaagggcggtggcgaaacggagggtgagtgaggtggagggtggttgtcttcgtgtggacggggctagcaaatgggaattgttgtcctcgctggctggggcgagtgtaggtgagggggagttgcaaaatctttttgagggtgaggagctgaggataatgctgttcaactatagggagatgggtatcatcccaaaggttgagcaaatgtaaagtgtgatgccctcactgtatgtatgtaaccgtaatttatatgaagctgtgtgccttcgttgatccggtcgtgcccgtaaacgacttgtgcgcggggaaccttttggaaaatacatcgattttgcgtacttattatgctagtccggctgcacccgtaggcgacttttgcgcggagtgtcgcacgtgagggtagtcaacgctgcccctcgcggtgacttcggtgtggtcgaatgccgaagaccgtcgatgcggtctttttcgacattggcttagttttttgcgggggatttttgcttgtatattacatggctccgcctcattgaaaacctcacccccttggaggaaaagagtgcgggccagaataataatgtttggtgaattacaagggcgtgatggccctgaggattcaaacaaaaaatttgcgaagattatctatattccaggaatgttccaggtcttcgccagattatgttgttaatctgtatgcgctgggagacgacttcgtcttgacgataaatggtctttcccactttggttccagcttaccccgtgactctgtccgggttgtgcggacaagcacgaggtccccttcgttgaattctcttgggacgactacgtggtcgcgccaggccttcgtttgggcttgatacttggcgagggcctgcagggcgaagacacggtcaccgtcaatgaggtctttggaagttggctcatcaacgtcgggtactgctgaagcgcttgtccgcggggacccatgtttgatttcctgcggggtcatggcctccgatccgtatagaaggcgaaagggagtgaatccggttgcccgacactcggtcgtgttcagtgcccagactgcttcaggtagcaggtcggcccatttgcccttcttgttgtcgaggagcattttcttgatcgccgtgaaaatcttgccgttggcacgctccacgacgccgttggattgtgggtggtacactgaggcgaaggcaagcttggtgccaatggagaagcagaaatccc

SEQ ID NO: 21925 - DNA, 554 bp, Zea Mays
gtgtatatccctcgaatcaaagttttgtgcgcaaaaatagatggtcgattgatccggccatggccaccactgcgacttgccctgcgccgccgttcctggttggaggtggggggaggcacgtcgaccgctgttttgaaattcgacggcgtagattagaagatgtggataccggttcgtgagttggtctcgaccgtttatccgcgatcggacgggttgaatcaaatcccatctatgttaagccaggacccctggatcgtgatacagcggccattaacgcgtaccaattatgcgcgggccagatctaatctaggccacccacttaggatcggatggctgtcatgagaagatacctcttcacggcacaactttttaaaagagtccctgcagttttataaactcaaccctccatcctttctaggccctggaaatattacacagagccccctagactttgttaaaattgtgtccgcggtctagaatccttgagaaattcagaatttattttcaaaaaggatttctggtacaaaaataaatgctagaaacttatataattc

SEQ ID NO: 21926 - DNA, 689 bp, Zea Mays
gtcatcaacaacaaggaataggacggaggagctcatcgacgatagtagaggtccggtggagggctcgatgaggtcgagggcgacttgtcgatcatgtcgatgtgcgggccacggccggagacagtctggatcgtacggtccacgtgcgcaggcagcgtggctcgtcagcggtggtagcatgtgaattgaatagttagggaggtttacagggtcagagaggtgcagtgggtggaaggaattgacttgcggaggtctatgatgagctgtccacgttcaccggcgggtggtcgagctccggggagcggtggctcgccgttgtagttgggtagcgagtgggggagttgaccgggagccttcacggggtgttacgaaatgtgctggtggtcttggtttgggtggggggtgtgctatgctctggtcacggtggtcgggcgttggaaagaatggcgggtggcggagctccagctcggtgctcaggcgatgctccagcgattgcaactgcgggcgagtgcgagggctcgaggggttgctgaccgagtctaggacgatccttgcatatataggtgtgggcagggcatgacgctttttgatccaactatgtggggggggggcacgtgggcgtgctcagtcagcgcgctggcgtgtctgtcactctgtcagggccgaacacctcgtaactttgcttgtgc

SEQ ID NO: 21927 - DNA, 879 bp, Zea Mays
ccagtggatcctttccgtcagtgttgatcgcccattcgcgaattcccctcgctgccccatggaccccacctgtctgcgtcctccgcttccctaacctctcgcccatgccccagccatggacgcggccacgaccgcgcgttctccggccacgtcctcacgcccgcaccccgctcgcccacctccccctgctcatttgcgccctcagctgagctctctcgcccctctctcgctctgcgcacgcgaccaggtagccccgccgtagctcaccgaagcccgacgtccgttctgcgaccgccgtcgagcccgcgccacgtctgttgcctcggtaagttccacctcgccgtcagctacttgagacacccctcagttcacccccagcaccctggtccgtccggtccgcgcttagctttttccccgcgcaggtcggtgttcaccgccgtcgcggttattcgacgtccggccattcggagtctcctcgagccacgccaagccaccccgagtcccgtcccgaggtgagatgtccgttcccacactcaatttctcccgattccccctggtattggccaatttgactccgccggcgatgaccattgtggttcgccgcgcccgtgtggtggccgattgttttagtccgatcccgtgcctctgtgttagcccctaatgttccccttatcctgctgcagctagcccatgccttagcatgcatgagaccacctctcctcgaccggaattcctcgccggaattgtccgacccgcccggagcaccttccctttgtcgtccttccttcactggcctcgttgttgcggccagtagtctgccagtgtgttcgccaggccctctggaccagttctagccctccccagcgaccccagcccgcc

SEQ ID NO: 21928 - DNA, 361 bp, Zea Mays
tgccctggtatcccactctgagtttgatgttgtggactttctgatctgtgagattgaggacaccgttctggatgggattcgtgctcgtcggcagctaccctatgctcactacttatgccacatctttgcgcagctgattcagtcacctcgatttcagagcacccttgaggcctcacgccttgtgtttggatcttaccgtcctgctcctgagattccagtgccagcatatgctcctgtgtttgacactcaggccgaggatgcagcacttcgacagtttgacacccagggtacagcagctgatgatgatgatgatgatgatgattttgggattcctcctccgcctccgcctcctatgcctcca

SEQ ID NO: 21929 - DNA, 307 bp, Zea Mays
agaaccaaatcgtcgatcatccatagctagcagaatagttgtctgtgtgcgtgcctgcctgcctcgtacaggactcctcctcttcgtccatcgtcgtccccccactctgatccctaacagcatgtgacggacaggcagcacatccgcatcgacccctcggcgcacgacgacggatcggtcggattgcccatctgcgtcacgcctctgctggcacggcgtcgggtacgctccaaattccctgcccggccggatcggtcggagcagacggtccgtccacatctgatggcaatgtatgcttgcattcacg

SEQ ID NO: 21930 - DNA, 633 bp, Zea Mays
gcatgatggcaatttggcgttcaatttcatccttaatcgctggaggatagcgataaggtcgaacgcgcactggagtcgcaccggcgatcagtggaatgacatgattgcagtcacggattggtggcataccggtaggtggttcaaaaacatctgaaaaattggatagcaactgcaccataggtgtgggcaaactcatttcattgaacctgagcgactccttttcaaccgtagccacctacaccaccgctccaggttgcagaacagccgaaacaccatataaagtaactgatgactgctgataaggaatgcatacccacttgtgtaaccaatgaatgtgcatggggctgtaagaagataaccaatccatacccacaataatgtcagacaggtaattccagcacacgtaaattagtaataaacacacattcttgcatggaccaacaagcactcttgatttgatgagaacacttaagacgagtaccatcagccacctgaacaactaccggtgctagcagctttgtaacaacagatagatgggatgcaactcgagctgcaatgaaagagtgagaactgccagaatcaagcaagatacacactggaatattctgaataagcccttgaaatttgattgtc

SEQ ID NO: 21931 - DNA, 344 bp, Zea Mays
gtcgggagcagcatggtggagttgggcgagcttgaggagtattttgtggtcggggaggcatccgcgccgggcgcataaatgaggccgacgtcgaggaagacgagaggcgggccaccgtcgatgtgcgagtagggacccacaactagtgctgggaggatgtggcttgcagatgtgcagatgtccgcgctgggcacgtggatggggccgacgtcggggaagagagttgttcaggcgaccgtagcagaggtgggggagtttgcccaatggcggcgccacatgtggtggaggaggtgccggtgttgcgtcagtcgctggtggttccgagcgaggagagctggccaaga

SEQ ID NO: 21932 - DNA, 589 bp, Zea Mays
tcggcatccgacatacactgttgtcgtccggtgcccgtgcccataccggcatgtgaggattgttcaccggattccaaaatccgataaatccgcgctttgccgtgcctctagccgtgctccgtgtctgtcacctcacgagtgctttctcaacagcgccgacccactgtttattcgtacttcttcgaacagcgtcggtctactgtggtcctgtccttccaccgcagcgcccatgccactgctttctcccaatccccctatatgaagtccctctgctgttgtcttccttttttcccctaactggcagtcgctcctttcttctcgtcgactccgtcgtcgtcgtctgtttcttttctgcggatccctattgcttttgtttcgattccttttcgtctctgcaccggattcttgtgcatttgattcatctgctatttcatctgttgtagatctgccacgttggagacctggccaacacgcgcacgtcctgaaatcgttcagtccgtcccttcttcagcgatttgaggtaatccttggttccaccgttcctcgcttttttatgttgctttggttttttggttcattgcagtttctt

SEQ ID NO: 21933 - DNA, 408 bp, Zea Mays
ggacggcaagcgtagccgcaactcgagcgcaagtggatcggacgccgagattcttactgagtcgtgcttatccgatggccatggcgcacgaatcatggcgagcaatcgatcaacggcgatgggctaccggcgacaagcagggggtggaattgggatcttttgcagttgaacatttactgtaccatggtgatctcctattagatgaactgacagagagatttggagcatgatttactcccaattttgtgtggtgactaagctagctctttgtaccaaaattatagcctgacaaactagctacaacgttgtcacagcaatcttgatcaaattctcaacaattcaagcttgaatttacacacaaagctggctctatttcactgaaaatctgaatttcagaatggaccagcc

SEQ ID NO: 21934 - DNA, 563 bp, Zea Mays
attacctgttttccatttcgaatattagtttgtgtgaagctatcaaatattagtaatgacgatcatttttttgccaagtctaaaattacatattttccatttgaatatgtgtgcatctgcaggtggaccgtgtgcatcagttggttaccctcataacttcagtttttgataaagtgctgcactgccttggttatcctccatccagctagggtgcttattggttggtgatggacgcacctggcctacaagatcttgctgattccaggaataagacatgtctcatcttcatgcttagttgtcgcaagttcatttgtacgctcccttaccataaaaaatattttagaaatccattacattgtaatgtagattctatgattaaaacaacactatatgtctgctctgattattttgacaggactgtgtgtttagagttttgcagaatggtcttgctatcgatgtggagtcacataatcagattaaggagaggaagaacaaggctaataagatctgtggtgtgaacaaggtatgcacagttccactcattagaacacaatcaaattaag

SEQ ID NO: 21935 - DNA, 393 bp, Zea Mays
caaagatctcaggtgagcttcattatgttttctctgcaacctctgtcacgtatcccactgtttagtcctagcacatggcgtagttagctccctgatcggtgtcagatgggtcatggcacccgctcgatgggggggtgaatgcatgctaatctgttgtgtgatgcactgttccatcattgcgctagattgccttttacgctttgcattcagagtactgcagacgctagacagcagtgtggatcagatcgactagcgagtagtgcagcaccagaagcaccttttattatctgccccagtcgttatctgagatctgtcatcaggcaaagtagtggtagcgaagaactgaaacatctctctgcctctgcactcggtactctgccaaagaaagtagaa

SEQ ID NO: 21936 - DNA, 787 bp, Zea Mays
tttataagttggtaccgcaattgttagctggctagtatggtactatattttgcaagttgtgacgacaatggcagcctgcagcttatttggtgcgccccacgtcgcatgcccaggaggctgcatgcctctggccctagcctagcctgtcgttcgagtccccctctgtcgctctccctccccagcgagcctcgctccacctctccttgcaagccctccctcgcatctgtctcccaagacatggagatgccttcctcctcgtaaccgttgcgccatattcagtccgcacccgcacgctccctctccacgacctccactccgccagctctgctcctccttgctctctagcacgcgcgcttggaggtcgtggaggttgatgacggaggcgtgtgagagcactgatgtggattaaggtagagcaccgctcccggcactcaatttcctctcacgaagcactagattcaatagtggtgagtttacacggcaaggaccgccgccacccggactcaactggttctatcttctccaccaactccccctcacacccactcactcccgaacacacactcccctgaaagctttactgggtccactccggcccagcaacaagcacattgggctttctcacccatcgtggcctattgttaatctgcatgtccatctactcgttgacattctcccctccttgagactcggcttgaccccaagccaagactgagggaaaccttttcttgatcaactcctcatcttcctaggtggcaagttcttctgaccaagctgaccattttac

SEQ ID NO: 21937 - DNA, 624 bp, Zea Mays
tatggtcccaaagccaaactagccattaccaaaaatctacattctctggtcacactagacacttccggtggtgcaccaaacacctcactattcatctgatcggtcagcagccattctaaaaagttgtcagctatcagactacaccatacatgtctggtggcacattggacacaccatgctagtgccacatcagccaactattggaccttcacttctgaccattgggttcactgtgtgtctggtggcacaccaaacatgtccgttgtgccaagttatcgaagtccaaaaacatgctctctatgtgccctatccggcgagttgtccgacatcacattggacaggtccggtatgcccaacatcgaagtcctaaaacaggctctctgagtgtcgtgtgcggtgacatgtccggtgcacaccgaataggtgcaatgcactcagcaacatcctggacacttctaacttgggttcaacttcttcgactttacttggcttgtatcttgggcaagtttatgagttgtacaaatgtttcttgagtccatccaaacactcaaagccatcccttttgttgtattccaccctctaacttaatttgcaattttccattaagcctttgttgcaattgac

SEQ ID NO: 21938 - DNA, 597 bp, Zea Mays
cgggaggacagcaacagcagcatgttgtcactacctcacgtggggggaacggcgtggaatggaaaagccacacagccacatgcggaccgtgacgcgtccgtgacttgtacacgacaggccaagcttgcgatggtatataagttgggcgtgcatatgatatagtagaataaagcttacatgttgaatgatagctgcaaatcccatcggtgtttaggtggggtcacgactggtgctgcaacggagaattcgattgtctcatagtcgcctatatcgtatgatcctgcacactcatcctcaatgactatattatgcagaatgatacattcacgcatgatcaaacttagtaattgttgattgaaagaatggtatggggttgcaagaatatgaaatcaagccttgagtacccggaatgtcctctccatgtccttccatgccccctcttgtcattcagcgaacatcctctgctttgaagtccgtgggagcgatatggtcttcacaaaaactagccgccgagggtatattccatcagcgagatagtatcactggttgtacccgtggccattcaccgtgaagtgctcgtttagtccttccccgcta

SEQ ID NO: 21939 - DNA, 630 bp, Zea Mays
aagaattgcctttgcacgttgaactgttgtcctaaaattcagctgttattccacctgtgtagtaggctagtagcgcctgggcaaccaaaaagaacattacacagagtattctcctaagatccatttgttattccacattgacttgcaatggtgctcgcaaaagaatctatgattagtcgaaataaggattatagacagaaaatcaaacaggattgctgactttacctgctctaacaccacacgagtgaattttgatgcaaccatgcttaggataggttttacaacaacccaaataatcctgacaaaatcaagagcgacgggagcatatcgatagctccacaagcaggggccttggcatggccacttgcaccaatatagtcgatctccaaggcacgaaggcgatgaaacaaatctgacaaggctgctagcgagagaaagatggtgctgactacagaggtgcaaaatagtcaaccagcgaaaacatcaatggagattgattaactctaggatagcataaaggtaccctggtgctattccaccctagctgaatctaactcaccgcaacccaaatcttcagcactgtagcgcatttgttcctagcaccacttggcatggtgcactgggtcgctg

SEQ ID NO: 21940 - DNA, 423 bp, Zea Mays
gttggatgcagcaaaatggagttgtatgacgtagcacaggtgtacaccgaggggcgagatgaagagcagacctgtgcccgctcccattttcatcaatgacctgtcaaagtacacggtccatagcacggcctgtatcggagtcgttgggtattgatctattgagccaagaagtcagccaagatctgggacttgatagcttttttgggggcgaatgagaggatttctcttatgagttcgaccgcccatttggctaccctgcctgaggccaccctgtcctgaacaatctcccctagagggaaggatgacaccattgtcactggatgggactcaaagcagtgtcgtagctttcgccgagccaaactactacaaacaacaatttctagatttgtgggtagcggatctttgtttcggataatatttcgc

SEQ ID NO: 21941 - DNA, 732 bp, Zea Mays
cgcggcttggcatgagcgtgtggctccgtgcccaacaagctggggtgaaggggcgtgataaggggaacacacggcgtgcggcagtgcacgacagacaagctcaccaaagttggccataacggggatccaggggcctatcatgctgggagaatagctcaggagggagcgggggtgaaggcgaacatgattagggcctcaccaagggggtcgaggtagcagagagggtcggcgacgagcgatggcggggagcgtggagagaggtagcgaggcttgaggatggggagccagtgcttggaatcaaaggtggggcttcaggtgatacttataggagcgagaccgaggcatgacaggcaccaaatcgatggaaatcgatgaggagatcaactctgcctggtttccataaacagcaaccacaaaaggaatgaaatacttggtaagggggaggggagattggtcgagatcaaggggaaaaggaagggcatcacggtgcgctccacatcgggcaaggaatcgagcaagggtggcttgatgcgggcggcatggcggtgacaagctccagactctggtgcgagaacgaggaagaagaaaggaaaggactgacatttggggcctggctaacagagagagaaggagaggggaagggagcgcgctgatgggccgcctaggccgaaagcaggcacaggccaggggcgaggagaggagaggattttcttttttttctttttctctgat

SEQ ID NO: 21942 - DNA, 395 bp, Zea Mays
gtgggtttcacttgatgatggcctagcttccggtttgcttttcgcactccgatccggattttgcttcagcgctagctactttttttccagctagctagcgcgcgcgcgctcctttcttcagccgatcctcttcacactgtgatagtcagtcaccggggaaaggacgttaacgatgaaggcatgaacgaagccccgtcattcagaaacaagcaacgaatgagagcctaatctgcgggccggcttttacgtgcgattagccgataggcctgcgaacggtgcgcgtacctgataccctccctctggcgtcgacgacgatgagcgctggagcgagagcgacttctcttcaagggctagctagctagagcgctagctccaccaatcaccaatgtcctcaa

SEQ ID NO: 21943 - DNA, 730 bp, Zea Mays
gatcaacgcggtgacggtgggatcacagtcggggcaggtgagggcacggtgaggggtgtggacgccatccatgcacaggcgtgggatggagcgggggtatggcctaactgtggacgtcctcaccgcgttcttatagagtagtagtagattaggactgagagtataaaataaggatttacgcaccattagtattctacgacaaagaatggttcctaagtccttccatctcctaattaaggcaaagtatccaatgcacatatgcacacataaaatccagaccctccatctagaatccaacgacacctgactcttttgcaaaaagaacctcccgcgatagctgccaacggttgttgttaatttatagaaaccccccgcacccacttggactcataggagaaggcatttacgtgctcttgtacccagttgctgcccagctcgtgagtatagagggctgcccaccgccccagctctctgtacatgtacacatacatgctcaacacacatacaggcacagattaggtataaaagtactaatatttttataagtgcataattggatttaaagtatcaagctaacataattatcatccaacacagttgttgataaatattacatgatttgagcaaaataaacaaaataaaagactactaattgcttcgctttgtcttctcgtttttggcattctttcccctgcgagactttggtagttctttggctctcttaattctt

SEQ ID NO: 21944 - DNA, 604 bp, Zea Mays
cacgatcacgcgcggtgagtgcggcaaagccctaagatctccctccaatggtgtgccgaggctggggatcgtggtcgtcaatggcggtgaagtcctcttgtttcccctcacaattactgtacaacgacgatgatgaatgaaacacgacggggagagaggatttgggacccaaggtactcagcttttatggttctcgtaggccggtccgagcgcaggcaacggactcccgagtctacgacgaggttccaccatggtcgggcgtggttgttggatggatgggctgacggctcgggtccacctaccggtgataaaccagcgccacacggaccagccgagctgactaacccaccgggcccacatgtaagtcactcagacggggaaaaggaaaagggaggaaaaggctgacaccatggtcccagtagtcagcgcgatcctccccagttggacaccggactgcggctgacgtgtgggacccagatgtcggcaccgacgcgccaactaggccacgtagctgagggggctgatggaccgaggtgcaaacttcgggcccaggttcggtttggaggtcttcttttctttttttcttttattatttctattcttt

SEQ ID NO: 21945 - DNA, 553 bp, Zea Mays
aggatcgagttctctggtgccggtcttgctgctgagctcggaggacttggaatttcctcttgaggtgacctttttcttcatcccttgccctttccacttgtatggctttgtttgagaggtgcaagaagctgaggaaatcttggctggctaggatggtcttgagttctggtctgagccccttcaaaaagtgggccatcttcttgacttcggtgctgacgtcatccggcacgtagcgggcccattctgtgaatttgtgcacgtattcactgacagatcttccatcttgagttagttcccggaattcatcttccttgagctgaacgatcccttggggcacatggtgctctcggaaagcagtttcaaactctgtccaagtagcatctctgatggcagcgttgaaggtatcccaccaagctaaggccattccggaaagttgatgagcagccagttgaacacgctgattctccgggcatccgatggcttctagcttccttttaatcgtgcgcagccaatcgtcagcatcgaggggtttgctagatccagcaaatgtggg

SEQ ID NO: 21946 - DNA, 413 bp, Zea Mays
attgtgagtccagtaccttcttcgatgccccgcggtgcctatccgaccctcacacaggtggattgggcgctaattggggcctaattgctcatcggagctgtgtgtgtgccgcggtttcactcgtcaccgtggccagggcttctaccacaccaatcgtcggtaagtcttcgtccgtcgtgttcccccagctctcttccatgtgtaacactgttctggtcgggtttggggcactggtgtggcgggaggcaatagctccggcgagtcacggccgcgtcggggggcggcgccgccgcgtgtctggtatagggagaagatggggccacgtccgtagatttgggattggacggccctgattagatcctgggaaagactcgtcgtagtgattgaatccaagccatctgtagggaatcgtg

SEQ ID NO: 21947 - DNA, 619 bp, Zea Mays
agataatcctcccgagatgactaaaacaaccaatcctccccactatttatagaaagttattctaccttcctaaactactcatagataaatagagtctatccactcagtcaggggcaaaatggactaactcctggattttcgatctgacaaccacccactctttacgaagttgcttcgcctcgatgtgcattttgtgatgaaaccacgtgtcgcctcgattcccaccggaactgtaccgtcggatttgaggcctgaacctggtgaaaccagcaaactgtaacgctgggtgattttgagactcaaccgctgaaacatccacgtagcgtactccatatgtatccccaaccaagacacgtgtcccgccgatccacaaccacatcggcaacaatggtccgctcctccacgtcctcgtgcccgtcagtgtccccatgtgtcagccaccatagatagtctctcagcttctccagtccctcgatcaagactcgtcgctcgtccttcgccacaatcgatccattggcacgaacccgtgtaaccttcacctctgctgtcgaccaccgtctcctaacttcacacctgcacaccataagtcgaaagacatatttgcaacacacaaactcac

SEQ ID NO: 21948 - DNA, 390 bp, Zea Mays
tatgtcacatgaaaggccaagaatctagagcccaagtcgaggacatggttgtagcaggtggagtagaagcaatagcaactgaacctgtaggtgctaaggtgcataaccagtaccacgacacagtgcatggaaatcagcgagcttctctagaaatttggcaaaacaatttttagaccgatgtgtattcttgcactgctcacaaggaactaaagaggaactcctggctgcataggacttatgagcagcaaccaacacactgtgagagccagaaccagtagcataagacatggatttaggcgagtctcttcagcaagaagatcagacaatgcctttgctatggttagattatcagaaccgtggagcagtcatgcatgaatagagtcatattca

SEQ ID NO: 21949 - DNA, 548 bp, Zea Mays
gagatttgtaagaagagggaatacaaaaggattggttcgcaatttagtttttaatttctaaatcaagggtctctctttttattattagtaagtgataggagagcatgggtattatatgtatgtccactttattatgaaggatagaagatgtctttaaagcatagataggtttgggtaagaaagtgtagggtaaggaaagacttcatccaagatttgtggatcttgattcatctgatgatttagcttgatctttgaaggcttgagttaatgcttatcctcctttgacatggttggtctcctttggcctttcttcttggagttgccatccgagttaaggacatatggttgagatatatggggtaagatagactacatgatataggtcaaaatttggtttgatgtcaggtggtggttgatagattatgcactccattaagattctattgcttgggcaagttgtgtaacttgttatatagatcgagttgtttgtgtatgtccttggttgctctaagtcaccagattagacttaagtgaatgtggagtatggc

SEQ ID NO: 21950 - DNA, 1154 bp, Zea Mays
tggcaaagcgaggtgtcatcgccacaagggcaagggatagtcgaggtggtcgagagtcgagagaggatgtcgtggctgaggtggccaagacgacagtgtcaagtggaggcagaggtagtggaggtaaggttgtagggttgggcaacataggcggaggaagatgggttgggggaagcgaatggggtatcggggcccggagctatcgcatcaagcaaccatagcatgagtggtaagaacctgtattgtgaggccctagggatcgaactcaatagagtagcagttgtcagtggtgaagcgacggactgagagaaggttataaacgatgtttggggcaacaaggatgttgttgaggtacaaaggaccgggaaggaccgtgtcacctactaaggtgacaggtagagtcgacccattaccgacaatggaggaaaggaaggtggagctatggggatggggtaaaccgacggctctggggtcgagatgttgtgaaatgaggcgtcgaagttggcaacccagttaatgggaggagagtgcggcgaagacatgtggtagccaagggaggcacccctaaagagccactgtgaggcgacaaggtgatcatgggcggtgaagacgacaaggcctcgatcgtcaaggagacgcgcacaagatagggaggtgtgtggaccgcgacatggcgaatgacgggcgttgagggagcaggcatgggagtgaaagagggcaagaggcttcctgcacgaaactggaggggcctagcgtggcgcacaaggcgcgcaacgatgggagaggaggaagatcctgccacacagaagtaggaaaggggactagcaagggtcaaggtgcagtgtagggggtctatgcagcacaagaagtagcacaaagggttggcgcaacggcagtggcgacgtaaggccacaatggtagctgggagctcgtcgttgcgtcgaagggaaggccaacaacgccggagttcgaagttgtcggtggagagtgacgggggtcatgcgatgggtgatgtccacgaggaggcagcaacgcgggatgaagacaaggagagtcatccgcacaaacacagggagcagtcgcgatagcggggattggctgagacagaggatagggctacgacgccgaccacaaggtcgcattggccagttccg

SEQ ID NO: 21951 - DNA, 477 bp, Zea Mays
tatgcataaatcatgcataaaaggaatcttttgtagcccgaatcacgtggaacgaatattacactatgtacaacgtttacgactgcataaagatgtgtaacgtgatagcataaaccatgcaatatgtaaatcttgatcagtttgagataaggaaagacgtgctgcacaatcgcgaaaataaagggacagttacggtttgaggagcattagtacaaggaaatcaattgtattagcctttcctgtacaaccgcatcagatccacgttcgtatctgtgtgttcttggcggcggcggaagggacaacatcgggcatgttttggcagtgattaacggcgagggaatggccagcactggcgatgacatgcaacctgtagcgtctatgcatagatcaataggtacgtctacttcaatggacatgcatcttgtagcgtctgcgatcaccggttacacagagggtgtatctgttactcccccggcg

SEQ ID NO: 21952 - DNA, 626 bp, Zea Mays
tctatagctttgatacagatgaattatgagattgtcacataaaaattggagagaagctgccttgaatttgctctgtcagaccgactaaatacacttcgtgatggtacagtgattggatcaggccgccagctcagtccctcgccgccggcgatccgcgcgtccgaatttgcgttggtcgccgtgattcgtgcttggcgcagaggatatccacgggaaggtaaaagatctcacgggggaatggatttgatcgcgaattgaagtttatcactgtgccgatagccgtcgcgacgtggctggaccaccagcgtcgccgtggatgctccagttaccccggttgtgccacgccataacttattactatgcgatactaatcatggctcccttaggagtgttatccttgcgtcgttgcaccggtgaacgccacggtcacaaccactcgtattcttccctatctccggccgccagcacgctgtgatcaaattgagagccaccgcccccgaagcctataaattaagtgcatcatcgacttcgttatgtattcaagcagctagcgcacccacccgcacctcagatcctccaccagagagctccaatttcgcatttcccccaacccactcaagaacacc

SEQ ID NO: 21953 - DNA, 972 bp, Zea Mays
cgatgattgcaacaactccagttaaagatcctagctctcgacggtggcagactccaactaaatccaccgatctctgcgcgcggcaagaacagattccagtcgtgtttctcgccacccgcgcggactcaccgccaggattctcgccaggcaaccttgccagtagttgcttgcgcgggataaatacgctccgcgcccgcctcctccctgttttctccatagcctcggatcgcgtcgcgccgcccgcacatactcccccttcgtccggtgcgcaccttgatctgcttcctcgccggcgttagcttctcgggacagcaccagagggtcgcgtgggcaggaggagtctggtgcggacgtcgggcggcggtggcatccactagaccgtcagcgattgcttgccgccgctgtcgctcaaccgcgagtcggctccacgtcgggggtcgggatcttcggtaccttcaccctcggtaaattacccacagctagtttcacccggtgtgtcgcattgtgttaaggtagtcgcgataggagcagaccgttgtagcatggggcattcggtgttgggtatggcgccgccgtcgggcaactacggcgaagtcacggcgggggagtgaagacgacgggcggtccgtccgatggtagctgggtggccacgattagatctcaggttatccctagtcgtttcttcaacttgggccgttgattcgagaatggacggtcggatcgttgatgggcgatcggatttgagcgagtgcagctgaaccgttgatcttgagataaacggtagaagtcggatcgcaggatgcgttaaatctggaccttagatcgcggatcctgtggccatcatgcgcgctggttgtgtaaatatggagatctaatctagaccgtggaagcctgatcggatggcctagatctgttgataccccttcgcggtgcatctttgcaaaagagacccctagtttaaatggaatcgac

SEQ ID NO: 21954 - DNA, 518 bp, Zea Mays
gttcgggtgggtttgggcatcgcgtataagtcatgggggcccgggattgtaactagggcgccggattcactcgcgccggcgagctcaccaccgcctgggtgggtggcgccaccgtcgggccgcgctgggaggaagacagacctaggccatcagatccgaatcgtgaggatgggattagatccagtaggggcgggtgtatggccgttggattaggattgtgtggatcagggcgcatgccagtagggtgatgtggtcttctgatctgaaccgtagatctagatccgagggccacggatggatatcggcttcattaaatccttacccttgatcttagatccagtggccgtaatcgcatacctcttcatttattggcgatctgatccggaccgtcagatctggatcgtgcggccctagatccccgatacccattcgccgtgtacatttattaaagagtccctctgttttcggaaaaccaacccgcggtcctcgggaactattctctgtgtctggagattctt

SEQ ID NO: 21955 - DNA, 676 bp, Zea Mays
atagggattaaaggggtaaaacttaacccaaattgagaaaacctaaaggctctagggaaatagttgtagaatatccccaaaaacaaagttgaatcacatttatacccctgggatactaaaaaccctaattggaaccctggaaaaccctaaaactaaaccctaggggcctatgtgcaaaattagtccacttttggactaaagtgcaaaaaccaagttaaataagtatcttaaatcatttgggtcacaaatatgtgagtttgcaagttaaaccctgagatttggatttaaatgcaaaatggacctcaattgggttctattctaagtcttagatttcagagttttggctcaactttggagcattgtatcttccaaattataggatctttgccctaggtcaccacaccaaatttgtagagcaattaaaggagaacaactttgcttaagagagtgagcatagttgttatgtagaattccgagataaatgagcctaaagttggactgtcaggctgttatggtctgaattttcagactagcagtgaactaacatcgacttcaagctaaattctgagcatgatccagtggaaatttacctgtggttgccatagcaagtttgtagtgggtataatgctctacaattttgctgcaaggattaactcgtgttaccacaggaatttgg

SEQ ID NO: 21956 - DNA, 777 bp, Zea Mays
aatctttgaaaacatagcagaagctgaggctactaggctggaggatgtcgatgtactagaagaagaacgattgaatacggtgattcaatcggcctgatatcagcaaactctgaggtgctatcatgacaaagccatacgacatcgatccttcgcattggaagacctcgtcctccgccgaattctaacgggggagggacggcataaactgtctccactatgggaaagaccattcatagtagcagaagtcactcggcctggatcatatcgcctcactcaaatggacggcacagaaattgggaactcatggaacatagaacatctcaggaagttttacccctagctatatctcaaaagctattgggacgacaatgtactctgtaaactgggaaatatatcatcaataaaaagacttcaaaggcactcaaattgttcactgtcaacctgcatgcttacttaactcggggtgaccactataccctactaacaaagcaatcggcttaagttggcaatgacttaaggcggtgcgacatgctcacgcttacttaactcggggtgaccactataccctactaacggagcaatcggcttaagtcagcaacgacttaaggcggtgcgacatgctcacgcttacttaactcggggtgaccactataccctactaacggagcaatcgacttaagtcggcaatgacttaaggcggtgcgacatgctcacgcttacttaactcggggtgaccactataccctactaacggagcaatcgacttaagtcagcaat

SEQ ID NO: 21957 - DNA, 340 bp, Zea Mays
gatgaagtatgtcatgtcaaagattttcggcctataagcttggtccactcctttgctaagctcattactaagcttttggcaaataggctgacggaacacctggataatatggtatctcagaatcaaagtgcatttattaaaggcagatccatcctggacaatttcatgcttgtgcaacagacagccaaaatgcttcaccagagaaaatgtgcaaggatcctccttaagttggatatcaccaaagcttttgactctatctcgtggcccttcctcctagaggtcttgaagcatttgggtttcgggcaaatttggtgcaacattgttagcattcttcttgctt

SEQ ID NO: 21958 - DNA, 410 bp, Zea Mays
tggggggcaagtccttcatcctcaccatggtcgaccgcttctccaaatatgcacaattcatcatgctcgaccacccctacacaatagccttagtcgcccgcaccttcttcgatgacatcgtccgactctaggggttcccctcctccatcatcagtgacatggatcccgtgttcaccggccatgtctagaatgacctattagagatggtcggtgtcatgctacgcatgagcacgacattccatcttcggatggacgaccaatccaaagtggttaataaggtgatcgcgacgtttctatgatgcgtgacaggtgacaggccccgagcatgggtagactagattccttggtcagagtattgctacaacacttccttccacattgtctgcatgccacgcctttgaggtggttta

SEQ ID NO: 21959 - DNA, 604 bp, Zea Mays
ccaatcttgtattggaggcccagtaatttggtgaagactcgctgttgccagggtgtatgcaagcgttgctcagtcaggtgtgacaaactgcgctgatccgtataaatgatgaactcagcatgctgcaggtatggctgccattgatcgacagccaagatgatagcgagatattctttttcataagtggaaagtccctgatttttgacacccagcgcgcgactgacaaatgctaaggggtggccatcctatgtaagcactgctcctatgcctgtgccggaagcatctgtttccagggcaaaaggtctggtaaagttgggtaaagccagaaccgacgcaaaagaaagagctgacttcaatgcctgaaatgcttgatcgtgctcgttggtccagacaaacagtgtatgtttcttcaagagggtagtaagtggtttggctagtattccgaagtggcgcacaaacttgcgataataccccgctagtcccaagaatcctcgtagttctttacaattagtaggtgtgggccaagaggtgacaacatcaattttggcagggtgagtagcaaccccttgatgggagacaacatgccccaagtatgaaatttgtt

SEQ ID NO: 21960 - DNA, 2803 bp, Zea Mays
caaactgcaaggtttctgtgagttactagcatatatataggtttgcaagtagtttgggttaccatcaaatatttctgcagttccatcccaaaggctgcgaaggcgcacacaagccaagttctactcaacatcgttccctaatcatggtagtaagcacactctgcagcagcttgccacttctacccaacatcatcgtcctcctcttgttcacaaccatttccgactccacgaacagcaacagcgatctcaatgcactcttgtcattcaaatccctcataacaaaggacccaatgggtgcactgtcatcttgggatggggacgcttctaacaggagcgctcctcatttctgccggtggaacggcgtgacgtgcagcagccaccagcacggcagccatgtcactgccttgcgcctgcgagccttcggtctggaaggcaacatctcccagtcgcttgggaatcttagccacctccaaaccctggatctgtcgaacaacaacctagaaggcgagataccttccagtatcggtaacttgtttgctctccattttctcaacctaagtgttaaccacctgtccgggaacgttcctcagtccatcggccgtctttccgaactcgaaattctgaatttccgcgacaatgacatcgtaggaagcattccttcttcagtgctcaaccttacaggactcacaatgcttagtgccaccgaaaattacatgacagggaggattccagattggttgggaaacttgacggatctgacagatttgaacttggcatggaataacttcagtggacagatcccacaagctttaggtaagctacctaaccttgctagattgactatgcaaggtaatcaattggaaggtttaatctctcctacactgtttaacatttcatcccttgagaatttaaatctcggctataacaagctttcaggttctctacctccaaatattggatttacacttccaaatattgtagcatttagtgtatgctataacaaatttgagggtccagttccatcctccctgtccaatatttctgtgctccaacagctcatcctccacgggaacagatttcatggccgaattccacctaatattggtgtccacggcagcttaactaatcttgaattaggcaacaatcagcttcaagtcgtggatactaaagattgggattttctaacccctttggtgaattgcagtcatcttaaatatcttaatcttgagctaaataacatttctggcattttgccaaatgctgtttctaatctctcctatgagctggaagcgttactgatgggtggaaaccaaataaccgggaccgtaccttcagggataggtaggcttcaaaagctccaaatacttgatctgtcagataacctgttttcaggcgccgtaccttcgagtataggtaaactctccagcctagacagccttgtgctattcagtaataaatttgacggggagatcccttcatcacttggaaatcttacaaaactaaccgagctagttttacattccaatgacctgcatgggagcatgcctccaagccttggtaatatgacaatcttagaatccatcgacctttcatataaccgcctcagtggccaaattccccaagagatcttaagcatgtattcccttacaaaatttctaaatctctccaacaattttttcagcggacccatttcccaacagatcaggctcttgatcagtcttggtacaatggatctctcaagcaataatttatctggtgagattccacatacccttggtagctgtgttacactgcagttcctgtatttgcaaggaaacctcctacaaggtcaaataccagtggaactgaatgcactaagaggcttagaagttttggatatctcaagcaacaacctgtcaggacccattcctgattttcttggtgacttccaagttctcaagaagctgaacctatcattcaataacctatctggtccggtgcttgatcgaggtatcttccacaataatgccacctctgtttcactttctggtaatgccatgctttgtggagggcctggtttctttcaacttccaccatgctcaactcaagcaacctatggccgttccaatcatcaacgaatgcatgtcttggccttttcctttactggagctttagtagtctttgtgtgcatcactgtatgctacttcatgaaaagggcatctgacaaagcaagtgatgctgagcatgggttagttacgcttcctagaaacaaatacaagaggatatcatatgctgagttatatgaagctacagattcattttccgattcaaatctggttggtcgtggaagatttggtactgtatataaaggaattctacatgatgacagtaatacagaaactgtagcagtaaaggtactcgatcttaagcaacaaggagctagtaggaccttctttactgagtgtgatgccctcaaaagaattaaacatcgtaaactggtcaaggttataactgtgtgcgacagcttggataacaacggtgatgaattcaaggcgcttgtgctggaattcattcccaatggaaccttggatgaatggttgcacccaagtgcacttgtcaccaacagagcaactgggagtctaagcatcattcagaggttaaacatcgctcttgatgtggcagaagcattggcatatcttcatcaccacagcaatccatcaattgtccactgcgatattaaaccaagcaacattctacttgatgaaaatatgactgcacatgttggtgactttggtttagcaagaattctaaacatggatgcatg

SEQ ID NO: 21961 - DNA, 419 bp, Zea Mays
caacacgagtttgacgccacatgaactgctctagtgtcaacccaccaaaactctgttggaccgatgtcaattcatggaagaatcgtgtgccccgtgtcctactagtactccatgtacctttaatttgaaccctccagtgcttgtattgtttgggcagacgccgcggaaccgagaccccgtcataggcgcgattggatcgttctgggggtttataggctacatccatgcccatagctgctcggtttaggttagaattaggtctggaaagtatctaatgggtgcttgggctctccaccgccgtggcatggcagggaggttcattcgtgccgccggccggagtcgaggacccaagtttaaaagacaaggaacttaggaagggtagggagtaaagtatcagtgactcattgaattcggtcgag

SEQ ID NO: 21962 - DNA, 363 bp, Zea Mays
aaaattattagggataaccgtcaccgtttgtttcctgtttttgtgtttcgatggcaggcgacgacgaagaagcaaggatccctacagacttcgatgaatgtgttagccgccaagatcttgaggcaaacaacaagctcctgaaggagcaaatggaggagacggtccacaagtcagtgcatgatgccttcattgacatgaaccttggcaagacttacgagaggctggatcgacgattgtaccagatcgtcgacagacttgctgtgttggagacgcaacaacaagcaccgccaccaccacctcctcgtccacgtcttcccaatgatgcggtgtttgatgaagaaggtaattacactactaaaaaat

SEQ ID NO: 21963 - DNA, 511 bp, Zea Mays
acgcgcgcgctcggtttccgcgggcactgatagcgcgggccccacatgtcaggagctctccctgtagatcttccaggtccggacgctccgcagctcctccgcgaaccacgcgctgaccaaaccgactccgacgattttctgggggcgagttccgcacggcgggcggtctttatcgtctgaccgagggcttagctaacctactgcccagtcctcgcgcctatattaatcttcttgacctcgccctccccttgcgcgcttgaatcctccgtgcgatcgtccgctcgccattgccgctgagcgaggagagagaacctgcgctacaatcgccatatccaccataaacgcactcggttagagagctacgggtgcggcggcgggaacacctgggtacctcggcatcaaggatcctcggcgcccccatcacgtggcggaccctcgggccgtgcgttcctgttctctgcggccggcatcgtctatacctggatcaccagtcggccccgtcgcggatcag

SEQ ID NO: 21964 - DNA, 479 bp, Zea Mays
ctaggttggagtgtacgactagcgagacccaaaaccggatattccgcgtgaggacgaaggagatctttccgctcgctaaatttagaagatttcctatattacaaagcaggtaagaaacgagccacgctacggtgtccacgtcggcgcaaatttttcaggccgttagattcataatcaagcgtcatacagtctcttggattttcttgtaaaaaaccccatctctctatgcctctggatgcttctggggcactctccctcgcgtcagctcgctttgacctcgcgcggagcttctcctcggcgtcgtcgcctactccgtcgccgcttcctcttcacgccgagcgctacaggtttgttctgacctcgctccctccgccattgcaaccgcgctggatttttttatacggttcagcgtcattacgcctttcagcttttggctgcgttcttggttctagggtttgtatcctctgcctgctagatct

SEQ ID NO: 21965 - DNA, 580 bp, Zea Mays
aactttgcagttgcacttggcagtagtggcttggaattggtggggacttttagaggtgatcagcatgatgatgtaggtgtagggtgattggtgtattcatgtttgtgtgtgcacttgggttttgtgaacttgcatgagtatcttatatatttgggtttggtttcaccagggcagattctctgactatagattgagaatggggaaaagggggaaataattggtattttaccactcaaaacgttgcctcattgttatatttgccactgtgtctatgaattgtaagtccatctgagtctgaaacgtgggtctgctggcaattttgcgaacctgtttcattataatggcaaatatcagattctctcggaaaatgggacaaacctggtgtgggaaatggtatggtgctgcatgatactggcaagcatcagcgagcatgatagactgtaaattgagatgacagtgacgtaatggtggcaagttagaggagttggatccgctgggtgtgagccacaggaatgacaggatagtggcagttgaggtgtgagaaggattttacaattgacaaatgtgagaggaggattct

SEQ ID NO: 21966 - DNA, 345 bp, Zea Mays
gcgagcaatcataatggaaacaattaaataatgcgcggatagcgcgcgagacacacgtgagcagcaagagacgacacacgcggcagaggaaccgatgcgatcgacgcaatggtcgagagatatcgcatgcatgctacacagatatgaattacaatattttaactcaacctagtcatactaacagacaactatcacatgcaaagataaaatcgacgcttagctttgatgggtttgctactcggttactcgctgtttaattacgtaaattaattaacgtgagtgattctaggcgaaacagtttattgtcgtacgacacggcgcatgacccactaaacaaggccgcgg

SEQ ID NO: 21967 - DNA, 521 bp, Zea Mays
gtcgcttgggcggtcccttcgtgaggatggtgcccttcctaaaatcctttctctgccttctgaaggagtgattaaagggtaaaaacatctatggcaatcaaagtaacatatcttgccaccagcactaagacgaaaacaatctgtatctttagcacaataaggacacgtcaatctaccatgcacgctccatccaagaaaataccatacgccataaaatcatgaaccgagaacagatacgcaacacgaagattgaatttttgcttcttgaagcagtcataggcttccactccttgccatagcttctttaactcttcaatcagtggttgaagcatcacattgaggcatacgccaggatgctcaggcctaggcataacaagacatagaaacataaactcatatttcatgcaaagagcaggtggaaggttgtacggtatggcaatgataggccaacatgaatacgacgcaacggtcatattgaatggtgtgaaaccatcagttgccaagccgatatgaacgtttct

SEQ ID NO: 21968 - DNA, 927 bp, Zea Mays
aaaaaagaggagagattctaccattactttccatgacacgcaagcttgtagtaactgaatgacacattgacactgatgatggtgcatgacagtgtgagattggtgtggtacagaactacagacagtgacatgtccagtcctacggcaaaaaaaaaaaaaaaaacagacccggctggagtgttggactcgaactcctttgattaggtggagactggagacattatgactagatttgggcgttggttatctcactactaatttcatgcatgagtgcaagtgtcagcttgtcccataattaagacctggaagcttgttcaatttattatgctaaacaagttggctttttgtgaggtccatgctttcttcatctgattatgggaccctctgggcgtacagttttgcagtactgcctcttcactggccatcttaatcaaataatcaaaaggccaatatcaactgctataaaatccaatgctcaatgatcttacgagcaatctgagacgcatacatacgcggttcgagttttcacacattctgaaatacgatcgagtactgctctagttggcaaacagacaaaaaccctgattgattcaacaagtctgcagcgaagccaagaagcgtgttgctagaggcatgactgcgatatggaacagcagatttgaaaccagtgaacactgacgctttggagagccagccatgtcaaaatctgttgcccccccttttttgatctgtacatctcttcaaccacccaaagatgagggataacgtgcagctttcgagcactgtagctcgacagtggggcttggttctctaggcattgcatgttgatgtgaaagagatacggacagacagacaggcagacatggagcatgtaatcaaacgaaccatctggagaggcggcgttcgtactctataagaaaatcagta

SEQ ID NO: 21969 - DNA, 760 bp, Zea Mays
ggccacctcattgggtcctactgcctcgcaaatgatccatactcagaaacgtaccaatcgggctctccctagtaagatcccgtactcatcctttcctttgtagggatcgaaaaacctcacgacgtgtgaaatagtcatgaccagccgggtcgcgtggacccaaaaaatatggagttctaaggtcagtccgtgaagggctcacgactgctccagcaaaaatggagcgacagggcagtcaatggcgggcatactagaaggacccttgcgcatgagcgccaaacgcatcactagcttgcattcgagtctcaggaatgtctgacacttggcttatcggtgagaggcagcaagccatcgggtctggtcaaacgaagtcgataactatatgagttggtgcctgggagtatgaggacggtcaccagctgaccccgcgcttgaatcctgcgaaaggaactagggcctcactcggaccactcggttgcaactcactaagcgccattgataacccatcgaggagagcatggtacagctcacctctccccatccccgcaaatgggacatgcaggaaagagtaaaatagaaagacgaaacatgcccctcagatggatctctatatcgaacagagactcaatggctcagcccgcacacacatggcaaatgggtaaaagatgcgagaaaggaccccctatttaagaaacaaaatccttgaaacggataagggtcatggggacccaaaacccacacgcttaaaaatgaaccgatc

SEQ ID NO: 21970 - DNA, 310 bp, Zea Mays
tgcttggggtgatttgggtggtggatgtttggctgatgcgggtgcggaggctggagcggaggaggtacgatttgtacctccttgtggtgttggtatgcgtggttaggtggatgctgagcgaggccgaggttgtatggttgtgggaggtggtgttgatatgtgtgggcgacaactcttgggttgtcggcgggttgcgcctgggacatcctgtccctggtggccttcgtttccaggcagtccctcgtcgggtgcgtgcagtcttcgtcgtgaaataggcagtaaaacctgcgtggctgttgtgcccgtcctc

SEQ ID NO: 21971 - DNA, 639 bp, Zea Mays
ccatgagtgtgtccaaggttgccaacaaccacttctaacaccaagccaaactcataatgaaacaccactgtaaagaatacaatctacccaccggcatatatatcttcgcttatattaatcactcgagacgccttgctaatgccacctcgggttatgtgaaatatccgatcaaaaacatcaggatgtccatagtgcattcgaactctgaacaaggatagtataccaccagaagttagctcagttctaaattattgtcaaatatatcataataaaatgactgcagtataagagagtgcaacagaacatgttccctatagcatgctaccatatggttggtaaaatttactcacttgaggtaagcaagaacacgttgccccaaagtaacaaaactagtctcctgtttcgacataaatgacgccagcgaagagacactattaaagattacaggtcaatacagaaaaattaaatataatcaagcaaagagataacgaatgagattagttaaataataacctccccgtgaatacatgctccctcacacctaggattgtgggcttccgtatgccatgttttccatgagcattatgaaattcttcaagtaaatttctcattttcattgcttcctccaagtagttatcc

SEQ ID NO: 21972 - DNA, 493 bp, Zea Mays
gcgggagcattttattcctgtaagcaacatttcttagccttgaagcaatcttttgcttctatcctaagcaaccccaaaaccctaccctaatttctcctctataaatatgggcttccctcccttgcattctgaaattttacatctcctacccctagtcgccacaaccttcttcctcccctcccacgccacctcttctctctgtcccgtggcacacggtagccacagccaatgtcgtcttcctcccatggctgctccttgtgcttctctagctcggcgcgcagggagcactacactccccagccggccccctcctctagcttggcgaccctccctgctcccttccatggatgcgccatggctcctccactgctcccttcctctccccccatggagagttcccccctgcatcttcccatggcgctgctacctccatgatggagctcgggcaccctttcacctctggtcgcgcccccttcacagcgttctactcccc

SEQ ID NO: 21973 - DNA, 393 bp, Zea Mays
gcaggacacaagggcgacgattaccatcgggcatggcacagtcaatgtggaaaggcgtcgaagccatcgtggtagggcatcgtctctgcgtcacacaacgcagagagctcggcgtaggacgcaaagaatactaacggatcgtcatacgagggatttggccccatatgaatcgcaattagccgccttatttcgtcagcctcagaaggcagggctggtctaggcctcctgcgtcgcctacatggggcggggctaaatcaccgagggccatcaagacgtgtcgaggctctcagatggggcaggtcaggtgggcatcaacctgaccatgtcgcccacccggccaatggtgaagtcgagactcccgaggcggatgggcgctctgggagtgtattcgac

SEQ ID NO: 21974 - DNA, 1295 bp, Zea Mays
gtagcggtcgacattgtcgagccaggcgcaggtggcgatcccagcggggtagagctgaggtcagccagggtgccagaaggaggcgcactggcggcaggtgcagcgcgtggagatgtagcgtgtggtgtggcaggagtagccacgtgaggcggtgtaggggcgacggtcgtcaggcatgaaggagaggaggaggtggaatggatattcgtgcctgtgtcgaagaactactcttgttgtggaggctgtttaagtgttgtggtctggaagttggctgctagagcctgttgatcccagccttgagccaaagcgaggaggatgggtggagggatgccccattgaccagtccattggccaggaggatcgaagacgtctgactgtggcgcctgctaaaagagattgtatctgtgtgcaacagtagattgataaatgagagacatagatgttacaatctatagggggtgaggcgatcttgggcaaaaggaaacccatacacaagatctcctcaaggatggaaagccccaattaggatcctgcctactaggtcctactaggtccagctgactacagagccagacgcaggtcctgtatatggtagggattcagctgtctaacaccaggattcctccctacgcgtgggctcttcaagccgtcgggggctccttaccctaccacggattgtgcctcctctgcaacctggcttggccaaccagcgtgccacgaccttttcaccgccaccgcctctttcccacatagctcgtgtggtgcagccgcgctgtccaccgtcggtgcccctcactcgcggttgcgaccttctttcctaatgttagcgccccccgcgtggccgtctgtatgcccctctcctccgggcagtcttgacccgtgatggcaccggcgacacacccttctccgtcaccactgctcctacccttgctgccttggacaacaccctcgccctttgcaatgctgcggtccatgtgcctccacgtgctgatattgtctccatgacgatcgaggccttgtcttctcccctacttgtgatcgccgtcagcatgctcgccactgccggctccagcacccctcccggtggctctatgggggtgcctctgatggctctccttccccatccccatgtcatcaccacccactcctcccaccgactgggttgctgactccggcgcctggcaccataccacttctgttagcatgctcgccactgccggctccagcacccctcccggtggctctatgggggtgcctctgatggctctccttccccatccccatgtcatcaccac

SEQ ID NO: 21975 - DNA, 468 bp, Zea Mays
aaaatggtcctgaaaaaatagatattatcaggaagagattgttatggcaagggggaaagagaccaaaaaataccatttggctggttgggatctggtcagcctacccaaagatcatgttgtgcttggggtgattgacttgaaatgtatgaatattagtttgcttgccaaatgaatctaaagacttgaatcttcagagggcctctggcaacaaataatcagaagcaaatataccaagggagatcccctcattgtagttggggaaaagcaagacgattctcacttttcgaaaggacaaatggatgtgaaggaaattttctacaaattctatagaaaagtcattggtaatggaaaacagactagtttctggcttgacacttggcttcgcgatctgccttcggtagtccagttcaagagactctttgatctttcctttgataagaaattttttgttcaaaaggttattagctc

SEQ ID NO: 21976 - DNA, 469 bp, Zea Mays
catgcatgcatctcctctgaatagtcgttgctgttgccatcgaataggaggaaagtactgaccattaggtgtaagtatggagctagtatattattatctcgttttcttcagtagtataggccaaacatagggaatcgcctctgtacgtagacgtagcgagtatcttccttgtctggctggcaacaaaaataatggtcccatgcggatgagtgagaacgggcacgggctctggaagatgtaacttgcaagtctcagtttaatgggagtggaccagcatcacccataacaagctaatattcggttgcttaatccgtcaccgcgtcaacttgcttccattgagctttgatgatacatctgtttctacgacacgcaccccagaagcagcatccggccccgtgggacccggggtgcagcgggccacaggaaaggatagctgctcgttctctgtccgtccgtctctacagttttc

SEQ ID NO: 21977 - DNA, 674 bp, Zea Mays
cgcggttgttggtggacaattgaagacaagcgtgggtgctatggatgggtgattaccctatggagctcacggtgggctcaatttatagcaggcatgagcggtggccggggaattggacgaagacgcgcggcggtcggagaaggagaaagttactggtgcagttgattcgtggagtataccatggtggactcaccagcgatgatcggatggctaacgtgagtcatggcggcacggttaaaggctggaggcatggcgcaaccgtggtgagtgtcgcggattccggtgacggccgtaaggccacgttgccggcgcaagtgggcaaaaggtagagcgaccccggtgacttgtgtttatctagggcaagatcttttcacgtcgagcataatccactagctcaagacatgaatcgcgacgaccggcggcgtgaatccggacgcgcagatcatcggcggcgagagactgaaccctgagatatttagtgtactgtaccatcagaattgcaattcagagcccctggcaatccaagtttggcattgattttctcctaaatttacatggcaagttgttgatcggccagtagcaaagttgttgtctaacgatccagctataaaccgactgtggtaaccatgctcaaacatccacgggatcatcttcaaaatggcccccaaagttca

SEQ ID NO: 21978 - DNA, 328 bp, Zea Mays
cacgattttaaccataactgatctgaaccctagatagctcatccgacgactgatctcgtgtagtactgcagggtatgcgtggttgtaatctaaagcgtagaatgatgatcggacgactcctaatacacgatacctcttcgccggtctatttttcaaaagagcccttcgggtatcggataactaacccgtcgtccaccctgactgtactctgagtctgtggaatcttgcgtcaggccccctgacctttctggaaaatgaggcccagtccagaagggtaagaaaatcagataaatgaaattagaaattgatttttgatgtgaaaataaat

SEQ ID NO: 21979 - DNA, 649 bp, Zea Mays
cagccccagcacaaggaggaggcagaggatgcttccactgtggagagcaaggccactaggcgatgcattgcccaaagaagatggcgcagtagcagacaaaccctaatgccccagcaaggtaaggtgtacctcaacaagcagcaggtaatcgtggccatgcgtacaaccgtggaaaggtgaaccacttggaggccgaagcgatccaggatgcaccagatgtggcagtaggtatgttctcagtcgaatctcatccagcgaaagtgctatttgatactagtgcaactcattcatttgtcactgcaacatgggtagaaatgcataacatctccatatagtcattgatgctgcccatgagggttaactcggtcggtggtaaagtgcaagcagataagatatgctcaaatgtaagggtggaaataagggggatagggttccccagtgacctaatagtaatagacacccctagggtagatgtcatcctagggatgaattggttaatgaagtatgaagtgagtgttagctgtgacaagaggaccgtaacattgaagtccccgcccggagagaaggtagtggctgagctaagaatgcctaaaacagcgaaaggtgactgtcaccagatttcggttgatagcaaggaggccaacccgct

SEQ ID NO: 21980 - DNA, 327 bp, Zea Mays
ctccacgcctccccgtgcttctcaggtgtgttccacacttcccattctagacttctcatgcaatctgcatgaaatcaaatgtttgtgtgctcccttgtatgcttttcattgcgcagaaaataattttactctgccagccacagcctgccttatgctcctgattggcacttcctcatcttgctcccagcagaaagatgaataaaaaataaaatagcagccgctaactcatgtgtttaatctaagtttaatcttcctaggtgctaggcagtggtatagggcctacctagcgcgtacacagtgcaagataacaaggttggagcatcagag

SEQ ID NO: 21981 - DNA, 896 bp, Zea Mays
gctgggcaagtgtcaacaccgcccttgaggaccaagttctctgcagtagccgcctctaaggctgatggaccctcagttacttccatgggaccaagatgatccaagtcagtctcctgaccttcaagaccgcgttctaaggtcgatgaggcacgggatgacctcaacccagcatcgagcacatcagcacaaacctccatcacaccatcatctgctggctctgataatagatcctctggaaccatatcctcaagagtctgatcaaaattcgccagggacaattcttgcagaccaatgagagcagacaaagcaggagaaggaactccactactttcaccactggcgacgcactgccgactgttctttcgagtcagagggacctcgtcctcttcctccccgtcgtcttcaccagcaacacaggcaacatccaccactggaatcagcaacagatggagcacacccattggggtcagcagcagatggagcacccccattgggatcagcaacagatggagcacacccattggggtcagcgtcagtaaattcaggcacatgcacttcttcaacagcaggaaccgaagtaccaacgtcccgatccaaactagatactcgccggaggcgtctctttttctttttctgctcatctgcggaaggatcaagttgattggctcggcaagggcgtctcgggcgagtactagcaggcttctggatatccaaggttgtaccagtttctgggagaggcgccaccaccaatgtcccagcaggagcagcatcagaagagtcctcagccaacaaatcaagcatagcacttatttctgcgtcactaggatccaaaggcacttcaaaatggacctgccgttcatcatcaggaatttccccgagcgaggcaaccaagacgc

SEQ ID NO: 21982 - DNA, 508 bp, Zea Mays
atttggtatcccaaacctgaatattatgtcttgtatgaattccactgctttggttgaggtcaaagaggcaatgggcttgtactctatccattttgtgaattttgtcaatggcaactagcacgtgagtatagcctccctgagctttcttgaaaggttcgatcatgtccagcccccagcatgcaaatggccatgttacaggaatggtctgcaactgctgtgcaggtaaatgttgttgctttgataagaattggcaagcttcacatctctggactaactcggtagcatcactcttcgctgttggccaatagaaaccagatctgaaagccttcccgaccagagttctggatgctgcatgtactccgcactgcccggcatggatttcatctaacagctgcttcccaataaccgagtgaatgcatttcatgagaactcccgtcgcacctcttctgtacagtgtgccccctatgagggtgtagtgggctgactgccttgcgatgcgttctgctgc

SEQ ID NO: 21983 - DNA, 970 bp, Zea Mays
ccgcgccctggcggctttgcacaggggcccccgcgttttagactaaccgcgaatgagccctttcactatttggaggagtcgctgacacttcgcaaaaaggccctccggtttctatctcttcgcaggatgaagtccacgacgacgtcgcgcggaggatgaactccggcgagcatgtagaccggccagaggaggccaagaccagcgcttatcgtcggcctaaaccaaattcattacctaaagaacgtttcccccaagttaatttgaagaatggcactctaccttgccctgtccacggtgaccgagaacgttacagagggatgaaggtgttcccggcgagtggtggtgatctagttcaattgaacggttcgaggagttcgtggggtgcctacggatgctaaaacaagcaacagaaggacgggaactaaccggaatcgagctggccgcggcgagctgttcttcacggcggcggagaccggatttggggagaatgggaaattcgtgcgtgctggtggatgatcgagggtgggagcgggtgctatagcttcgggatggcttagcgcagctgcccaggggctcaatttatagtgttcgcgggcggtggtgctcaatttgaatgaagatgagcggcgaccggagatagggaagaacgcaggtgcggcgaattcgtggctactgccgtggcaagctccccggcgacgatgggacgggtagagggagtcatggcgacgcggtggaaaggcttggacacgcggcataaggccgggaagcggcggtcaccggcgaggtaatccacatccgccgcggtaacgatggtacagtggccggagttgtttaatggctcaagtttatccccgacggtgacctccaagcgttatccacactgtccgcacgaatcacagcaacggatcgaccaccggcgacgacttaccagcgacgagcccgccgcgctggcaacctgatccgctcggtc

SEQ ID NO: 21984 - DNA, 326 bp, Zea Mays
gccgggggtaagtaaatatcacgccgtggatacactccagccactattttactccggccatcgtacccgagcagatcatggttgcttcggatgggtttgccggagatagccacttcacggccttgcgccacgtgccttggcacgttaaccacaccgccgtgactcacgttagcccatccggtggttgccgggaagcttgccacggtaattgccaccaatcgcgcgtgccagtgaacccctctttctccgcccgccgcgcgacttcctcaaattcactggccaccgctcaagcctgctataaattgcgcatacccatggctccgtta

SEQ ID NO: 21985 - DNA, 561 bp, Zea Mays
ccttgccacattttgtctcggccttgcgccaacatagctccctctcgccctcaatcctcaaggcctcgccctactacccactcatacaacctaagaagtcgagatcattccaatctggtatcagatatgtcaggtcacgatgaggaagatagcacggcagccgctgccctccagccatccttagcgtccatcgccgcgacactaggagaagttcaacatcagctctgcgactttgcccagcagatgtcctccatctcctcttgtgttgtggtcgtcgaggcatgtccatcttcatccacacctgttgggttacgatggtatccccaaggtatcggtgaacaccgatcctttgtcagtcacgacacatcctagctccatagcccccttccaatccatcgtctaccccttcctcattccccatcaccactaccatcattcccctcaccaccaccagagtattcaggagcaccattctcgcaaccagcgacaagtgttcctcgctttcatcgactggagttttcattgtttgatggtaaagaagaccccattggatggatcaac

SEQ ID NO: 21986 - DNA, 644 bp, Zea Mays
ggccagtcaaaaatatttgtagaagatttgatcaaagaagaaaaaaattggcttgctcgctagcgcatcggaccgtccgtgcaggaggtcgagacttggccttttcccatctggcgcaccgaactagtccgatggctatctagactatctacacagagagggtgtataataggacttcgggagctggcgcaccggactggttcggtggtgcaatgaaccgtctaacaaacgcccaacggtcgactgacaatcccaacggctccctgctctgaccattgatgatggttcggtggtgcaccagaccggcactgtagttggtccagtgcacccgcaaacagtgcaacttttgaacttttctccaatggctcttttggtggttgggggctataaataccctccaaaccagcacattgaagacacaagaactactcctacatactacacatcaagtacaacacatcccaagcattcaaatccattcacgcgtcacatttgattgatttgagtttgagaggcttagcgacttgtacattcgagtgtttcgagttcttgtgatctttatttgagctttcattctcactttccctcccccattctctttgttgtaaagtgtgggaagagactccattcttcgtttggaggtc

SEQ ID NO: 21987 - DNA, 293 bp, Zea Mays
gatttccagcaaagaagggaggaagcttacatacattctgagatgaccagaggcttcggaggaaggcttcacccaaggcatgtcagaacaatacacaatcctagtcaaagtgaggacaggagcaaccataaccaagtgcaccagcacagttctcagtcaacagggacacaacagagttcctttagaccaccagcaccggaaggcaaagggggacgaagctttagaggaagattcaactctcaatcaagaagactattttgcttattctgtggagaggataaggggcacacaac

SEQ ID NO: 21988 - DNA, 1703 bp, Zea Mays
agcaaatattcttcgacaaaccaaacagttagctacatagctttaggtcctacttaggattggacgatccattcattatcccatcctcagtcctagaggtgaaaaagtagccaaaatgcttaccaggagacaaagcagactaaaagcagccttcgggcccaatggtacggacgcattagtagcctcggtattttcaagaaggcaatgaaacagaccaggtgcccaattatacaacggccagcaagcaagtgctgacgtgataagatgacaaacaacaccaaaacctatagcaaaagtaggaaacatgaaggacaaatctgcagcacaagctgctagcctcgggctgcaagaatagaattgcagacattgttagacagagagagattgagagggaagggtaggaggtataaaatggaacgtgatatgcacaacctaacttctcggtgcaactgcagaagagaactaagaagttttttgttgcggtattgttctttcgtttcctgcaatgaaaaaataacccaagatcataaaatcagcttgaaacaattgttgtctcatacgcaaaagatacatccatattgattgtatcacagagaatatgaagtgcagcttacacgtaatatatgaaggagatttatcaacaagacaagtgagggaatcatgaggtcaacaatagctttctcatgagttcgatctagaagtaattctgtggtagaactcagttcagccccttcatcaacaaggtaatctgtagaataattgaaatttaggacaaataagagcacacaaagattcatgaatacaagaatctaaagatatactgctgtcacaaattccatgtcatggtagaaaaatataaaacatgttgcactcaccataactatttgataaacgctcaagcatagacttgcagttcatcaggacaacatatataacagttatggcgccttcttcaaaaagggatgacgccacaggctttgcagatagcaaaaaggtaagcatgtcattacgaactataagtcatgaataaatgggttttccatgagcatgaatttcttaccttatcatccgaaataaatgccaagatacggaaagctgttgttaattggaccacagaagtgctgcatagagcaactccgtcaaaatacttatccgcaacaagtttaccaagaagattatcgatgacctgaccatctctactgtttgaatctgcaactacattttctacatccattgaatctgacacaagcacatttcctgaagaaagatgagcatctccaccagatgcaagaatagcagaataacgaagaagcccacgagcaccatttctctgataaacaacaccagcatcaatccattcaagcaaccttgttggtgcatctttcctgtttgaaccaggagaagatgaatgcagagccttgtgcagatcaacagcaaacccaatccatgattcaagcgatgaagcagttgaatccacaaccaaaacttcaagaatttctgcagctgaatggaaaattgcaagacccaaaggcgaccctcctgagatcagacagacacaaagacatgtaagcacacggatacaacactaaatcaaatggaaggatccagaagattctcaaccattctcagccatgactgaatcaagatccttatatgaagagagagatctcagtagaactgatattgcctgcaacaagaatatt

SEQ ID NO: 21989 - DNA, 499 bp, Zea Mays
tcgagttctacatcacccggttcacggtgacagcgcgaggaatggaccgaccgaggtgttcccgatgatccaatggattctagctcaattggatgggtcagagatgattaggagcatccaaggatactgaaacgaggaaccagaggacatgaacggacctgagacacgttggccacggtgaggtcacaaggcgcggtgcttcagaccaatttgggggaaatccaaaattggcgagctctagtgagcaattggaggctcggcttggtgggttgggtgcttgactaccttacgaccctgacggtgtgctcaatttataggatttgggggcagcggccagtgaatttggagttggcgcggtggcggccggagaaggaagaggtcactggtggcgcaatcgtggcatttaccggtgcagtggttcagagagggtaagctcaagtgtgccacggttactaccgcgtagtaaagagtcacgacgtggcataattgagatcgccgg

SEQ ID NO: 21990 - DNA, 477 bp, Zea Mays
cggcagcaccacgacgtgacgcgaaccagcaacccgacaaacgctgggagaagaggcctcgcgaagaagtgcacgccgccggaccacctgcctctcgcgcccggggaggacctcgtggaggcgaacacacgctggacgacatcctcgacgcccagtgcccgtaccacaaggacatgcgccacacccttcggaactgcagggacttcaagcactccgtcggacacggccggcccttctagcctctacctcctcctccgccacggggaggaccaggagaaccgcgacaaccccagcagcaggaggagggaggatgtggagccttcccgcgtgttgacggggaggtcagcgtcatcttcggcggacacggatcgcaggagaacagaagacaacaaaagctcaacgatcgccaaatattggtggcgaccaccggtcctcccgctccgtaccgatggtcggagcacccgatcaccttcactc

SEQ ID NO: 21991 - DNA, 610 bp, Zea Mays
caagtctaaaataaatgcaacagcgaacagaacccttctctcgtctgctcatcctactaccatcgtcagttcgacgccacttaaaaggagaacaggaccgtcgtcctcacgggcacatacacagacagacacaccctgccgcctcaccaccgcgaaccatgctggcgcagagaatgtcatcatcaatcttagcgacgctccactgctcctgccgtatccaccaccactgtgcagtgcttgatatcaactactacgtacaaggcttgtagcaaagaagtacggcctctgtcctatccttccataatcacgacacgagaagatcgctagtaattaacaaccaccactgtcgctgtttctctcctaatccaaccagctccctccctttctagatagaaaccggataaggccccaagcaacagtgcacgatggacctccccgcaccgcacctaacgtctgtccagtacgggcccagcgccgtcgtcccattgccattgggcatttccccacgtccgtcccggcgtactatacagcatgcttccgccccgcagaaaaacaactcgcggcgctccatcccgtccagtgtcccgtgtcctgaaggatcctgcctgcc

SEQ ID NO: 21992 - DNA, 716 bp, Zea Mays
cgccagccctgagatggacggtgcagagggcatcttctacaaccgtgccaggacgcacaaccgagcacaatggtgccacagctagcgcggcggcgcacagctcccgcgacggcgaccatggtcagaatcccgccatccggcgaactagtccacaaattcatcgtaaacgcgctatagggagggttccgatggtgaacatgacagagaaacgacacataggcggagggcatagagaggggggggtgtccttgctgcaaggcgggaccgaggcggggctattctccggcgagggatctatggctaacgagggctctattccatccgaagcacgatactagccgtcgagaggaacatggcgaagctaggggagaaggtctcaccgggagcgaaggtggggacgaggtcggacacggtgttgggcgaatcgctggcgttgaagtccctccggtgagaaactgtgtagcctccggtccacaatcccaccaggcaaggccatgacagacatcctggtggccttatttatccgcacggcccatccccgagggatctacatcgacgagccagagtcttccccatggcgaacatcattctcacacttccacccatggcggtcgggtatgggatgactcgaattcgggtgccagctcgatggaaggaggggagggggtacagagacggcttttaatagggcagaggagcgcccaggttgttgcgag

SEQ ID NO: 21993 - DNA, 609 bp, Zea Mays
tgagaattttgtccaagtgatggtgtcggcggtagcatgtgatgcacaataggcatcccaccaatccacagtagggccagtaaggcgacctgatgcatatagcactttctccctgtcggtgcattgggcaatattgagcatcttctccacaaatttcaactagccgttagcttgcattggatctaggtagatggaaaaggtgggtggtttgtggttcgtgaactcacggtgtttatctctaggtggtggttggtgtgggtcagggtgttgatggttattgttaagttgggcttgcatattggccattgcattggccatttgttgtagtagttgtgtctgggtcatgaagaaaacttccaacctagcaggtggagggtttgaaggattcatctgcggttctgaattaattattgtccttcttcgatggatgcgtgcaggcagatccacacatcctcctgtcctagcatcgaccatctgggttagagacataacgtaagatagatttgtagataaggttgatagctatgtgaggaacacatggtctttttgggtcaaaatagctcagtaaattagagtgccacctacctatcattactatactacatctag

SEQ ID NO: 21994 - DNA, 489 bp, Zea Mays
cgggtgaccaagggaatctctagaggggtagaggggatgccatgcttttacacaaaactagtggctataaaagaatgggatgctcctgaatcaaaaagtacagtagcgggagtaaattcaacaaggaattcaccgagcactactcccggagcttgctgagcctcctgagcatcaacgtgatttactcgtgcccttccttgatactaggtcttgttctgctggctgatggaggagggcgccttgggggcgggtgctgaggtattcttggagccattcaccgagttggagtaagcaggtcctgatgccttcaactgggggcagttgttcttgaagtgactggggtctccgcagtgccaacaggcatttgctggcggttggttgcttgcaaccgagggggcctgaaagaagctctgactctgctgactgaaacgtgatggagtgggtccatctggtctaatgaagcttggtcccttgggtggaaacccaaag

SEQ ID NO: 21995 - DNA, 658 bp, Zea Mays
caccgccggtgaccccctgcgcgaagattcgcgccgccgccgttaggattctcgctcgctggtaaccggataacgcttcgagtagaacagtcttcgccgccgtgagctggaagccaccccggtcagccgcggtactcctcccctggctcaccgcccgcgggtaaagctgctcaccgtcgtcgtgccatcgccgttgtccacctcgtgtcctaaacgcgccaccgcatcgccgtgactccctctaaactccccgtcgaccaccggagttactgccacgacgatgaacacgtgttcactgcaccagcgttcttcctcacttccgaccgccgcacatcaacgcccaaattcacggtcaccgccaaagagtcctataaattgaagcccccactagctccgcaaggtcatcctccacccgaccaccgctaatcgctagcagtccttcgctagagctcgcgaattttgaattcgccccaaatccctctccgccaccgagaaccacaccctaccgtggccagccttccccaggtctgctcattcccttcttgttcctgttctagcatccttacatgatggtgatgctccccgacccctttaattgaaccggaccggcgggaattgccgggaacacgtaccatttcttcatcgtccgcggttcacg

SEQ ID NO: 21996 - DNA, 702 bp, Zea Mays
cgccgggggtcagtaaatatcacaccgtggatatgctccggccactaaattactccgaccaccgtacccgagctagttacggttgcttcggatgggttcgccggagattgccacctcgtggtcttgtaccacgtgcccaggcatcttaccacgtcgcggttagtcatgttaggcatatctggtgatcgccagaaggaccgccacagtgaaagccactaagcgcttgcgccagtgcccctcttcctctccggccgccgcgcgtcttcatccaattcaccggccaccgctcacggactctataaattgagcgcactgcgagctccataggataattacgcatccatagcacccacgcttgcctccaatctttcaccagagaccgtgcattgctcgttgcccccaatctccgtttccgccaccgtagaaacaccctgccgaggccagcttgctccaggtccgttcatgctccctgttctctcgttttagcatgcttgtgtgtccctgttgctcctcgacccctccaattgagctagagtccctaggatcgccgggaacgggcttggttaaccgtggtgtccgctgtcaccgtgggcagggcgtgttattgcgccaatggtgaaattagttggggggaaatgctccttaggactggaattaggtgtagaccaaagaagagcatcggtcattgagtaattcgaccgg

SEQ ID NO: 21997 - DNA, 497 bp, Zea Mays
ctccgaaggccgaaggttgaaattgacgaagccgccaaagcatgtcagaaggcatttgatactgtctgcttctttattggtacaagagatttggttcaagagcacatagcatacagagtatggctgcttatagagagctgggaaatgccgaaggagaccatcaccgaatctagtgaaggtgaactggtccggctgaagtacacattcagatacggggataaattcgatgaaccaaacgacgactggctaaaatgcatcgaagttaccagtgatgaactgcttggatcatattccaaggcggaagacaatgcattatccacagcctttggaggccggggaaaaaagagattgaacagagtttttgacgctattggcttcgtttacccggactaccgttatccactacgaggtcagggaaagaagaggaaaactgctgcttcagccactccagacgagcctacgccaaagggcaaaaagttgaaggtccttacccaccg

SEQ ID NO: 21998 - DNA, 592 bp, Zea Mays
tatggcagtcaacttgggagaaagccgaaactatccgaaccatcattctttctaattcacttttactggataccgctttccagatacttgctagaatgttgcccgaacagccctccgacaactatgccagaactacaacaaggtgatctttgaaaccccccttcgctactttccacccagcaacaagaatacccccacctggaggaaaagacttcaggccctgtcagtaggagatcctattgaggatgatcccaccatcgtctacatggctggataccttcacacccttgataaccaatatgatgacctcaccctccactgcacccacctaacctcccgggtggaaagcctggagcaaaaagtcagggaactttcaagggaaaaggcgtccctccaagagagcctcgcaatagctgaaggcgaggaaaccaatacccgtgaggcctaccgcaccctaaagatggactatgacaagaaactgaagaagctcgcccctgcaagaaaaatccgcaagaagaccaaaagccaaggatgccagattgagcagaaggaagaagcccctccaaccctacgccctgccgggttaagaaac

SEQ ID NO: 21999 - DNA, 840 bp, Zea Mays
gatagtccaagaggatgaggctgcaacaacaagtaaagctcggacaatagttagatgggccacaggtgcaaaagtctcatcatagtcaataccctgagtctattgaaaacctctggccacaagacgagctttatatcgctcaatagacccatcagatttggttttaaccttgaagacccatttgcacgtgataggtacagcaccagcaggtaacggaacaacatcccatgtacatgtgcgatgaagggcattcaatccatcagtcatatcaagctgccactcaggtataccagaagcctctttataagatgatggttcaacaatgactgcaccagcacggggaaacccataacgttctggagctgcaatagtgccacggtcacgaagatgatacccctgattaaaaacaacatgagagtcatcattgttagtacaagtatcagcaacaggatcatcatcaagactggccgtgggagtagagcgaggacgacgaatgtaagtctgagtgacaagtggtttggaagagtaagactgagatggtgtggaagtggaaggtggtgtgatgggaataagaacatctggggtagaaacagtagatggtggtactgatgaagtttgagaaatgggaggaaggctcatgaaggaggtagactctgtggaataaaaagaagaatgggtggaagagttgtaaaagaagggtcagttttcattaaagctcacatctcgagaaatacgcatgcgacaagaagatgaatcataacatcgataacctttatgttcagggctgtatccaagaaaaacacactcaacagattgagcagtcaatttagtacgttcacg

SEQ ID NO: 22000 - DNA, 975 bp, Zea Mays
agaaaatggagctccaaagtgctctgtcaggtcgactgcttacactccgcgatggtacagtagctgaaatggatgagatcgccagcgcgactaccctcaccgccgacgactccctccgccgcgattcgtgtcaccggcgtcgggattcgtgcctggatggttggatagcgccgcgaggtaaaaagatcgtcccccccgtgcgctggacaccactccgatgattcccaccgtaccccctgctttgcggcttgagcagataagctcgccggagaacctccgtcgcacggccttgcgccacgtatccgaacactcccgtcgcgtcgtcgtggctccttacagccgtcaaatcatcgccggtgagctcgccacgactgaggacacgaaaccactgcaccagtgcccttcctttcctccgaccgccgtgcattatcatccgaatttccagccaccgccgttgagccctataaattgaagcccccaccagctccgcaaggtcatcatccaccccgccaccaagaatcgctagcaaccgtgcatccgagagctagaattttggtttcgccccaaatcagagttccgccaccgcgaaactaacctcaccgcggccagccccaatccggttagctcatccctctctctccctcgtttgagcactctcatagctctgtgatgcttaccgagtcaccaattcgaactgagagaccaccaatcatcgggaacgcgatcaaatgctcatggccttcgcggttctcgtgggcaggatagaatagggcaccattcttcaaattaaattaggggaaacgtttgttaggtaatgaatttggtttaggtcgaagcgaagcaccagtcttggcctcctccggccggtctacatgctcgccggagctcggttgtgcgcgaacgtcgtcgtggacttccaaccgagaatagataggagtgcgggggtctttttgtaaacggtcagtgactctgtta

SEQ ID NO: 22001 - DNA, 1555 bp, Zea Mays
aacccatgcttcatccttatgcagctcatcttcactagtctcatcgtctgtcaagtcaccctgtactatcttagccgcatcccattttctcacttcagttcggttatcttcatcctcccttatttcatcgtctgctaactgaaactgcaacacctcattctcagccccttcttggtgttcatcggctatgagcatggcagcaaagcttggcggttctacaaccctgccacaaagcgtgtgttggtgtctcgtgatgctgtgtttgaagaaaatcgagcatgggactggggtgatgccgagaaggtagactatgagaaccctttctgtgttgagttcatgcagattggtggggatcagcagctggacaatacaccagtcagggagaaaaactttgctggaccatccaggtcaccatccacgacacagcacatgctagtccagtcttcagaaatcactccaggtggaagtcagtcattacagacccctacaacatccaggttgaagagttactagcagcaataggggatgaacctgccacaactgaagaagctgttcaagacccactctagcgtggtgctatgatagaggaactgcagtctatcaaggagaacaagacttggtcacttgtaacattgccaaagggacataggccaataggtctaaaatgggtttacaagctgaagcatgacgaaaaaggagacataatcaagcataaagctagattggtggcaaaagggtatgttcaaaggcatggagtggactttgatgaagtttttgctccagttgctaggatggagtctgtcagagttatactcattcttgcagctcaactaaattggagtgtacaccatatggatgttaaatctgccttcttgaacggagacttgaaagaagtttatgtctgtcagccacctggttttgtcagaaagggtgaagagcagaaggtgttgaggctgcacaaggctctatacggcctaagacaggctcccagggcttggaattcaaagttggacactatcattatgggtaagtccagcagtgagctaattgctttcaagactgaaatgaagaaggtgttcaaaatgacagacttagggacactatcatactatctgggtatagaagtgcaccaaggagacaaagggatcagcctttctcaaacttcctatgtgaaaaagttgctagaaaaggtcggactgagccagtgcaacccatgttcaactgcaatggaagctaagctgaaactgtccaaggacagtgattcttctcgagttgattcgtctgaatatagaagtttgatggggagtctgaggtatttgttgcacactaggcctgaactgaatttcagtgtcagttatctgagccgttttatggaggcaccaagtcaggatcaccttgcagcagttaaacatttacttcgatatgtagctggcacaatggagcttgggctgttttatcccagaggaacacataaaaatgttttgatcacaggatacagtgacagtgacttgggtggtgatttagatgatggaagaagcacctctggaaccatttt

SEQ ID NO: 22002 - DNA, 444 bp, Zea Mays
ttgcgcgtggatgacagtgtggccccactgacctgcgcctcaccgcgcgcgcacgcactctgctgcgctgactgatgtgtgggcctctctatcggacctattctcttccccctccgtctcctttcaacagaacgcgaaatcacgcaggtacagcggagtcgcaccgtgattttcggggaaatcgttgggattcttggccatggggccataaatagcagcgctgcatccctctcgacctcctgaccaatacgcagtgcccgtcgtccggttcgctacagctccagcgctgtgtggtgcgcgagccaccatggccgactggcggagagagatctgccgccgcggtgtcgcgcttgctccattggtggggtctcggtggtgggccagggagttcaaacgggtacccaagttggtgtccgtagcctcgtcgtgcgtgattggtgcacg

SEQ ID NO: 22003 - DNA, 685 bp, Zea Mays
gaatagcagcgtcctcacggctcacgctcccggacttcactcgcccgttctccgtgatatcgcgatctgatctcgcccagcgcagcagccagatccgccccatccagccaccagtttcgcggcggagggtggaggtggaggatgtcggcgacggtggaggagcagatggtggtgaaggcgatccgggaggagtgcccctgggagtcgctccccaagcgcctccagtccacgctccagaccaaggacgagtggcaccgcaggtactcacttctttgctcttgccctctatggatttgctctgctgcatttctgatgtaatcagctacgcttagttttgagctctgatagtcctagtactagtagacgccaacgctgtgtgaaatggctgctcttgtggcacttatttggatctcgttctcaactactccctatctaaaaaagtcaaaacgtctaataatccggaaccgagggagtagctgttttgaggtcctcaattttggccgggacagttgtagtcgtcgtctagcaggtcatacggtgattcattggctcgtttgattactaggtctcttggtgttactctttcctaacaaggacactgttggagtagccgaattgaactatgagcgccttgattggataattctgcgacttgaagtgacttaatgtttcctaacaagtgact

SEQ ID NO: 22004 - DNA, 746 bp, Zea Mays
tgtgcccacgcatggaacccgctcgacgtcctcgtcgtgttcctatccactgcgcagtcctcgctcgctcccctcgctccatgtgtcatcctccacacgcacagggccctggcgcccccatccgtctctcgaactggtccgtgcttgttgccctccttctgagacagccaccgcatccccctcccttttcagttggatgactcgcactccccactcccgtcgcgaccggccctctcctccctgacgtgcacctcaagcccgccgtgacgccctcttctccttcgacctacgcctctagatacactcgtgcctagatccgattcggggtgcccctgcaagggatgaggtcgagctggtcggaggggcatcggaggtgtgggtgggcaacgtgaagaagaagcgcagacgtaagatgtgtgcggggcggctagaaagcgctgtcgtgtcgtggcacgagacgggaggaagcttcccttctgtgaggttgtcgaggtgagcgtcatccgcaccatcgtttgcaatgaggtccaccgcattgcggctaagggcgatggagcagggtggctaggtgtttgatttggcgtcggatctgtcagttcccaggtcatttcccagcggcggttgtccgctcctgtcagacttgagagcacctagaggaggtgaataggtgatcctgcaaaaattaactctaaacaagaccaacttggtttataacaagtgttagtagaaaccaaaaccaagttgag

SEQ ID NO: 22005 - DNA, 917 bp, Zea Mays
gtggggccaaatcatcaacgctcccttcttcctcgggtcgtgacaacgggcgtggctttcatacgtgcttgacggatctcaccgcaacgtccggcgcaaggttcgctcgttcagttgggttgttgaccgtataagtgcgtgcgctcggtgccgagaccactcatcgccccacctggcctcatccgcgccgccgttaggtttttagtgcgccaccgcgggggaaatccacagccgagtagtcgtccgccccgttgaagtgcacaaggatcttcctcaagttctgggaggggtgtgtgaggccgcgctactcgtgatcgtccgacggttttgctccaattcctcgccgtcgtatcgcacaccgcctggatccgccgctcgccgtggccgagactgtctgcgacaaatcgtggggtaagcacacgttcaccgcattcctcttgcttagggtatcgagtaggactcctcggatcacagcgttgcgcgatttgctgagctttgggatgtcccaaccacggcgccgccgcgccaggtgctccgccgtgtctgttcgccgggaagagcaggtgatggggagcgacgcgttagaagtcgtcgatcttaggattagcggttatgattagatcactgcttaccccttcgcgcttaaaatctgatccgttggcggttcatccgagggcttgtgagcggagaaaacgtggttggatctggggcgtagatcttagatcctgtgggcgacgtagcgtaccggttcgtggccgactagttttaatctggatgctccattaggatcagacggccgggatcaaaccgcacctattcgctctggcacaattgcataagagtccctcgggaagtaggaaatagaacccgccatccaccttcactgcgctttgtgtctacagattttttaccccgag

SEQ ID NO: 22006 - DNA, 528 bp, Zea Mays
ccccggcttcctctgcataattgtcgaattcgcggcggccctggcttccaagcgtcccggcgccctatccgaaccccatgctgaggtccacgaggtggccaatcgtgcccttgacggcggcggcagacccctttccccaacccatcctgtgcagacactcgattctcccatggtggttggctcggctatggcttgggtaccggggcggggctcaggttttataggcacggtgagccggtcagggcggcggatatggcgcaacggcccccggtggtcggccatgcgagtatcacaggaagggaagcaggcaacaggaggagcggaggatcctaacaaccgatctagaagaagctactgccacctggggcccacacgtaagtgtaatacttggtgcacccagtcatgggccaggcgggtgacacactaggccgacgcccaggggttcggctgggccgagagtcaaggaaaggggcccaatattaatagtagaacactttttttccttttattgtctagctttctattttc

SEQ ID NO: 22007 - DNA, 364 bp, Zea Mays
cctgtcttcccctccttcatctctggaaactaagctagtgaagttgtcccactgggtgggtcaagttgtggaatacgtcggggcccatggttcctccctggtggagcatttggacaatgtcccgtgttgcatctaggatattgtcgacttcagcgtacaccagggggttgccgtggcgttactcatgggggaacttcggtcgagctacactcctcaggacatcgtgctaggggctaaatgacctcttggtgggctatggcgaggatgctagccgcgttgtggaccgtctgtctaccgatgacgatgtacgcagtgcttcctaagttgtggggtcgctatcgaataaaattagtctttatttccc

SEQ ID NO: 22008 - DNA, 618 bp, Zea Mays
ccaaatcagtgggacacatacacgcaccatgattgcaaaactaattaagaaaaggaaggctatgagagggagataaactaaaaggcaacacaggaaaaaaaacgtggggataagatatcgatacaaagaaagattggtgaggtgcggtcattgttgaagccctaagccaagagaggccgttctaggtccaccaactggttgttatatggagatggagaccatccatccatccatttatctacctatccaccgtctgccgtctccgtatctagcctggctgccccatccatccatccatccgtgctgctaaccaaaacgcccactcccaacctcaatgtgtgcgtcgctagcctcgtgcgtacgtggcttggatttcatttcaagagctgtttattttctctgtctggatcaaatttaaaatcaatcatccatgcgcggtttagatcaagagcgttatcatcgtccgtaactgtaaagcgcccaacttgttcatcttatagttgtcagtttaatcgccagacacgtcggggtgctccgggctaaactttacttttgatggattatgatcttaattaacctgtgacctttttgtttcgatagaaacatatgctagccacg

SEQ ID NO: 22009 - DNA, 505 bp, Zea Mays
ctttgattctactcattcgttcgtccgcatcgcgttgcaccgattagcacgatgaaggggtgtcggttctgccttcaccggcggggcgtcacggccaaacagtgggcgccgccgcgtttcagggcgactggatggctggaggagggtgatgagccccgtgccatcagatctagagtaaacggttgtgattagctagcagatctggtcgtcgattgtgttgcggacatctcagatcagatcggggatagcattgattcttggtcattggatcaggatccggtggtcaggaaggcatggttggctttgaaccgtatgatagagatctgacgaaccacgtggcataccggtccagtataagggtaggtataatcctaacccttgatccgcgatcatacgaccctgagatcacgatacccctaagagcacctgataaattagcgaattaacccgcagtcccaagcagttgaaagaaacttacactgaggccctgggatttttagatggc

SEQ ID NO: 22010 - DNA, 653 bp, Zea Mays
gcgactgcaaggggttcggatggatctcggccattggatctccacgcgacggctaagattagaaggtcattttaaacgaaacggtatccattccacgccatcggattcgaatctgacggtggttattttatgaaagcgatatcggatcgggtccgtgagatcccatccaacggttcacgatcaataaccgaaagggtatccccgtgctctatctcgaccgtaagatggttatcggacggtcctgatcactgcccgatctaatcttctctcctagctctctctcacggccacagcggtgacccacggcggcgccatggccggctcccacaatccaggtgccccggccccaaaactcgaatacaaactacgctacgcgttgagggaaatgaaacgaacaagatggccaaggacttaccacaaattactacgcggacgccactggccacgcggtgtggtctcggtcgaagtccgacgagaaatctccagctcgcagagcctcaatcgcgcccaccgaggccgagcgcacacaccgacggtcgcgtagaaacccacggccaacaattccgatcgttcccgcgtcgtagccacgaaaccacaacagcggaaaactctattctctctctcacctccgggcgcctgtggttctacgtcgc

SEQ ID NO: 22011 - DNA, 325 bp, Zea Mays
tccactggggatgccgtggttcagggctagcagcgacaacatggcagcaaaggatgacaacagtgagacctgcctctcagtcgccatggcaaaggtgagtctaactgcgcccggcgctcagcctacgtggggtcttccttgtcgtggcctatgttgatttgatagtcaagagggaaaagggaaggagagcacgcattaggtgttggacctctgacctgtggctgcacaatgcaagcacaaggcagaacgcgagacacgcagcaacacagcaaggaacgccagcctctgacgtgcagtggcctatgaccgtggtgatgaacaattg

SEQ ID NO: 22012 - DNA, 273 bp, Zea Mays
cccgcaatctaacggcgtcgtcgagcgcgccaatggcaagattttcactgccatcaagaaaaggcttctcgacgacaggaagggtaaatgggccgaccaactacctgaagtagtctgggcactaaacacgaccgaatgccgggcaactggattcactccttttcgtctactatatggatcggaggccatgaccccgtgggaaataaagcatgggtcacccggaacaagtgcatcagccgtccccgacgtggacgaaccaacattcaaagacct

SEQ ID NO: 22013 - DNA, 501 bp, Zea Mays
cgcggggcgacttgtgtgtgtgcgaccgaggctgcggcactgagacaatgagttcgcgaacgccaagacggaggtgatggctatggtgagcagcgtggcaccagaggaaactaatctatgaactggtaacggagaaaaacaatgggagtgaagggaactcaccgaggaagaggtagtttcgccggggacacggaggggtgggctgtggcgtggatgcaggtgcacaggttgatggacgcgatgtagtggcttgggcacagcgttgcaagcagggattagtggttgcacggtagtggtggccatggccgccggcgtgtggggtagacgaggcggaatggggtagatgctgaggttatggaggctcggccaaggagcggtgttgtttgtcgattgccagatgaacaactgcgtcctagcaggaacacgacgtgccctccatgcgtatagatgagcaaacgggccgctcggcacggcatggcccgggcccggcccaggcacggc

SEQ ID NO: 22014 - DNA, 468 bp, Zea Mays
caaggatgagcaagtcttcttgagcatcaagagttgcttttcttttatctagcttctccattagtttagtaattacattatatccatttaaaccaaattctttaatcatcatatttttcatagcaagctgttcttcatcatcattaataaagtcatcattaaacaaatgtaccttgtctccttttgccatgaggcaagttggagtataggagtcgtcgtagaggttggtgaagagttgcgagcttgaggtagattggatggcgatgtttgccacctcttcctcttctttggagctagaactttcttcatcggagttccattcttcaccaatgtgggcttggccatatttcttcttcttgaaatatcccttgttcttgccccccttcttgagcttatcctttttgtactccttcttggcttcttgttcctttttgtttggataatccgctatgaaatgaccggtttggc

SEQ ID NO: 22015 - DNA, 598 bp, Zea Mays
gaaagttgcaccgtcgtcaagaacggcctcccattcacaaatttaggaggaacatcctccttcttgtatatcgagatattggttttaagacgtaatgattctcgagtatgaatcattccatcttcttcccatactttgaaattgtctatttgggaccgtgtgcgtactccatgagatgctgattccgcttttgattgatttgtcataactctccataatttatgcaggtagcgtgccactgattctgacggtttcttgacatcgtcagtggcgattcgctgatgaattttctttgaaatagttggcccttcaacattggtgtcaacctttgcttcctttttgatgtttgcgtcgacattctgaggaacaattttgtctacgtcccctcgtcgagttccttcgcaagaggtgatatgaaagtttcaacgatttttgtggaggtcggtgtcatattttcctgcaccatggggtatggaatgatcgaactatctttctgttgcattggtgttgaattcggtgttggtgacttatgacgcgttacacggcttaagatcggctcatcacccaacttgatgttgcgtcgatgccaaaggaccaa

SEQ ID NO: 22016 - DNA, 915 bp, Zea Mays
ctcggagcaagaattcctaagacatagagcgcacaggactggtccgcgggtgaattcctaaattctcatgggtttcttatgcaaagtttacaccgcaaaggggtacaagtgcttcaccgccgtcggattaaattccacggccacgattagatcggcctcagtaacgaatcggtaaaagattccgaccgtaggattgaagatgtgtggctcagattagatcttcgcccatgcgatcaggtatggcatggtgaccgcgggattaagatccaatggtcgcggcacccttctactacctccctgcgcccgacacggtagcacgcacccagagcggcggaggcacaccggcgaacgcgccctacggtgaaccccgtccaattcacgcacccgactcagttttcaagaatgctcgaccactatgaaaatcatggctaaccccatccatgaaacaatgcgcctaggcccctgcccacggcgaaacaccgattcacggcgacgctgacctcgccagacgctattcaccgccgagccacaatcccatgctctaattttgatttctcgaggtgtaatgaggtcgactcgaacacaatagaaggttttcttacctgtttacgatgtgaaggtggcaatgacccgctgctacggttgccgccttcgttcccccttgatctccggtgacaaaaacacacggcgcgaagggagttgtgaatgcgacatcggaggtctaataggctagggcacaaaggtttgcgacatccttaaatcttccctggggtcagcgagcaaaggggggcggcacccgatttctaatgcgccaatcgcgcacgatctctgtcgatccgttaagacgaaggcacttggacccattcgtcgttgaccccacgagtccctgggccaaaggtcccacggttcagagac

SEQ ID NO: 22017 - DNA, 676 bp, Zea Mays
cctccctcacctgtgccctggggcgcttctccagtgcatcgcaagctagcatcttcttatgggcccgcttcttttcctcatcctccttcttcttcttctcctcggctgctagctgacgcgcctccctgctggctgcatctttcgaaaccaggggttgggcggttcgaaagccttgcaacccatacggagggatacgaggagtaagacgagaagggaaaaaccagaaacagagttaaaaacagaagactcatcagggacacatagccctgatcagggtgcatcggcacaacgacggagtaatctgccttccccaccattcccttcacctgccggaggagttcgtcggtggggagggtagccaaagccatctgggagctttccatggaggcctcgggtgtcatctcgtcgaggcggagccgacgctcggtcagcggcagaacccttcaccggtggaatgcggtgacgaccctgccacagtgaggtcgcaatcacggagcctccactgagcgtccaacaacgactttaggtgggtctagagctcccgagggaggccccacctccatcgctcctccgctctgagaacgacgcggtgcgtgaacgctgacaaccacttgtcgtcgttgcggaggtaaaaccaccgactctgccaccctttgttcgacgaggtaagggtggc

SEQ ID NO: 22018 - DNA, 352 bp, Zea Mays
tgcaacacaagcatagaggtcctagataggacgagtaaagtggttcgacgggaacacacaatggtttttcacacaaacattgtgaaaaatttctgagaattaccttttgatgtactcgcaacttcgtgttgctaatgtactagtcatttatcttaaagtctgctccatgtcattcagcaacaaatagcaatttgccaacatctggttgagcaatatataactaagatttatagcctttattcatttggtaaggtattttgcttactaatagaatcccaatgtgtgatatcttctatgccaaaatggctttcatgcattatattatatatcttcgggttactttgggtaaaac

SEQ ID NO: 22019 - DNA, 832 bp, Zea Mays
aagctttctatcctggagggaggtagtgttagcggggcttcctcttttcggtcagtctagcatcctcggctctttgaccgcttccagattttcttggcgggggcgagcttctttaacttcttcgtgtagtccatcttcagagttcggtatgcctcgcgagtgttggcctcttcgccttccgccatctcgaggctttcttggagggacgcattttcttcttttaattccttgatttgttgctctaggctttccacccgggaaattaggtgggtgcagtgggagaaaaggtcgtcattgtggttgtcaagggtgtggagatatccagccatgtagactatggtggggtcgtcctcattaggatctctctctaacaaggcatgaagtcttttcctccaggtaggagtgtttttgttgctgggtgggaagtagcgaaaggggtgtctcagagacttccctgttgtagttttggcatagctagcggagggctctttgggcagcattttggcaagtatctggaaagcggtgcccagtggcggtgacttggaagggagggtgatttgggtagtttcggctttctcccaggtaggctgccatagagcatttctcaattctgttcgcacggtaatccttccagacgtactccagcttcttgcggatccccatgagaagcgcgcaactccgcagaatggtgagggaatccttccacctccgagcagtaggatgtcctaatgacaaaggagccttccatctagtggcaagagaagaagggtttgttaatatcggggaaagaagagaagattctttttagggggtaaggggtctttttcctttt

SEQ ID NO: 22020 - DNA, 485 bp, Zea Mays
gtccaattagagaatgggggcgggaatcgcgatatcggtcaactccggcgaggttcaacagttgcgccaccgtccttggctgtgcgccgccggtgttgacactgttttgggcgcgggatagaccagaggaggttgtgaccgtcgatccgatcagggacggctctaattagaaatcgcgtactggttcgttcagattgcacgacgatcgtccgatcgggatcggatggtgattactcgcactaggactcattaaatcagggccgtccatgggggatccaacgactgggatcgcataccgccttacgggcagtcagttctaatctgggccgtcagtgtgtaaacggacggccgaatcctacgataccacttcagccgcactttttgcttaagacaccctggccttttacttaaccaacccgcagtccatgtagcagtaatctgtgtcttggggaaaactctggtttagcccttggtctttctgaaaa

SEQ ID NO: 22021 - DNA, 629 bp, Zea Mays
aattgattgagtctgttgcccttgtcgagttaattaatgagaaacaggtacctgcagtacatctacggtggggatgtcatgtgtcagtcgatcacctctgactggagcataagaaggttctgtgagatcttgtcctctgacactgtctggtacgtacacccttttctcacgcattgtgcacaggtgtatctttaaaaattgccggtggagtcaaaagaaaataggagcatgcagtgcactgtattttatttggatttgaagcccctgcatgtttggcagcagttatctgttcctcagctcctgtaacctgaggcgcatctcggagtccgaattattatttttaatcatcacctacgttagaaatgaatctgtttgatgttgcctaggcgcagtggacagagaggtaaggttctttttgggaccatatatatgactaagctggtctccccaaatcattcccggcaaaatcatggaccttagcgaggaaccggaagctgcttggttttctttctttctttcttttatgtatatgtttgtattctgtatagattattaatccgctcaaagcggcaaaccgacatgcatggtatagtaaaatatgaatatactagtactatagataagttcca

SEQ ID NO: 22022 - DNA, 668 bp, Zea Mays
ggaccgagtgccgccgcagccgcagaacctgtcgtggctgaagcacgcgactgccgtcgtcgggctgacctgagccattgagggagcttcgcctcaacaccctgatgatatccgtagtctcgccacgcaagttttgagggcgaagtggcgtgaattggtcgtcggaggaaaagctccgccatgcgcctgcacttcgccgtgggcagctcttctgcgtccacgattcgtggtatgtattcatcgtctgtgcccgttttcatcaccatatcgtgtagcactggtccaattagatttagttgcgtcatcgtcggggattcgcttcgccggtgttgggttttcgccgtggccaggccgcggtggacagggggaaccaaggcgcgtggtgacgacgggtccgtggccgtcggatccgtggacaacggtccagattgatggcgccggtgtaggattggtggaggaacagtctgagccgttgatcgctctctggacggctcagattagttctggatctcataaaaccgtagccgtcaatctctgatctagcggccgagatagcaatcataaagagaccctatgtttaatctggtgcgctcaatcataaagaaaccgtgaccgtaaccgtagccgtcataaaaccggttcattttggttcatatttaatctggtgc

SEQ ID NO: 22023 - DNA, 928 bp, Zea Mays
acgttgaggaggtgtccctggctagccttgaccatcttcttagggagttcggggacaccttagaaaacgctcacgcgtagtgtgatctgtggcgattgtatgcttgtaatgaacttgagtgcttaataaaataacgtgtttgagaaatacaaatatggcatacacatgttagtaatcctttctcccctctggcagatggcctctgataaaaccatgcctaccgcctcagggattagagcaaggtctcccctaggtgctgaaggagaagtcggtgaataagggtatgaaacccacctccccgcacctctagagctgccattagacctagcctaagttctagccaaccaaacccaactcattgaggtcctcaccagaagcctcgagaaccagcggccgaatggaggaaggcctcaggacatgatgggagagtttctaaggctcaagccttccacatttgctagatccagaatccgctcgacgccgatgactggctgcgcacagtaaaaaggaagttagaggccatcggatgccctgaaaaccagcgtgttcatcttgctgcccatcaactctccgggatggccctatcctggtgggataccttcagcgcggccatcagagatgctacttgggcagaatttgaagcagctttccgagagcatcatgtacccctagggatcgtccagctcaaagaagaagaatttcgggagttaacccaaggagggagatatgtcagtgaatacgttcacaaattcacgaaattggctcgctatgcgcctgatgatgtcagcacagaagccaagaagatggcccgtttcttgaagggactgagaccagaactcaaaaccatcctcgccagccaagatttcctcagtttctcacacctctcaaacaaggccatacaggtggaaagggctagagaagaagaaaa

SEQ ID NO: 22024 - DNA, 812 bp, Zea Mays
ctaaaaggaaacttatccgatttgccggagaggaaaccaccctagtgccgaaggatgatgaagtagttgttttcaggagttttttcagagcgagactgcggttccctctgaacgagatgataggagaggtcttgaaaaattttgaaatttatcttcatcagctgacccctaacgccaatgttaggcttagcgtcttcatctgggccctctgaagccaaggggtgagcccagatgccaaagcattctgccgagtgcatgagttgcactaccagacgaaggccagggcagatggtctgcatgaaaattttggctgctacaatttcgcgtatcgcaaggatacgaaggctctagttcttagctaccacaccaaatggccaactggctggaaaagtgaatggttttttatcaaggccgatgagaagaagagcgggaaactgatgacgatggtcatgtgcccgctggctttaagcttcggaatgaccagacctctatgcaacatgcagctaggctcagcatgccagctggccgcagtagaattcagggtggtggctgaacaaatcaacaccagggacttggtgcaagaatacctggccaacaggacatctccaacgtcaagtgattggggcatgccgaagctaaagggaacaaagaagaaatatgaacttgttcgattaccttatcgtttaagtttgagaaacaatttaaggagccttgccaagaatggctagaaatgattgaaactatgtgcaatgagattttggggaactataccaaaaagaagaccaactaacgacagcagccttcgacacccg

SEQ ID NO: 22025 - DNA, 800 bp, Zea Mays
tggcaggaggggcagtaggggtagcactagaactcccagcctcatgatcatgtgagcgtggaggcataggaggcggaggtggaaccccaaagacatcataatcatcatcaccatcatcatgggctgctgcgccctgagtctcaaacaaatgaaggtggtgtcctcggcctgagtatcaatcactggagcagatgctggcacaggatcctctggagctagacggtacgacccaaagatgaggcgagaggcctcaagagtaccctggaactgtggaggcctaatcagctgagcaaagatgtgacatagatagtgaccataaggcagctgtcgacgagcacatagaccatccagtactgtgtcctcgatctcacaaatgagaaaatccacaacatcaaactctgaatgagaatctagggcatcaaggagccaaagctgaatatgagtggcagcctcccggtaacccatccgtggcagaagcgtccgtctcatgagctgatatagaaacctggccgccagggtgaaatctgcgggagaacgtcgcgacccatctgagaagggcggtcggaacaaagccgcgacatgagctgtaccaggagcaactccgccgtgagggtgacgaggagggtcagaggtgccatagcacaagctatgaagacgagtcgatgactcgttgaatccaaacaactgacgaatctgactggcatgaatggtaacatcctcgcgctcaaatctgaatctcatccagtggtgattagggtcgatccatacagtagcatagaaaactcggacccattcctcaa

SEQ ID NO: 22026 - DNA, 491 bp, Zea Mays
actgccaactgatcaaaagtgtaaacaagaaaccacagaaagcactagatacccattattgttactgattgggagctatagaagtacaagaacaattgcatttttttttatggagctgtcactagtgtagtttggtggggtgagatcagtggagtaggaacaggaccctgttgcaaactgcaggctctggaagctgctgcctggaatcctggatacaaagggcctgattggaggagctccttgctcccgtgccgaggagccccaaattcgcaactcttccagctctcttcttagttcatttgtggttgtggcagagccgaagctgttttttacaccgccacagtttgatacagtaacaaacagtatgcagagtgacttgggcgccagagccaaggaggcggagaacctcaaagcagcaccaagcagggccaaaaacttaggccctgacttggtagtagctatgtaatgtatggtgcagtgcatttgttttt

SEQ ID NO: 22027 - DNA, 454 bp, Zea Mays
agaacattaccaaatagaaacactgaatgctttgagtatgtggttagtgtgctcggatattttgttagaaaacacttttttagtactgaatgctgctattattttcccgttgttagaatacaacaatatttacaatcacagaagtaaatgcagtatgaaatttcttcgcggggcatagaggtcgccctaaggtgagtaatcgcaaacgtgcttgtgttggatttaagtaggcgcaaacgtgcttgtgttggatttaagtaggcgcaaacgtgctgcgtcgatttaagtcattaccaacttaaaccgaccgctctgttagtagggtatagtggtcaccccaagttaagtaagcgtgagcatgtcgcaccgccttaaatcattgctgacttaagtcgattgctccgttagtagggtatagtggtcaccccgagttaagtaagcgtgagcatgtcgc

SEQ ID NO: 22028 - DNA, 681 bp, Zea Mays
caataattcatgttgtttgctgataggttggtcgcattattatggcaggggttgtggtcgcattattatggcgggggttgtggggcaatggaaataagtcatttgaaacaacaagaacaaataggttttatgtggtgcatgttagttgagaaatgctacttgaaaattttataggaatccagaatcctaaatccaaattgtatatttaataattagaagcagtttctcttggttaatttgttctgctacaactattatcatgacatccttaaaaaaatatgaaactattatccattgttggttgtccatatatcttgagtctgagttgttgtctttccttagtgcattttccagtgagaagctaatttaacgtagagttttctattgagaactgagtgcagcttgcattttatttcggctgttggaggagctagaactaagtgcagcttgcatatatcttggagctctgcataagattagtaacactgattgctttgtttagccattggtcgatgttcaaatatatttgtaccttatgcaatgtgtacctgaggtcatatctcatttgtttgtttgcatgagcgaatcaaaccatatagtatacgagctttggattagtaacactaatgcttccctttgatatgcttattatgtttagtgcgcgtgtcgtccagcgacgag

SEQ ID NO: 22029 - DNA, 466 bp, Zea Mays
ccctaactttgatgaacaatttttttgtattgagcttggcctggtgttgtacgatttctggagtaaatcgctcctaaacttcggtcatcaggcactcgggagggtgttcagtgatgaacagtgacctgacgaagaacgccaggttcagtgcactgtcgccggtgatctcgcgctgagatccgagttcgccggggagattcgtgtgtggcacgaagtggataatcacggaggggtaaaagatctggcgaggggtagatttggtcgcgggcaggagcttatcggctgcacttgatggtcgtgcgacgtggccgagcggccggtgtcgtcgtgggacaacggcgacctcaattgcgccacgtcgtgaccctttcaccatgtagctataaccgtgccatgcccggaattaccatctttgagcccttgcaccggtaggcgccatgacgagctcgctagtgaaatatcccac

SEQ ID NO: 22030 - DNA, 691 bp, Zea Mays
ttcaactaccttaactgtaggcacctttgacattatagccggctctttagtcctttgcacgggaggaataacttcttttgttttggaggcagaggaggtcccttcgccaaattcaggtatcgcggccgattcgatgtatcgcggccggtgagttaggactttcaacttttttcccttcggcacaggttcgtctggggtggccgaagtagcagctttcatcttttttccttgtccccgcagcgggtagcggtagtcggggtaaacaaagccaatagcatcaaaaactctgttcaatctcttctttccccgacctctaaaggttgcggatagcgcattatcttctgccttggaatatgctccaagcagttcgtcacttgtagcttcgatgcatttcagccagtcatcgtttggttcatcgaacttatctccatacctgaatgtatacttcagccggactaggtcaccttagctagacttggtgatagtctccttcggcatttcccagctttctacaagcggccatactctgaacgctatatgctcttgaattaaatctcttgtaccaatgaagaagcagacaataccgaaggccttctgacacgcttcagcggcatcatcaatttcgaccttcggctttcggaggccgaagcgggaccatatggggcgcatgataacttccttaatgtcttcc

SEQ ID NO: 22031 - DNA, 758 bp, Zea Mays
tgccgccatggtggtcgagtgctttcaccatcgtcgcgggccctctgtcaggtcggggagactcgcctaaccttgcggatgctcccgttgcgtcgtcgggcggttggggccactggctcggaaggaatcgcttgccggagtccgtggtggtccgctatgccgctgtcgatgtggccggtgatttccacacatcgacttccggtaagaagtactctattgcgttcgcattgtcctacgctccgcgagtattcgatcggttctggggattgagctatgcggccggggcacattgctcgccggcgttcactgcctcgtggcgccgtcgctgttggggccgtcgctcagctcggtctggggtaggtgatgatgcgagggccgttgatctccctgtgttcggctcagattaaatggtccatgttactttggcccgatccgatctgaattgtggatatgaaattgagtggctgagattagatcatgaaataccggtttgtccaattagatccgagccgtcgatccttgatcctatggttctgagagcttaccggttcaagtgagactgatttaatttgagcccttggtttagatcggacggccaccattcaacgataccctttcggctgcgtgtttttcaaaagagtccctgtactatataagaatcaacccgccatcctacgtgactatgctctgtgtcttaggagttttaccccgagccccctgctgttctcagattttgaggcgcagtccaggaattaaat

SEQ ID NO: 22032 - DNA, 411 bp, Zea Mays
gcagctcgacaaacgctgggagaagaggcctcgcgaagaagttcacgccgccagaccacccgcctctcgcgcccagggaggacctcgtggaggtgaacgcacgttggacgacatcctcgacgcccagtgcccgtaccacaaggacatgcgccacacccttcggaactgcagagacatcaagcactccgtcgggcacggccgacccttccaacctctacctcctccgccgccgcggggaggaccaggagaaccgcgacaaccccagcaacaggaggaaggaggaggtggagccttcccgcgcgtcgacagagaggtcaacgtcatcttcggcggacacggatcgcaggagaacaagagacaacaaaagctcaacgatcgccaaatactggtggcgaccaccggtcctcccgc

SEQ ID NO: 22033 - DNA, 1007 bp, Zea Mays
gccacaagaaacatacccatcataaccggctctccctccggtgtagtggccacttgagtgtaatatattcgcccagtcttcttaacattcttgcccgctgaattatttgccatgtttcccttgccttgatttgagctccctgagttctgctgattgttggatttattctgcctcggacatgggcagtccttgatgaaatgaccagacttcccacagttgaagcagctagttgaggaactagggagggcggggaaacaagcactaggggcactcggctgacttgtagaaatgggggcagtggcagggcgaatgaagacatgctgttggaatgggtaggagggtgggcgagatgaagaacaattttgattgaaaggtcagattaccatccttggtcgcttttcaggtccctgattggacctgtcacctccgaatcccttcgattttccttggcctgtattcttagcttctacagccagcgctgtgctgacagccgtgctatatgtaagatctaggcaggtggccatttttctttgaagtcggtcgttgaggcctctcatgaatcaattcttctttttaggttagtatttacttggtcaattgcgtattgggataaatgattaaatttgttgagacactctatgatagtatctcccccttgcttgagtcgcataaattcctcctatttcatgtgtagcactccttctagaatatagtgctcacgaaacgctaacttaaattcatcccacgtgacctgatgtccggcctgttgaattgccacaaaatttcaccaccaagtactgacagggcctcttatttaagcagcgaacaacgacttctaggattcggtgcagcagattaatccaaattttgctccataatccgtacccattcatcggcttctagagggtcttcggctttaacaaaaagtgggggacgggttttagagaagtctagatatgaagtctcacgtggtccctgctgaaattgatttcccgccatttcacgta

SEQ ID NO: 22034 - DNA, 283 bp, Zea Mays
gtatctgccactggcatatggccataaccattggtgtttccattttcctatatcagttatcacagtacttattctgtatccttctcaatggatcccactaattggcactccatctgagctgctagtgaatgtctgttggaaaataagaatctgccattctgcttatgtacccagcagttaacatatctttgcaatagggatatggttctgtcaatctttgcttaaaccagtttcacaagatgtgcaacgatttgtcttatcatgtgatgttttcttttcttat

SEQ ID NO: 22035 - DNA, 677 bp, Zea Mays
ctcccatcggggtccaaccagcctccgcagtgttgtttgtaccgacaggagtcacccgacccgtcacatccctcctctccattcctgtggccaggcgcgctccacttggttcgacctggcttttggggatggtgaggtgggacttgtgccacgcttccttcaaacttgagaagttgtcgcgacgtggcatcgtttgtcgttagcgtggatgcggtgtagcggttggtctctggttcgcgacgccgggacatggagatcttggcttgttgttgcacagcaaggccgaggaggtctcggatctcctggtgggtctttcattgggatggtgtttacgccctaggcagcttgtccagaagtgtcgcatcagctacggcgttttggctcacccagggaaaacgcggcgttgcgcccctgccataaactaggcaacagcaaacctttgtcatcatggggcactgtcgccccaccgcttggcgtggtcgccccgtcccctcccccgtagtggcagggcgaacaccgtgagactctcttcaccgcttcccgccggagctccctctcccctacggtagaggctacaggaagacgctacctgccgcaacgcttccccctaaagcaccccctacggtgcagccgcgcgctatcgtcttctctctccccccgaatgcagcgtgctctcc

SEQ ID NO: 22036 - DNA, 579 bp, Zea Mays
cgaatatagggacaaattcatccagttatatcgatatgctcctagggatgttgaggatgatgagaagaagcaggagctctttctggacggtttgattcgacccctacaatatcaactagtatcgcacacatttctgtccttccaaagactacttaacaaagctattgctgtggaaaacaagaggtgtgagtttggagagaaaagaagggctgctaaccaaggacaggctggaagtagttcccgtcctcgctatactaccactccaagtacaccagctcgtggcggttccgggcagcaaactcaacaggcaccaactgctcctccgcaagcaagcacccctgcaggacctattgctcctaacatatccaccaaccgggcatgcttgaagtgtggacaatcgggacactatgccaactactgtcccaacagggctgcctatactacaccggctccatgaagcaaggtcaggcttcagcgggaaaaagtcagcccctatctgtcaaccgggggcaagccaaccatgtagaagtagaagctgagctaggagaacttgaaatccaagaagaagtgctagttgaa

SEQ ID NO: 22037 - DNA, 298 bp, Zea Mays
gtggacagtagcaagattgaggccatgcaatcctggcccacgccgatgacagttacgcagatttggagtttcgttgggcttgcaggattctatcgatggtttgtgcgtgatttcagctccattgccgccccattgcatgagctcaccaagaagggtatccctttctcctgtggtacgacagaagacgaggcattcaccatcctaaaaggtaagttaacccatgcccccttactacaactacctgatttcaataagatgtttgaacttgaatgcgatgctagtggtattgggttgggcg

SEQ ID NO: 22038 - DNA, 712 bp, Zea Mays
cgcgctcggggtggattgataacgtcgcaaggataaggatcctcgccgacggtgagctgggggtcactccggtgactcaccgtggctccccttctgctttacggctggcggcagttagctcgccggtgaaccgccgtcgctcggttgtgcgccacgtatccgagcacttctgtcgcgtcaccgtgcctctttaccgccgttaaatcaacgccggtgagctcgccacgactgtggacacgcactcacgcggccagtgccttcttcttcatttccggccaccacgcgtcctccccaaattcactgtccaccgctttacccttctataaattgagggccgggtcggttgcgccatgtaatcgtcaagctatagcacccactctcatctccactcgttcaccgtagccctgcaattcgggttttcccccaaatcgactctccgccgccgtgaaccacacatcaccgcggtcagccccaatccgggtagttcatctctctctcccttgtttgagcactctggttgctctgtgatgcttgccgagccatcaattcaaactaagagaccaccaatcgccgggaacacgacgatctagccgccatgctctcggtcaccgtggccagagctccttagttggtcattagtgcaattaagttaggggaaatactctttaggtcacggatttggtttagtccaaagttgagcgccggtcttgac

SEQ ID NO: 22039 - DNA, 401 bp, Zea Mays
cccatcccctcgccgcacaggaagagttcggcaccgccccgtcctcaccgcttgaccaacgtccttgcctagtaccgccccgccgcggagtctcatcggcgccgctgtgcggcattaatgccggcgctgtgcacctcactggcgcccgccgagctccgccgctcccctcccctcgggcgcctataaaaaggtcgccccgggcacctccttcaccgcaccagcctcggccactaccctcctcccctcgcccgagcgcaattcgcgaagcgccgccgtcttccccctccccggtgagttctccacccctcctctctctccctctccgttggtccagcgagcaattaagttaaccgagcagcttcctcacaatgctgcgaactcaaagcaccacttccccgccc

SEQ ID NO: 22040 - DNA, 616 bp, Zea Mays
ctccatccttcctcctccccggcacgccccactccccgccaccattaccaaccaaccaaccaacccgcgcacccccgaaggagaagagctggggtcggaggccccaggtcggagctgaacgcgcccccatctcccgtcggcgagaagaggtactaccgctccgcggaattcccccgctgcctccttccccagcggccgcatccctcgtctctctcgtgagtgtttcgtaatttcagaccgcgcacagggtagccagcgattccgcgggcgaggcgagaacgatcggttcgatctcccttgatctttggtgtgctcgcgtgctgtgatttcatttcgtctgacactagtaactgctacacgatagtgtgtatcggatgctaggacgggagattacgtgcgtacggtatctcttgatggcgttgctaggaatgggatagtaggatctaggctaagttttttgagtataagcataggatctgctttgctaggaagcaaaaaaaaaatcatgtgatttattgctttctataaaagcagggtgtgtgcctctactcaaaacttttttggagctaagttttggaaactgatggtccttgctttgctccaatgcttcagttat

SEQ ID NO: 22041 - DNA, 1067 bp, Zea Mays
cttgcatcatccttgttcatcgtctctccagccgcgcgcccagcagcagcgttctcgatcgatcagtcgtcgatccggccgtgtgttcttcttctgtatcactatcaccttcaccgcttcacctattcggccggccagctgctgatatcttcttcttcgctgccgcctgctgccgattaatttattcactcgacggcagcgacttcatcgtctatcataggaagctgagcaaagaagacgtagggtgcagccgtgcaggaggaatagagatagagagcttcaggtatatatagcaggcaggcaggctgtgtggttgatccggtgatctatatcgatccgtcgaggatgtgcaccaggggccactggagaccgtcggaggacgagaagctgaaggagctcgtcgcgctctacggcccgcacaactggaacgccatcgccgagaagcttcaagggagatcaggtgctgctacatcatgtatacagtatatatatgatcgtcaagactacatatatatggtcaatcatattacacacacagcaattgttggatttggtgaaccctacataccataccggccaacaagctagctggttattaattactcctcttttatttggtccactaattgttcgcgtggggtttgactttgcaatttggggcatgcacatgtttagttaaagaagaagaagtttaaaaactagatctgttagggtgtcatgtcatagaggtgatgtgtttttatctgccattcgtctctagctcctccactatatacgcatttgatgtgcatgtcgtatccgtgtcgcttgtagagcaattttaccagtgaccttcagcttttcttgctttataattttgtttgtgtggccgtcgtgtgttttctttctagcacaagttagccatggcgtagcgcatgctgccgcaggaggagaactgctagctagccgctagcgtggttaagccgttgaggagctatatatatacgagtatatgataactcaattaaaatggcaaattcgttaaatttgtttcagggaaaagctgcaggctgaggtggttcaaccag

SEQ ID NO: 22042 - DNA, 292 bp, Zea Mays
cggttacgggagactaccaaggaaaaattaatcataggcggctcttcacaccaatcctcttcctccatttctcttcccgtaccctggcctggcggggtcgcgcttagccagctttgcaggtctcctccgtttaaaacatggcacctagctgttttggtgagaaaccctagattgattggagttggatgttctggagtggcgaggaaccctagattgattggagttagatggatgcttgctcgttttgttagttcctttaccgtccctcaaatccaaacattccttgctggga

SEQ ID NO: 22043 - DNA, 629 bp, Zea Mays
agcgccccaaccctagatcgaatatgcgcccttagatcctaaatccacgattcacgtttaaccgaaccctggtttctaatctgggtcatctatttctcatccaacgatcgaaaacgttttccccaaatccgcgttgaactcagcggcggtgccgcactattacgatgagaaatccggtgagctctccccccaacacggcgctgcgttgcccggaatttctacggataagcatatcacgcacctactaatgcagtgaaagtagccgaggccataccgagagattggagcgtcgtcgaggtccgaccacgcagtgcagcggctgccgcggctgccgcggcggaggagaaccacgacgagaaattcactagagctcccagcgccacccgtcgcaattcctccactatcgcgacccacgagccctagcgagcagctccgcccttacgcggactccggagcggcggtataggtgcgaggctacggcggcgatgacgacctatgcgtcacggcactctcaggcagaggcggctgatggttgcgagagtggaaggacgaggagatcgtgacccaagctcccatataacagtctggcgagtcgattggggcgcggattcacgagattgggggaaaga

SEQ ID NO: 22044 - DNA, 821 bp, Zea Mays
caaggggatacaccggttgagcacccactccggagaatggacgagagggtcccagtcaggaccctgggatctgcagctgtctgaacgcagcgtggctgatgacgttgagcccagcctcaccgtcgattagaacgtgatgtagcttgatgttggcaataacaggggcagtgatgagcggcagtatgccggcccatgccatgttctcagggcagtcggatgccccgaaggagatagtggtgctccaccacaactggtgtggggttgccttcgggactcctggggtcgccgacaggacctcgcgtcgcaaggactttacgttcccgcgggaggtgagctcccagcttccgccgtacatcacgtatagcttcttgcggcggttggtatcatcaccagagtcggagtctccggtgaggatatccttgagcacctgctcaagggactaataccgaggtcccgttctcccgcggccacatcaccgtatcaactcctccctggtatttgtccttgctgtatgctatttgtccttgctgtgtgtggcgttatcaactcctccctggtacttggcccccctgggatgtaggctcgacgtgtcgatgctggataccagtatacctaagaaagagttggtgactcggcccccaggaggtagcctcgattgggacctggacctgtacacaacttcagctaggaagtgttagtagcacacccataggacctatcgtctggtatcagccatcctttgattcatgtaacaggacctgcatgattgagtctgggaagccaagcctcatgttcggacctacaagatcacaactccaaat

SEQ ID NO: 22045 - DNA, 902 bp, Zea Mays
ttttgggttgcggccacaaatctccggaagcccagggtcgaatctgcaaattctaggacccgctggtaattattttaataccgacctgtactgcgggttgattgcttaaaacagtaggggctcttttgaaagatggccaggccaaaggggtacgcgtcaatctgtgccatccgatcaagtgtgggcggcccagattagatccccatataagtgaatcggtgtgcgacacagaccgttggatcaaaaggctacggtcacgatttaaaacactagcgatggaatctcatacgcccggtcccaatccaacggcttagcctcgatggagcgaaagggtaaactaagatctaatcctagccacccatcttgaaatcgacggccacagacccgtcttctctcccacggccgagtcatagcggcgccacccagaccatgcgacggcgccatcgccggtgcacgcgatacatcaccccggcgcgctattcttcaatccaatgtgattattatgaagtggaagcgatggcgaacacaatggaagtggtcttaccggcgctggtgcggtggtgaggccggtcggcggacccaggcggaggggtgactactggcgcacgattctagcagcacagggcgcaattccggacaggcgaagctcaatagtattccatgtggtatggcgagcttcaccggcccgattccgactactcgacatcgccggaggcttcgaatccaccacggcggcacctgctctactacttcgcctcgccgtgatgcgattgatgagctggggcgagcgctggggttatatagtgtggggcacgtgggcaggcagagtccacacggtggaggactttatccccggaatcaggtgacaacaacccacccgaatccaaggggaagactccgag

SEQ ID NO: 22046 - DNA, 371 bp, Zea Mays
cttgatttgttcttattggggtagtccttgtgtcccttcaaagaggtcttgaagcacttgatcacaagcgccatctcgtcctcattatggtcggtcacctcaacttgcgccaccttgtcgcggagtgcatccttgttgtccgtcgctttgagagcaatatgggttgtggttcgtagtgaggaagaggtccgttggcgatgtcgttgacgtaccttgcttcctttggcatcatgtgtccgcttacaaaatttcgaagaatttcttcgaacgacattttggtgtacctatggttctcacgaataaggtttacaagattatgatcaataatggtaaatgaacttagcattagtcacacggcgtcatgatccgtc

SEQ ID NO: 22047 - DNA, 838 bp, Zea Mays
ctttgatcacatacaaagtttggagaaaaataagctcaaagttgtgctgtcagtcactctactgactgaattttggtcaccagtgacattggccagacttttgggtcgaattagagtaagatctattgctcgattgagggtagttgctatagaagaattgtagctggtatgaagggctacaagtttgctacagatgtattggcaagttgttgcacaaaaattcaagatctagaattcggtctgtaaggcgctctgaatcgggtttcaatggtacagttaccagatcagaacgccagctcagagaactcacagccggcgatcgtgcgctcggattcgtgcccgccgtggtgattcgtgctcggcgcagttagataacgcagaggggtaaggaaatatcgcgccgtggatgaactttggccactattctactccggccgccgtacccgcctgagtcacagccgctgtggataggttcgccggagttagccacctcacgaccttgcgccacgtgccctggcatcttaccacgtcgcagtagctcgcgttatgcatatccggtgatcgccggtgagctcgccacggtgaaagccactaatcgcttgcgccagtgcatccccttccctccgatcgccaccgcgcattcacaaattcatgggccaccactcaagggccctataaattgagcacaccctcgactcggctatgtaattgtgtactcaacagacccactcatgcctccaattactcaccagagcccccgaatcgctcagttcccccaaatcagttttccgccaccgtgaacaagctctcaccgtggttagtgtactttaggtccgat

SEQ ID NO: 22048 - DNA, 456 bp, Zea Mays
ctttgctacccaggatgggatatagggaggccaccacgcatattcagctctggctacttggtgtcttgatctctcacttggagtttgatgtggttgattttctgatctgtgagattgaggatacagtgttggatggtctccgtgctcgtcgtcagctgtcgtacgctcactacctctgtcacatctttgcgcagctgatccggcctccttagttccaggccaccctcgaggcctctcgattgcagtttggtttctatcgcccaactcctaaggacccagttccatctctagctctagtatcagatatcagggttgaggataaggccatcagacagttcgaggatcagggtgccgttgtagatacttcttgcggtgatgatgaggatctggggattccgccaccacctcttgtgccacctcgttcccatgatcatgaggctggtagctccagtgttg

SEQ ID NO: 22049 - DNA, 312 bp, Zea Mays
gcgcacccctcctgcttcccctcggtgagcagccctctgtcttccccctctgactcttttctcagtcagttaggcaagaacaccccttttgcaaatctcttccaaatctgtgaattcctgtgaatccaattgatggaatgagttcatgtacctcccttgtgaatccctgcaaatttttagctccttcgggagggcattcccacctcaaatggccatttccctaaaaccctagctccccgcacgccacgtgctcggtgaaatgcccaaaccagtcaaacttgctccaattgaacccaaatttttcaggcactt

SEQ ID NO: 22050 - DNA, 1053 bp, Zea Mays
cggaggagttgcatgccttcgtcttcctggcgttgcactgacgaccgatatgatgatgggcgggggttggtatcgcgctgcggggtgcgaggagtaccgcaccggtcggtcctgtctcgtcgtcgatcggcatgtggagtatctggatggatcgatcaggagccgggcaccgatcgcgagagacgggagcaggtgagctgcgtacatcagagagcctacttcttgagcagatggctatatatatacgattatatatacgtggcgtaagagatggccagctttgcatgcctaatgcacatgcttcctcatcaatcacataacacatatataggggcgtggtgctcgtagtacgttagtttccgtctcagcagacagcaggcatgcaatgacgctcgcggggagatgatatgatgtcgtgcgtctctatatctcctgtctgcccccgatgccacaagaaccagcccccttggccctgacgtggccagcggcggcatacgtatagtatcataattcataagcactcctcgctctgtatatctctttctatcctctccccgacgccacaacaagaaccagcgtgttccctccccacccgtcctccacctccactgcatccacgtactagctccttcatattcctgcgcacgtcgacgatatgcccggcgcgccacgttcatccaccatcgatctctaccgccttgctcgcgacggctggatctgaggtcgccgggcgcgcggcagcggccagaacccgagctctcgcccgcgtcagcgtccacaaggaccacgatatggtcaggtactcaggttccatgcatgcccgcccataggcatcaccgaaccgcgccctacgtacgcaactgcccagccgatccaccgcattcaccccacacgccccagctcacccgcacaagcgacacaccgccccgtcccactaacgatggcccatcgcgtgcgtccactccacgtaccagggacggcggggaggttgagctcgtttgtaacagcgacggcaccacttccttacgggtctatcgtcgacgtagatgtcta

SEQ ID NO: 22051 - DNA, 425 bp, Zea Mays
cagaaagaagatattggatgaagctcacctttccaaattctccatgcaccctggtagcaacaagatgtaccatgatctcagatctttatattggtggaccagaatgaagagggagattgccaagtacatatctgagtgtgacacttgccagagaatcaaagccagtcatttgaaggcagcaggccctttgcaaccccttcccataccatcttggaaatgggaggacatttgcatggacttcatagtgggattgtccaatacctccaggcaccatgattccatttgggtcattgtggacagattgaccaagtcacctcatttcttgccagtacacaccacccacaggacagagaagtatgcagagatctacattgaccagatagttcgtctgcatgggataccaagaactatagtatcagacagag

SEQ ID NO: 22052 - DNA, 393 bp, Zea Mays
gtgagttgaatgagcgcctagaggagcaggacactccttttggatccggaggtggctgagcgcctagagggcggcatggtcgtgcccgttctcgacgagcaggacactcattttggatcccgtgaaggaaggcacgctcctccggccggcgcccgcgcccacgacaccgtccatcacctggcgcgagggactttattcgagggcgcctctgatctctggcagtgagacgaacttgcgaggagggcacggggagggagacgctcgaccggggactacaaacagcatcactatcgtgggattggaacttcctttttttctcaaccggttcttcgtgtgcggtctggaatcctctcgacgacgaaggagcagagcagacgacatcatagcgtggat

SEQ ID NO: 22053 - DNA, 540 bp, Zea Mays
gttttcctggacggaggagtcctcggatgaaggcctagattattttgctgcgttagacgtggctgcagcggagtccacgcccgtgtggagggtgctggggatcttcctagtgcgagtactgggtataggcggcgaagggtggtgtagaaacacagtgtgggtgatttttcgcgaagtggtatgcgtcgtcgtatggggatggagcgtggccgtctccgagtagaccgggttggtaaacgagaattgttgtcctcgccgattggggcgagcataggcgagggggatcttcggaatctttttgagggtgaggaattgaggataatgttgttcaattacagggagatgggtatcatcgcgaaggttgagacgatgtaatatgtgatgccctcgccgtgtgtatgtaactgtaatttgtatggtaatgtggcctgttggctgtattcgtatgcctatgttgatccggctgcgcccgtgggcgactttgcacggagtgtctttttaatgagagattttgattaacgcacttgttgtggtactccg

SEQ ID NO: 22054 - DNA, 977 bp, Zea Mays
gaaatatcgtacggtgatttaaattctactcagactataacttaatagaggtgtgctattagaacttctagttttattaaaacttgagtataaaattctactatgtgtatgactcctatttacatgtacgagttttagcaaagactgtataaaaagatatataggctataggcagtaaccaagaatttaagccaattcagaatttattctttgtttctccacttctttcttttacctcccaaaccttgtgaaagtatcaaactgaagttagatagtttgagccagatactaccatagtggcttcgtagaatggttctaacaagatacataacttctttgacatctcccaatcattaggcgaaggctcatgtgtggatttgtgggtcatttcgccttaaagcttcatatgctcttctatacttcaaagatgtcttaagaatatgataggtcgaatttcaccgggtgaggacaccgaatgtagggtgtttctcaacatcgagtacaacaactgtgtggtcaacttgaggaggaggtgccaccaatgaagatattattggcggagcaggagaaatgtcgagcacgaccgatggaaaggcagtagtgacacttcacaccagggactttccccttagatgtgataaggttgtccttccctctctggtctgcatagatcaatagacgatattattaagtcaataacagtatcaagtgcctgtgctaattattggaagaggagagagggcgatagtgacgacagcgcgagtgagggagagggcgcggcgaggatgcgagggagggggggactagacgcaacgaggtcgcatgggaggagaggggtcgatgacgacgacaatgcgagtggggggagagggtggcagggacgtggggagggggaggcttttgtcaatggagtcgcaaggtgatgatgagggtgagagatgatccaaataatattgtccattatacttgaatgagta

SEQ ID NO: 22055 - DNA, 1225 bp, Zea Mays
cgggctgtcagtcaatccctcgactgaattttcagtagcagtgtgatggggtgaactttgagctcgattttgaatgggattcagtgactatttgatggtaagcattgtggcaaagttgaagatggattatagatgtataactttgatgcagaaagttggcttaggtaccacataaaaattggagaaaatagagctccaatttgatctgtcagataagctcttcactgagtcaggcgcactgttcatcggtcttcagaaaaatcgcgccgtggataagggtcagccctcgccggcgataagaatgccacggcggtcgggatgggctggcggacgcggtaaatatcctcggcaacgtggcagcaaatcactgaggtggcaggctccggttaaacggcggccaccgtgccatcaccgggttccgccgcgcggagagctcgcctgcgcaatctaaagtccgcggtcctcatccaattccggccgttggcctataaattgtgcctgggttccacttctttatcacatcccgcacctccacgatcgagcactcggctcaatttcaccgaagaacccacaaatccctctctcctctgttcttgctccgccgtgaagaactccttcgtggccagcgctcctcgggtcagtaattatcaaattgttccctgtttcagttagtctttgatctcttattgctcttggatgcggcaaattgaagtttggccgaagcccatcaccggaacgcacccgtgcgctgtaaaacgccgccatgacaccctttccgtcgccccacctttctgctcatgcctagcccaaaacttagcgtgtgcgtcatctctggtgaacccaggaaccttttcccagcttcaatttggccagccaagccttcggttatccggaacatcttagttcacttgatcacccgcactgtcaccgtggacagagcttgatagaccacctctagcaaaattgattggggggaaaggtgcggtaggcatctaatttggtccctgtagctttggagctccagccgtagcgtcattcggccggtctagctcgccggagctcggctcccaccgcggatcgcgtcggggactccaccttgcaaagggatagaactacggggatctttttgtaaatggtcagcgacttggggaaacagtagagaaacccatttccaattgttcaaaagggcatgggcctctgcacaaactcgccccgcgggcgcgat

SEQ ID NO: 22056 - DNA, 1585 bp, Zea Mays
atataaagtcatttggttcacaaatatgtgaatttacaagccaaaccctgagatttggacttaagtgcaaaatggacctcatttgagttctacactaagtctgaaaatcagtgttaaaggctccactttagggctttgtaacttgcaaagcatagggtttttgccctagatcaccacaccaaagttgtagagcattcaaaggagaataaatttgctcaagagtacaagccttgttcttgtgagaaattgggagataatcttgcctgaagttggactgtcaggccaagatagactgaattcctgttggacagtgactttgatccaagattaagagtcatttagcctaagatccagtgggaatctacctaggattgctataacaaagttgtagagcttttatacaggaacaactttgttacagaaacttaggtgtgttgccattgaaatttaggagcaatttggccctaaatcctggctgtcaggtgctctgaataaggcttgccatggtacagtagttccaagctgaagaagatcgcaggttcacccccctgctcgccaccggtgtccatcaccgttgatccctgctcgtcgtgattcgtgcgtcgtggtcatcggttatgcacagctcggtaaaaatccttaccgccggtgagctggccaccactccgacgaccccctctcctgtcttcctttctgctttgcggcgggcacgataagttcgccgtcgaccgccgcttcccgaccgtgcgccgcgtggcctagccattttacagcgccgccatgactccctctacccgtcccatcgtcgccggggaacttgccacggcaatagccacgtattcaccgcgccaggcttcttcctcccctccggccgccgcgttgctcgtccaaaatttgcggccaccgatcactccgcctataaattgaagcccccactagcttcgcaacatcatcacccacctagccaccgtgaatcgctagcaatcgtgcaccagtgcgcttgaatttcggttttcccccaaatcaagtttccgccacccgaaatcaacctcaccgtcgccagcccaattccggtcagctcccgttccctgcttcctcgtttaagctttctcacatgccttggatgcttgccaagccattgaattgaacttcgggctctctggtcaccaggaacacgaccatatggccgctatgcttacggtcaccgtggctggagctccgtagttgatcattcgtgcaattaaattaggggaaacactcttcgggtagtgaatttggtttacgccatagctaggcgcctgtcattgccctaatcggccggcgtagatgctcgtcggagctcctccgtgcgtgaacggcgtcgagggcgcgtcgggtaaaggaatagataattggaggacttttctgcatttggtcagtgacacaaaagagcagtgagcaaacctgttttgatttagttaatagatcggggtcttctgtgcaaaactcccacgggcgcgcacgcgtgggcgtatttctgctggttactgggccgcctgggctggattcggcccagtactattctattgttttcctttttctttta

SEQ ID NO: 22057 - DNA, 560 bp, Zea Mays
ctcacccgtggttatatcctatactttacctcttgcaagacttatcctatctcaattcttgattgtacctagattactggttttttatgcacatttacctcttcctttatatccttgcctattatcacctttgacccttgacctctctccatatttaccatgatgtttacctatttttcttagcctcacttattccatttcaatccaagagtgttgttttccctatccctctctcgttcgtttcctttccctttgtcgctttgcagccctgtctcaccttaacttcatccttggttgagattttgtttgatatcatccttacctttgtaatttgtagatcttgccttgatacttatcttaggtctgcttgttgagattccctcttttttatctcaattcgagagctatgttttacttatctcacccttggctatatcctcttctttaccgtgtaagccttgacatacctccattctttgttgtacttataccactggctcttctgtgctttcgtcttttcccttatgcccttgtctattatcgcctttgacccttgtgat

SEQ ID NO: 22058 - DNA, 485 bp, Zea Mays
tgagctcacaccaaaacgttgaagtgaacaccgggtcgcggtcggagacgatggactgcggaacgccatggaggcgaacaatatcaacgaagaaatcctgcgccacagacttcgccatgtacaaatgcgcgaggggggggggggtgaagtggcaatacttgccgacggagagaatgaccgtcttcccgttcacccttggtagcgcttccatgaagtcgagaccgatgtcggccctgaccgccgcgacataagcagcctcgctgggtgtagatgctccgacttgtaggacacaacagcacaaattcctacaccaaacaacggcaggagcaggcgtcagccacgatgttcgtggacccggacttgtatttgacggtgaagtcaaagcccaacaacttgccgacccaatggtgttgcaggatcgtggcaagtcgttggtcgagcaggtacttgaggctgtagtggtccgtcttgacggtgaagcgacg

SEQ ID NO: 22059 - DNA, 569 bp, Zea Mays
cagttctcaattacatggttcgtcttcttgcagtatttgcaaaataattcatcggatggcccccttgacttggagcgacccctctggttctttccctttcctttgccacctgagttgaactttttctgctcagtgcggccacggacatacaaagcttctccactcgagccagtagcatcttccgagttaaccatctgtctcatcttttctttcgcagtcaaagcttcatacacttcagccacagttagagtatcatgactttataggatggtatctcgaaaattgctaaacgatgcagggagggaacacagaagaagaagagctaggtcttcatcatcaaactttacctccatagacgtcagattggccatgatctccttaaacaccgatatgtgcgtcagaacggagcctccttcctgcaacttgtgggagaacaacttcattttgacatgcatcttgctggtcagatcctttgacatacagattgactccagcttcaaccagagagcagcgacggttttctccgccagaacctcctgcaggatattgttagccagatgaaggtgaat

SEQ ID NO: 22060 - DNA, 276 bp, Zea Mays
tcacatgtcgtcattgatacagtagacatcacggacccatccttactagcagtcgcagatggtgcagtgatcgcagaaggtgttctcattcagagccatgaagtccgtaatgaagtgctgagtttcaggcatgtcaagattggtcggaaggcatcagttggcccttatgcggtgatccagaagggaactgttgtgcatggtggcgttgtcattccaccgttgcaaaaaactgagcaagggaaatcagcatatcctcctagcggagcttctgcttac

SEQ ID NO: 22061 - DNA, 824 bp, Zea Mays
gacttgtgaaaagcacaacttctaaatgatcaggtttatggctgtcaattttttgtacaagcaagataataaggttatttacaactcttctatatgacttttctacagaaaacatggtttagttcctcaaacatacagcacgacaaaaacagtgcgtgcagcccaaaacagcaattaatagaattcagcttctatttacttcaaaaattgccgcgttctagagactcgacttattctaacttatatcaaggcacacttaagcatagtcacacaatagatgacgtgatggctacgtagtcatgccatcacttcaccccacaatcccaactaacaaaataactctaaccgaacttggcatttagccgatcgattcctaacccatttttcataccaccactacacgacatgcctaatacgttaaatgacttgttcacaattcacatacatctttaccaaaacattcccacatcgcttgcaacttagcctaagcttcactacacaatttcaagacatctacttaattcatgaatatcatcgtcacacacatcgactcgattcgaattaaccacacatgtctatcacataaatggagcatttcaacaaatatcctaaaacaaactaacttcatcacacatcttgcattacaaccctacttgacttatttgaactgtctactcaaaaccgtgagcacaatcatacactatatgcgaagcataattttaatgaacgcataatacgcatcgtcacgacttgacctataaatatagagaaagcgatgactactctggcatgtcaccacctctctatttaagccaagacaattt

SEQ ID NO: 22062 - DNA, 829 bp, Zea Mays
aagccatatgcacacatgtgtaaaatattattactcataagtttagcagagacatataaaaaaaatactaaccacaaattcatggatccattcacatgaatcgatattgtgtgttgctcgaattattggaccacaatcggtgcagacaaatattcccagtgttgtccctcatatgtccaccaagaagattaagcatccaccagaaagaagttgatcttctggtccgttcaacaagcgatcacagtgacgctccttaaaaaaaacctgatcgccaatacttgagcaggtattgtacatgtagacgatggttccacagaggcctgttctcccaacactctgtgtttgcagaggattggaatagggagacttcgatgcaactcgactttttagtgaagggtaatcgtgtgttgtatttgtctcggactggtcttccaaagaaaatgatataatggcaggagtttcaagaaaatagaaagatggagtgatcaccgtaacgtgcgtctccattatttcatgttacatgttcattacacctccattagtgtagccatttcctcctccatagaccaagtgaagtggcataacaagtccacctacacaacacaatcacaccaaggtcgcggccatggcacgccacaacgagcccgaaggccccgaggcctccaaacagccccgacaatttaatatgcgcctagaatttatttgatataattaaaaaaaaatataatatatccacatattaagtctaacaatttgcaacaacccccaccaaaactaggacacataaatactctcacttctctgtcgtttggttttaccaatgtttcaa

SEQ ID NO: 22063 - DNA, 386 bp, Zea Mays
gccgccgagttagtccagaggtgtgaagcttgtcaattcttgtcaaagcaacaacatttaccggcacagcagctgcagaccatccctataacatggccatttgcatgctgggggttggacatgatcggacccttcaagaaagcttagggaggctatactcacgtgctggttgccattgacaagttcaccaaatggatagagtacaagcctattgcttctttaacctcaaccaaggcagtggagttcatacaagacataatattcaggtttggggtaccaaatagcatcataactgaccagggatccaacttcaccagctctgaattcttcgatttctgcgaacaacggagcatccagatcaagtatgaatcagtagcccatccaag

SEQ ID NO: 22064 - DNA, 367 bp, Zea Mays
cgtcgctcgcaaggcattgagggccatgtgtcagatctatgaagaagaagtggccgacaccccgctcagattctttccgccctttcagagagaccgttcagtttggatggccaggatgcgtgcattggaagggcagcagttgcttgaggacgaccccacagtcgtgtacctcactgcatacctgctcaccctggatgcacagtatgatttcttggctcggcaccaccgtcagatgattgcccgagcagaagatgtagagaagctcaaccgtaagctccatgtggatctcacctcagctcagctcaagcccgtgtagctcccttggaaagtcatgaagtcattgctattgaagccctgaagcaagcca

SEQ ID NO: 22065 - DNA, 969 bp, Zea Mays
ccgccgccatgaaccacaccaataggatcagagctcgagaatcgatgaggcacaacacccgaccgagaggatgaagacgacaagcccagatgattgaacgccgagattctagggtgagactgataacgcccagtagcgggagacctccaaccgttgcaaactgaggccagtttatcaagggaagaacccagacgtcctagtccgaggctgacgctcaaagccactgggagacttaatgatgttacgaatcggaatagcattggcaccagtgagagggagcttaacaatatccgcaaaggataaactctttttgccccgcacctgctgccaagaagacgcttcttcctccgaaaagatcttgaattcatgcttccagttaggtccaccaaaattccaaaggttgaagaaagccttgaattcctttcgatcaatgcacccggaattgtaaatatggaaacccacagccatcgaggaaaccggaaaccgaaaaacccggtcagcgagctggagcacctcgaagccagaagcgaacccgccaagggccgcctggaggaggtgaccaacagaatccgggttcagcttgaagatgcatctgccaaaagaaaccaccagccagaaagacgatcgaagacggggtcgaaccagacaaaccgaagaagctaaattgagcctgagggaatccgcgaaggccaacccaggccgaaagtctaggagagcgaggtccatgctcgaagaaacgagaagaccaggggtagaggagcacgaggggcgaaggaacctgagctagaaggccatccgctcaaaccaccggccatccaccaccggcaatcggctaatcgatcccgaaagtctggtcggggctgcgctcacgagtctgcgaaagagctggacatgtctgattggccttagggtcgatcatgctcgtgctctaccttgtcatgagattaggatgtagaagatgggactggg

SEQ ID NO: 22066 - DNA, 824 bp, Zea Mays
cggtggcgatggtgtagccccacgtctggtcggtgccacgatagtctgatgcggcacgcggatgagtcggtgcccctgaacctgggcgcgcaccgatgcggcccgaatcacgactaaccgaggcttgcccacagtcgtcgtcggggtcatcttaggcctcgacgcggacttcttttgagccaagacggtggcatgagacctcggggctcccattcctgtgtctgctacactgtgcagggtgcccttctggtccacgatgcaggagagggatccgaagtggaaacctccctggcagtgaagcagatgatggtgttgaagatgatggccatggagttgtcttggatttacgtcacaccccctacctagcacaccagttgttggtgtttagtcccaacgacgaactacaagatgtactagtgtaccacgtagtgcctttagaaggacgacgaagttgattgcagctcaatggttcgtgtagggcacaacgtgacacatatgattatgtaggatcaggccacttgagcgtgtaataccctacgtcctatgagtttatgtggatgtattgctcggtgttcttggttacagagagttctcaagcgagaagatgactagaggtgtctacgcctgcccgtgtggactgatatttgtaggggatcctcctccgccttattcctgacgaaagagcagttacatgccacgcccgcagtgaacattcccagtccactcttctctaacagagtagtaccgacatgcgtggaggtcaacgagtcttcagggagctcgcacgtcctttgcatgcccttaacatggctctagaatcttca

SEQ ID NO: 22067 - DNA, 966 bp, Zea Mays
gttcaattgggcgggtcggtgagtatcaaggacaagcatgggtgctgaaactagaacacaattggcaaaatcggacctgatttgagcggaccacggcgaggttagaacacgcggtgttcttgagcagattgggggaaatgcaaaattgaagctctctggtggagtatttgaggtacgggtgagtgcgctagatgtgtgattacataacgaagttgatggtgcactcaatttatagaccccgaggtcggtagctctcaatttgaccgcgatgtgttggcggtcggagatagggaagaacacggtggttgtaaccgtggcagtcaccggtgtaacggcgcaaggagaatactcctaagggttccatgcttactaccgcgtagtaacaagcttcggcgtggcgcaaccgaggtcaccggcgcttccacggcgacttcggtagtccggccacgtcgcagcgactataatcacggcgataaattccaatttccgatcctatccattccccgccgtgagatcttttctttgccgtagttatccacccgccagtgaacacaaatcacggcggcggcgtgaatcacggtgtagagatcgtcggcggcgaggttgctgcgctggcggtctgatccactcaaagcactgtaccatggcgaatggcattcaattggcctgacagaccgatttgaagcatgattttctcctatttttatttggcaacccatctgaggctctgcagcaaaattgtagtccaatataccatcttcatctttgttatagtattccaagacaaattcttactggattatggtcgaaatggctcacaaacttggttctaggccactgtcagtttgaaattcagacttcaacagcctgactttgagtgtgattatctccaaattcttcataacaaccttgcttacactcttaagaaaaattgttctcctttgttaggtctacaaatttgatgtg

SEQ ID NO: 22068 - DNA, 642 bp, Zea Mays
gtgacatttctaccccatggcggcgcatcgccgacgtagagccggtgaagccccagggtctccaattcgaccctacgcgcgaggattcatgtcaagggtgcaaagagggacttatctagctaggttctagcgcgattggtgaagcggggagctccgcccatggcggcagacgacagcgtgaccccactgcccgacagcgcgatgcccggtgcctcgccataaccggacgatgtgctctactcagacataggactacgacatacatggggtgatgcttacctagagtctagaacggggggaagaagccggtcgcaatgaggatgacgacgagactccacggctacgaggaattgccctagcgattcttcaccttgtggccaacaccgatgcccccacccgcagggtgctgtggcgaacctatcgggcagtcatagagtcggggagccggcgaaattccgagcgcagtagaggcgtctcggtgtacactctgtttctctcctacgactttggtggtgaacgggagggaggaggggaggagcaggccttcatatcccaccgaggaggcatgcaatgcgaggatttcgctcggccgttacgcccgcagaagtagcgtaggtggccattacagcacatgcgattccg

SEQ ID NO: 22069 - DNA, 313 bp, Zea Mays
ccccaaccgtccatctccaaacaagcgagtcggttagatatttcctcaagccccagtcagccgcctcctctccctcccacagctcctgccgccgcctctccctccgtcggtatctcccacctcgcaatccactcccacctcccccctcgcccctaaaaccctagctaaacccaagccgaaagaaacaatggctctcctcgcctaagcgagctcgcgcccgccccttgctggccatggcgctccagctccgccgcttcctcccgcacggctacggccagcgacaccgcgctgtcacccacgtgctatcaccgcc

SEQ ID NO: 22070 - DNA, 664 bp, Zea Mays
tttcctttttttaattccttgatttgttgctctaggctttccacccgggaatttaggtgggtgcagtgggagaaaaggtcatcatagtggttgtcaagggtgtggagatatctggccatgtagactatggtggggtcatcatcattaggatctctccctgacaaggcctaaattcttttcctccaggtaggggtatttttgttgctgggtggaaagtaacgaaggggtgtctcggagacttccctgctgtagttttggcatagatggcggagggctttttgggcaacattttggcaagtgtctgggaagcggtgtccagtggcggtgacttgtaagggagggtgatttgggtagtttcgactttctcccaggtagactgccatagagcatttctcaattccattctcacggtattccttccagacgtactacggcttcttgcggatccccatgcgaagcacgcaactccgtaaaagatgagggaatccttccacctctgagcagtaggatgtcctaatgacaaaggagccttccatctggtagcaagagaagaagggttggttaatatcggggggaggagagaagattctttttagagggtaagaggtctttttctttttaaggcaagcttttaaggtcgggctgcgatctacggtagtcctat

SEQ ID NO: 22071 - DNA, 351 bp, Zea Mays
aggaaattcatgtgcttttggtggaatcacacgttcatacaattatttgaccaatacatttctttcagaggaattgagtcttcttcctctgctgtggatataaagaaggcctaccgcaaagcagcactaagacatcatccagacaaagtatcgtattattttttctctctattgtgactctcattgctctcttgtctaacagtagttatgccacaggccagtaactttcttgtcagaagtgaaaatatcagtgatgctgtatggagagatataacaaatgaaatacgcagggatgctgattatttattcaaaataattgggaaggcatatgctatgctttcagaccctaca

SEQ ID NO: 22072 - DNA, 572 bp, Zea Mays
ctggcccgctagggaggacaaaaggcacaaactctctagcggtaagctcatcggagtggataacgctggcgcaaatcctcccgctgagcgccggcgcattccatccaagcaagaggtataccatttcgagcactcactcagtttgggtgtgctcgggatgaagtcacaaggccatgcaaactacggcaacacaaagcagaaaccttgaaggcaaatgggcacagagagctcgaagatgaaagggcaccgcgagtgggagagaagcaagacatggctgctacccgaggggtgaacccctttttaaaggcatattccccccctcgtgccccgaagcgtcacgggcaaggtctcccccgatgcgcaccagggttcccatcctatgacatggggccaggcctcacatgtcatacaagctggcccgaagcacgaagaaggtgaatcgtcgcacaaggagcgtgcaaccgccctgcggttatatgccctcccatcttcgccgcaaccagcgatcaaaaaaggtgaatcgtcgcataagaagcgtgcaaccgctctgtggttatacgccctttcatctc

SEQ ID NO: 22073 - DNA, 523 bp, Zea Mays
gtatttggtaacacccattgtgtgggagctatggggtgttacagttggtataagaggcgataggctgtaggttctagcaagtgaaataatgataaattgacacactgcacatataggatgggtttcttgttttactattgatatattatgaatcgtcattgcttgtttgacattatttgaagtggtgctatgccaattttatttgtttatttacttactcctgtggctgcagttatgccgccacgtagggctcgtggcagcccgcaagatcctagtggggattctatgagtccggcggcaatgttagccacgatgcagggcatgcagcaggagtttgccattctgaggcaagccattcttgttgcccctgctggtgctgctcagggtgccggaggtggacgagtgccgggggcgctgtccctacgagtgctgctccaggtgacggggctgaggtgccccttcccgtcagtggtctctctctgatgcagtggatgggcatgaagctggacaccattgatggcag

SEQ ID NO: 22074 - DNA, 477 bp, Zea Mays
gctggtggacggcgacgagcgtgtctccggcgagcctgtactagccggagaacgcaatggcaaagcttcatacttggtcgacaccgaattctaccccgggcgacactaatccctcacccaatttcactaatctggaccggagcacgtctgttcacgataacggcgaaaaccaagaagaagctacggtgttcagggcaatctagtatggtctagtttaatcgatcgagcctacaagcaataggagaccctagagaggctagaacattcaacagaggggcatgaatcaaccttaggcaggctgatcacgtgagagaccttcacgacggaattctgactgatttgggggaaattcaaaattggagcgctctggtggacgatctgaggcacgggcgggtgttctggttttgtgacaacctaatggagctagcggcaccctcaatttatagtgtccgagagcggtggctatgaatttcgaag

SEQ ID NO: 22075 - DNA, 462 bp, Zea Mays
caagttgtcatgtaaaaatttgagatctaggccctacgaattggtctgtcaggcgctctgaatgaggattccattgtacagtagctgaaaaagatcccaaaattcatcacccttcgccgccggtgatccgccattgcaattcgcgctcgcctaggagattcgtgccacgggaagtgtggataatgtcgagcgtggtgagaatatccagcgcggggtgaatccggtcgctggtcgtaccggtcgccgtgtcccgccatggttatcgcgctagcatcaccggagttcgccgttatctggccaggctatgtgcctcaacgccttaccatgtcgtagtgagtcaccgtaaaccgctctatagtcctggctcgtcgctggtgagtctgccacggtgaaagccactaaccgctagcaccagtgcaactctccttctccggctgccatcgcgccattccaaattcacgc

SEQ ID NO: 22076 - DNA, 661 bp, Zea Mays
gcttggagtagatattaccagggagtgaaaagatcggcggggaaggaacttgggcacgaaagcaactgatccgtagtgcccacttgctcggcgtcgtggctaagttaccgcggtagtgatctaccggcccccttgcagtgccacacgtagtctagtttcaccccatcatcgtgagcgtggtgagtggtgaaacaagttctcgagtcactatgatacctgtgtgccacggtgcacgcgctgtcatgaaatatctcatcgctgtcgtgggtgatcttatcccaaattcatgaagccggtgactagtccctttaaattggagactctccctgctccgcctctctgttacgcacccatcccacccttagctagtccctctcgtccaccatagctcaagttcatcagatttccctgaaatcggtcaccatcatcgccgtgagaagcctcaccatggacaggccatcttcggttagttcccacctacctagtccccgtttggatttcctttaatcatatagtttctcacggtaccggtcgattgaatgctaccacagtacaatgccgagaacaccgcatcgccgtcacagaatgccaccgaggatgcccttcacgtcaaccgactcttccatgcttcttccgtataaattcgtgcaagcaccataac

SEQ ID NO: 22077 - DNA, 620 bp, Zea Mays
acggccgcaacccagaatgacaaccccacgatctaatttccatcgtccgatcatggacagacgctcaccctcgcatcccaactccgacgagagtaggcagcctcgccaccgaacctcgcgttggcgacctcgccggtaacgttcgaattgatgccacgaagcgtgaaaactcaatcaatgactgctacgcgatgcctagaggatggtgaattgggtggaggatcatattggggtttcgtggctatggagaggttggttcgcgatgattgaaggattcacggcggtggagagctctgatgaggaattcctcagcctcccggctttcgatcccgagcgccaagacccacacaaccactgtacgatacggtgatttccccacaaagttctccggcacccggtgtcagcgtggacggcggacggcaatagcggcctccctggttcacatcgcaggaggtatggccgcgagctccccagatcccactcgaggtgatattggcagaggatatggcttgttgggttttgatagtcgaggcgaattggtgtcgaatctcatatagactcggtggggaactcccgagccgagagaaaggagcggaggacgcgctattctgttttgagtg

SEQ ID NO: 22078 - DNA, 644 bp, Zea Mays
caagaccgggccacctccttgtacatcatgccgaggtcaccatcgccgggcgcatcgaggatcaggactggtcaccactatcgccgtaagcggataagatcgccgccaagcagtcctctcgctcgcgtcaccgattctaggttacgggtggccttcacaagtcactgagtcatcccacacctatccatggccgccgcgggagaatcaatcaactcaactgttgttgatttctcgccaaagtggaggaatcaccgcgacaccgtacttcgtcatagacaggacttcacagtgctcaaaccaccggtaagttgcccctgtcgtgctcatcgagtgctctgctacaactattaaccatcggattggtgttcggggcgctagtgcgatgaaggggcgtgccggccatggccgccgccgcgccggtactatatgctgctggggccgagcgccaggtgactgaaagaaggtctctgggccattggctctcggttggacggctcagattgagcgtagcgataccctttcagcccatgggatctggatcgtggataggggaatcgaggccgtggatgagaagctaccgtggttgattttggatcacggatcctagatcctgtggctataaatgcgtaccggttcatttaaag

SEQ ID NO: 22079 - DNA, 726 bp, Zea Mays
atcttggtttcgctagcgtgaacggtgtaaggcgttttatgagcttctctcaatatatccatcttcacctctgatttctgaggcacacaaaggtgacccttgaaacgaaccaaatcattctcatcgatggagaactcccggggtttaccatcgccaaccctctttcgagctttctgcaataaacgatcctgctgctgagccgcacgcactctctccatgagggaagattgaataagcatatgagtctcctcactagcggtgtcgacatagcacaaggcgatccccaaacggtccagatcagcaatcaactgcaaggccacttttggaaccccggacctgctaagggcatcagccaccacatttgccttcctcgggtgataatgaatagacaaatcataatctttaatcaattcgagccaccgacgctgcctcaaattcagctccttctgagtaaaaatatacttgagacttttatgatcggtgtaaatgtcacacgtctcgccataaagataatgcctccacgactttagagcaaaaaccacctcgaccaattcaagatcatgagttgggtaattcccctcatgcttcctcaactgccttgagccataagcaatcactctgccttcctgcatcaacacacagccaagaccaatatgcgaagcatccgtataaattgtgaaacgcttactgctctcaggcaaagctaggataggggcgtctaccaac

SEQ ID NO: 22080 - DNA, 447 bp, Zea Mays
ctcacgcttactcgacttagtgtaacatgctcgtgtttactcatcttagggcgatctctatgccttactagctgatcaattagcataaattagaaaaagattccaaaaccagcacactgcacttacttctacaatcattcatgataaccgttgaattctaacaacaaaaacaaaacgttatagttttcagcgccaagagcacattctaatatcctaccgagtattcaaacgcgctgatcacacacacatagttcacaaatgcattcaatatcttctaaacacagcaaaacatctttacttggccatgtcttttgcaggggcaatcgaggaggaagggcgactcgaagcatcgggtgtagccttgacgtccgcaacaatgtcatcaggaacaactacaccaggccttctcatcaagattcgccccgcgcggatggctttgcccatagc

SEQ ID NO: 22081 - DNA, 860 bp, Zea Mays
gtcgagctgtcagactgccttaagtgtgaattcagactgacagtgtaattgagcaatctttgagctgggattcgagcatgatctagtaagaatttgggagcgattgctatagcaagattgaagctagatagtagaacaacaactttgttactggtggattagtaagtcaccacatggaaaattgagatccaggccttgcaagttgggctgtcaggcacactaaatagagactccattgtacagtgactgaataagatcccaagttcacccccccttcgccgccagtgaccgtcgcgccacgattcacgccggccgctgtgattcgtgcgccatgacttgctgataaccgtgggcgagtaaagatcttggcacctgatcgactcgggctcggtcaccgctaagctcgccgtacccacttgctcgtcgatcggtcggatagacctcaccgctgttggccgcttaccgtcgtgcgccacatgctaaagctttagaccacgtcgcagtgaatcacatcgtgcatgcccggtgatcgccggagagctgccatggtgaaatccattaagctcgtgcgccagtgaccccttttcatctccgaccaccaccacaccaacccaaattcatgtgtcgctgcccctggagcctataaattaagcgcacccgcggctcctataggtaattacgcatccaacgcaccgatccttgcctcggattatccaccagagccttccaattcctcttttcccccaattctgttttcgccactctggtagaactctcaccgtggtcagcgaattccaggtctgttcatgctccctgttctctcgttttcgtgttcttgtgtgcccctgatgctccccaac

SEQ ID NO: 22082 - DNA, 568 bp, Zea Mays
gccttacctactgctctactgctctcgcttaccttttctcattatcttgcagcttgtcagtatccagttcaggatggtgcggacgaagaatgtcacaccatcaggggggaggagatgaccaggaccctcctcgccctttcaggcaggacaaggggaagactgtctaccttgagcagcaagggggcaagaagaagagatggttggacagagccacccgtgcagcgattgccattgtagcagcatcagatcaagtagagcaggtaggtcagttgaggatttcctctgataagatcgccttccgagtcagtcgcctctcgtctcagactcactcatccgctgctcgatccactccttcagacccagtcaccactccacctccctctttgccagctcctgccgctctcgagccttctgccacatccgctgtgaccacctcctccaccactccagcttccactgctcctgctcccgctttcgctccaccaattcctccacctcgctttcaagagcgtgacaagaccaaggtgcgaccactcgctgttgatcctcgacttcttgaccttcagcg

SEQ ID NO: 22083 - DNA, 392 bp, Zea Mays
ttcttctcttgcttgaaagactgcaaatcaatcttcattttctccaggaaggtgaccgggtagaacctcctttcaaactgcctgatgaagacatcccaagtcagaactcctagtgaggaggagtgcgctacctgcacgcctctccaccaaatttgagcctctcccttcagcagctgtgtgccaaagcgaacacgatcaccatacacaatctcaaagacattcatcttatcctccacgtaagttagccaatctaccgcctcgaccggagtaccactgccatcaaaagcatccagcttcatgcccatccactgcatcagagaaagaccactgactcgaagaggcacctcagcctcgccacctggagcagcacccgcagggacagcgcccccggg

SEQ ID NO: 22084 - DNA, 793 bp, Zea Mays
aggaggtctcctcggaggaggcagaggactccttggactctgagaaggacagcaacggtgagggcgacagcggcagcagtgacgacagcagcaggggcggcgacgacagcagcgggggcggtgacggcggcggcgtgggcaacgacgacgttgatggcggtggcggcgacggtgacgccagtggcaatgtgccaccgacttaagtgttagtataacatagttgtaatggtagtagtagtagtagtatagtttagtagtagtgtaatgtagtttagttagtagtgtaatgtagtgttggatcaaggggtaattggccgactcataatgagtcggtctttcctttgtaatgatccccgacttatggatggatgaatgaagcttgtttgatgccaattcgttgttgtgtactttgttcttttgtctgacggtccgatcccaggtaaccttgctgacgagtcttagccttttagagatactgactaagtccctttactctgctgcgaccaaaactctcccgagccaccagcctgtccttctgcgctcgacttagtgtgccaacctgtacttttgtcgacgttgtcatggcccttgaaccctagttcctgttttttctccacaggtttctagcttcctgagctcccacatcttttcgcattttgttcttgagttgcgttgtttgaaagattgtgatggcgccccggaagaggaaacagagggctaccacgccggtcatccctcagatcgatcctgatagccaactcccttttgctggtaaccatgtctctgttgtttc

SEQ ID NO: 22085 - DNA, 631 bp, Zea Mays
aagaaaaagaaaagagtaacacagttattgggccggtgttctgtgcggcccttcccactccaacgtctacgtggcccaagctgggatcgcggtgccgacgggtgggtccaccgggtcggcctctgcatgtgccaactattatgttcccccgcttactagagagcccgcgtagcaaattcgtttactccacattgtggctgacttgtggggtcatgtggttggatccttcttcaacagaatcgcccgcactctcagggcgaccagcgtgcggcgtgggatactcggccataaccggactggtccaaggacctcatcgtgcgtataaatgtctatcgcaccgcgttcctggtgaccgactcaattgcgtagacgaccagagcctaaccgttattgcgaggaaggagggaggagggcgaaactgagcggccgccgtggtgtgtcgccgccaccgtcgtcccggtccctatagatagcccagggtttgggtcgtggtccatagtacatgggcaaaggattcccaagcactagggacccggagactccgagtaattcctcgttggagagtgctactacattgggcccacgccacgccacaattggcgtgaccgtcaccctgattctggtaagaaac

SEQ ID NO: 22086 - DNA, 494 bp, Zea Mays
tcgacggcgaaccatggcagaagaaaaagtttggctagcatcattacacttggagggagtagcagccgagtggtactatgccctggaacgtgatcattgcattctgtcgtgggcgcgatttgttgactacatccacatgaggtttggaccacccatccaatccaatggcctggcaaaactgaaagccctttataggacaggcaccgtggaggcatatcaacgacagttttcagtcttgctttgtcgctgtgatgacttgtctcctatgcagtaggtgaacatgtttacagcaggtcttggagatcccctccgcaccgatgttgagttgctggccccgacaaacctacagaccgcaatgagtctggcccgtgcttatgagcgcaaggaggagaacattgcagcacttagagatagacaaagtcaccggaacccatccaccatcaaagggactggttcaggaccgggggccaggccggttgctacgaatcggtcgc

SEQ ID NO: 22087 - DNA, 836 bp, Zea Mays
gatgaagaaagggggggtgatacaccattggcttggcgtgagagtcgggtggtgtacccacccatgcacatcactgatagacatgcacatgttgggcatagcgatgaactggcataggcgagggcactagagagagccccatgggtgggagcgatgtcaaaggagatgccactagggctgaaggcggagccacgaaggtccctagggacccaacatgggttgacaggggtggcacacgggttaataagggccaacagggtggctcggagggaggctgggggagcaggagccatgagggccatcgggtcaccgactgaagctgtgtttggggacctgtagttggaaaaacaaatagtggctgacaattggttgccacgaaatcaaggtcatggagaaaatccaactcaggaagggaggcggtgggtggttcggaagtaggcgagaaagggaaatccatcttgtcgaagatgacatgacgggagatcaagagacgatgagtggtgaggttaggacaccagtaccctttgtgatcaggggagtacccgagggagacacaacgagcagagcgaggagcaagcttatggggagtagtatcagaaaggttgggtagcatgtgatggaatacgtcttggaggcgttgtggaggactgcagattagtattgcagtttttggatagcagccttgttgcgttgtggaggactgcagtttgtggagctttttactgtgttttagcatctagaggacaacatctttgtgctgcagcttttaactgcactttagcatctagaggacaacacctgtgtgctgtagttgcatctagtggacaacacctttg

SEQ ID NO: 22088 - DNA, 383 bp, Zea Mays
gcaaaaggccaagtaccaccctaatggcgcaaggtacgtaacgatcgctgttgtctgacatagtcgaacaaaaccacctacggatacaatcaagcacgtgtcttcggtacccacacattgctgcagcaagcgaagtcccatctcctttcacaacaaacaatatcatagtttacatacacacagcaaagggccaccggccacattgcacaaataaatacctaccgcatcttattaccctccctctttatcgcgagccagggaagggcagcgtttccactcactaccgcaatacaagagcgagggcagcataaacactacattggctcggccttcgggataattgccctcttcactgtccactggacatgtattgttcactgtcc

SEQ ID NO: 22089 - DNA, 459 bp, Zea Mays
aagaaccgcaaggtgctggtccgcgctcgcctgaggtggggaggaaccaagcattgaatatgcccgaacagcagccaagtcttcttccctaggctgaaccgcagaccctgggcctagacgttgaagagcagattgtctgcccttatgcacaccgtcatctgcagagcccctcctaccatcacggtccccaggtggcgaacgtgaacggaagcgcctcctccgccgtgcagaatcatccaaatcagatgggacctgggtgggatctggtacagcacgttgtcccaccaacactttaatctgaacatgataggcaagagctagcctaccaacacctggtccaattcccagagggtcggtaatccaaaggtctctagtctgagggattaaagccaagtcataacaccaaccgtaacaacgaaagacatccaaattcttgagttgtaaagtatcatcatgcac

SEQ ID NO: 22090 - DNA, 1008 bp, Zea Mays
gcggtagagctccggcgagctcgtagaccggccgaatggggcaagtactggcgctaatctctagtttaaacctaattctagccctgaggagtgtttcccctcattaaatttcacgattggcgatctacctagctctgcccacgaagacaacgggcagcgtggacattcactcgtgttcccggtgattcacggtggtccaattcaattaaaggggtcgaggagcttgaggagagcctagggatgttagaacaagcgacggagaaacttgaactgacctgagttgagctagccgcggtgagggtgttcttgtggtgtttttgagcagattgggggaagttcaaaattcgagctcactggtgatcgactgggagcaatactgggtggtgtggtgcatgataatgttgtggagctgacggtggcttcaatttatagggagcgagagcggtggccaggaattggaacgatgacgcgcggcggtcggaagaagggggagctcactgggcagtgaattcgtgtcctacgccgtggcagtcactccagcgatcaacggggagctaaagtaagtcacggcgatgtggtggagatgcttagacatgcggcacaaggccggaaagcgacggtcaccggcgtgcttatcgggttccaccacgacaaactctgtacggtggtcggatttgtttaccggccggacttatccacggcgacgtgactctgagcgtcatttgatcaacccgagcatgaatcaagacgccggcaacacgaatcgcggcggagaggtcgtcggcggtgagactgctgcgctggcgatctgatccccaagtctggcactgtaccatggtgaattgcattcagtcggtctgacagagtaacttcagggcaaattttctctagatttcgcatgacaactttatcatccctctgcactaaagttgtagagctataaacttgctataattttgctatagcagcagtagccaaattcctattgaatcaagcttgaattcatgc

SEQ ID NO: 22091 - DNA, 388 bp, Zea Mays
attttctgtctacccaaggtttacctcagcttaatcacacaagtgtaaggcagcaggggaagaagatctttgctgcaaccccaaacctggtctaaaatcagttaactgcatttccctctccactaagagacagtagataaggttccattgtttactgtcctcaaaatagtccacactgtgatatttatagcagggagagacccatagacccttaactatgtacccatccttatccccatccatacaaccaaacaaaacagcagggagaatgatcttcttcatttatccaatgccaccctgaactctactgcatcaggtttgttgttcatcttgctcacctccatgcttaaacccctctatctcacaaatcctctcaacagcaaacccc

SEQ ID NO: 22092 - DNA, 1212 bp, Zea Mays
ttctcatggtttggaaatgcctcaggaacaagcagagggtctcgtcgctttgacgcttgatgaacttgatgtcccaaggctgcactgctttttcaaaaagggattgaaagttcatgacaaagtggcggctgaagtcgtcctagtcgtcgatgcgatggcgaggtagatgtcgaatccattgtagcacatcttgccctaggacaatgggcatgtatgctgtcacaacgtcctctatcgccccagcggcctaggtggcggtcgtgtatacgacaggccagtgcgccgggtcctgcttgggttcatacttgtcaacgttggagaccttaaagtttggtgaccattgaatcgctcagagctaggggtaagggctgagacttcgcacgtcccccggtcctcttggcaatggtcatgattacggtcccgaggaggtgagtgatgttgtgcatcatgttgcctttcccgggctaaccgacatggagccgggctattcattgaggctgctgccgacttgggtcttggtggcatgaatacgcgccggtgcaccatgatctcggtcgtactcttctcgctgcctcatctcctcctcatgccggcgatcgagtgaagcattgatatttctccatgcgtctcattgactgttgatggcgtggcgtagatcattcgatggatgggcgaggggaagaagactgttcgccacttggttgaggatctgtcgatagcctttcgcgtctagggggcacggtaaaccattggcgatttgagccaggactccccaacttcactcggtgtattcagtgctcgagcgaagtgagggaacgggttctgggggagaagcagtttctagcgtcggagcatgtcatcctgctcaacttgctctcgttcgcgttcctgggtgtggcgactatcacgacaatgggagttgcggtgttcgcggagcgctttgtcgtttgtggtttcccctacttcagaggcttcatcccaggagacgggttgtgcaggatcccattccctagcttcatggtgacaccgtatgttgcggcgcctgttccggcgtcggcatccgtcacgctgggggggggctcttcctctagtatggtgggctcgtcgtcggaaataggcacgtcctccaccctttcctaaatgaagaggatgtccggaaagaaggagcttggtgtgatgcttcgtgctcctaccatctcctttgagggtgga

SEQ ID NO: 22093 - DNA, 841 bp, Zea Mays
tcattatgtctgaatcaattgtagactcccacgtccctcgtacaggaatgggaaatgacacaatagactaatcatggggtatgggggtcggtggaaatggagggtatgagcgaaccctccatcgtgtcaggccacaccggaacatgcacctccactaagaacgacagtgtgctgccaactccagtagggaccccatcagaaccaaggacatactacgacacgaaccactgcacccgcacgcacgcgtatggggtcgccttgactaggacgagtcgaaaagcatgaaactacaatactaacaaacgacggggaaagaaggcgtcactagtcgacataggacgttcctacttcctatccttcctttttttatttttcttcgtggtactccatcgggaagggaacaattgtaactagccctaccattaaggtataaaagggaggagtggggaccgacaaaaaggacatcgagaacacacactacacgcacaacgaaccagagacttgggaactctttcttcactcgttcaacttgtaacccctaatacgagcaatctagtgccggtagcacaagccacagaagactagagtggcttgtgtccaacttgcacaccatccgagtcccaaaacgcacatcacaagtttactagccggtgcttactcgaaacaccgacagtatgaaaacataatgatcaaatgatgaaagaaacccaaaatgcaatgtacaaattaactattccacccaaagtgttcacattgtacattttaaaaaattactacaaaatgatgactgtttgcagcctcgaaagttctaatgtgaatataaataaagagcagaacattg

SEQ ID NO: 22094 - DNA, 1287 bp, Zea Mays
gatggattcagtaatgcaccttgttcttgcttcgctctctctctcccacacgcttataagtcaacaaatgtgatcctattgcctatgcaagttttacttgatgacacaagtaattaaaacctggcatcttacaatcttttacttgataatgataatgaagaaagcaagtccaaagttgcattgtagccccgcagggggttgtttttaattatatcaacaagcgtggctttaattgtagtgtcaaactttgcccaaggtgtttgaattgatcaatgtcgttagcatgataatatcctattatttttctacgaacgaggttaaatgtcatggtatggttgacatgtgtaggtcgtgaggcaagttttagatattttttttaaaaaaatgatgaagaagcttacggttttcataacaataatgttcaggttcctttggcggtcttttgtaatagattcaaacgtttacagtattgtgggtaaagataactctgacacaagtagttaacattgttttttttacaatattcttttatgtcaagttttgtagaacatacgaggaatgtcacaaagttcatatctcataccgatctagaatgtagtcatgcacgcaaaaaattatatttgagtttggatcataagtttatccttttatatgggcacaagctgtgcatgtcttacgatgagtgttcctggccagcagcttgatcgttggattaagaaggaacactcacgatttaaagtgctcacatgagcacggacgtcgcgtgagcacgagatacgttcccttcagtagtaacaagatatagcagcatcactctaccgaataacaaattgtagaagcgttgtgcatgtttttcatgtgacgatgcctttgatctgcagcgtactgcgttgttgctaccgagtcagctggtcgccagcttccagttggatttattgagagagtcaaagaagatttttccaagaaatatagcggaggtaaagccaaaaatgctagtgccaatggcctcaagcgagaatacgggtactaaaccgtctcctactgatacttctttatatatgtcctgggtgacttttagtactaatttcaaatctttttttttttcctcctaggcctaaactcaaggagcacatgaggtattgtgaccagcaccctgaggagatcgacaaacttgcaaaagtgaaggctcaagtcacagaggtcaaaggagtgatgatgcaaaacatcgagaaggtggatctgtcctttttctacaatggttatcagttactaatcttatggggattg

SEQ ID NO: 22095 - DNA, 879 bp, Zea Mays
cactatttcgtcacttagaaatcatggcatccctgagattagggatagaacttacagaggtgttgtatgttccatgagtttcatactagaattccatctatctgagatagcctgtaggaccctggacatgtgacttatgtgattatatacgtccttcctaaggaggggacaatttatgacgtccttcccctaagagcaccctgcatagtaccagctcttcaactgaaaaggctctgaagcgcacctcactatcatggtaacaccacagagtttgctggtaccgtgccgactaaattaccacgtaatgtcgttcttcctcgagtgtgtcaatttcttcgagccgagttgtctcttcttctgcgatgtcttttaacatcagcctttgtgccccaaatgctaaaacagtaggtaatactgccttcgacccatacaccatgaagaatggcgtgttgccctgtagtgcttgactcgattgagttctaagactctagacaatgtatgggacctcctcgatccatttcctagctaacttcttgttcttgtcgaagaccttttttcttaatgcatctaagatcagaccattagcccattcacttgaccattggtcttgaatgtgctactgaagcatacttgataagtattcccttctacccactgaaatcaaagaattttacccctgtgaagttggatcccaagtcagtgatgatgctaacgggcactccaaatctgaagattatttcctagatgaactctactacttttgctgttgtcaatgatgtaattggcttgtactcaatccatttggtgaacttgtctatggctactagtacatgtgcacttccaccctgtgcttgcttgaatgacctaatcatgtccaac

SEQ ID NO: 22096 - DNA, 799 bp, Zea Mays
ccaaaatcagggtgttacaccatggtgatggtgcaagacgccgggtgtggcacatagccgatggcgggcggctcgggcttggtcgcgacagcgcgcacgccggccgcacctggccatgcggaaggggtcgcgacaacgacgaggaagaaggctggggaagagagataaggggatttctcacttgcgctaacagagctccggcgacggcgcagtgcaggggaggaagggcgccatatgtgatggagatggagtgctgctgcgttctgggaacgagggggaagagggagagttgtgtgtgctgcgtgaaactgcatagaatgtgaccctttttcgtgggcgaataggcaaccggcggtgttggcgtgaggagaaaagtggggttgaggtggttgccgattttgcggtgggttcgaacccagccggccgagacgagggaagtttggaaatcaaaccaagacaaagaaaaccatcacgacatatgagtctgcatgataaaaaagatgaagataatgatagacgggaccagtgcgatcgtctgagaagatgaaactgacatgctggcctaggatgatagcgagaaaaacaagtgatggggaacatgcggttgcacgcacatagggttgaaaacggacggaaaaatctcgtcccgacccgtaccgttttctacatttgacccgaccgtttccgtatttacggaaaaatatggaaattggacggaaacgggagagggcttattccgtccgtttttgcgggatcccgtttttttgggattgaacccgtatttattccgtatttgaca

SEQ ID NO: 22097 - DNA, 1091 bp, Zea Mays
cggggctcgagaaaaggtaagggtattccctcctcagagagtcctcactttccgaggtggcttcctcttctccttctctgctccactgaaccttacagagtctcacttcagagttgcgggtctttcggactgctgagtcgagaatctttattggcttttctcggtactggagatctttttgaatctgaattgtctctgcctcgatgtggttctctggtacttgcaggcatttgcggagctgggacacatgaaacacattgtgaatatctgacatggattctggtagctcaaggcggtatgctgcgggtcccactctgctaatgacggggtaggtgccgacgaaacgcggtgctagttttcctttcatttggaacctttgacaccacgcatcggggagaccttgaggtatacaaaatctccttcctcaaatctgagttctctccgtctgttgtctgcataacttttctgtcgactctgagcttctagtaacctcttgcgaatcagggaaactttctctttggcttctttaacaaagtcgggtccctctagtgtcctttcccctacattggaccacattaggggggtctggcacttccttccatacaatgcttcgaatggtgacattttgatactggcctgatggctgttgttgtatgagaattcggcgtacggcaaactggactcccaattcctgtcgaacgttaacacacatgctcttagtaaatcttcgaggaccttgttgactctttctgtttgaccatctgactgggggtgataagcggtgctgaaatctaacttggtgctcatagcttgctgaaggcctttccaaaattttgaggtgaactgcgtccctctatctgacactatcttctgaggaataccatggagcctgactatctctttaagatatattcgggccagggtggctcctctaaaagtggtttttactggaatgaagtgggccaccttggtgagacggttgattattacccagatagagtcattccctttttgcgtccggggcagtccggttacaaaatccatgcctatttcctcccacttccattcagacactgggaggggttgcagta

SEQ ID NO: 22098 - DNA, 777 bp, Zea Mays
aattcaaacaaagttgtattgatatgactggttgtgggtaaaaccctagaatagggtacttaaccctaaactggactcagaaaagtaaataaagtctaaacaagggaaagcttcaaaacctattggtaatgatcataaaatgtcaccatggatggacttaagtagcatccaaactctaaaaataccaaaacccctaaatggacccctagaaaaccctagattgaaaccctaaggggttatatgcaaaatgtgcacatttttggacctaagtgcaaaaaccatgaaattagggtaccttaactcatatgattcacatgtatgtggatttgcaaagtaaaccttgagatttgcacttatttgcaaaaagccccacttaaactctattgagttaggtctgaatttcaatgaattggctcaactttgaagctctatatcttccaaattatgaagattttgccctgggtcaacacatcaagtttgtagagctactaagggagaacaactttgctatagggattaaaccatggtcacatgaaaaatttgaagaaaaatgagcccaaagtcgagttgtcacactaccttaagtctgaattcagactgacagtgtggttgagcaatcattgacccaggattcgatcatgatctagtaagaatttgtgagtgattgctatagcaagattgtagctggtttactaggctataactttggtactgagagttgattcagtcattacataaaatctggagcaaatcgatgccaaacatgctctgacacgc

SEQ ID NO: 22099 - DNA, 332 bp, Zea Mays
cggatctgttcgcccaggcctacgatgcggactccgttcgaggaggcgcgcgaggaagacggaggacagggactgccacgtggtggaggaagggacaacgcacgatttatatcctgaacacaggagtccaagcgagatccgcccgcgaggtcaccgacaatggcggacgccattcgtttcgcccatcttgttgtgataacgcggaggagctgacggtgtggggcccgaccagcagtcacccaaaggcggacgccatcacagctttggcgaatatggcccaccagcgagagggagcaacgaagcaacaatacggcgcgcgacgctgagagttg

SEQ ID NO: 22100 - DNA, 516 bp, Zea Mays
tgcccatatgaaacggctcgatgggactccaaacccctgctcatggaacgaggtgaagctcaccacatagcccacggtcggagctggcacttgctcgtcgtctgacgcgtaccactctggctatgggccatgggagcagaggcgaagcagaccaacgtccaccaacgcgtccaaatcctcgtcgatgacgaaggagatggaccatgggtcgcggagaaggagacaaaaaggaggcaaagagcccttttgcggagatgggccatggatcttctcagccatcggaacaaaaggagacaaaaaggaggcaaagagctcttttgcggagaaggagagagtggtgtgtaaagcaggaaggctgaagcagcatggtaacgatccaaagcatccatctcgggcgaatttatagggacgggcggagtcaccgaggtgcgagtcgcaacaaccaaacgatagtgtttcgaatccgacgcgccgcaaatggtatgctgaccggtcaggacatcctgtcacattgaa

SEQ ID NO: 22101 - DNA, 679 bp, Zea Mays
ccgtgcggccggtctgtggtcgacgtagagttaggggtcatcgccggatcgaggtgatgctagatgcagagttgcgggatccagagatcaatcgcgtcgtccctaacccccgtcggtgtcggggatccaccgcggtgccgcatgaactcgtgggcaggaccactgctaccaccctgtacggtatgggctccatcgttagctttgttgatctccccgcaacgttttggtccgttcttcgatgagctttggtcaccggatgtcgggcggtgtcgcctcggtgcgctccaaggagcggattccggccacgccgccactcaacttggtctggcagcgagtgggaagaagacgatgttctgaccgttgatgcgtgatggatgacccagattagtttaagcgtaccgctttaggcgattggatctgtgctgtcgatcggatgatgggtggccacgaagtgattctaaagttttaaatccgggccgtgcattgcggatcgggtggcgcggatccgagcaagcctaactcttcacgcgatataatctgagtcgtccagatctaatccaatggccgaaatcagcccataccccttcgccgtgaccattttctaaaagagcccttggaacctttataaatcaacccgcggcccttccacctttaagattcataacaagcgggtcctgta

SEQ ID NO: 22102 - DNA, 299 bp, Zea Mays
cttatgttgccacaattactactttgtagatagatggatcagttgttgaggacatttcctgaaagcacaaagttaggacaaatgtactgattgaaagaacactcctttataaccacaccacaacctatgatcatcccaaagaagacccaagtaaacagacatgcttaaataaaagtcagaaaagacactttaagatttgagatttgatcctgtagctggtcaggtggttcttaccgcagagcagatgaggatgattaaatgtctgaaatttcttgaattcttgagaaatcggcgtgcac

SEQ ID NO: 22103 - DNA, 401 bp, Zea Mays
ctcactcacgaacgaaatgggagcgagtatcaatgcgctcactcattcaacaatcttcagaacactagatttttcataaatttcatggtcgatttgttggcagcatagtacagagcaacttgatcagatttccctgctttcaacatactacttgctagtccttgcagacacatggcttgtcgtgctgctgtgtagctgccataaactcagcatcgctgatgcaagcgttacacttttctgcatcacctgttgttgaaaatttctatcttatcggtgcacagtgctagtacctgtgctgatcatgtcgtcaagttgaactcccaaatggaaatcgagatccctttgcatctgtatatgcagcaattctagttggtcgacataccacgcggtgcttggccaag

SEQ ID NO: 22104 - DNA, 575 bp, Zea Mays
gtgatgtatctgtcgatgtcacgtacgagtttctcagaggtcgctagatcccattggaggatggcatgtacgaaagcctcatcatgagatccccggtagaagtcctcattcattgctacctcagtgatgttggggatgcggttcctcatcgattgaaaacactttagggacgagcaaaaagaatcatcctccttgcactttttggatttgaggtaccatggttgcgtcagcttgtcagagagtgactgaaagtgggcaatgagcctgacacaaaagtcggccccgtcgttgatgtagtgatgacaaaggtgaggaagccactagggcacatcttgcaccagcacgattaggcggtaggatgtcatcacatccttcattgcctctgtagctcgggtagccgtgaaataaacggccagctagtcgctcgggccctattttgcatcatacatgtcaacattagagaccttgaagtttggtagccactgcaccacatgtagtaggccggtgaaggagaaaaccccaaacatggccctgacgtctggcttgccaccctctacatcgtcatggtgtcgatg

SEQ ID NO: 22105 - DNA, 1336 bp, Zea Mays
atgtttggtgctgttaagtaatatgaatgtcttatgttgagtttgaaaatgatgaaaatgattccagaaaaacgccaaacatgaacaacaaatgatgttgattccatggcttcagttagtttttctttgtacgttttcacccttttattagattgtgttatggtgttaaattattgctcaattagttattatcattcgtagttgggggtcatatcttttctttaagcgcagtcctgaaaataacacacctctacaattatgttgcataggcatttgtttgaagcaatgtgcacatctcaatgattcttgctgtcagttacacttgacagtaataaccatctaagaccccctcacgcagtgcctctaggtgggagaaaacaaaaaaaggttcacaggcagctctggatacttcaatcctgaggggacagcttcgccttcgtccaggtcaccaggttcagcgaatccggctccttgcatcgctcctccggtaaccttctcttcctcagtttccctttgagaatattccgcactcaattttcctcacttcattttagatcctttatttttatacctacaacatatactttctctactatttcgacaaggaactgcgcctctatatgggtcagcgagtttggctacttctatgttgctatcattgtactgcttattgcttttttttcctaaagaaaatgttcactacctgcttatcatactgatttttctactgctattgtttgatctgctaaaacaaaagggatatatattcaacaatgaaaatagaactaataaaataaatacttccacccttacaagtctcttttgagtatttccttccacccttgcaaactgtggtatatcatacgctaaagttgttgtaacacgcttcatatcgtccatcaaattaagtaacattctcctttactttgtttatatgaataatttactgattatagagattttatgctaagaatattcctttttccctttttattacttttattttgttagttcaccttaaaatgagcaagctccattattatcggttgttattgttataggatttcaggtgagtgcatttcctcaggcatttgtttgaagcaatgtgcacatctcaatgattcttgttgtcagttacacttgacagtaataaccatctaagaccccctcacgcagtgcctctaggtgggagaaaacaaaaaaggttcacaggcagctctggattcttcaatcctgaggggacagcttcgccttcgtccaggtcaccaggttcagcgaccaaaggaactgcgcctctatctgggtcaccaggtcaccaggttcaatcctgagggga

SEQ ID NO: 22106 - DNA, 277 bp, Zea Mays
ccgccggacaacgcgagggcaccacacactacatcggctcaaccttcggaatgatgcccgcctccctataattgaacaacattatttttaattcctcaccctcaaaaagatcccgcagatccccttcaccaatactcgtcccaatcggcgaagacagtagatcttgtttgccaaaccgatccactcgaaggcgggtccgctccacccccatccgacggcgcctaccacttcgcgacatctcaccaacactatgcttcaaaaccacttttcgtcgccg

SEQ ID NO: 22107 - DNA, 420 bp, Zea Mays
cgtggaagtagttgagagatgctgctgctagcatttggatccatacctcgaggtggaacgtgttgaagaatcccagtcacaacagacttggccgcgatgcttaatcgacgacgaggctggccatcgacacagtgaagttccccacgagacgcgaactctgacgaactttccttcgaactccaagcactaccttcgctctattagcccatggttcgcttcggcgtgcactgcagcccttcctaggagaattccagggccgggtggtggcgtgtcgtagtaccacccgtggtgacgagcttgctccggtgaagcccacacgacgatcgaatttctggtggctatcggtggcttttatgcagacttgcagagaggatgaactcgatcggacgatgtagtttatatacgccaagggggctcaag

SEQ ID NO: 22108 - DNA, 544 bp, Zea Mays
agagagaccgcaacgcgacagctgacgcattgtctaaactaggatccagtcagactcaggtcccgcctggagttttcgtctaagaagtaccgcgcccgagcatttcaatggatcgggtagaagaatgtaacactctgggccaaccagagtcaaattttgatgactggagggagccgatcatcagatatataaagaatgaggaggaaccagatgacaaaaatacagctgagcgcattgcaaggcagtcggctcactatacactcgttggtgaaacgctatacagaaggggtgcatcaggagtcctcatgaaatgtattatctcagctactggaaaacaacttctggatgaggtccatgttgggcaatgtggagtacacgcagcatccaggaccctggttgggaaggtcttcaggttgggcttctactggccaacaacaaagagtgatgcagccgagttagtccagaggtgcgaatcctgccagtacttatcaaaacagcagcatctaccagcacagcaactgcaaaccatacctgtaacttggtc

SEQ ID NO: 22109 - DNA, 1003 bp, Zea Mays
acttagattatcttcattttgtcacaaacattgttagagattagcgatttgatattgttcgttgtagttgaaccgctcatatgaacggttgaagtgcatgctcaatatcttatgcgtttctactcaaacgtgtttgatccttgctcatcataggttctatttcttatttcttagaatggtgcgtcgaaggaacccgtcggtggtcgaattcgactcctcggatgaccaggaaatccacggagatactccacctcgctctcgatccaagcgagggcgcggaagcggcaatgtcatgccgggtgctgaggcctccgggtctcaaagtgctcgcggtcggacttcccggaatccttccggtcggtctcgacctgcgacgaatccgcaggcgtgggagcctgcaagtgatgatgatggcgggaaggacgatgaagttgatcttcccccagcccacgctcctgtgattcgcggcttggtcctccaccgggcagaggctcggcgtgctggcaatgagccagtcactgacttcactgccagtggaggctctgctcttctccaggatcttcgtttccaaaatcctgtattgcgtattcgtgatgccaggatcgatggaaatcgcttttggactcttcaccacgtagatttctataattccgtcattctccccaagaagcatcaacccatcctgcatcaacgatatattaactgggaaggttgtgaagccattggggacctagaaatgtcacaggcactgagggcctgtgaaaggaaacaaatgaagaatatcatgacattccaatatgattggaatgatgaagtgattgctcaattctactccactctctggataaagcttgctgacgaggagagtcattacaactacccctatctaaacttcttcattgaaggtagttggtacaaggtgagctatcgtcgatttgctcacattcttgggttttctgacgatgatatatctggagacaagatcaagattcatgatttccgg

SEQ ID NO: 22110 - DNA, 339 bp, Zea Mays
ttctttggtgcaagtgatagggattagacggtagaccactttgacttcatgaatgggacttggacacccatgtgcttcaccctcctctggaatatgcatttggatggaggtaccgtgttgttgattgtctgagctaaagggtggttgctaaagggtggttgctaaagggaggtaccgtcttggactgggtattgcagctagctaaagggtggttgcttggcaagggaagttgagggtggtgggtttcttagtgacttgagtgtggatgcaccaaaacatttaagggcgaagggtgtgcatttggtccctggtgctggacatattatgacacgtaaggtg

SEQ ID NO: 22111 - DNA, 673 bp, Zea Mays
gcctatatgcgcactaattcatttcttgcgacacatgcactcaaaatcaatccacactacacaaaatacacttatctcttatttatgcgcagacttaacacctttcgggataaagcgtcactataaacaccttacacataatttccttaggaacctattagttcactcgaagacatctattcaagtcataaacacaatcatacactatatgtgaagcacaatttaaggaacacataatgcacatcgacacgactcgacctataaatgtagcgaaagcgatgactactttgtcatgtcaccacctcactatttaagccaaaacaatttatacttatatcgactgaacattcgtgtcgagcacaccttatattaccttgtctcgcatacaaccatgttgtggcgtgcactcgagacactaccgattaacttaacgcaattaccactacaatgcacttcgatatacacgttcgacatcacagtgcttcgacaaacccacacttctaatctacttatcacatccaaccaacaccacatgcccactgcactcttatgaccaatttttagcgcaaatatttataacaacatttatcgactagacgagtgaaacaccaaactgattatttgcacatctcatcttcaaacaataacatgtcacataatttatattttcaat

SEQ ID NO: 22112 - DNA, 841 bp, Zea Mays
atttcaccaatggcgcactaacatgccctacccacggtgacagcgggcactataggtaaccaagcgcgttcccgttgatctatggggtcctagtccaattggctgggtcggggagcatcaggaggatccacggatgttgaaacaagacagcagggaacatgaacagacctgggattcgctggccacggtgaaggttctaccacggcgacggaaacagaattgggggaagaagcaaattctccggctatggtggctaattgaaggcggtaatgggtgctctggcttcgtgatagtatggcgcaacagaccaggccatcaatttataggagcacaaggcggtggtgttcaatttcacaaagacgcgctggcggccggagagggagaaggctactgacgcagttgattcgtggagtataccgtggcggactcaccggcgatgattggatggctaacgtgagtcacagtggtgcgattaaaggctggaggcgtggcgcaaccgcggtgagtatcgcagattccggtgacggccgtaaggccacatcgccggtgcggggaaccgagtgacagcgtggccacagtaacttgaacccatccgcgacgagatcttttcgccggcgaactcaatccacagaccaaacgcacgaatcgcggcgagcaacactaatcccggtgaagggtcacaggcggccagctcactgaatctgcggattgtttttggttactgtaccatcacgatctccttcaatcagtctgacagacagatttgtgacgccaaaatcttgaattttcgcataagaacttactaatccatttgtagcaaacctgtagccctatgatccag

SEQ ID NO: 22113 - DNA, 707 bp, Zea Mays
caaatcactctgtttttgtgtcataactctatgtgtatgtatttattcacatttcatatacttatgactatgtgactaatacgtgctctcctcttctgtcatttcagtgatttcgtctgctcgcctgcgcgtctcctgtcctgcctggttcctctctcttctcaagaagttcccaggtagctatcgcactctattctagccttacctactgctctactactctcgcttatcttttctccttatcttgcagcagtcagttcaggatggtgaggatgaagaatgtcacaccgtcagggggaggagatgaccaggaccctccttgccccttcagacaagtcaaggggaagactgtctaccttgagtagcaagggggcaaaaagaagagatgtctggacagagccactcatgcaatgatttcagcaacagcagtagtagatcaagaagagcaaggaggtcagttgcagatatcttctgatcagatcgccttctgagtccgtcgcctcaggtctcggactcgctcctccactgctcgctccactccttctgacccagtcaccactccacctcccacttcgctagctcctgccgctctcgagctgtccaccactctggctgctaccaccacctccaccactccatcttccattgctcccgctcccactttcgctctgcctattcctccacctcgttttcgggagcgagatgac

SEQ ID NO: 22114 - DNA, 845 bp, Zea Mays
tgcccatatagtgtaatgcctcaatattctattaaacgcacaaaagcaaaactgaacctgtcgttcggtgtgtactcctatgtatatggagtttgccagaaatcgttgaggagtaaccatattggtctgaatgcttctacttgatgtagatgtggatatacccgggattaatataatatccacatttgacttattggcatttgatctattctcggggacgcctgcgaatatgatccgttagtcttagtcaaagcatatattctgattgcagattcatgtggtctgtaataactctcctccgatgaactcgcaaagtgaaagtcgcgagcttgaagttcggacattatgagcttgaagttcggacaacgagattagagggagtttaggccattaaattagactattggagagattaatctagatttttctggatatttcgagggagaactctctggttctttttggagtgcacttttgtacataaatataattaaagtcttgattatgcaagattagtgtggtaacattgttccttggtctttattgatgcatgaattgcatgtctagttttgatcatatattgatttcttatttaactaacgtaattgtactctgtctagattcagaaaagtgcatttttttcgttttgtgattagaagcaggtgggataattattttgaagctaccataatcattcacacatccctatggttgcttattctagcgccatacaatcctatacatatgagaacttcaatgagcctttaaggtaaaaagctcattagctagggatcaatataggggttgtggcatgattgagatgattatcttagttgccactgtcc

SEQ ID NO: 22115 - DNA, 426 bp, Zea Mays
cctataccaaactcgattgctaatctgtccactagtcttggacaactagtgatgggttggaacagcctatcaggaacaattcccccaaccattggaaaacttagtggcttatatagattatcactacaaaacaataatcttacaggtaccattgaggaatggatcggaaagatgacaaatctacaatttttaacactacagtcaaacaacttcatagggaaaattccaccttcaattggcaatcttacacagttgatagatatcttctctgtagccaaaaacaatttatctggttttgtaccatctaacttctggaatcttaaaatatcgaagttggaccttagccataacaatttccaagggagcatacctgttcaatttagtaacttagaactcatctggctaaatctttcatcaaacaaattt

SEQ ID NO: 22116 - DNA, 591 bp, Zea Mays
ccagcacaagtaggatgtcatgcatgcttctactatggagaacaaaagcactgggctaagaactgtccaaacaaagcagcttagaagtcaccagtagtcaatcccccagcaagacaaggagcgccacggcaagcaccaggaggtcgtggttaggcctacaaccgtggaaaggtgaaccacctagaggtcgaagcaatcccggatgctcaggacgtggcagcaggtatgtttccattcgaatcctatccagcaaaagtatcatttgatattagtgccacacattcttttatttctacatcttgggtagaagcacataacatccccatagaaccaatgatcccacctttaagagttaattcagttgggggaaagttcagtctgataggatttgtctgaatctaaggattgaaataagggagatagacttccccgctaacctagtagtaatgggaactcagggttagatgtcatcctaaggatgaattggctgcacagaaatcaagccattgtcagtagtgacaagagaacagttaagttggtgtccccatctagaaaggaagtattaaccgagctgtacttgtctgaactaga

SEQ ID NO: 22117 - DNA, 957 bp, Zea Mays
ccgcccatgaccgtcacgccgtgattcacgtcgatcgccgggattcgtgcgctgtggattgtggataactgtgggcgggtaaagatcttggcgcctggatcaacttgagtctggccgcgactaagctcaccgtaccccttgctcatcgattgatcgggataagacctcgccgccattggtcgattgccgccatgcgccacgtgctaaagcactttaccacgttgcagtggctcggcttgcgatatttgctcatcgccggtgagttcgccatgacggaagacacaaatccactgcgccagtaactttctgttttctccggctgccgcgcgtctctcccaaattcaccggccaccgcccttgccttctataaattgagcacatcgcctggtccgtaggataatcacgcaccaagccatcaagtattgcctccaatcatatacccgagaggtctaattttggatttcccccaaattgagtttccgccaccgcaaggacaccttcaccgcggccagcttattccaggttcgttcaagcgctctagtcgattgttctagcgtccttaggtcctcctcaagctcctcgacccctctgattgaactagaccgccatggatcaccgggaacacgttgttcctttgattatctgtgttgtcaccgtggccagagcaaaccaggtagccattcttggaattaggtgaggggaaacgctcactagatcttgaatttggcttcggccaaagtaggacgccagttgttgagcgaattggccggtacgcgagctcgtcggagctctgcacgtcgccatccatcgtcgagggcttcagagtgtaaaggaatagaaacgtaggggcttttcaacaaatgtcagcgactcagtcaaatagtgtcgcgaccccgcttcaggttatcccataagacaagcccttttctacaaaatcaacacacgcgggcgcgcgcg

SEQ ID NO: 22118 - DNA, 1062 bp, Zea Mays
atcttgcttgaagttggactgtcaggctatttaagtctgaaaattcagactgacagtggactgatagcaacttcaagaccaagttcatgcatgatctgctgcctttttgtgacaataccatatagcaaagatgtagctggtttatagcactacaatattgctgcagagatttggacctgttgccatgaagatttgagagaaaggttgctctaaagttgctctgtcaggaggtttttgggtgggattcagaatgaacagtaacctgcataagatcccggttcagggaaccttgacgtcggtgatctctacgccggtgatctcctcaccgtgattcacgccggtgttaagatatgcgcctggataagagtggatagctgtccacggtgaaaatatcggggagggggatggatgtggtctctggcgcgagcttatccgcttcagccagttgctcccgtggtcggccgggacgccatcaccggagtttgatgttccttgcggccacgccacgtaactgagggtgttaccacgtagctgggagtcgtggcgtgaagccagttactaccttaagccattgctccactacgtgccacggtgaacacgctccagcgaagatcttttctgtcaccaccgtgtgcacttccgtcccaaattggcgaagcaagaaatccatccctttaaattgaggacactccctgcttcgcctctctgttacgcacacagcccacccctcactgccccagttcattcaccacagcccccagtcaccggtttttcccgagaaaggtcggtagcgccgccgtgagaagttccaccgtggtcagtcctggctgaggtaatcccagcccaactgctatctgttctagtttcctttaggtgtcgtggtgctcactggcttgggaatttgaactctaccgcagcagagcgtcgagaacatcgcctcgccgtgcagagcaccgctgcagacagcctacgcatcgacccgctgctctgtctgaccccctcgtcctctcgcccttcgttacggtgtcctggtgagttactaatgctcgccatgccttcaat

SEQ ID NO: 22119 - DNA, 506 bp, Zea Mays
acaagatcgacaacaaccccaagtaaataacatcaccaattagtaacaacatggcgaaggcccccttgtaaccaagagcacacgtaacacctaaaaagggggacaagggtcggtagaggtcatgatcacagtaggggatccatataggagcgaaggccatattgcgtcttccatagagagaatgtcgagcatcaaaccagggactaccctatcacaaggccaaagaaataatgacaaggtcggttctcgaccaaccaacaaggcaatagtgcacacattccagcaacaatgcccctactaccaaaacacccatcaaccttgcaccacatttcccccaaattaccacccacaattaccccaccaagaaaggttacaatccccccttaaccccaaaacataccccacacactagcttgctcctcaaacccccgaagatgaaggccacttctctcaaccactagcccacgacatcataaacatgatatctagtgagtccagtacaaact

SEQ ID NO: 22120 - DNA, 842 bp, Zea Mays
cgcattctttgtgcgcggcatcctgaactaaagtctggaaaggtcacacgagaggtgacgatccaggcaggacgggagacggcacacggtcacacaaggtcactgaaatgacagaagaggtgagcacgtattagtcacatagtcataagcatttgaaatgtgaataaatacatacacagagagatatggcacgagacaggacgatcaagaagtcaaacgacgtgaaaacggcgtttgacagacaaatagtgacataggatgattggaattcgaattgaggcacgaaacgatatgggattgagccgatacttcacgaatgggtttatataggtgaatatgagtgaagtgtgtgcttggtttgaattttggcgaagaaatagggttttgggcactcggctcggaaacgatcgcgcaaaacgggaattttggtgaaatttaagcccgggatctcggattggcgtgaaatttggcaagtaggttactggaagtgtggtgaaggtgcctgaaaaatttgggttcaattggagcaagtttggctggtttgggcatttcaccgaacacttggtgtgcggggagctagggttttaggaatatggccatttgaggtgggaatgccctcccgaaggagctaaaaacaagcagggatacacactagagatactagaactcatttcaccaactggattcatcagatttcacagaaattagaagatttgaaaaaggggtggtgaatggaatgacacagagactttgaacccgagagcagggagaaagagggaaggagagagctgctcacggaggggaagaccacgggcgaggtcgccggagcccagcggggatgg

SEQ ID NO: 22121 - DNA, 645 bp, Zea Mays
gtgatataaatggggttttcctgggtcagacactgtttctaaaaagtgctaagtcatcactcggaaaaagcaagacgctctggcataactcggcagctacttctaaagcaccgacgtggcccaacatgactcggcagctacctctaaagcatcgatgtggcccagcatggctcggtagctacctctaaagcatcaacgtggcccagcataactcgacagctacctctaaagcgccgacgtggcccagcataactcggcggttacctctaaagcgccgatgtggcccaacataactcggctgttacttctaaaacgccgacatggtccagagaagctcagcggttatttctaaaaaaacacaggcaatgcataattcagccgttttctccatgtaaacgccagcagaaccaaatacgactcaacaattaccagtcattactcgggcgttatctctaagaacaacggcaacgctgggaatgaatacaagctatcgattgactataaaagaacgatggaaaagcaaaaaggagagactcagaacaagccgaaattttcttcaatatattgataagggaagttcttccacaaactcaaaggccaactcattatgagccggccttccttcccttttttgctacattatac

SEQ ID NO: 22122 - DNA, 784 bp, Zea Mays
gatggatagcgtcgcagggtaaaagatcatcgccgccggtgagctggaagccactccagctagccgcggtacctctccccttgctcaccgccctcggataaggattctcaccgccgttaagccgtcgtcgttgtccgccgcgtgtctctagcctgtctaccgcatcaccgtgactcactcttgctccccgttgatcgccggagcaattgccacggcgcaggacaccaatccactacgctagtgctcttctctttctccggccgccagcattgctcgaccgaattacgcgccaccgcttaagccctctattaattgaaggccggggcagctgcgctacatcatcacgaaactagagcccccaatcccaccctcaatcgttcaccaaagctcacgaattttgggttctccccaaatcggtttccgccaccgcaaagagcacctcaccgcgtccagcacgatccaggtcagtccatgtcttctgcttccccgtttaagtattctcatgtgtctacgatgctcgccgacccacataattgagctagaccaccgccaatcgccgggaacgcatgattctttggttcatccgcacggttaccgtggccagagcgaattaggtcaccatttctgaaattaagttaggggaaacactcggggaaggttcaattcagtgatagccgctcgggagcactggtcattgtgtaaatccaccggcacaacctcaccggagttcatcctccgcgctgccgttgtcgtggacctcgtgcggtgaaggattagaacgtgg

SEQ ID NO: 22123 - DNA, 659 bp, Zea Mays
cgagggcggtgaggcacgtgtttcgagtacgggtgagcatggtcgccagggaccatgttgtgctgctcatggcgctgttaagcatgcttgaactagatgcaccacctgctagcttcttcccttcgtacgtcttgccgcttgcacctcccttcgccacggccctcatcctagcctgacaccttcgacctttccactgtgatgcaaggtgggggccatccctgagccacgagcagcagacacacgcatggaaggagttaacggcaggcccgtaggacgcacacacggcctgaccgccgccacacccactgtgtctccctcctcgacgtttttcagggatccctcagcgccacgatgcagatttggatggggctgacatgcagatttggtccaacagcgagtagatccgtccgtgctatttggtgcttgacaaggaacacatttttgctcgcttcaaaaaataggaacaaatttttgcagctgaactccatgatctttccgtccttcagtagtcactcaaagatttgcttccttgtattgtttaatttttttttcaatcggatgtcctgttcttgcacttgcaattttgctatcttcgcagttcaccctggtgagacaaactttgaaagtccagttgtctgcaatgagtaaacaatttctag

SEQ ID NO: 22124 - DNA, 445 bp, Zea Mays
ccgacgtttggttaaagggaatcaagttgttcctcaggttcttgtccgttggtctagtgtcctagtggaatcttctacttgggaggattattatgtggtgaagactccttttcctgaagcacatgcttggggacaagcggatactgaagcccggggagttgtcatgaccggtgaggatgcagtgccttcctgtgttgttggcgagaatgagtgatgttgagcgtaatagtttgcttattctggagttggtaatgagctgacaaatagccatgctatatattttgaacagagccgggtggacagagtatcgaataacagaaatcaaaacagaatcgtaaccaacttatgtcgatttgttgcgtgttgttgtcccttcgacgacctcacgtcccggcggtggctcatttcctagctagtcatcgtgagaccaccatcgccctgttcc

SEQ ID NO: 22125 - DNA, 1528 bp, Zea Mays
aaaccaacagcctgttttagctgagatacgtggacaactgggtggatacgactggtagaaggcagctgaagacggtatgctactgccccgacccgagcttgtaccatgtaggggccgaagtatttgtaactcaatttctgatgagcacgcggcatgacggaagactgaacagagggttgcagtttgaggtacacccaatccccaacagaaaaaatacgttctgaccttttcttatcagcttgacgtttcatgcgatcttgggcacgaagcaggtgctgacggaccaggttctgcatagtatggcgctcatgcaaccaatcagataaatcagatggtgttgtggcatcaactgtcaagccaagtgagcgtggtcgacgaccataaagaacctcaaagggtgaacaattgagtgctgaatgatgactggtattataccaaaactctgcagtaggcaaccaagacttccacttctttgggcaagcattcacgaaacagcgcagatatgtctcaaggcattggttaacgcgttctgtctggccgtccgtttgagggtggtaggaagagctgagcttcagatcagtgccagtcagtcggaacagatgacgccaaaactggcttgtaaagattggatcacgatctgaaatgattgctgatggaagtccatgtaagcgatatacctcagtcatgaagcattgagccaccgtcagtgctgtataggggtgggacaaaggaataaagtggccatactttgtgaatttgtccacaacaacgagaatacaatcagcagtactagacctcggcaagccttcaataaagtctaatgagatagtatcccaagctacttctggaactggtaatggttgtaattttccagggtatgctgttcggtccggtttagcctgaagacagatttggcactgctgaatgaaagtatgaatgaattgtttcatatttttccaagcgaacagttgtttgatgcggctgtaagtaaccgggatacctgaatgtccacccaccgccgaacagtgaagagcagttacaatacgagtatgaagctgtgcatcatcaccaatccacacacgtcctttgtaacgcaagagtccattgtccaaaacaaaatgagggactgcattagggtccacagacagcttagtgagcatagactgtgttgcagaatcactggcatagctggattgcacatcctgcaaccattggggaaccacaactgatatagcctggatagaagattgagcacatctggatagtgcatcagccactcgattttcagaaccggatctgtaatggattttatattgtagccccaagagtttcgtaaagaccttatgctgccagggtgtatgaaggcgttgttcgttaagttgggagagacttttgtgatcagtgacaataatgaattcagcgtgttgaagataagctctccaatgttgaaccgctacaatgagtgccatgtactctttttcataagtggataaaccacgcgacttggggcccaatgacttgctgagaa

SEQ ID NO: 22126 - DNA, 330 bp, Zea Mays
gggtggcggcgggggaggaggcatgtatggtgggtgccagggagatgtggacgtcgagcagcaaaggcagtctatgggcggtgatggagatgggaaatgcagctgcaatgcagcggatatgataggcatggttgagaggaggctggcagcggcagaggcagcgacagtcagacggaagggatgaggctggccgcgacggagaaggaagagacagtagcgtggcagtggagaagggacgaagagtcgtgcggtgatggagttctgcgaactggtgcgtgtggctgggaggagagatggatggataaggtgggctctgttttgatggtcctt

SEQ ID NO: 22127 - DNA, 678 bp, Zea Mays
ccgagccgatcaagcctcttttcttgctgagggggagaaaaagaagaagagacgtcttcgtcgggtgtctagcttggatcagggtgccggtccttctgttcctgttgctgaggaagtgccagtgcctgaatttactgaagcaaaccccaatgggtgtgatcctgctgaagctgaccccaatgggtgtgctgtctgtgttgttgatgaggatgatgaagaagaggacgagatccctctgattcggaagaacagccggcgttacatagctagtggggaaagtagtggtgttccttctcctgccttgtctgccctcattggtctgcaagaattgtctctggcaaactttgatcaaactcttgaagacatggttccagaagatctgttgtcagagccgacagatggtggcgcgatggatgtttgtgctaatctgctcgatgccgggttggggtcatcccgggcagcgtcccgcgcctcatcgaccttggagcgcggtcttgagggtcagaaagctggtctggattgcactgctcccatggaagtgactgagggaccttcagccttagaggtggctgttgcagagaactcagccctcaaagatggtgctggcgcttacccagcccccgagggtgttgccggagatgattcggctcggatgggtagcgcaagctgcgacccagc

SEQ ID NO: 22128 - DNA, 709 bp, Zea Mays
catcaacacttgaagtcgaagcccatgcctcccacgtcctcttcttatctttttcctttattttatttctctagccgctaatgccaatggtcatgacgagacatcgtcgtttatttctcatgtgatattgccgcctagaacccaccgctcagcatcaccatcgcgcgcacatcaccgactttgcgggctcctgcggcgacggacttcatccttgcatatgtagcttttcccgtgtatgacgggtgggccacattgtagctgtgtttttcccttcggacaatcggatctcaacgaaatcgcgtgcactgcgccgattgttgctgccaactatgttgatgtgggttcctcgcgggtagttgggattaagctggggcatatatatgagcacgccgcctctcctcgatgcagccatccgccgagcgccatcgtcaagcgatagcaagcagagaaagatggagcaccgccacaccattagaaaccagagagggagaagaaggagaaggtcgtacccagctcctagcagccagcgagctccacccttgcctacacgctctgtctttctcccatgcgcgtcgtggcacagctgccctgaccgcgggcctccgcctccctgcaccatgggtgtcgagttcagcccagtccctgtgcagcacgcgtctgctgttgctgactcctgtcgcgggccaccgccactcgcagctccggcgag

SEQ ID NO: 22129 - DNA, 445 bp, Zea Mays
caagagtgccttggaactgcggtggctggatcagttgcgcggagatgtagcagagataatgagcatacaacatctgacgccgggcatggagaccatccaataccgtgtcctcgatctcacatataaggaagtcaactacatcaaactcggaatgagagatcagggcaccaagtaggcagagctggatatgagtggtggcctccctataacccatccggggcagtagcgtccgtctcatgagctgatataagtacttggctgctggagtgcaatctgccggagagcgtcgcgacccatctgtgaaaggcggtcggaacagggccgcgacatgggctgtagctggagcaacaccgtcgtgagggtgacgaggatgatcagaggtaccgtagcataagctatgaaggtgcgatgactcggtaaatccaaacagctggcgaatctggct

SEQ ID NO: 22130 - DNA, 360 bp, Zea Mays
ggaagagcagtcgtcgcacgtgagggtcggtggtactgacctcagagcagcggggacctcgcagccatctacctctaggtaggtgtaaaagtaggagtaggcttgatgtgacaatacatttgatatttgttaatacttaaagtcggctgttgtgtaggttccggtgattgggcctacgcaagcaaattttggcttcttagacaaggggaaagaaattgttggggctgttgaatgtgttacaccattgtctttccggagtccaatggggcttagcgatgagggctatgaatttgattcatggtcgtcgagtagcgaaggacggttgggccccttcgcaaagatggatgaagagtcctcgga

SEQ ID NO: 22131 - DNA, 543 bp, Zea Mays
gatccactaccacccatatagcatccctgccccggggggaacgaggtagacccaccacaaaatccatggtgatatgctcccatttccactctagaatttctaatggcttcaggaaactagcaggccgcttatgctcggcctgcgctgacatacttcacaggcggccacatacttagaaacgtcaaccttcatccgcttccaccagaagttttgcttcaaatctcggtacattttggtttcgctaggatggacggtgtaaggcattttatgagcttctctcaagatatccatcttcacctctgatttctgaggcacacaaagacggcccctgaaacgaaccaaatcattctcatcaatggtgaaccctcgtggtttaccatcaccaaccctctttcgagcttcctgcaatagacgatcctgctgctgagccgcacgcactctctccatgagagaggattgaataagcatctgagtctcctcgctagcggtaccgacataacacaaagcgattcccaaacggtccagatcagcgatcaatggcaa

SEQ ID NO: 22132 - DNA, 608 bp, Zea Mays
caaatgacaacaacgctgatgatggttgggatgcctagccggttcaacaggcacaacaagcccaaccccctgcgctagtgccaaatgataacaatgaggaggaacaattcagttatcaactatctggcctcgaagacctgccctctaatgaatctgtgggtcttttcaatgacatcattatcccacaagaggtacacttccctcaggaggaagccccagaacctgaagacgcagttcttgctttgccatcctttcccccagcgggtttgattttggagggaaacaacgactagggggaggagaacatgcatgtggaagaaaacatcaatgtgggcttcatgcaacacttggagcagcccaaccatgatcctacatatgaagattacctggctagaaaatgcctttcttcttgggctgaaatgttccccaccaactcagaatttattcatgttccaaaaatgcgggttgctttctttatgggcctgctattgaggctggattcttttgaatgggccaagaaatttctgctgtctggtgctatctctgctttcgttgagcccaacatggaaactgtctccatcaagattccctccaagtgcctggcccct

SEQ ID NO: 22133 - DNA, 737 bp, Zea Mays
ggccaggcccattacagtgaggggtgagacggtaattacaacccaaaccctagactcctagacgggtagtctaacatgatcatcacataagactgctacctgtaactgccccagtggcggtccgaccatacagatatcctcaactcctcaaagatgaaatcgaacaccagtgtgatcagatgctgcagcaaggaatcattcaccagagcacatcggctttttcctcacctgttctgctagtcaagaaggctgacaatacatggcgattttgaattgattattgcgagctgaatgcgatgacagtgaaggataaatttcccattctcgtcgtgaatgagttactggatgaactccgcggcacaagcttcttcaccaagctggatcttcgcagtgggtatcaccaagtccgcatgcatccggatgacatacacaagacagcttttcgaacacttgtggccacttcgagttcctggtcatgccatttggcctgactaatgcaccatccatcttccaggcactgttgaatgatattctcaagcccttcatccggaggtttgtcctgctgttctttgacgacattctaatctatagctcatcatggacagagcatctgcagcatgtgaaacatgtgtttcagttgctatgtgccaaccaactcgccctcaagcactccaaatgttcttttggcaaacctgaagttgcatatctcggccacataatttcagcagcaggagttg

SEQ ID NO: 22134 - DNA, 542 bp, Zea Mays
aacaaggacaggtcccagtaacgcacaggtgtgcatcatagacccgaaaggcgttacatgatccaccgctgcgaaaaaaaagacctcccaaggaagcacacaatcccactggctttagctgtgtgactttgggattgtagttgaagagaggagaaacggcaggagaatcgatgagaatgatcccacagcgtaccacactcgaaactggcgcattcgaaaaaatagaaaccttgagtgtaatctcacagcagatggagcagccaaatcactagtgggtagatacccaacacacgccagaacaaagaaaaaccaaggaagcagtttttctttccattttaattataccagcatcaccatagtacctatatacttggctaatctagcatcctaacctccaggcacgaaccaagtgtggaaagaagaagagtaaatgattcagcaacgcaattgcctgctcctttgcagtagtgccccgccaaagcaacagattgagcaaattccaaagtgatccagctaagcaattgcttgtagtcgtaaagcac

SEQ ID NO: 22135 - DNA, 513 bp, Zea Mays
tcggtgatagtgaggtccattggtatgggtagaaaactatttaaccattagaaatgggtatacccactagtgtagggaactccaactccaagcacctccccattattgcttgatcgttatccggtgggtttgggcaaatgtgtatggaggagtttgcggagggtaacaaggtatgcacaatgatgacctggatttgggtgtggggaagtactggtgtgcccaaaccctcttcagtggcaggtatactaagctactaactcatatgtgccacatgctgcttgcccttgtcagttatcaaccttgttagttctcctgtttcactcaacacctgctgtggctttcctcatgaagttctcgccaggaaatttgagactatatattaagcaagcgtcagacagagtccaatttgaacagaaaatacagatttgttcacttagcagaagggaagacaaaatgagtaaactgaagttcagcataattgacagtttcagatcgattacaaacacatttgtc

SEQ ID NO: 22136 - DNA, 884 bp, Zea Mays
caacaggcaggttgaacgagctaacgggatgatattggaggcactcaggaaaaaggtcttcaataaaaatgaaaagttcgcaggaaagtggataagggaattgccctacgtcgtttggagcctaagaacccaacctagctgagctctgcatgggaacactcctttcttcatggtctatgggtcagaggcagtactacccgctgatctcaagtttggggcgccaaggttgatctttgaaagcatagcagaggccgaagccactaggctggaagatgtcgatgtactcgaagaagagcggctgaacgcagtaattcaatcgtcacggtaccagcagactctgagacgctatcacgacaaggtcgtgcggcaacgatccttttcagtgggagatctcgtcctccgctgaattttaacgggggagggacggcacaagttatcgccattatgggaaggaccattcatagtagcagaagtcactcgaccgggatcatatcgtctcactcaaatggacggcacagaaattgggaactcctggaatatagaacacctcaggaagttttatccctagctgtatctcaaaagctatcgggacgacaatgtactctataaaatgggaaatatgtcatcaataaaaaaggcttcaagaatactcagtttgttcatgattgacttgcgcgcttacttaactcggggtgaccactatgccctgctaacggagcaatcagcttaagtcggcaacgacttaagacggtgcaacatgctcgcgcttacttaactcggggtgaccactatgccctgctaacggagcaattggcttaagtcggcaacgacttaagacggtgcaacatgctcgcgcttacttaactcggggtgaccactatgcc

SEQ ID NO: 22137 - DNA, 447 bp, Zea Mays
gaggaacctcccctgcatgatgcccggcgacgaagaaacagacgccgaaatgtgcggtgacatcgtgaagctagggaacaggacccagcgtagcccatgtcccgagacgaagcctcagaagtggggtaaactcccgacgaatgagtacaccgagaaagacgcaactctcgccgtcgtgatcgccgacagtctcaggagcgagagcgagagctggctgagcaaggcgctaggctccagcgagagaaccctctcctcgctcgaaacctgtaccccgatttcgctcgagcactaaacacaccgagtgaagttggaggagtgctgggcagatagccaacggccttccgcgaaccccagaagcgaaaggttaccgacggctgcttactcaggcgggcaatcatcttctacccctcgcacatcccgcgaacgacctgcgtcacgccatcaaca

SEQ ID NO: 22138 - DNA, 564 bp, Zea Mays
tggcgcgcaagttttcctagactcaggttgcaggcgccacgatggcgggttggtttagggaaagccgaggggctcatacgtaaaatcgccatggcgaaagggtacaggctaatcagagctgttcgatctcctttcagaggccctgattagatctcaataaaatagaactactatgcgctggcagccatcgaatccggaatccatggcacaaatgccatccatcacaccacccagccctggccattggatttctaatctgcggtcaagatcgagccgagtcgaaccggtacaagcctctaatcctagccgctcatagcgagatctacggcctgccaaccctcttccttatcccatgcccagacgcggcgacatgtggccaaccgcggtggtgccattgctggggtgcgagctctggcaccccctcggtccgaccttgaaaactaatggttctacaccaagcgcgggttatgataagcatggcagaggttccttaccgctagaatggatgaaggcgaggtcggccgacggtgttgcgctgcttcgccctgatgtgcgacatcggcg

SEQ ID NO: 22139 - DNA, 398 bp, Zea Mays
cgaccgtggttgcggaaaatgattcgggtgattctgtgtctaagttttttgagtctgatgattctgggagttcggtggtgtggatgaaagagtcttcggatgaggatttggattattttgcggcattagatgtggctgcggcggaggcttctccgcgagtgttggatgctaaagttcccggtccgagtgctgggcgtaggcggcgaagggttgtggcgaagcgtagggtgagtgaggtggagggtggtcgtcttcgtgtggacagggctggcaagcgggaattgttgtcctcgccggctggggtgagcataggtgagggggagttgcgaagtctttttgagggtgaggagctgaggataatgttgtttaactatagggagatgggtatcatcccgaag

SEQ ID NO: 22140 - DNA, 954 bp, Zea Mays
gtcactttatcgaaccggtatggaataggggtcactcgatcaaagatcgacggtccggacacaaaataaccgcgacggattcctacgcttgtgattcctatccaacggctcaccttatcctatcaccaacgttatccccgatctgatctgagacgtccgctacacaatcaacgacactgaaccgttcttctctaatagaagcccggagacggcggcgcgacagcaccgcgcggcggcgccatgccggtacacgcgtccacgctccccggggaccaataccgatcgctggctaccacaaaacgtagcaggggctatggcgttcatgatgacatacctttccagcgttcattgcaatgaaggtgcttggtccacggtacagcgcggcaccacgtcgacgtatagtttccagccatgaatttccttcgcgctgatgcccttcacgcccacacatagctccctgcttgggcgcgcagacgagaagtgctcattgcggcatcgaccatccttcacgacttctctctcttctactcgttctgtttgacgatggcgagggcactggttctatagaggataggggtgcagccatgactggttttatatccacgcgcagggaccgataaggatactggtataggagtcggttgcgaaaacccggcggcctcggtgctgagtttgcaacaaactagagctagatacgtgaggaagatttggtctgaccgcaagggccacgtgcagcgacataccggaagagaatgtgtaggagctgttgacgccgtgctggtgtaaacctaatgcaagcatgcatggtggccgaaaaaaataatggccgtgtaggccgtggttgagtgtcttggccaaaacctcgtttccctcctttttcttttgccatttcttttctatttttttttcttcattcaactttaattcaaatttggatttctttttgcatttcca

SEQ ID NO: 22141 - DNA, 305 bp, Zea Mays
atgagcagcttcgagtttttggatgtgcttgctatctgaacctcgctgccaccgcaccgcataagcttgctccccgctctactaggtgtctttttctggggtattctactgagcataagggttatcgctgtcttgatctatccacaaatcgggtcttaacatctcatcatgttgtctttgatgaggcttgcttccctttcgcagcctcgcccctcgaactaatgattttgattttttgtctgagatggatctgatgccttcacccatcgaaacacgtcttctacctgtaggtactcgttctgttg

SEQ ID NO: 22142 - DNA, 831 bp, Zea Mays
ctgcggtttcatagagtgtggcacatgcccttgtggtatgggcactgagcgtcaaggatttcatccagtgttcgttccccttcgcatggtgcaccacgagctcgcgcggcaggtggcccggtgacgtggacctcctcactgggcctcttctcctagcgcctatctggctgctggtttgtgtcacgccatggcatgggtggtgcaggtttcgtacctctgatgaggtcctgtgcccgctcatctgcgatgatgtagaggtctgcctctcaaaatagttgtttggaggtggtgggcgctttctgtagtatggctcggacgaaggccgagtcaatggatccctggtagaaatcttcaatcactgctgcctcggcgacttcggggatgcggttcctcatggtctgaaacctcttaaggtatgagcggagtgtttcatcgccctggcgcctgatggatttgaggtcccatggctgcaccgatttgtcagagagagactggtagttggcgatgaaacgccgactgaagtcgctctaatcgtcgatgcaatgtcgtggcagacgtcggagccactgcagtgcgtcattacgtctttcgttgccccaacggcccaggcggaggtcgtgtagacggccaaccagcctctcgggtcctgcttgggctcgtacttgtcgacattggaaactttgaagttgggggtcactagatggcccaaagatgcggagtaagcgcggagacccccacatgtgtcttcctgtcggcgttcgtgaggtcggtcccggggaggggagctggtggtgtgtcatctcgaccgtccccgggtcgggccactggtcg

SEQ ID NO: 22143 - DNA, 313 bp, Zea Mays
agccagaggtggaccgacgtgtcgaaacagccaacccaattagcgtcagtgtaaacgactaacttagaagtcggagagggtcgaagaagaaggcggtagtcaagggtgccacagaggtagcgaagaatccgcttgacaacgatgaggtggggctcctgcggcacacctgctagaccgcgtatgcgatgttgggctaggtgaagatgaggtactgtagagccccgactaagtttcggtaggccgtcacacatcgttgaccagggcgtcgtcgtcgtcggaaaccttcgcctgagtgtcaacaggcgtggatcag

SEQ ID NO: 22144 - DNA, 422 bp, Zea Mays
cttgaactctgtaactgtataaaggcaactcaagactgctcagtttagcatatgattccagcgagcttttgtccggaaaggaggcactaaaatcatgtttgtccatcctcctaaccctaaaatcccagttagcttgcaccagatttttaagctctctgtccaatttctcttctgtgggttccccctcaagaatgtgaataacagcattcaacatattcacctgcacttttttctcaggaatatcaaaaccaaagaagccctgctccggaattcaaatccaaacaacctaagtttcttgttattttggcattccgccgccatatgcccagactctttacatttgtagcatagagggtcattcgggcagtcagcttgatggtgtccagattgagagcaacggaagcatctaatctccttgacca

SEQ ID NO: 22145 - DNA, 523 bp, Zea Mays
cggcgggttgaatacctaaaagtatagggtctctttagtgaaatggcatggcgaagaggtatgatggattctgagccatccgatcccaacccaagggcccagattagacctaggttattacgaatcggtactcaccactggtcaccggattccaatcgaacgatcgagattttatgaacggaaatctaatcttaagcgtcgatctggcaaccgagggctaggatcatccacagacgagtcggtgtgctggctgaatcaccaccgttgatgaatggatcaacggtcaagggcttacttcttttcctttcaatctagagcgctcatcattacacggacggtccccgctcatcttcaatctcacgacaccaggccgcgctggtgcccatcccggcgacggtggtgcacaccgacgcacggcatcccagcgaaccaacgccctgaatccccgcctgacctgagctacaccacgctacacgccccaccagcctgttgggaaatcaattcctacagtgagcctacgcag

SEQ ID NO: 22146 - DNA, 591 bp, Zea Mays
cgttgcatgaaaaattaagatccaggccttgcaagttgggctgtcaggctgactgaagatccgtcccatagtacagtaccctaaaaatatcccttgtgcactgaatgtcgccgccaacgatctccgcggttggattcatgtcactgttatgattcgtgctcgccagtgccggataatgctcccaggtgaaagatcctggcgatggataaactcggacccaatcgacggggagttcgccgcatctgctcggattgcagtcgatcggattggttctcgtcggtgttagctgtttaccgaccatgcgccacgtgcccgagcatcttaccacgtcgcagatagtcatgttaagcgtatccggtgatcgccggagagcttgccacggtaatagacaccaatcacgcacgctagtgacctcctatttctccgaccgccgcgtgtcttcgtccaattccccggccaccactcatgtctactataaattgagcacgtcgtgagcgccgtagggtaatcacccatccatagtaccaacgtgtgtcttcaattgtccactagagaccgtgaatcgctcatttcccccaatctgtgtttccg

SEQ ID NO: 22147 - DNA, 793 bp, Zea Mays
gaagggtcgggtgaggatggggagcctctggcggtcacgtcaaggtacgggtcagtgccgatggtgcccgaagctcgtctttccacagactcaggcggtggagctcgtcggcgatgtatgtaccggccataccacggcggtagagttcaatcagaccacataggaagcttcactgagtgacagggagtttgtgtgtgcaaggaatcgatgaatggctaggtagattacctggaccgagggaaccgacagaagggacaagttcggcaaggtgttttggcttctccggcgaggtagtgttcgatatgagtggctgggaagcttcgctagtctctggggaagctggccggggagctagactggacagggataggctggagtggccgagctatggtcggtgttctagcgattaccggcatggtcggtgttctagcgattaccggcgtccagtcgccagcaaaaagtatggggcatgtgggagggcaaggctgaggggttggggcttcttataggtgagggctcaggctcgggcgcagggctaggtgagttgtcaagccggccggagctcgtggcatgtgcgggcgcggtcagagcgcactccctagtgccagccgtggtcggacatgtggaggatcgcttctgcccttgtccaagcgcatgtttagctaccctagcatgcatatcttggcaaggatcccatgtagggtctcttccctgctccaaatacttggttttccatgtgagtcctgagctgagatatgcttagggtgaggagaaatgccagtgtcaagtcgag

SEQ ID NO: 22148 - DNA, 393 bp, Zea Mays
aggcagtgctacctaccaacctcaggtttggggcaccaaggctggtcttcgaaagcatagctgaagcggaggctaccaggctagaagatattgatgtattggaagaagagcggttgaatacagtaattcagtcagctagatatcagcagaccctgaggcgctatcatgataagactatacgacatcgatccttcatagtgggagatttggtccttcgccgaattctaacgagagaaggacgacacaaattatcaccgctatgggaggggcctttcatagtgtcggaggtcactcgaccaggatcatatcggcttactcaaatggatggcacggaagtagggaattcatggaatatagagcacctcaggaagttttacccttagcaagaactat

SEQ ID NO: 22149 - DNA, 691 bp, Zea Mays
gggctgacctcctagggatataaggccgtaagactagcgcctaaccctcatctcaccgacgtatcgccgaccccgccgccattgactcatagcgaaagaaaccgaggttgggggaaactctgccgccgttagcattggcgacttccagtcttgatactgccctagtgtgtagccgagggacttcgcaagcgctccctgcgtgtattcgtggtgtcttcgtgtggtaattcatatcgacgcgagggaaattgctcattggcgtcgggatttcgctgccggacgaagctctccgtggccagggcctcccactccgcggttgtaggtaattcctctctccctagctcgaattaacagtagcaccatgtattagctattagagtcgggtttgggtcacggggggaggtcaggactcctcatcagagtaggcttttacacatcaccgcccagcgccgtcgttagtgcaattttgggcttagtctgcggcattgatcttgtaaactcgtgcacccagtcgcgctcttcgtatttattccatgcgcgtcgaagttcaggcttcggggagagattttcatgaccaccggtcaaggcaccgccgtcggagctcggtcgccgccgtgcacggtctgagggtagaaggagggtcgtgcaccatcaaattcactgtggacggccggattaaatctaggcgtac

SEQ ID NO: 22150 - DNA, 620 bp, Zea Mays
cagatacgcaacacgaagattgaatttatgcttcttgaagcagtcataggcttccactccttgccataacttctttaactcttcaatcaatggttgaagcatcacattgaggcgtacgccaggatgctcaggcccaggtataacaagacataggaacataaactcatatttcatgcaaagagcaggtggaaggttgtacgatatggcaatgacaagccaacatgaatatgacgcagcggtcatattgaaaggtgtgaaaccatcagttgccaagccgatacgaacgtttcttgcatcgctggaaaaatatggatcaaagttgtcaagagccttccatgcatcaccatctaacgggtgcaccattaacccatcttgtctgtctgtacaatctttatgccacctcatgtgcataacgatcttcctcgagagaaacaaacgtttcactctaggagtgagaggcatgtaccgaagctgtttatgtacaacctttgtcaccaccttctccccttcttcatttacaagctccacgtacctcgacttcgcacattttaagcatttctgctctctgtcatgttccttccaaaaaagcatacaattgtcctcgcaaacatcaatcttct

SEQ ID NO: 22151 - DNA, 1893 bp, Zea Mays
gcgagatccctgaaggcttggccaactgctccaacctcgcgtacctgagcgtagaggtcaatcagcttcatggcgggatccctagcggtctgggcttgctgtctcggctacaagtcctgtatgtcggcgagaacagtctgacagggcatgtaccgccatcgctcggcaatctctcggcgctgcagaggctggcactgtatcagaacaagctggaaggagccatcccagagggcctttcccgtctgaggtatctccggtacatccaggcggcgaggaacagcctctccggcacgattccgcctcgcttcttcaacatatcctctctccagtacttcggtttcagctcaaacaggctgcatggtagactgccaccagacgcaggcaggcacctgccggacctccaagtgctccttcttggtggcatcgggaacaacttttctggaacactcccggcttccctctccaatgccactaaactacaagagcttggtcttgctcacaacagcttcgaaggaaaggtgccgcctgagatagggaagctctgcccagagagcgttcaattggggggtaacaagctgcaagctgaggacgatgcggactgggagttccttagacatttcaccaactgcacccgtctagcggttctagatgtcggtggcaacgcccttggaggagtgcttccacgcttcgtagctaacttctctgggccggtgaatactctgatcatggagaagaaccggatgtctggatcaatccctctgggtgtcggaagcctcgttcaccttgaagacctggaattcgggggaaacaacctgcgtggtgttatacctgaggatattggaaggcttcggaacctcaagtttttcacgctggaggagaatctcctgtcaggaggtatacctacctccttcggcaacctcacgcagctgctcagccttttcctgtcgaacaataggctcaatggctccatccctgagaaccttgggagcttgcgcaggttaacgtccatggcattgtccttcaacaggctcaccggtgcgatccccggagcattattcagcctcccgtcgctagctgattcattgctgctttctcataactacctttctggcgtacttcctccacaaatcggtagcctcaagcatgcgacaacattggatctgtcaacaaacaacttatctggagaagtaccaggagcgcttggagactgtgcaagtctagtatacttgtatctggatggcaatagcttcactgggagcatccctccatcgattggtaatctgaagggcttgagcacgctgaatttcacaaggaacggtctgtccggtagcatccctcaggagttgagccagattcatgggctgcaaaggctttgcctagctcacaacaacctgtctggagccattccacagctcctccagaactcgagcgctcttgtagagctggatctctcctacaaccatctgggcagcgaggtgcccacacacggggtgttcgctaacatgagtgggttttctgcaactggaaatgatgggctttgtggtggcgttgcagagctgaaattgcctccgtgtgaggtcaagccacacagccaccggaagcggttgcgactgaagatttttcttccagccattggcatcgctatatgtttatctcttctattggttgcgctccttctgttcaaagggagaaaagggtcggacaggatcagtgctacgcgaaaccatttgttggagaacaagtatccgagagtttcatacctccagctctttgaagcgacggatggttttgcccctgctaatctgataggagctggaaaatatggatctgtttacaaaggaagactgtctatcacaggtgttggggattctgtagtggctgtcaaagtgttca

SEQ ID NO: 22152 - DNA, 329 bp, Zea Mays
cggggaaggaacttgggtacagagccagctgatccgtagtgcccacatgctcggcgtcgtgactgtgttactgtcgtcgtgatctgtcggtcccccttgctatgccatgcgtagtcttgtttcaccccgtcattgtgagcgtggtgagtggtgaaacaagttcacgagtcactatggtacctgcgcgccacggtgaatacgctgtcatgaaatatcctaccgttgtcgtaggtgatcttatcccaaattcacgaagccagtgaccggtccctttaaattggagactctccctgctccgcctctctgttacgcacccaacacaacctcag

SEQ ID NO: 22153 - DNA, 533 bp, Zea Mays
atcttttagcatccacccagtctttcatgtctcccagttgaaaccctttgtctcatcgagctcccaggtaccattgtcacttcttgatgatttgacattaccccattttctagaacacatgctatagacacatatcacctccaagaactccctgtcggtgcaacaaggactcattcagtggtcacaatggccgccggaattggcaaattgggaagatcttaccagcctcaagcaagcttttccttttgcgcctgcttgtggacaagcaggccttcaagaatgggagaatgttagtactgctgaaccagtcgcacagcaagaggatgaaggacaacagcagcattccaatgagcgtgttgccaggcccaaaataggagctcgtacgagaagacccaacattcatgtctgtggtcctgaatggtgtgtgtcagtgcttgaaaacactttcaggccgagttctgagcccatgtaatggagagtatttagcctaaagagagtgtgaggaaaagatcatcatgtaacagaacagaaat

SEQ ID NO: 22154 - DNA, 1456 bp, Zea Mays
gtttttcatacatgggcaattcctgttgctttcaccacatggcccgtgtatcatgaattcgtcgactaaagcataaccaagtgggtcagtgttcacatccggaatctcagcgcatataaaattgtcgacaatagaagcatcgaaatcctttgcgccagcagccaaccacacaaggcaatgtatatgtggcaagcctcgtttttggaactcaacagtatacaagaccgcgagaactggtccgaatgtcacgccctgccttatatcagctatgaactcatcgactttcatatggaagactcgtacaactaagtctgaacgatcgcatggttgctgacccggttcgaagcgcaacgcatccgcaatttccctccatttggggttgcatgtgaaagtcaaaaaaagatctggtgggccgtacactctgcaaatagccatcgcgtcttggtaattcataacatggtatcgcctactgccagtgaaactcgcaggcacaatcactttaccgccaacagcgtccgcactaattagccctctgtcaacggcatcggctattccttgtactgattcagaccgcaggtctttttgatggtcggctatgaattgtaacctggagccctcgatagttgaatatgcatcgacaatgacctgagcacttaacctaccataacacgtgtacgggtttgactcgtgtaatctgtaatgtaaatgtcttcttacaaattcaagcattgttacgtattttcgtttggtcccaacactgtctttatcatcgcaataccgaatgccaagatggtaaccattttcaccatacggaaacaacagagggtactgcaaagccatgtaggacggatgcaagcatgagacacgtcgtaggccgcaatttctatcgtgcacaaggacatcatatgtgtattcatcggcggtgtagtcgccgacaatgatggcaacgacttcacctctggagggaagattgtattggacatcttgtctagcatcacagcctaacagcctgagtgttatcctctggttacccgcttgttccaatcgctcccttgcatatcgaaacgctttgacaagtttgttattgtcatttaacatggccaacaaagccatagttatttcacgttcaggttgttcagcgacaccatcatcgacctcgaacatgtttagcctattctgtgtctcgtggtttgtatcatgaatatacaattgggcaaatttaggcatcactccacggcgtggaagcaaggtgccgatacgatgatgtactattccatttatcttgaaaacataaggcgcagtaccattgtttatcgctttgtctatagcggcaccaaaggaggtgaaggcaaagagtgaattgtacgcgcgaataagtctcaaaaatcttttcgagcgcgcatcgccatcaaacgacaagagatcagcaagcacagatggcggccttttgtaaggc

SEQ ID NO: 22155 - DNA, 559 bp, Zea Mays
ccgaaaagctatacgcagggaaggacgtgacagacaacatggaagggtttctcacctgcaagagattgcggaggagcctgcccacgggcgaggggaattcacggtggagtccaagattcagcgagcaattggtgcggccacaatggtcgatccaccccgccacggccacaggagccatcctagacacactgtggagttcccaggtctaacttcgaagccatcacggtgacaaggacgtaggtcgacggcgcagagcggcccgcgcccattcaactcccactctgattggtgaacatgaggtgatctgctcatggcggctcggattctcgataggatagccaggaggggcgcagatcagcaatggtgtctcggcactagcttaaggcttcggtttccaagcaacaggtatggcactcaagtggtccgggcaaaaaggaagggtctcagattgccaatcgtcgagtggtggcgcccgatccttaaggtcagaaggccgcaccatgcacggatgtcgttgggcgtggattccatggaggcgaccgcggcgctcggttgagat

SEQ ID NO: 22156 - DNA, 507 bp, Zea Mays
tttcccctacattgttagctgcaagcaaggcatatgtttcatcatctaaatcactagcagaggagtacccaccattagctattactacaagcactcgcttgcttgggcagtctttgcgaatatgaccataacccttgcattgcaagcattgaatatctcgtgtacgcctagttgatgcgacagagaacgaagtccttgctattgtggttgttgttgcttttgttgtgtcaggtagacaggtaggaatcgatgtagaagagatatgttgcttgctgtttgtaggggttattgtagtctgacctggcggtgtactagtgttgtgaggtatccaaaagctagcacgacctgcaggagtgttagctagtgtgcttgctcgacgtccatgtacctccctttcagctttacatgcaagatgaataaatagttcacagaattatattccttgtatgctaggatatcttgaatttctcggtttaacccactcatgaaactatccatagaagcatc

SEQ ID NO: 22157 - DNA, 450 bp, Zea Mays
ccaagagaccctcttccacccacgttagcagactaggaggcgccaccagtacggcgacgacgaacgccggtgagccctcccgactcacgcactcaccctaatcccataatcgaacgcggatacactatgtgtacaccaatgcgaattacatggagaagtccttaccgtgcgccacgcgagcaggagcactgaccacggcggagggcggaattgcggtggttcctctacttcggcgagaaattgccgcgcgactgcccaagttctggggggtaaggtcatgacaccattgggacacctctacgaccctcccaagccatctatcgaggacagagcgactctggacacaagccgtcgacggcgctcttccgcttttctctcttcctgccgctcccgagctccgactgcgtcactcccctcccgatctctctctcacgctcggtcgcgggtagc

SEQ ID NO: 22158 - DNA, 593 bp, Zea Mays
tagtcatcggtggcacggccgaagcaggtaccttgtcactgttagcgactgagacaagaaggtcgaggtagttggccaagcaaaggccaatcttagtcacgacggtggcattgaagttgtgtgtcaacctcgtgtccattagagcagtaagctagtgcccttggatgtcggtgacgattgcattgtgtccgtcgtgcgcaacccgaccatggcatgtagggagatgactaggggatcggtgtcaggaacctccatgcacagtggtgcaatgtcatcgtcgttgtcgatcaccttgaggtagaggcgccgagagtgatcaccatagacgaacggctcatcatagttgtagcataggccctggcgtcgatgttcgaccatctcgtctacggtgcgatgcttgtacacctggcccagcgtaggagctaaagtggtcgaggaaggaggggtaccggtcacgccaagtgtgtctgagggatggggcagtgctcgtgggccacgactgcccctcgttgtcacgccatcaagggtgagcgtgtgccgcttgtaggcccaaaccagtgccatggaagacttgtgaccaatagttgtaccta

SEQ ID NO: 22159 - DNA, 329 bp, Zea Mays
gaggcaactgaggcgaggcagtggcagtaggagtgggggcaccctcacgacggcgtggaggatgacgcctgcacttctcgatggtatgcgtcgttgccttgcagtagcggcagaagacagctgcaacaacgccccctggagcaagagggactgctgcaggaaccgaagtaggcgtagaaactggagcaggcgacacagtcggagcagcaagaactgtcgaggaagacgacaacacaccatggagacggatctcctcagctcgggctaaggtgaccgcctcaaccagggatgccagaggagaacgagtgaggagctgagcccgaagctgc

SEQ ID NO: 22160 - DNA, 315 bp, Zea Mays
cgatgccaacggccgtcgcccaggggtcgcggcggcgaccgccggagttgcgctacactgtgccatgatgccccaaaatccgatccaagaggtgctttacaacgacggcacgaaggagaaacgaaggggagggggtctcacctagcatgggcggtgcagagggctccgcccacgtcgcagggcgatattgcggcggtggcttgatcccggtgagcaattggtagcgctcgggtagactacatcgctgtgaagtccacaaccatgtgcagcgtgccaccgtgaaccttcttgagtactttatcagagatagacgcg

SEQ ID NO: 22161 - DNA, 401 bp, Zea Mays
aaacggagcaccgagcgaaaagttatgcccgttttatggaaggtacctcaagttatggttttcaagggcacaaattgttaggaaccgtagcggcggctatagagcacatggcacaaacctccctggtataagcaataggtaagcgccagatgatgaaacaaggaggggctgcaatgcaatgcggcttgcaacctaatctagtgctagcgtgttgagaattcacacaaggcggctagcgagggcaaatcgagtaatgtggtgtctcgacttgtaatctgggtaaggtggatgggatagcggcggaaacaaataacagcgatggagcggttgaactacgatgacgacacgacctaaaccagcaacaagactcgacacagacacaaactcaacaaagcaatctt

SEQ ID NO: 22162 - DNA, 532 bp, Zea Mays
gaggatccccacctgattttcattcagttcttttcgcccaaagcggctagagtttacagcaagctagcagcattgtagctagcatagttacagggggagggcgaagcaaggatgagattacgtaataggattagagaacaccaacaaccaagcacctaatacttgtgcctctttcctgttgtgcctgtacgcccaagcttttgcttcagaagtgcatgaatgtaaagtggccgcaagagtggcatgatcctgacgaaagacgacaccatttctgtgtttccacaattgccagcaccagaggaggacaaaggagttgaattctgcacccggaaggcgatcagggcgactgatgtttggcaggtcctgggtgcccagatcatcagcgacagagaatccgatggagctccaaaattggcgtgcaaacgggcagtggaagatgatgtgcgaaggagtttcactgtcttggttacatatttcacaacagtcatcatccacaatccctttttcttcaggttccatttgcactgaattt

SEQ ID NO: 22163 - DNA, 554 bp, Zea Mays
tttaatgcgaatacctaccccacgtgatgccgcagtcaaacacagagcgatgggactgcggtcccatccactttcaccaactacgatgacgcaccccgagaataatggccactgctcccccacgccgactactgtgctcaaacaactctggatggcatggtctcacctcgggagggaactccacctcgcccaaagtcggccttaacctcgaagaaaactccgcttcgcccaagctcggcttcggccaactgccccggcaacaactccccgtgaattccgtaggtggccactccgacaactatgctaacccctccctgtaccactgcatgccccgaggcaggctcaaccaaggcctcaggaggaaccttggtcttgcccgagcctggcctttgcctagataacatcaaccaaatggcgccaccaactcctccacgagggatgctgacgacgggatggctacaggaccgatgtcaaatttgttttatgccatacgaggagaattaccatgcatttttcaccatacttatcgttgtttcaataactacgactcgaac

SEQ ID NO: 22164 - DNA, 329 bp, Zea Mays
caattctgaagacaagtcgaccacgaagtcctttcgacagtcgagggtgagcttagtggtctgagcaaggttagtgaggtgtgccatggtgtcgctctgcaggcctgtagacggtacagtgcgctcatacactgaacagtgatcctcccaacttggtcgggatgcatggcccacacgtccttcatgtggctcacttggttgcaccacatggggtcatccctcttctcagcggggaagagtcctagtgggtgcattaccatctccaagggatggtatccgcagaaagtcgtcagggtcttcatagctacggccttagtggtgtcgtccgc

SEQ ID NO: 22165 - DNA, 646 bp, Zea Mays
caagaatgtagctggatcatcaggcaacaactttgttacaggcagattagcaagttgtcatgaaaagatttgagatctaggccttgcaaattgggttgtcaggcgcattgaatagagattccattgtatagtgactgaaagagatcgcagattcacccccctcgccgccggtgatcttgcgcccagatccacaccggtgttgtgattcacgcccggtcgaacacagatagcgctcctcggtaagaaatatcgcgctgtagataaactccggccactgttctcaccggccgtcgtgtcccatcatggtcaatcgcgctggcatcaccggcgttcaccattatccggccaggctacgtgcctcgacactttaccacgtcgcggtgagtcaccataaaccgctctatagtcctggctcatcgccggtgggtctgccacggtgaaggccacgaatcaccacgccagtgactcggttcccctctcgaccgccagtgcaattcgtccaaattaaacaccaccgctcaagcacactataaattgagcacaccgacgggtccgtagggtagtcacgcaccaagccacctagccgtgcctccaattgttcaccagagctcgccaattccaaatttcccccaaatctgctttgcac

SEQ ID NO: 22166 - DNA, 593 bp, Zea Mays
aacaatgttaaatgcaactaaccgactaggggcgtacaatagtttcgttttaaaaaatctggggtgaacacgcaatgcctaaaaaacaagggcaaagctacagttacactaaaaacaaggggcactgacgcaattgccccataaatgattatgcatgaacacataatcatatcaacaccatttaagtggcaccaaaaatttcttcttcatgcataagtccaattttgtccatctagaaagtttgtctagcacctaaactttcatatttcatcgtttaaagggtcgttgaaccacatattttagtgtttacatgtctctaaccacaattttatatcatcattgaaactgtttttaccagtttgattgtttagatatgtttagtgtttagtttaataactatggcttaaactacacgtgtacccactgtttatcatgtgtgtatgcagttatttaaatacatttagatgaacatgacaaaaaacatgaaagtctcacatgtatcaggtcctttactctttttttgatataaacgtgtataaaatcctatcacaacattaattatattacgatatgcatctttcacgtacttaaac

SEQ ID NO: 22167 - DNA, 508 bp, Zea Mays
gtgccggtacaccatgatctcggtcgtattcctcccggtgccttatttcatttttgtggcgacgatcacgcgaagcactgatgttgctacatgcgtctcgtcggctgttgatggcatgacgcagatcgttcggtgggtgggcgagaggtagaagatgattggccgcctgagtaaggacccgccgatagccctccgcgtctggggttcacgggaggccatcgactatctgtgccaggacccctccaacttcgctcggcgtgttcaacgctcgagcaaagtcagggtacaggttttgggtgaggagcggattctcccgtcagagtctagcatcttgttcagctagctcctattcgcgttcctgagcttgacgacgttcttgacagcgggagttgcactgttctcgatgtgttctttcatcaagggtctccccatttctgaggcttcgtcccgagagacgggttgagccaggtcccattctccggcttcatggtgtcatcacatgttttgg

SEQ ID NO: 22168 - DNA, 309 bp, Zea Mays
gtaaaacttatacaaacatattaaattgataaatgagattcatatatttaatggaaaatgcaaaacaacatcacaaatatgcttacaaacgggcataaaggtatgtgaacgttatcatatgcatgtaaataaatgattgacacataaaacaaataccgagcaatgtccaaatgcttcttctcctttgcgtatcttgcccttgtcagctcttgtcaaggcttgaataatattcctatcaaagtatttgattcgtggtgttccacgtttgttctggggtgccgctgagtcatgcaaatgatccaaataata

SEQ ID NO: 22169 - DNA, 937 bp, Zea Mays
agcctcatcaactcccgccaaaatgttgaagtgaacacggaatccctgtctgacaccatggattgaggcatcccatggaagcgaacaatctctttgaagaacgcttgtgccacagactcggcactgtaggggtgagccagtggaatgaaatggcaatatttgctgaaacggtccaccacggtgaggatcaccgacttgcccccaacccggggcaaagcttcgatgaagtccatgccgatgttggtccacacgacatgtggaatgggcaggggcagcagtagtcccgccggatggagatgctctgatttgttgtgctggtaggttgcacagccgcggacgaagtcttgcaccacccggcgcatggcggggaagtggaagtcgtggcatagtcgatgtagagtacgttgtaccccttcatggtcgtccccgtgtacagccgccaccaattccggcagcagtagcgagtccgggggaacgtacagccgggtggcataagccaccatgtcgtccaggagggaccacggcgccccctgctacccgcagtaatctcatcacggatggcgacgagagctaggtcttgaagttgagcttgacgaagacggtcgataaagtcgaagcgaggtgcagagagagccaagactgccccctcctcgcaggtatcacgccgggacagggcattgacgacggtgttggcggtgcccggcttgtactcgatggtgaagtcaaacccgaggagcttgcccacccagtggtgttgtgggatcgtcgtgagccgctgatcgagaaggaacttgaggctgtaatggtcggtgcgaacgaggaacagacgtccccataggtacggccgccaatgtaggacggcttggaccagcccaatgagctcgcgctcgtacgctgccaaggagcggtggcggggcgcgaccggcctacctaaata

SEQ ID NO: 22170 - DNA, 353 bp, Zea Mays
cactcccctcccctagtcgtgcccctttgtagagctcccacactcccctcgcacatcgcacgcgcccgagaaatgccaccaccgacgtgcttgcgtgcccattctatcgtcgccagtgaagtctcgtcgggtccatcgcctcagtgagttccgcattggcatccgcaattcgagacgtgcctcaacttaccctcccctcctgattccctccgcccgcgctcaccggtccttcaccgtgtagccggagcaccgtcgccgttgacccgacgtctcgttgtgttcctaccgccgttcaagagtcccagagttctctcttaaggtaaccaaccttcccctatccctaatttcctgtt

SEQ ID NO: 22171 - DNA, 420 bp, Zea Mays
gtggtggttcgccttccccgcactcggagaccagcacaccaactgtatgacttgtggacccgggccctcgtgtcataggctgggttgctttggtgcgcgtcgggcaggattttctgcagcgcctcggggcgcgagcgggagagtcttccttgaaaagggattcaccccgcgtgcagcagttacgctttcgcattctctccaactgctgcggcctttcgccttcgagctctccgcgcccctttgcatctgtgttcttttgcttttcgccgtcgtagtcgccatggcctcgctagtccatcccgagcgtttccagtccgagggggcactcaacctggtgcgcaacctgctcggatggagcgcaccggcggtcgtcggaaggatccgcgccggcgccactcccctcggcgatctcaccgccgg

SEQ ID NO: 22172 - DNA, 594 bp, Zea Mays
gtcgagtttgaagattctccagccaacatatcgagtacaatatctatttctgcatcatctgaactcgccggcatctcaaaatgaacttgcctctcatcattgggaagatcacaaagaggagcaaccagagcctcaatgtcttcaggagagggtcgcactctaagacccagaccactatcaccagaaggagggttggacacaaaattgaaaaaggacttaggagatggcagattccaagcagagtaggcaacaggagcaccaacatttgatactttgcccctcaagatcatgtctagtcggctcaccagatcctcagcaggaattttcctgttggtaactcgagtcgaatcagtaatgccactgtacaaataatctgggtatgctctatccttcaagggctgaatattcttaaaaacaaagtcagcaatcatagcctcggcagtcagacctccctccttcagcagacagatttcaacaagcagaaccctagcttctgttacctccaaggcagtaggagactcaacccaactcagagtgcgcacatctggctgtctccccgaccgaggagggagggacttgccgtggttttccaca

SEQ ID NO: 22173 - DNA, 1177 bp, Zea Mays
ggaggatgtatcgttaagacataagtgtcgaagttcatttatattagtggtcgcgccacattgattgaagtgtctcgagtgcacgccaccatatggttgtatacgagacaaggttatgcacatgatgagtttagtaaaaaaatccatcggtgtctctagtgttaagttgagatttatttgcgcatggaaagtaacattgtgtttaatacttagaactcttagtcgttagtagaaattgtttgggcttatgtagagatgtgatgacatgccgtaagtagtcatcacttcctctataattataagtcgagtctatacgcgttaggcgttcctaaagttgtgcttcgctaataagtgtatgattgtgtttatgacttgaatagatgtcttcgagtgaactgataggttcctaaggcaaatatgtgtaaggtgtttatagtaacactttatcccgaaaggtgttaagcctgcgcaaaaataagagataagtgtacttgttttatgcatgtgatcgatgattgggatagtcgaggcgaatgaggaatatgattaatctggttagagtcactatgctgttgatgccttgtgcgtaacctggggcacgtatgtgcgggtatatgccgtgatatggttatactcgcaacgaggaaggatgtatgccttgggtaacgcgacgcttaggtcgctgttgtataatcgaataaaggctgtattattgagcttaaaccaaaatgtgggaactagtggtatgctaggcaggcggtgttccaaataaataaatcggttgctgtggtagttgtcgtgcgtgatttattgttagtgaatagttgaattacgagttatgtgaaaagcatgttagaaactagtgtgcggcgagaaactgtgttcgtgtggtaaatgcgttaattaaatgtgtatgttagttctcacgcgtgaattaacttgtataaaaattagtgagtctacttgttagtcctcctttattgatttaactctaacaaatggtgaagtgttaggataattcaagtctctagaacgcggcgattcttgaattgtataggagctgaaatttattaatttctgttttgggttgcacgcactgttttagttgtgttgtatgtttgatgaaccaaattgtgttttctgtagatatgtgctatagaaaagtggtagataactt

SEQ ID NO: 22174 - DNA, 355 bp, Zea Mays
gttgttttagagttccatttgtggctgatctgaaatgtttggactatggagtctatagagaaattgaagaccataagttggaggacaaatggccttaagggtgatggtcatgattctacatggaaaatggagtaaagttagttccaaaagcagttgtcaggtttgcactaattgaatgtttgatcagctgctgaaaactgaaatcagtaatggatgcatagtttggaggctattggtgactgatttatgtggttttagattaagagttatatagcaaacttggagaccagtgttaggagagtaatatttaataagggttatgcccttaaaactgcttagaattgggagaaaaagc

SEQ ID NO: 22175 - DNA, 509 bp, Zea Mays
gggagacaataggacaaggatagaagatatacaaatcaaaggtcaaggattacaaaggttgtgcggctacactagctaccgactaccagcaacaacatacttgacggtgtggactctcaactttccactatggcacgatatgctcgacactatggcacatcaaagacgtgcattgtatacgactccacactacagtaagatataagtagttgggcctctgctaggtggaacctgctgtataaacagaaaatataactcaaagaggctctcagaaaggtagtacctttagtatttgttttaaattttcccagttttacctagaaaactatgtaaagccgaaaactttttcaacaagaaactgtttcatcaggatttgtttcgacgtgatttatttaatagaagaagctgaaaaaaaaagttgcctgaaatttccttattatgaaagcagcagggaaaactgctcccagaaacgtccacgtcacccgaattattttggccgttggattcac

SEQ ID NO: 22176 - DNA, 357 bp, Zea Mays
gtttataagtcggaacatctttaccttaagattgttgtaagcgaggttgtctgcaaggtcatccttcgacattgcagagaggccaacctcgagctttgaaaaccctatgttccttgccatctcccggcaaacagatatttccttgttgtccagaaggcaatacaaaaagtcatcttcatcgatgccattatacaccaaggatccttttgggtactttaattccttagcatagtgcttagcttcagcaatatgctcttccgacaactgtttacccgaagcgtgtcgtatgataaagtctagctcctcagtaaacgcttcgggagtaggagatgtaaccttcttggatgcacattcttt

SEQ ID NO: 22177 - DNA, 669 bp, Zea Mays
gaatggagccaatttggacgcgccatatctttggattcactcgattttgacccaaatatcctatagtaagtttgaagacggttgataggtgaacaaactttattaatgaagtttgctctgtccttaacaagaatcaagagattgagtggatggaagggggtcggttcagacaaactctaaagatccagtgcactgaaatatttgaagaacacagggaaaagatctacgacactgtttaatcagatgagctcgagtgatccagtggggagggatcgatccgggggaggataactttggacgtggcatcatcccgcgagctcagtcgtgcgtggctggagatattcaccggcggtcgccgtgactcagtgctttccgccgcggtgtcacccatgccttgctcctcccttactgtacctcttctatacgtggttaccatgcgtaagcaaagccttctgcggtcgctgatcgttagccggaccgccgtggctataaatagcgctatgaaccacggcgaggtattcacatctccaccagtgagttgattgatgcccaaaatttgcacagcctctgccacctcttcccaaattgagtgtgcacggtgaaactatagttccttacagccgtgtagccctaatctcacctcccaattccacctagagccgtcgcgac

SEQ ID NO: 22178 - DNA, 508 bp, Zea Mays
gcatcggcggcaccacgacgtgacacgaaccaacaacccaacaagcgttgggagaagaggcctcacgaagaagtccacgccgccggaccacccgcctctcgcgcccgaggagcacctcgcggaggtgaacgaacattggatgacatcctcgacgcccaatgcccgtaccacaatgacatgcgccacaccctccggaactgcagagacttcaagcactccgttgggaacgaccgaccattccaacctctaccacctcccccaccatgaggaggacccagagaacctcgacagcctcagcaacaggagggggggaggaggcggagcattcccgcgcgtcgacagagaagtcaacgtcatattcggtggacatgggtcgcaagaaagcaagaggcaacagaagctcaacgaccgtcagatactggtggcgaccaccggccctcccgccccgtatcgatggtccgaacacccgattaccttcactcgggcagatcagtggctcaacttcgat

SEQ ID NO: 22179 - DNA, 632 bp, Zea Mays
cggagttcctgcaagtatatgtcaccgccatcacggcagcaggtggaaacaccgccgtaatggcgacatattttcatgtcgccttgtctggacctgcccggacttggctcatgaacctcgccccagggtcaatctacaccctggaagagctctgtgcacggtttgttgcgaactttgccaacgcttaccaacagcatggtgtggaggcccacctccatgctgtaaggcaggaacccagagagaccctccggacgtttatctcccgcttcaccaaggtacgaggtactataccgcgtatttccgatgcctccatcatcatggccttccgacagggggtacatgataagaaaatgttggagaaactggccacacatgatgtggagactgtccccacgctcttcgccctggcggacaagtgtgccagagctgctaaaggccgggcatggcactcggccccacaaactgggaccacccagacgggtggttcgggtgccattccccgggacgacagaaagaaaaagaagggtcgcggctacgagaggctgcagtctaccgcgctggtcgtcgcagctgcgaccgggggccagggcgaccgcaacaaatgcccacgaccacaaaggggtaatggcggc

SEQ ID NO: 22180 - DNA, 1300 bp, Zea Mays
gcacgatcggctttctacgctatgttatcgcggtttggcatttcacattatctccccccacccccaccccccacacacagagtgattctgttgattcttttttttttgttgttgacttgcctcgtaagattcagtttggtgggggctcaaatgattgcggttgtaatataaccaaactgtttgaccagaccgattgggtcagggatgctcatgtattgatttgatggtcggtgtatggacttgctgtccattgcgtttttatctgtgacgataggtggtttttttttctgtttgccactttttccatgtttttgatcgatcttcttgctgcaatggtaatatttactgcggccaattatttgttatgtaaactactggtgtgtttggttcgaagaatcaacttatcctaatgcagtgatgcatcataagtttattcctcagatttagtgggatgacctcattcctcatgctagtattaattattaacccgtgaggaatggtgtcggatcaatggatcacatcattccaccaaccaaacaccccatacaggtatcactaaagctgggttcatggattcttagaaaagctacaagagggtattcatgctttagatataacagaacagtaattttcagtctagttgcttaagcagttaaaagtaattcattcctttgtccatgggcaatgttggttctgccaagaggtaacctgcttttcatgacagtgaacctgttatgcaatgggcaatcttgctcattgtgcatgagggattattttgcttggcatttggacacacattggattgcttgggcttcgatttggcaactctgcagtgacaatatatgtgatgttccttaacatccagtggaatacatgctttgcaaaatgtgaattaattttgatattcaagttcttctctttctatagctgttgcatgtcatcattaggtctgtgcaaggtcgtcatcttgcctgctttcagagttggcaaggacttggataagataaatacaaaatatttcaagcacttgcttgaacattaggttcttgtgaaacagagatatttttttatcgaatgatgttctgattgccggtgttatttttttatcgattgatgttctgaacattaagtaacaaagaattttcctttttcaacatttgtttatttgtattgatttcatccatcattgatagacatcaccatatcaaaccagctgttgactatcttgcatacatatgttaagatcagtttccatttggattggtctcaagctaagaacggtttggctaatagggttcaa

SEQ ID NO: 22181 - DNA, 633 bp, Zea Mays
tctcatcctcccttctagttccagctgttgtgcgcccatggctcctccctccagatgctgcttcttttccttgctgtagccatcggtgcacaaggcacagggaatctcgtggggggcgcaagttgcagggatccatggaagcttgtggacagataggccatagaggaagctcgctgattctcttctccacctgagctatgtcaatccaagtccaagggagcacgaagatgagctcctcctccagatctgactcaatgctgggtcacactcacacctctttcctctgcaccctgctgcaatattgctttgatgcttgatttatattatataagtatatagtatgtggtatgtatccctaaatatatgtcctggtatgtacaaaatgattatatagactagaccaaccaaggttgattagttggcctggtcgttgactgatcgcgattagtcacccagtaacatggcgattagtgataactagccgattaataaccttgctaccatgtatatttgagtcagtaagattcatgtaaatacagcttggcaccagaaacaaaagtgacaatggatatgcccccttgttaataaagagatacaaagacaaaaggtaaaggtaaactcattatgcaatag

SEQ ID NO: 22182 - DNA, 347 bp, Zea Mays
cgaacgcccactatgtgctgcctccaccctcaatctaaacgagagtccatctctagctccttgcgacacgagatccaccaatgataatggatttagggaaaacagttgcatcaacacccccttgctcacttctatttgggtcacgatggaggcaaggcctagcttcaacatcccttcagtgggctcctcccaaacataggctgcatgtgcctactcatccctcatcggcaataaactgctttccctttctattatcgtcggtgttctgtggcctcgagccaccaccgtctttgttgcacccactaggccaccaccttgtcaatgactcatgcttgatgttgtccgac

SEQ ID NO: 22183 - DNA, 713 bp, Zea Mays
tttccctgcataagagtagcaagttgcagatgctgattagcaagcgtagaaatgagtacacttatatatggaacaggagaggaattgatactgaacttctaattaacttttgactagaccaaaactcgacctaaaattagtttgttgggatacaagttgtggttcaactcttcttgctagttagtactgtaggctaactgagtgccagtctgtggttgtgtttgtgtgagtagtgaacagttgagtatctaaaatttgatgcccttctttttctctcaaacgtgtaggaggacatcacatcattgcattaagaagagagagagagaggtccaaacaaaaaacaaccaataaaaacacatggcactcatccaaactacacaaacactaacatcaagttttcaaacgcgttacagtaacattgtaatcaatccaacaacagagcgcaccaagcccctaacaccaccgaaagtgcccaggcgcccctgcatctctcgatagctgaaatttctccattgagcacacaattgttcctgaaaaacctcctcagaacttttggagtggcttctggtctggtgacaaatataagagttccattaccccagttagatgtgaggcacatgaaattgaggttgtccagcaggttctaccttgtgatgtggttcagtttccttgcaaatatttgggtatgtcgctgtccatcaggaagctctcca

SEQ ID NO: 22184 - DNA, 531 bp, Zea Mays
gcgggagcttgtgctcgcctcgttcgcgactaattgcgcaccggagttcatctctgccgcaaagccgccccgtgccgtggacaacccgccttcgtgcccgattctcggtaatttctcccctcatgtgttcgttgttgccatctcttcgagtagcaggggtcaattggggttctggcctgaccattgcgccgggtaggtttcttcgacgggtgcgccgccgttgggggagacggcgccgccgtcggactagttggaggaagggagaaaaggtgatcaccgtccgatataagttaacggccacgattagccccatggataccggttcgatacttaagatctaggtcgtcgatctggcatccgtgggctaggaacggttcggacttcataaaatctagagcgctgctcgctgatccaacgggtacgattgcgtaccggttcgataaagccaagatctaatcctagccttcgacatttgatcgggcggccagtaatgaccaataccccttcggcctgaccgatttgcaaacgaac

SEQ ID NO: 22185 - DNA, 619 bp, Zea Mays
gcctttggtgctgccccaatttctcaccgacgccaacattagccgcgggtccgcacttcatcgcggccgggggtctgtgcggcacaactaccggtaagaaggctccccggacgtccgcctctgtcttctctgcgcgttgctcgcttccggtaggaatatagggctccggggcatcgggcacgccactcaccggcgggagccgccacacgggcagtgggcgccgccgagctcagccaccagggtagaagacagcttggttgctgtcgatcaaatctcggacgacccagattaaatcccaggataacccttcgcgaaatcgaatccgagccgtcaatgcgatcgcaagcggatcagatgccgccgtgttgtgggctgtagatcccagatcgggtggctagggtcgcgtaccgcttcggtctgtacataatctaatctgcaccgctcgtgctggatcggacggatctcgtttgatcataccccttcgccttgacatttattctaaaaacccccttggcttttctcaaatcaacccgccacccgagtcagtgttaagatcattacagagaagacctcggatttacaaaatgaaccccgaactcctgttaaattgtgcctgcag

SEQ ID NO: 22186 - DNA, 579 bp, Zea Mays
agtgagtcacggtgatgcggtagacaggtagagacacgcggcggacggcggtgagggcttaacggcggtgagaaccttatccaagggatcagtgcgcaagggagaggcacgacggctagtcggagtggcgtccagttcaccggcgacgaagattttcctaccccgcgacgttatctatccactccgggcacgaatcgggacgtcgacggcacgaatcgcggtgaggctcatcggcggtgagctgagcgcgcgactgatgtatgtcaggttactgtaccatggtatttctcatcagttcacctgactgagcatctccagagcaattcttctccaatttttgcattgcaacttcatcctctctctgcaccaaagttgcagggctacaatccagctacaactttgctacattgggttcctacaaaaagccactagatcctgcttaaaattaagccctaagttcatgtaatctttctgtcagtctgaatttcagacttcaacagcctgacagcccaactttgggcttaattatctccaatttcttctcaacaactatgcttatactcttaagcaaagttgttc

SEQ ID NO: 22187 - DNA, 1978 bp, Zea Mays
ttaaagcagcaaagaccaacctgagatgctccaaatgagaaggccaagtggaactataaatcaatatatcatcaataaagaccataacaaatttccgaaggaaaggagctaacaccaaattcatcgcacactggaatgtagctggagcgttagtaagtccgaaaggcatgactcgaaattgataatggccctggtgagttttaaacgcagtcttaaactcttcagagggtcccatgcgaatctgatgataccccgaagtcatgtccagactggtaaagaactgagtaccagcaagctcatccaaaatctcctcgaccaccggcattggaaaccgattcttgatagtcatatcatttaacttacggtaatccacacagaaccgccacgtaccgtccttcttttgcactaaaaggaccggagacgcaaatgggctcacactgggggtgatcagtcctgacttcaataacgcagcaacttgcttctcaatctccgtcttatgatgaggagaatatttgtagggtcgagcattgaccggaatagctccagggagcaaaggaatatgatggtcaaatggtcgagatggaggcaattcagttggtgtaacaaaaatgtcactgaattcccccaacaacacctgcaattctggatgaatctcattgctattctccgcacgtacctcctccaacaatgcaaacacctagatatcatttcctcgcagccacttctccacctatagagtagacacttcctccaccacctgctgttgtaccatattgcccaccaactgaacgtccacccctttgtccacaaaggtaatcaccttagcatcccaatcacaattcatcggactgtgtcgacgcaaccaatcatagcccaaaatagcatcataggcacctagccccaacaccctcatatcactctgatatgtatgcccattagcccaccattccaatgatcgtaccatcgtatcactatacataatctccccattagccacccgcaccttagctgatgaacaaggatacactggcagccccatgcgatcaaccaactgcttgctaatgaaacttgtagagctccccgaatcaaccaacaccaacatcacctgattttgcaataaggctcgcacagccatacattcctcatttgtggtcccagtcaaagcattaagtgacaacataaaattctcctcttcccctttctcctcctgcgcaatctgtgtcaacgtttgctccgagagggtcatactcaaatcctcggcagtgagggcatgcaattgcatctggacttttttgggacagcgagcttgatggccaggttcaaacttgtcaccacaagtatagcacagaccattctgcctcctatactccttcaccaatctctccttagacaactcaggtaaggaagtagacccactagtgtcagacctggacacagcactccccaggcgacctggattgaccagcttgaaggatttctgtcgttgtttgtcgaaaatgccttgttggatcctggctaacaacgctgctcgttccaccgaagctggcaaatgagacttaacgggtccttgcagctcttgcttcaaccccttaatgaaatgggccacatacaaagtctcatctaaatcatgattatggacagaagttgcataccgcgcctcatcaaacacctttttgtactcctccacagatccggtctgcctaatttccaacaaggactgcatagcctgtgaatactcctccgacccaaacttcagcatcaccgcttcacaaaattcctcccaggaacacggaccatactgaattttgaaaatctgaaaccaccgcttagcatttccttccatgttcaacgatgccgacatcacccaaaccgactcaggtacccgatacaaagtgaaataatcgacacactgatcaatccaaatacgcggttcctccccttcaaatttaggaaatggtatacgtggaatgggaagatg

SEQ ID NO: 22188 - DNA, 569 bp, Zea Mays
gattggtagctgttattataagagaattctgccagagaaaggcacttatcccaatccttgccatagtgtaacacacatgccctcaacatgtcctcaagaatccgatttactctttccgtttggccatcagtttgaggatggtatgttgagcttcttatcacatgggttccaagtgacttttgtagctgctcccagaaacgtgccacaaacagtgctcctctatcagacacaatagtcctcgggattccatgcaaacacactatttggtcaatatagatctctgcatatttttccgtcttgtgggtggtatgcacagacaagaaatgggttgtcttggttagcctatccacaacgacccaaatagaatcatggtgccgggaggtatttggcaatcccacaacgaagtccatgcaaatgtcctcccacttccaagaagggatggggagaggttgtagggtacctgctaccttcaaatgactagctttgattctttggcaagtgtcacacccagacacatacttagcaatttccctcttcatcctggtccaccaatataaggatctgaggtc

SEQ ID NO: 22189 - DNA, 1234 bp, Zea Mays
gtcaccacatcaaaattgtagaccaatcataggagaacaactttgtttaagggttcaaaccatgatcctatgagaaatttggagaaaaacccaatcaaagttggactgtcaggctggattcattctgaaattcagcttttcagtgtaactgggtcaactttgagtatgaattcaaccttgatccagtgctcgaataagtttaatccctatagtcgagttgttgctggtatgtagcactacaactttgatgcagagacttggacctgttgtcatatggaattgggagaaattagaactccaatgtgctctgtcagttgtctgatggagagttcacgatggtacagtaccctaaccggatcagatcgcccgccgtagaaaagatctcaccgccgatagctttccgccgtgattcacgtcgccggcgtcacgattcgcgctcgggtaagtggataacttcgcggcgtcaaaagatcgtcgtcaccgccgagctggaagcccccccgatcggccacggcacatctcccctggctcatcgcccgcggtaaagtgctcatcgtcgaccgccgcctctcggccgtgtgccgtgtggctcaactctttcaccgtgtcgccgtgacctcctctgaactctccgtggctcaccggagttactgccacgctataggacacgtaatcgcgcgccaaggttcttcttcccctccggccgccagcacaacttgctcgaattgatcgccgccgctatcgctccctataaattgagccccccaccagttccctaaggtcctaagctaaccagccaccttgaattagccccgatcgttcgctgaggtccgtgaattcggagtttcccccaaatccgatttctgccaccgtgaaacaagctcaccgtcaccagccatactccggtcagttcccgtcttctgctcccttgtttaagcattcacatacgtcggtgatacttgccaacccatcgaattgaactaagagccctctggtcgccgggaacacgaccgtatagtcgccatactcacggccatcgtggccagagccccatagttgatcaatagcacaattaagttaggggaaatggttaggctagccccaatttcatgtccgccgctcggagaacccagccgttgccccgttcggccggtgtaagtgctcgccggagcgcggccgtgcgtgaacggcgtcgaggacgtgtcgggtgaagaaatagaacatcaggggcatt

SEQ ID NO: 22190 - DNA, 853 bp, Zea Mays
tcttgtgccagcaacttgtaagacatttgggatgacatcggtagcaacgacaagcacgagggcaaccgatggacccttgcccttagcggtggattaggggacattgctagtgttgttgggtatcgtaattaggggtacctagattacgcgcctaaaacacgcttaacccctagatcaccatcaaggcacattccctgaggtcgaaggatcataagccacgcttcacccgaggccccactcgggagttaccataactctgccttgcccgagcctgccctcagacagggtgtgttctcgagagaatcatcgtcccggtcgaggtcccctctcgccaaaatggcaatctccgcctcgcctaagcccgcctcgggtaaggaagacaaacccagggcaaaactcagccaaagtctgcaggggacaacaacattcaatgtgcatacgtaccccatgcaggtttacaagtgaacaggagcaacaagaccgcggtcctgtcaagcttcaccaactatgatgacgtgtgcggccactattcctgcatgtcatctgccaacccccgatgggacatacaatatgacaaagtacaggctggtccttgggcgcaaactccacctcgcccaaagtcgaccccggccttggcgcaaactccacctcacacgagattggccacagctaactgctgcccgcgaaccccacagaggccactccttcaactgtggcacacacgtcttcgaatcctgggacgggctcagtcacgaccttgggcggacttccgcctcgcccgagcctagcactgaccatgatatccacaacggaaaggcgcctgacgtcaccacatattgtagaactgacgtat

SEQ ID NO: 22191 - DNA, 413 bp, Zea Mays
atatatatagggaggaggtaatggaagcccagggcttccattagtaccaggaagccccagctaggtataccccgcggcgcgcgttcgatcgtgcgcgggttctggcttgggcggatttcagcgtaaaacgtgaaccaaaacagcgtaaatgtgtatgaattttagtgtaaatcgtagatctgttttgtaacggcaaatggggcctaaaattacggcgtgaaaatcgcgcgcgggttctggctcggacggattccagcgtaaaacgtgaaccaaaacagcgtaaatgtgtcgaattttagcgtaaattgtagatcggtttcgtaacgacgaatggggcctaaaattagggcgtgaaaatcacgcgctgagttctggctcggcggataagaaaatcgcgctacaattaccgtaaa

SEQ ID NO: 22192 - DNA, 1198 bp, Zea Mays
atgtaacaaagttagagctggtttatcaggcttcgactttgatgcagagtattggttgagtcatcacataaaatatagagcaaaatccatcccatgcatgctctgtcaggccaactgatgaagcttcgcgatggtacagtaaccggattggatcaccagctcagagacctcgccgccggcgaccacgcgcgtggattcgtgctatcgctgtgattcacgctgaattaaacgctgatagagatcacgaggtgaaagatcttgccgccgatgggttggaatgtactgtgtgcttgatggttcataagtacacaccggtgatgtggccgagcggcaatcaccagcgtgctcaccgttcaccgtgaggacgccacgccttaggaagtttatcgcgtcggtatgagccgtattgaccatccaatgaccgttgtagttcagtcactctgcgattgccatggtagatcgccgccgtgactcattcccctctcggccgctagcgcaattcatccaaaattggaggccaccgctcaagcacactataaatttgagcacaccgacgggtccgtagggtagtcaagcaccaagccacaagtcgtgcctccaattgctcaccagagctcgccaattccagatttccccaaatctgctttccgccaccggggaagaggcttcgttgtggctagctcgtcttaggtccgctcatgccctctgctctttagttttagtgttcttgtgtgtcccagatgctcctcgaccccgccaattaggctaggaccccttagatcgctgagaacacgtcgtgctgtccgttgtgcccgctgtcaccgtggacagagcgagttagagctccgttagtgaaattaattgaggggaaactcttgttaggacttgaattaggtctcagccgaagtagagcaccggtcatcgtgtgtcctggccagtgcaagctcgccggagctcggttctccaccgtgcggcgtcgtggaccgcgggttgtaaagagatgaaagcgcgggggtgttttttcaagtgtcagcgagacagaggaacaatgggaaggagtctttatggggttttcaaatgaccgggggcctctatgtaaatccaccgcgcgggtgcgcgcgcgcaggcgcgtccccgtattctgatttgggttgggccgtttgggtcagttttggcccaacactgtagagcctttttc

SEQ ID NO: 22193 - DNA, 347 bp, Zea Mays
cgacgtcttagcatcacgacgtgggtccacaagccgtagcggggcattccgcttcttccgctggatctcttgacgatccttctccatcactattgacacaatagcaccaatatttctcctgtaaggaaagattttcagctaatgagccaaatgggacgtaaaatagtcatcgccggtggcccagggtatagggtccttccgatgccatcgatccctagtaaacttcagcatgcgccaagatgtttctcggagcttgggcgtagtcataacctccccgggcccagcacacgtcccagtcaactcctcaacaaaaagcctagagcccttcagccccatcttttcccctt

SEQ ID NO: 22194 - DNA, 804 bp, Zea Mays
ggtgggttgattttccagaaatcagagggttcttttgcaattgtacacgactgaaagggtacgctctaatttggaccgccagatcgattccaacggtcgggattagatccgccataatccgaaccggtacacgttggccgccatcggatcgatgatcaacggaccaaagccatccacaccagccctcggtcgtgaccgctagatctgatcctaacgcccaagatttcatctagccgaatgggtatgcatggcgaaatctcagccgttaacatagaaatcggtggacataatgcttgcccccaaccttcacctccaccggtcatcagcagaaggcagcaccaacatccctatggcggcgccacggtttccccacggtggaagtcgccggagttcttcgggacggtgccccattgctccccctacccctcaacaccgagattcgcaacgaggagaaagatttgaacacgtcggggatacttaccgccgtagaagggctacggagggagctggcctcatttgacaatggcaccaggcgcggaggtgagccataggtgagaactcccggccatgccccaccgccatcaagccagcagatgcgttgcctaggtgcagcgcagattggagtatccccagcttccctcgtaaagccattaccattgcttgactacgaccctgatgtgcactctctctcctttcccttccccggatccctggcaaccccaaggctgcagcccgacatggaggtcgaagacaaccgcaccaccgcaacgaaacgacgggataccctagatttattgtccgaac

SEQ ID NO: 22195 - DNA, 287 bp, Zea Mays
atcgagggggagattggcatgttcccgtaccagagctcaaaggccaccaccttgtgcaatcaagcttgacaaggagaggaaaagaaatccccacatcaatgttatttaggagtcttttaccaattcatggcatctattatcttgatattgttatgtgcccatgtatatatttaacgtttaattctcatgacaaccaccacatggacatggatctacaattgtttttcaagcctacaggttgagggttgggaacatgcagcccacctacgcaacattaatatatgcaa

SEQ ID NO: 22196 - DNA, 628 bp, Zea Mays
tggatcaccaccggacggtcaggattagatccccaaccgatgtgaaccggtatacacgactaccgtgagatcaaggatgtatggaccggatttaatgaatcggtcttccaccgggaccgcacgattttatcaaacggcccacattcgatctcgcgaagggggtacactcatctaatcgcatccgctcgttcgaggatcaacggcgcacaaagcccccgagcaatcggacactctacgcacgatctccaccgttcatcgcgagataaccgacccaaagatcgtcccctaccttccgctgctaaattcgcccagaaggccccaaccgagatgtccccgacggtggtcaaggttccgcctccctggcgagcaggcgaccaacagtgctaggctacggattggtgcgtggataattcctgcgcataacgcaaacaatggcgaatctgcagagatgtgcccttaccacgatgggaggcgaccgcgacgggtggagagaacgcggatgcgaggcgaggccggagctgtcgcgcagcgaggacgatcccgaaaggcagctcgtccaaacaccagggttcgaaggtcggaggtggtagatggtgtcgcggagcatcccaacttttctctcggtcgc

SEQ ID NO: 22197 - DNA, 283 bp, Zea Mays
tgctggtgcacctgctgcattgctgctagggtctgaccaattgcttggactgcctgagtttacatcatgaacatctgctcaactgtcatcgggggtggggctggcaactgctgctgagctgcatcttcttggggtgcctgctgttctgggtgagcacgccttgcacctctgctcctgttctcagacatctgtagaaagcacacacacatcagatctgactctgtagtctttcagcataagaaaagatatacggaaatttccacagcgctgaacaaatgatcat

SEQ ID NO: 22198 - DNA, 398 bp, Zea Mays
tcgagggtgagggttggtgctctggcttcgtaacaatctagcggaacaggttgaggcatcaatttatagtggacgaccgtgagaagggtcaatttgaatggagaagcgctcgcggtgagaagggggaagagtcaccggagttcgctaacatggcgttcactggttgacggcctacggtggtcactgccaagtcttcatggcatgcgacgagtcgtgagatgacttaaggcgtgtcacaaccgagtgagatggcggcacaatggcgacggtcgcgcagccatgtcgctggtgcaagtgggtacggcgacagggcaaaacagtgccctaagttcatcctcggtgaagatctttttactgccgatcgtgatccacaccacagagggcacgaagcgcgggcg

SEQ ID NO: 22199 - DNA, 411 bp, Zea Mays
gtgagttggtgtcagataaggaaccacactaggcagggtgacaccttcgattggcacaacacgagttaatataggtgtgcttactgaccaatccacacaggggttgctgccatggtctggctgcggtatgtggttggctaattagccaccaagaccatatacagactcaaatcgagtcaaggcgcggacccagtaaaagacatgtacacccaataaaatttgcaaaacaaaatcgatgttggtaggcataatacatgtacatgctggtaattagattcgaaccgaatacaaatagctgaagttagggtttgagtgattggtttcagcatagcatgaagggaaggggtggatgtactcgtcgccggcgaagggtcccgaagaattcctgacggagtgtcctacgaagactct

SEQ ID NO: 22200 - DNA, 586 bp, Zea Mays
agcatccgaaaaattagttaggtctgagaagacgactagaatgagcatgcatcatgattgtcgcattataattttctcttgtgcaccaacatgcttctctcacctttattccaataataaaaacttgtgaataatgtgatgtaccgctatgttggaaatgccttacctcgtgttggattggtaagacttgttaggtcgtgttatgtgtttctcttgtcttgctatctaggtggcactgtaattgttcaacccttgttgccaataaaaattgttgcttgttttgcccataaaaagacccccatcctaacaaccttgagtttagaaagtgaaacctccaaaaataaaaaaaattatgcttgtgttagtgttttctaacccttgtgtgtttcacccttgaatttacacctgcacagcttatagaacccctagctggaccgctagttcaacctaaaacttccttgtgcatgtggttatgtcaaaaaaacatcgtttggtgtctagttgcgcaaaccatgtccaagccatgtttctttccataaatccttgccccaaaaacttcctagcagatcttgttttcctacctttc

SEQ ID NO: 22201 - DNA, 459 bp, Zea Mays
ttccaatctgatctagatcccatctaatctaacatgatctaatccaaattgagttacttaaataagttagataatgttggcgacataaactatgccctaattctataaacatatcttaccctaaattaataccttggactaactcgtccgtaaacaacaacctaacctacatcataggctgcctaatctagatatcccaaaagcaaagtaaaactctgtttaaactgaactacctcatgtaccccggctatcctaaccatatatccttagccatatgtccttaactcggatgacaactccaagaataaaggccaaagaagaccaaccaagtcaaaggaggataagcatcaactcaattattcaaagatcaagttggatcgccagaagaatcaaggtccagagtttaggatgaagtctttccttactatacccttgccacaacccctacttgccataatc

SEQ ID NO: 22202 - DNA, 859 bp, Zea Mays
gccacctcgttgatgagctcgaccatgaggtatggcccgtagaaacgaggcttgagcttgccggccattgcctggggcatggatgcagtaggtcgctgatgaaggcgaagcaggacccagtcgccaacctggtaggtaacatcgcgatggagacgatcgtagtggtgcttttgcagagcctgggcctactcgagtcagtggcgaatatcctccaggaactccgtgcgttcctccatcgtgcgggccaccgccggcactcgggagtcaccatgcgcataggagcacagggatggatgaacgcgcccgtagacgacacggaacggcgtgtcgcgtaacgacgactggaaggcagtgttgaagacgtactcggcccatggcagccagcgtagttagtcgcgtggatgatctcctgtcaagcagcgaaggtacatgatgatgactttgttagcggactcggactgcccgtccaactgtgggtggaaagtcgtcgtcatctgtagcttggtgccacggaaacgcatcagctcgccccaaaagttggaggtgaacacggagtcgcggtcggagacgatggactgcgggatgccgtgcagccacgatttcggtgaagaaggactgggctacagtctccgctgagtacggatgcgccaggggaatgaagtgcgcgtacttgctgaaacggtccaccaccgtcaagatgacggacttgccccagacgcgcggcagcgcctcgacgaagtccatggcgatgtccgaccaaacaccttgtggcactgggaggggcagcaacagtccgaccaggtggagatgtttcagcttgttgcgctcgccccctgtgcacgcacgaacaaggtcctgc

SEQ ID NO: 22203 - DNA, 643 bp, Zea Mays
gttgaggaccgctagggaagtggcggaggaggctctacagcaccggactagaagcacgaaggggcgacgatggcatgggctaaagaggcaggggcgactgagcgggcagatggcataagcaagaaggggcagccacgatgctagaaggggtggtgacagtgtggattgaagagccaggagcggtagggttggtggatggcgtaggattaaggcccaagcaagaaggggcagccacgtgcacaaaaaggggtgacctgcaagacacgggttgtggccaagggcattggagcctaaaagggtagacatcggtcagccgccagcggtgcaggtgttgtggcatgtgagacttggaaggggcatagggtgcaatgcaggaagccagcaaggttattagtggtgtccagcagtgggaaattaggaggcattaagcgtgaggttcagggagtttgagttttctctttgttgtgtaatatgggctagatcaaaacaataatctattggcctattttggatatctaataggcaacccacaggtggaaggtaatatcctaatccgtgcccgcccgatttcgggtcagacagagttggacccatgggtcaaaacttgtatccatgtccgcctctatcggatcggatatccgaa

SEQ ID NO: 22204 - DNA, 558 bp, Zea Mays
ctgaagcgcccgagcgtcataaacacaattgaacccctaccgaacctttcccccaattcaatttcattgttacgactgcgaatctaccggtccacggtgacagggcggttggtcatatggatggaagtgttccggccaaccggtggcgcgaacgacccaattgaagcttgggaaagcttcacaggccaaccaatggtgatgtatatacacaaatctgaactggacgcgaatagaaacgcggggctccgaagagggtgtcatggcggctgttctacagagcagaggggtgttccagtgatgaggctcgggtaaactccaattggtcggctccgagagcaacagggggctacaaacaagcaagaacatgaaacaattgggtaattactcactcgaggaaggctggccacggagatgttcttcgcggcggagttaaaacagagaggaaacaggctcggggttattccggtgagcttgagtcaagtgactagttatcgatgcgcggaatgcaacgacgaagccacgctagggtccaatttatagtcggccggccgaggaggg

SEQ ID NO: 22205 - DNA, 1028 bp, Zea Mays
cttatgcatcagttattagctcatgaaaacaacttgacttcgactatgattactgctagatttatagatgggttaaaggatgagattaaaaatgctgtgattattcaacgcccacccgaattggatactgcttgttctcttgcactattgcaggaagacgtgctgttgcacgccgggcgccgggacaccagaagatcagagttcagttatccttctccactgtcctctaggccaagccccttacctctaccattaccccctgttatcagaagtggtgtaactgctgaagaacgtagaagtccaagaccgaacctgaacaagggagatgacagcaagttgacagccctcaaatcctatcggagagctaagggactctgcttcaaatgtggtgaaaggtggggtcattcgcatcgctgttccacaagtgtaccattacatctggttgaagaaatgtgggagatggcagctgagggggaagagaaggtggatgcagctattggtagtgatcaggaagtggctgaagaaaatgtgcaggccatctcgattgatgcagtaagtggtggggaaggcaacaaaaccattcgtttatgggcgtcagtgcactgtcagcaggttttagtgctggtagattcgggcagctcagccagctttttaggcagccacctaatgggagtcatgcctggtgttcaactgttggataagccagttcgagtgaaagttgctgatggaagattgttatggagcaaatatatggtacctgactgtaagtggctgtgtggaggcattacattttcaacccagttcaagattcttccattgggaagctatgatattattttgggaatggattggctggaatgtcactgtccaatgtcggtccattgggcacagaaatggctggaatttgattatggtaacagaaaagtacatctgcaaggagtccaaccaaggatagaagtttgccacaccttgacaggattacaactggattctctcatcaaacatgaagctgttgaacaactgttgga

SEQ ID NO: 22206 - DNA, 677 bp, Zea Mays
ggtatgaacggacctggaaacggcggtccacgacacgacggctcacggcgacgcagagaaccgaattgggagaagaaagaaattagggcgctatggtggctaatcggaggaaggggcgggtgctctggcttcgtggcaacctaacggagctagctgcaccatcaatttatagtgtccgagagcagtggtggctaattttgagaagttgtgctggcggccggagagaggagaagtgcacaggcgcgggtgatcgtggctttcaccgtggcaaggcctccggcgatggatggacctacatcaacggtttactgcgacatgttacagctactaggcacgtggcgcacagtcgataagcggccaacgccggcgagggccatctcggccggtcacaggtgaagtgggtacggtgaacccactagtgatcgggtccaagcctatccggtgtcaagatttttactccgctgcgattatctcctcaccagtgagcacgaatcgcggcaccggcgcatatcacagtgcatgggtcaccggcggcgaggggtgatgcaccagaagatctttctcagtctactgtaccatcgaaaccgttcatcagagcgcctgacagagcaacttcagagatgtttttcataaatttttgtgtggcaactccctaatccgtctttaacaaagttaat

SEQ ID NO: 22207 - DNA, 402 bp, Zea Mays
ttagggtcatcgcttcgttttgagagtgtcgaaagagtgccacatattgcaacatcattatcaataaccctcgtattatcaacatctttcatatgatgatcgtcatcttgggcaatttgtgatgcctctttactattcttctcaagctctcaaggtggtgtgttgggcttttatttgcccgatctcctttggaggagttggagcatttgatttttcctttacatgatttttagtatcgacttccattgtgggctcctttagtttaggagaaccaatcccatgattggacgtaattgttcatgtgttctcctttagtttagaagacactgaagactttgtccatgtcccttggacaacacacattgtccatgacgaaggctttgaaggcctcccccacttagg

SEQ ID NO: 22208 - DNA, 608 bp, Zea Mays
gtgaggactacatgattgactcttcggtaatggtctttcttctatcgttttgtgtcgaagtctacgttcgatccaccggtaatcatatgaatgacccctcgaaaaggttgatcggtgaagtcttcttgtttgggtgttggtggtggtggtggtggattttggtgatgtggtggtgttggcggtaggggttggatttcttagtgttgctggtacatatggttttgctagtggggatggtaatgttcattgtggaattggtgctagtgatattgttgggggtggtaggtgtgtgcgacaactctttggttgtcagctggttgatttctggtcatccaatctttggtggccttggttttagggcaatacctacgaggtgtgctgagtcttcaccgtagaaaagacagtaaaaccttcgctgttgcagaactctgcctttgcctctacctctagtgttgctaccgtggccctgttttgtggggtactcgtggcgacgagcagtgtctctagtctactactgattggcgatggtgttcacttggtctggttgcggtttggccggtctgagtctgactacgtaggcctaacccatgtcctgctggactgtggag

SEQ ID NO: 22209 - DNA, 514 bp, Zea Mays
ccacgatctagaccgccctccaaggtcgaagaagtgtgagaaactgtctgggttgtttcttgcccaacaggattaccagccaaagggacgtcatctgggacctctacggacgacagaactttcagtctcaggaggctccaataaaaggtcttcaggaataatttcctctagtgcatggtcaatggcagacattgtcaacccctagagactaactagtccagataaagcatgcattggagtgtcactgctgttatggctgcggctgttcttgcgaatcaaagggacaacttcctcttcttcctcttcaccctcatcaagcacatgaccaccaactcctctggtaaattatttcccctgactctgccttagtcctcgcattgcgatgctctagtcggataggactcgcgtgggaaggatcgagatctaggggaccgtcggtgatggccgccgccgctgtgggccggtttgcgccgtcgcgcctgtgtgcgattggggaagaggggtatctggccgt

SEQ ID NO: 22210 - DNA, 275 bp, Zea Mays
ctcatctctgccacgtgaaaatcttgctttaacaccattctttgttgtactcatacccttggttcttctatacctttacctcttctcttacacccttttctgttatcaccttcaacccttgtaatacctatatttttaccacgatgcttcctttgaacctagcctttggagccttctcttttccatcctagttcaggagcggtgttgtagttatctcacccttgacaacatcctcttctttaccgcgtgtaagtttggacgtgactccattattt

SEQ ID NO: 22211 - DNA, 562 bp, Zea Mays
aagcagggggctcatttgcataatcgcacggccgaaagggtatcaacgaatcctagccgtccgatctagcgccaacgtgccagattagattgacgtggttatgaatcggtacgtgtctgcagccgttggattaaaattcgatggccccgagacatccctacaccgatccaacctaggccatcagattggcatccagcggtcacagatcaatacaacaaaacattacgcgttgtttgatctcagccattcatcacatttcctacagcgctggtaccgtccccaatcccccacaacggaacatgacggtgcaaagttgtggcatggcggtgccattgccgtgcaccccgtccacgcgatactctaccctatacatcaattcgatggagcaaaacgcagagaggagggagacgaacataggggggactcacatttgccagcccgagacgaggtggcgcccaaccacggaaaggatgcgattccgcccccgattgaccaccgacgagcaattctacgagctcaagaggtgcgtagctcgaattgggggcgcggtcagctacccagg

SEQ ID NO: 22212 - DNA, 405 bp, Zea Mays
caagctctcaacatgtcttccaatacttgattagtccttttagtttgtccatcagtctgaggttggtaggccgaattaaaattcaacttcgcatccacattctcatgaaaacttttccaaaatctaggggtaaactgtgatcctctatccaaaatgatcctcttcggtacactgtgtagagacacaatccaagccatatataactctgccaattaagatcccttatacgtagtcttaaccggaatgatatgagccactttggtcagtctatccacaataacccatatcgaatcatatcctttcgaggtgcgaggcaatctagtaatgaagttcataccaatctcttcccacttccactagggtatctttagtggatggagtagtccagttggcctctggtgttca

SEQ ID NO: 22213 - DNA, 649 bp, Zea Mays
ggagagggaggatgcgtttttgcaatgggttatgggaaaacatggatctagtgtttgccaactagcagtgtatgatggtccaattggatctcaactttaggtttattggctagctcaccaaagatcgacacctgatggtaaggaattggaggaatcgggtgcgtggtggcctgcttgagtctacaccgaatggtgggccaaatgggggatgaggtttccaaccactctttggtctctgatatgtcgggtccttcatcaccgtacctccattgccttgatgggcgctcgactcgcgatcgtccttccaatcatcgcgagtgtcagtggtttcgtcacactctttctgagctctcatttcctaagtttgagggttcccatcctaagatttggttagacaagtgcatggactatttttcgtgtttatgaggttcagaaggtgttgtgggtgactatagcggcgttacacatggagggcaaggccgccaaatggtggcaggtttataaactacaagcatcagagtgttattggcgttaatttagacgtgtcgtggagatgaagtttggtgtggaggattactgcaaagcccttgccaccctgcttgacctgaagcaaacgactttctggatgactatgtgtaggactttgacg

SEQ ID NO: 22214 - DNA, 414 bp, Zea Mays
taagccaattgacggggagtcgagggtcctggtttaatgagccaacacgaaccggtggttgaggatctgggttgttggatcatggtgggcggttgagatcgagtgcccgggggtggttaacggctccggtcgagtttgggtggcgtcgctcacgcccgtggcgaagaagtctctagagacgtttcagactcgagttctagggggtcttggaccattcgagtgggccagcaccgttggggtgacttagtgaacctcgcgttggcgctctggccatgagaaagagatcggaggtgggtgaacggcagggaggtgctccgggcgggtcaagggggtgctccgacaagcaatctcggtcgcagtttgagttgatccggtgcactgaggttggcgtgagcttcagtgaggggttgggag

SEQ ID NO: 22215 - DNA, 436 bp, Zea Mays
tcaccgtttgccacctgcagtgctggtaagaaccttgtaagagcggggtaagatgcttcataatttgtattccaccaccaccaccaccacactgagagatagttgtagggttcacattgtttgttgcctttttgtctctgttttgtgctaacaatgacaggaccaaagaatcaaatggacaaggacaaggggcctaagattaacgacgatgagtgtgtctctcagctggaattgaaggagatgatgcgcgtgatgactgaagcttttaaaaaataccaggactctgcggtgacatcctatgagcagcttgatcgacgagttgctgaacttgttacacgcatggacgtactggaggctcgttccccaccaccaactccagccccagctcactctcctgtggacgacgacgacgatgacgacgacgtttatgcaccgc

SEQ ID NO: 22216 - DNA, 599 bp, Zea Mays
cggttagtcaacactttggtgatgatcttatagcaaacattaagcaaacaaataggtctaaaagctttaatatcaacagcattaggaaccttgggaataagagtcaccacaccataattgagtctttcaatatttagagtcccagcataaaagtcttgaaaaagtttaaacaaatcggttttgattgtgtcccagaactcctgaaaaaattcaacagggatgctatccggaccaggagctctattatgcttcatagagaacacaacttctctaatttcttccatgtcaaaaggtctggtcaagcagcttctgtcaaaatcatctaacatttgcatattcagatcattcaaagaaatatcagtttcttgagaagggccaaataaattctggtaaaaagaagtcgccaattggttaattgcattatcatcctgagcaacaatgtcatcatgagaaagagacacaatcttaagcttcctcctcttgtaattggctaacaaatggaaatattttgaattctcatcaccttccaagatgaatttatcacgagctctctgtttgagcttagctctctcctcatcaactatttttttgagagtcaa

SEQ ID NO: 22217 - DNA, 2482 bp, Zea Mays
agaacacaaacaaatatgaaacatgacaatacttcatgcatataataaatgttatatcgtattttagtttcaaataagggaatacagctcaaagacaaacttgaaacacaggtacatcgatatgatcttatagcccaagagtgaaattttgtcctagatgggttcttgtttcatgtgtttccttaaagtatgcacaacaacttcttcacactgaacttcataattaattattaaaaacgctttaataatgaattttaattatacaaacttcagtggatcaccttgaaaccaatattacctctgctttagtctttttgtagatcatcacttcatctttgactattctgtcgattatttctctttcaagctcattgcatcaatcaggttcatttagaagaatttcatcaacaacactgtccaagtaaaaaaattcatttgagtacaagctcacatgcagtaatcatagatggcatgtattctttctatatacccactgtgagtatgtttaacctactcgaaatagaagttgcatgacaggctggcaagaactaacccagtcatagaatcaatatcctgagtaggtttcatcttgaatgttatttttacttttagtaaagaagcgcacagcaaaagatagaagtggtaactgcacactgtgagatgacaacatgcagcaactccaaccataagtagcctaacatacaattcttggcaagataactgttgtaggaaagacaaagcagaaacgcaatacagcagggtgcaaaatgacatatatgcagcaacaccaagcataagtagtttcaaggtgttcctggcaaggtacttctggaggaaagacaaagagaaaactcaatacagcagggagcaaaaatacaaaatttgctaacgacgactcatactaaaaatcatgaagactgacaagtgacctaactggatgctctgttatttgcaccggtgcattgaagaagacatcctgccatacaaaggtttttattgaaattcaaagtttataatgcgtgagaatacattattcaaaaataagacttgtaaacagggaaaactgtttttgtacaaatgcatgtaaaataaagcacagattcaaataaaagtgattgttcttacatgtcgtaatcctcttcatttatcttaagtacttgatagccatacttcacagcctgtttatcagcacacttcaggaaatactcgcgaccttcatttcccaaccctggtattcataaagatgaaagacaattttaacataataagaacaatgtaatgacaaaaaatgtattcatgtaataagtcatccaacaatcagattggtctgattgttccttgaaaatgaccaataattgtacttgtgctcatgacaaacccatacattgatgtcgtaattatattaacattcgtgaccaacagaaacataacgctctaaccaagttgagaaccgggtgcattagtaacagcgatcattctcatgtgatctgcgactaggcggtatgtcgtatcaactccatttgtatcaacagcaccaaccttacctgtgtaatccttgaaacctttaccagtacgctgcatattattaaatgtcattgaccatggaaatcaataatattacacagccagctattgtaactcgaagtggacacggaaaacttaccgagtagacttgacgaattacataagcgtatacatctaagtcatagtggctttctttcttttgaagaatggcagctaaacattcgagattaatccttgttaagacatgcttagcttggaaaggctccaagacgccatctgcttgccgatcgaactaaaaatgaaggaaagatatgagtaaagcagagacattgtgtagcaatagaacttaacagctgagaagtttcgcatgcaaaagatcttaaaagaacagaaaaccaacctcaacaaacacaagacggcatatctcaacaagcttggcattcgttatgttccttacggaatcaacaccatcattgttgtccgaacaatcatggaaaaaaccaatacatggcccacaaggaccagtttcatcggccatccaaaaatcaacctattgaagcactcagtcgataaatgtccacataaattcaaagcaaaattgataagacataacaagtaccttggacatggaaggcaagattctttctgctcctatatatttctgtaaggtatttcttgactcgtcgtccaaactcaaacaagaggacatatcaccactaaagtatgaggcatatattctagactgaggtaacttgtatttttgcatattgaagaatgagccatcaataggtaatgagaaggtggccttaaatagaacatcagaacaatattgtacactaatttttccatgcagtagcttaatggagcaactcacgtgcacacacacaaaggaacttttaagcatgtcttaacgctgctccctcgaattgcagaggtgtgtcatcttttaagcaggttt

SEQ ID NO: 22218 - DNA, 1599 bp, Zea Mays
gaatgaaaaaagctgatttacctgaagattagaaaagaacgaaggcaatcccaagtcatgagaagtcgcgttatgactcgatgaaggaagatcaactgggacaatctgaaaagcatcatcgagggttgatttagctcctccagcagatatcaaaatcttgtcatccagtgcgctgacctctaaggcgactccctcacttgaagctaaaggagtatgcatcactatcactccatcagaatgtggtggagacgacccaacgtggacatccatggaggtatcggaaggagagctcgctcgggcaccctcgggggctgggttgctgctcgcactgcccatcagagctggattgctaccggcaacaccctcgggggctgggttatagcttgtgttacccacctgagatggatcgtcaccggcaacaccctcgggggctgggtaaccgccagcaccacccttgaggattgggttttcttcaacagccacctttaaggctgaaggatcctcagtcacctccatgggagttgggcagtctggaccaacctcttgacactgaagaccgccctccaaggtcgacgacgcgcgagatgctgcccgggatacctctaatcccacatctggaatgtcagaacaaacatccatcatatcaccattagtcggctctgacagcatatcctcaggaatgtcatcctcaagggtctgatcaaaatctgttatagataaatcctgaaggctaacaagagcagacagggctggagaaggaatatcactatctcctctactacctctgtagagtcggctatttttgcgaattaatggaacttcttcttctttttcttcgtcatcataaaaaatgcggacaaaagatggtgcaggatcgcacccattgggctcagctgcaacaggattacacccattgggttcagattcagtagggccgcacccattggggtcagtcagtgcacgatcacacccattggggtcaacttcagcaggtacaccaccagtgggatcaactccagtaaagacctctgccaatacttcttcagcaataggagcagaaaggctagcaccctaattcaagcatgacaatcgttgaagttgtctccttttcttcttcttttcttcagcaggcgcagctggacgactgagttggcgacgacgctttgggcgagtaccctcaggcttttgggcgtccgttgctttgtccagctctggtatagcggcaacaaccattgtttcagtagggcccaagtcagatgattctccagccaacatgtcaagcattgcattcatttctgcatcatctggactcgctggcatctcaaaatgaacttgcctctcatcattgggaagatcacaaagagaagcaaccaagacctcaatatcttcgggagagggtcgcactctaagacccaggccactatcactagaaggaggattagacacaaaattgaaaaatgacttaggaggtggcagattccaagcagagtaggcaacaggagcaccaacatttgatactttgcctctcaaaatcatgtctagccggctcaccaaatccttagcaggaattctcctattggtaacccgagtggagtaagt

SEQ ID NO: 22219 - DNA, 795 bp, Zea Mays
aacagctactaatggagccattaacagaactaaccataattgggtgacacaacctctgcaccaaaagaccagcccacgacacaaaattctccgaaacaaacaaatagttaatgccagagtcaaaaagagcatgggccacaaacgaatcaactgagatcgtaccaatcaccatgtctccctgctctctgccatccgtagagggtagcacatatgctccgggaatacccgcagaagaggaagctcccagagtgaagttaacagaagaaccccactgagtcgtcggatgaggcagacacggagctccaaactgagatggtgttggagtagccggtgcaggagtaagcgcagccagatactgaggaaacccctgcataagcacgaactgaggagtcccgggcacgtagaactgctgcagaggggtggtactaaaaattgctgctccgcacttgacatcatgttgatagtaccctgagaagaggaagaagtcactggctcccatctgagctttccattgggattcctcctacacaccacatccttgtggtcttggctgcagatagagcacctgccactccactaacactcagcacagcgatgcgcatcaccacaacggaaacacaccagccctagcccgggcttaggaacaacccgatacctctgagtacttcctcctgaagtacccaattcagaggatttgccacggtaggggtggtggcgctggtgttgtgacttgcccctcttgtgggctggacccctagtgttgcccctccttgcgtcctagccacgaggctgatc

SEQ ID NO: 22220 - DNA, 533 bp, Zea Mays
actgattagcaaccaactctgtcagctgaaaaggcgtcacaattagtaatttaccaataggcaccacaacgtaaattatcgcataaaaaatgacaattcgataaacaaactacagacctactcacctacatataattaatatagcagaccagatactgatgatcagcacacgacaccaaaccaaattgacattcgaaagatgctacggtcattcctccaagtctgcaaatgtactttcgtctttttgctgtctaaaatgacaccacggagctggtttttgttattttcgtactacacagagacgttctggttgaaacgacaagtttatctccttcgaagtcagagatttccgtgtttgggagatgaatatgtgtttgtaagatacaacccacacaattttccgcatgtaactgtaaaacgctgcttggatcaacgctgttgcctgttttccctagctggtatccacatgcttacgttcttcactgcctcaactcaatccgtgaagacaaatactggagctggtgaacctccag

SEQ ID NO: 22221 - DNA, 362 bp, Zea Mays
gcagattacatacactcagtgaagggtcactagacccaccgcactattaaatacaactgtgccctcacccaccaccggacaacgcgagggcatcacatactacatcggctcaaccttcagaatgatgcctgcctccctataattgaacaacattatttttaattcctcaccctcaaaaagattctgcagatccccttcaccaaaactcgtcccaatcgacgcagacagtagatcttgtttaccaaaccgatctactcgaaggcgggtccgctccaaccccattcgacggcgcctaccacttcgcgacatctcaccaacactatgcttcgacaccacttttcgtcgctgtcgctccatcctcg

SEQ ID NO: 22222 - DNA, 631 bp, Zea Mays
ggagtgttcgtgatggcattccacggtggcgacacggcgttccggggatccttctacggtagagttcaactgggcgggtcgatgagcatcacgacatgtaagagaactcaaaacactctcaagctcgaccacagttaccttagagagctctggccacggtgagatgtcttgaggcggcgcggatgaccgatttagggggatttccgaattccctggctacggtggatggcatgatgtggttggggttgcgttgggttcgtaacaaggggttggagcagggagagtcttcaatttaaaggaatcggctcggctactcgtggatttgaacgaagttacaatcacggaggtgacgtgatatttttactaaggcaagttcaccatggcacgcgatggggcaaagtcctatggcaatcactggttactgtccacgactcatgatgacatggtaagacggcctatggcgtggcacaattgaggtcaccagcatcccacgatgacatcggtcgctcggccacatcgcagagcaatagagcatggccgatgagctcacgcgagagaccataccacctcccttccgatcttttacctctatcagttatccacgcgccaccgagcatgaactgcaacaccg

SEQ ID NO: 22223 - DNA, 519 bp, Zea Mays
tctttagcacttttaccatgaccgaaggggtatgagccaaccagagtcgcccgatccacatccaacggccgcgaaagaaaacagagcgaggggggtatgcctacatctatttctggacgcccatccgagatcgacggtcacgatttgattaaaccctaccttcaaccctggccacctgatttcggatccacggtcgagatataaaaacgcaaagggtatgagatcgatctaatcccaaccgtccagagcaagatctatggtggacgcgttatcttcctcacctatgagggtcaccgagcgatggggcgcatccaacccacgacgacgaccatggctggcatgcccaatccgccgcattagtgcccccgaactccgatccgaatagtaataatcgtagcaggggccatgacaaacgcgacatggaaaacttaccgacagtttgagcaacatggagacctgaccacgacatggtgtggtccagtgatgcccaccgagctctggtgagcaattggggttgac

SEQ ID NO: 22224 - DNA, 321 bp, Zea Mays
ccaaaatgaatagatccaaacgtcccgttagttcatttgatgtctatgcatacagcagcaaggtctacttgggtttatagttgtgtaggtaacttaattggttatagtgaatcaggtattggtctcaaggtgttttccgtttcttagaaactgaagtatgtagtacggatttatagtttgatagtgtcagcatcaggggaatgccataaaaggaaggggtggagcagtgtagaggggggtgggtatggtaaggcagtctgaagctatgaggatcagaacaagatagacaaaatgtgaactaggaaccaattaaactagaac

SEQ ID NO: 22225 - DNA, 329 bp, Zea Mays
aaactgcccttgagcagtaacttgacgtgaccgcggggtgtaatcatatcgtccaagcagttgacctcagtccaaatggtgtcgtgttacgtgaaacgacgtctgccgcctgacttgtttccagacgatttgaatttcttattgaattcttgtgactgttcagtgaccatggtaggagatgagcggttgcctcctgcctctataaatagactgcctgcctcgctggtgtcttcacacattttctagccatttgttgcttattctcccacttttctcttctcttccaatcaaccatgggcaagaacaagaagggtggaagttcgtcgcac

SEQ ID NO: 22226 - DNA, 1139 bp, Zea Mays
ctgagggtccctcgatcacttccatgggaggagggaaatccaaaccagcctcctgaccctcaagactgcgctccaaggtcgatgaggcgcgggacgctgcccgggaggaccccaacccggcgtcgagcacatcagcataaacatcctcggcaccatcatctaacggctctgatagcaaatcttctggaatcatatcctcaagagtctgatcaaagttggccagagataattcctgcagtccaatgagggcagacaaggctggggagggaacaccgctactttccccactggcagtgtaacgacaactgttttcctaatcagggggatttcgtcttcttcttcttcaccgttatcatcagcaagacggacaatacacccattgggttcagcgtcagacgggccacacccattgggatcagcttcagtgaattcaggcactggcacttccttagcaacaggagcagaagtaccggcaccttgacccaagctagacacctgacgaaggcgtctcttcttctttttctccccctcagcaggaagagagtcttggtcaactcggcgagaacgctttggacgaacattgacaggcttctgaacgtccaaggctttatcagcttcagggatgggaaccaccaccaatgtttcagtcggagcagcatcagaagaatccccagccaacatatccagcatggcacctatctctgcatcactaggatccaaaggcacttcaaagtggacctgccgttcatcatcaggaatttctccaagcgaagcaaccaaagcactaacttcttcagtagagggtcgcactctaaggcccaaaccgttatcagcagaaggaggatttgacacaaaataagtaaaggctttggaaggaggcaggttccaggccgagtacgcaacaggggcaccaatgtttgataccttgcctgtgagtatcatttcaagccggttcaccaagtccacagcaggaatttttctgttggtgacccgagttgaatcggctagacccgcgatacagataggccgggtatgccctgtccttcaacggctgaatattcttgaagacaaagtcagctactacagcctcggcagtcagacccctccccttcagcaatccaacttcagctagcaaagcc

SEQ ID NO: 22227 - DNA, 431 bp, Zea Mays
cttcccacaatctttgcggcctcggcctccactttgcgcacaaatgcgaccgggttctgaccccgcaaatccacagcaaaggcaggacttcgcaccaaccggtcgccaagggtcggcatccagtgggggcacacttcgcccagtacacagccgtgtgccaaggtccacactccatgaccgacaaattcctcaaccaaatcgtgcccactactcaagtgggcagcgtaccgaagggccccttcgtcctcgtcatcctccgccacctcgaatcgagggaacgccacataacagtgggagcatagaatggccggagggaggccaggcgggtcttcgacatcaccaggagacacatagaaccaaaaatcccaccagttgccccacttgttcctggcacaagggactatctccacgacttccgccgaagtcttttc

SEQ ID NO: 22228 - DNA, 1155 bp, Zea Mays
ctgagatagaagagctgaacgctgctttggctagtcaggataagttgcttaggcaggctgctcgtgagaggagaaagtttagatccaagtacgagagcacgcttagggaacttgagtccgctagagcttcagttgaggtgtccgacgagactgaatgtgatgagtgcgctctacacatgtcgaacatcaccactttgcagaccaagtaatttaccttgctagattagcgcgacgagttgagatctaggtctatcctattgggtgcgtgtaccgtttgtcctggtttgcagtctgagctagcagagagagacactaggataactttgcttgagaaggctagctcagtgagtgcccgtgcacctgcgcagtgtgcactttgtgagggtttgcaatctgcccttgagtcctgcagacacgacaagacaagaatcgaggaagaaaacacatacctttgatctatcttgagttgggtgtcgtgcagtgagccctagttgggcatgatggtcagtcagttcaagaggggaactggcggaccggggttaggctttgctaataagaatgggagtgtcgctcgctttgggaaggttggtgagtgcagtggtttgacaccttcagagaaaccttcatccactcccaagcttatcaaaaccacctttgctaagcctgtcacccctgtgagagatggtgtgattgatgaacctatgagagatcctcctcagaaacaagtgtggcttccaaaacctaaccatcttaggaacacactagacacctttcccgacatctctagcgatccccttcctagagcccctcagccatccaaaaagaaaatcctcttccacaaacaaaatccacccaagagaggggtgaggtaccattgtgaatattgtgagaggtatgggcatctagcttctttttgctttaggaggaagagagatgagcggcaggtttctgagtcgagcaggaaggacatgaaccgcccctctcatggtgttcatgctcagcctgttcagagacgtcctaggaggcctagaggtgttttgcctcttgccgctaggtctcaggcagtgagaccacgtggtggtcgtgcccaacggaatgctggtcgtgtatcatatggccaaggaccatgtgacagaggttttggttcatacttcc

SEQ ID NO: 22229 - DNA, 497 bp, Zea Mays
caccccagtgttgggaatgggcgcagatcccccagctgggaccttctccactgcggcgacgccgcctgacgttggtgccactgccgccggatccccagctggggcatgggaggtcggtgccgctgtcctggcagcagctaggagcggatcgccgacaccaccctcagcggattcctgctgctgagagccagacccatcggtgggcctggtatctggcggaggaggcgtggccttgggagcagcggaggaagaagccctggcaaatagatgatgggttaagacttgtcggcatgctgattaggctcgtggaaaaagggactacacttacttggggccctggactttctagtgaccctggaagcgaggagatcgctgctcctgccgctgaggtcgctgttgctgcccctcctgctgctgttgctgctgctcgtgctcctggggtgatcacccccggatggtggtggtggcggtgggatcgggggactaacgcgcctctg

SEQ ID NO: 22230 - DNA, 276 bp, Zea Mays
ctggggatgccgccccctatggttcgggctttgaaccgtgctttgaggcccaaaccacatgaccaaccctttacacgagggctcgcccatcataggttggttcatccatgccgaccaagggaactgacgagtgacttttttaacctcaccctcaaagctgtagatattcaaagatggcagattatgttggtttcagaggtcgatggtagacacatttggtgcttctaaccctctggacagtactctgcgaggtcaacttacgagggtttcttccag

SEQ ID NO: 22231 - DNA, 740 bp, Zea Mays
ccaaaaacgagccacaaagagggccacagagtttgtagccacagaggaccgacgtggggtgatgcgtgtgcaggggaaacattcagcggggtccacatgttgattttcttccagacgtgagggcgtgaggcaaaggaatctgcatgcaacatgcaggtggggccatgggtggttttcattttctatttgcatgtggccaagagatttgtgcgttttgtctgtgtgcatgtgggtggggtccatgcatggtttcctcttctctgttgtatattcgcatgacgctgagaaaaatgaaaaaatgaatcgtgcgtgggtgttgcatgccgaatgcgggtggggtccacacgatggttctcttccctctctgcaagtctgcatctttctcctaccgccgaacgcccaggtctgcggcgccttcttctacccccggtcctctctctctcctatttctttcctctgctaatccgccgcggtagaacgccatgcacacggcagtgagcggtttcgagctcgctattagagccctaactatcgtacggacagttctgctcctatcccaaacagttaccatcagcaggtagggaaaagctcacacctggtaaagcggtagaccgagcagacctcaaccactgctcgtcgaggaggtccacgacgatactccgatccggccacacccgattccgttgcgcgcggtggactgacgaggcacgagcccgaccacactcccgcctccggtggac

SEQ ID NO: 22232 - DNA, 588 bp, Zea Mays
atacttgatgaagccgtggcacgataccaagacgcaccagggctgaaccaagatgaagacgcaccggtaccgaccgatacaaccaccgagaggtcaaggaaaaggacgcagagcgaccgaaaaagaggtgacaggggactgaacaagtttcgtgacaaaacatataaaatctcatttgtgagcccgaaaggtcagcccctaagttccggaatgcacttgggttcttagttagggataatcttgacatcacaatccgacattggaaagatgtgtcagatgatgtcaagaatcaaatatggaataagctattaacgaggtttgttctacctcggggttcagaagaactcgtgaaggaatacatgatgaagcagcttgcaatcaattttcgaaactggaggtctgagatgaatacaaaatttgcaaagaaaggcttagacccgacaaaaaatataaaatctcagaaggtcagtgggcagtatttctagtgcagaggaacaaccctgaattcatatctctaagcgaggcaaattcagaactgtctaagaagatcaagtaccaccaccacttaggcacaggtggttacaagcg

SEQ ID NO: 22233 - DNA, 653 bp, Zea Mays
gcacggtgttcttggttgatttgggggaaatcccaaattggggagctctggtggacgatctaaggtgaggattggtttactgggtgcacaattacttagtggagcaggcgggtgcagaaatttataggctccctcagcggtggcgtccaatttcgcgaagacgcgctggcggccggagaggaagaaggctactggcgcgcaagcttagtggctttcaccgtggcggctcttcggcgatcaccggggcatgcaagacgcgattcactgcgacgtggtacaacgcttgagcatgtgacgcacagcggtaagtggcctacggcggcgaggcctatcccggcagatcgacgagcaagtgggtacggtgaaactcatccacaactgagcccgagcctatctggtgccaagatctttactctgccatgattatcccctcaccagagtgcatgaatcgcggtgatggtgcaaatcaaggcgcagaggtcaccgacagcgaggggctgaacttgtgatcttgttcagtcactgtaccatggtggttaccattagagcgtctgatagaccattttgtagggctcgaatctcaaattttcatgtgataacttgctaatctatctttaacaaagttgttgttctactatccagctttaatcttg

SEQ ID NO: 22234 - DNA, 449 bp, Zea Mays
caataaacatgtcccatgtttaacatgtttaagtacgcacatagagcgacccatcttatagagcagaagcatgacctgtgtaatggccgacgtgacctggtttagctcatgagaagggatatataatctaagccattgcgtgacccctttcaaaccctcattttccactcccacccacgaccactacttctctctcggctcttctctcctacctcctcacattcaaacttcacgatggtgagtcatcatcgtcgctgtttggcctcacaccatcatcatagcttcatcgcttgccttctctatcccaattcttcctttatcgccctctatccggttctcttggcctccataccaaaaccctaacctctccatcgttctgggcaagatctatattattatagtctagatctcttttgtgtcaccactttagtaactctggtgctccggct

SEQ ID NO: 22235 - DNA, 322 bp, Zea Mays
caagcatcaggcgacccaaggaggagttcaggtcggtcgtcgaggctagggacacaacgaattgcacggccgatgacggcgggtgccttccgcaaccatggttgcgcccgaattcatggtggcatcgcaaccctgcgaggaattggtggcattcccatcgattactccaccaggggaggccctggcctgcttcggcagacccaggcgatcacaacccaaggccggaccgacgatctgggcaagaatctcccacggcggcaccatcctttcttgctctctctcccctcttctctgtctcttcacgcggtggcttcagttccta

SEQ ID NO: 22236 - DNA, 677 bp, Zea Mays
gtggtggtggacttttgttttcatgtacgtgtccacggggacaaacatgcaaagaccgcgagaacaaagtggtggaagcttagaggggaagcggtacaaacgtttaaggatagtatgctaggcaaggggccttgggaaggagaagatgcagacgacatgtggttaaagatggcaacatgtgttcggaaggtggcttcagaagtgtttggtgtgagtagaggcaaacaggaagcgaaagacacctggtggtggaacgacgaggtgcaaagggttattaaggaaaatgagtgtttcaagtgcctccaccttgacaagagtgcaaccaacatcgagggctataaaatagcaaagagggttgcaagtgagctgtgagtgtagcaaatggacagacgtatgatgacctttatcaggtgctagacacgaaggagggagagaaggacatgtttaggatggctaggacccaggagaggaagacaatggacatcaaccaaatcaaatgcatcaaggatgagacaaatcaacttctggtgaaggataatgagatcaaggacatatggcgagagtatttcgacaagttgtttaatggggagaatgaaggttctatccttgagttggacgactcatttgatgatagcaactgacactgtgtgaggagaattcaggaggtggagatcgtg

SEQ ID NO: 22237 - DNA, 352 bp, Zea Mays
ctgagttaagtgagcatgcagattgacaataaacggttcaagtgcctttgagaatgaagtcttttcattgatggtgtattttccaattacagaatacaatgccgtcccaatagcttttgaaatctagctaggggtaaaacttcctgagatgctctatattccatgagttccctatttccgtgccatccatttgagtaagacaatacgatccaggccgagtgacttctgctactatgaatggtccgtcccatagtggtgacaatttgtgtcgtccctcccccgttagaattcggcggaggacaagatctcccactgcgaaggatcgatgccgtatggccttatcatgatagcg

SEQ ID NO: 22238 - DNA, 860 bp, Zea Mays
agaaggaactccactactttcactgctagcgatgaactgccggctgtttttctgagtcaaaggaacttcatcttcttcctcctcgtcgtccacattagcaacacaagcagcacgcccattgggatcaacaatagatggagcacccacattgggatcagcaacagattgggtacacccattgggatcagcgtcagtaaattcagtcacaggcacttcttcagcagcaggaaccgaggtaccaacgtcccgatccaaactggatactcgccggaggcgtctctttttctttttctgctcatcagcagaaggatcaggttgactggctcggcaagggtgcctcgggcgagtactggcaagcttctgagtatccaaagttgtatcagcctctgggaggggcgccaccaccaatgccccagcaggagcagcatcagaagagtcctcagccagcaaatcaagcatagtgcttatctctgcatcactagggtttaggggcacctcaaaatggacctgccgttcatcatcaggaatctccccgagcgaggcaaccaaggcactaacttcttcagcagagggccgcactctaagacttaagctgccatcagtgacaggaggattcgacacaaaaagagtgaaggctttgggaggaggcaagttccaggctgagaatgccactggggcaccaacatttgacactttgcctctaaggatcatctcaagtcggctcaccaagtccatagagggaattcttctgttagtaacccgagttgagtcggctaggcctcgatacagataagccgggtatgccctgtctttcaacggctgaatattcttgaagacaaaatcaacaaccacagcttcag

SEQ ID NO: 22239 - DNA, 389 bp, Zea Mays
ttgccgatagccttcgtctcatataaaagcttgtgcatgttgcagaagcacttcgcgctcggctctagtccctggctccttatagaccagacaaatatccccatcctgattatagcttcaggggtaatctgatggagaaagatttgaaatatctttaatacttcgaccacaaatttactcagcgggaaccgaaggcctgccttcaagaagcttcggtaaataacaacttcgttttcctctggagcaggggtagtactgtctcctccaactctgacaatagacatgtcgcaaaaatatctccccctcatggcgtcaatatgactttgcttgatagttgattttctgaagatagtatgacttggccgccagggccgatcctcagaatcttc

SEQ ID NO: 22240 - DNA, 287 bp, Zea Mays
cacagaagccgggacttcgcattagtcgagggtcagctgtacaaaaaggggatcagctagcccatgctgaagtgcataactgaaaccaaaggcataaaaatcctccacgaagtccacaccggaacttgcggctcccactcaggacctaaagtcctcgctgccaagatgattagtcagggattttactggtccacaataatttgtactgccaatcgagtcacaaggtcatgtgaagcatgccaaaagttctccccttgctcaggcaaccctttgcaattcaccaagct

SEQ ID NO: 22241 - DNA, 1069 bp, Zea Mays
aatgtaactgtcatgtacgacatcgcgcccgcgacatacgcagggcagccgagcatgcagcacaggaggcggctgcccaaaccaattagctgctaggattaaggaaataaaagatatctagtctattatttaggaagggattactcctttctgttagaagttatctagcctattatttaggaggggattacccttttctgtttcagccgtgggctatatatagatgtaatcagcacttgagaaagggagaaaagaattatccatctctctctatctcctctcaagcccagccgccataaggggcataaccttcggtcctagaagacacggcaggagactacgaactccatagtcgagggccgcctacccttgatcaatacgcccttgacatatggtatcagcgatccagccgatcctccacctcctcaccagccgccgccaaccctagaccacctcccaccccacccttgccgacctcttcatctgaatcttcaaccagcccagcagccaccatgtctgagccgtctctcgccgacgtgctggacatgctcaagaccatgacctcgaagatgcagaccctcaagtccgacatggcagccatgaaggacaggactgcgtcagcgtctggcaccgccgatggcaaccagacagacaggctccgcgatcaccacttcttcccgagccataagaagtgggactttccccgcttcgacggcacgatcgatccaatgatcttcctcaacaagtgcgaggcttacttccaccaacatcgcaccatggcggaggagcgcgtgcgcatggcgtcctatcacctggacgaggtcgcgcagctatggtatatccagcttcaggacgatgagggcaccccatcgtggggacatttcaaagatctcctgagcctctggttcgggccccccgctccggtctgccccgatgttcgagctcgccgactgccgacgcaccggaacccgggaagagtacgccagccgattccaggcccttctacctctcgtcggtcgactggaagaggcgcagcgtgtccagctcttcaccgggggttttctaccgc

SEQ ID NO: 22242 - DNA, 281 bp, Zea Mays
ggatgtagcagaagcaactcggcctgaagaaatcgacacactgcaggaagaacaactgaacacgatgatccagtcggctagatatcagcaaaccctgaggcgctaccacgacagggcaattcatttctgggtgttctcaatcagcgacatggtgctttgatggatactatcaagagaaatatgtcataagctatcatcgccctaggaaggaccctacgttgtcatggaggttacatggccaggttcctaccagctatctcaaatggatggtactttgatcg

SEQ ID NO: 22243 - DNA, 367 bp, Zea Mays
tatggtttggagaccgattggttgttcctaaaaatcccgagctcagaaagaaaatattggatgaagctcacctttccaaattttccatgcaccccggtagtaacaagatgtatcatgatctcagatccttgtactggtggacccgaatgaagagggaaattgctaaatatatatcgaaatgtgacactggccagagagtcaaagctagtcatttgaaggtagccggaaccttacagccccttcccataccatcttggaaattggaggatatttgcatggattttattgtgtgattgcccaatacctcccggcaccacgattctatttgggtcattgtggataggttgaccaagacagatcatttctt

SEQ ID NO: 22244 - DNA, 569 bp, Zea Mays
cagcacctacaacagcacctacggtgtcacaccccctcagtacggcacatcctacgggggagttgcaccaccagtgttccaagtgcccacgccggcgtatccagcggcgcgctggaatcccactcacggtgggtcctggaaccaggactccctgacgcactccttcaacaccatgaccctaactccgccgggccctgagtggtatgcagattctggtgctggctcacacatgacctcggatgctggtaaactctccaccatttccccgcctttttcatctactccttctatcattgtgggaaatggtgctttgcttcctatcactgccactggatctcacacattttctttaccgcatcgtaatcttgttctcaataatgttttagtgtctcccaacatcattaagaatttgatttctattcgtcgtttcaccaccgacaataactgctccattgagtttgatccttttggcctttctgtgaaggatttgcaaaccaggaacgtgatcgccaggtgcaatagctccggcgacctctacccgttctatacaccatccaccagcacctccg

SEQ ID NO: 22245 - DNA, 664 bp, Zea Mays
ggaggagttccagacggagtcgcggcggttcgaggcggagactcgcgaggaagtgcagaggctgagggatttggtatctcgagtatggtccccatactttacatccataaactattatctattgagctcatcacagattcacagttcagcctggttgcaactagttgcttggcatctgggtgaaactggtaaatcgttactaattctgttcgcttgggcttgctcagatcaaccggcaataatagggtatagggcagatgtgtttaatatgctttggtctgatctatacactagcccgtcttctcgtctaaaaactagccagtagcctgtagtttgttgattgatctttgttggcctgcccgatggaagggaccacatgggaagctggaagctagctcttgccatctagtcaaattgttgccttgccatttagtcaaattgttgccttgccatttcattgcatttcagatggaccggatcaatgcgggtgataaattcttgggccatggttgttgcctcctgagaaggatttgaattattgtcaagcctgtgttggtccgaacaaacattgtggcttcactatgcaaacagagcgaaaaagagcatggttatgagttatgacttatgtgatgatcagtaaaggctaacatgtattttatttggt

SEQ ID NO: 22246 - DNA, 659 bp, Zea Mays
attaaagaacggatgagaattctgaaatgggtacctgtgcgtcagctggaggacggcaaagcttcagcatagaagcagccgtctactttcacgcgaccacgccaaaaatacgaagcgccggcaccagtacgcagcaaatgaagtcacaatttattgttgggccgaaaaatagtgggccggaagctagttcgtccaacttttggagcaatggagaggtctgagagctactggctgttagatctgcatcgaacggtacagatggagcgaccgcagaggcaagtcagattgcccgactgcagacgatcttgagttgcacgtgtcgcatctccagttctccgagcgcgagcgagcattatctggcccgtacgctgtgactgttcggacgtcactgcgtgtctgctcacttgggactgcattcagagacactactggtggtgtgtgttgtgtgggcgatgctgtgctctgtctgtccctgtggtacctcgtgtccgtctgcgcgcgtgtgttgtgtgtctagagcagttgactgcctgacactgtttcgctccagcgctgtagcagatgcagatgcagcaccgccctttgcttgctcggttgctccccacgggccacgggacacggcttgatgcgttctctcttcttctgctactagctagtcg

SEQ ID NO: 22247 - DNA, 858 bp, Zea Mays
caagtgaatttactataatcatcaatgaaactgatataatatttattgttgccgaaagaatcaattgctggaccccaaacatcagaaaagatgagatccaggggagcactagacctactaaccgaaataggatatggaagctgtcgtgccttggcacgcatgcatgcatcacaaacggatgacttattatttagagtggaacataaaagaccattatctctaatgacacgaaggacgatctcatgagccggatgacctagccgagcatgccagcgatgaggtgaagacttgatggcagatagaaggagcttctgagtggggttcagctgggtcggtaagggatagagaccacccttacaggggccgcgaaccagcaccttcctcgtggcctggtccttgatcaaaaagacatgaggatgaaattcaataaatgtattattgtctagagtaaacttatgaatggacacaagatttttttgtgtaaggggaacatgaagaatattgtgaaggtgtagagggcgggtggacgaaggtatgacagatgagccaatacagtcaatattcatacctgcgccgtttgccgccttgatttgttccatgccattatatcgttcatgcacggtcattttatcaagctcgccggtgatatgatcagtagcaccggagtctaaataccattgtgaatcactggcttgaaatgtcgtcgcagatgcagcaagacgttgatcagggacgaaatcctcgtcaaaccggtaccagcagatgttggctgtgtgtccgattttgaaacatatttgacagtgaggacgagattggcccccagatgaatcagcggaagagcgacggttggatccacca

SEQ ID NO: 22248 - DNA, 429 bp, Zea Mays
gtggaggaggtggtaactgagcccaagaagcttaagaatgattcgccgaagcaaccgacgccgtaggttgctggttgcccacatattcggggatatacggtgaatagcatgaagaagtatacaagacctgcttcggctgattttgtcatgcttcagcttcagcgatctccttctgcttttggatcgtgacatggcacatccttgttgtgtgtcccttatcctccccatagaataagcagaacaatctcctaggttgagtgccaaaccttcctccgaagcttctcccccctcttcctctcggggctggtggcctgtaggaagtttgctgcatccccaaagattgtgagctttgctggctgctctaggggtgatttgccctatcatcatttgtgttgggattgtggattgttctgacatgcctgggtgaag

SEQ ID NO: 22249 - DNA, 381 bp, Zea Mays
ctaagacaaatgaaagaaactcgggggatgtatgtgaagcaattcaagtccacgaatgagcacaagctcctttttctattgatcccactcacaaaaaagcagaacgcgacgaccaagtcacaagaaccgagcaagctgccacattctgctcgaggctgggaagcaggcaccacctcgccactatcacaacacacacaacttcctagacatcctgatccatcctagaaaatctcacatcagaaggcctcaatggataaggctacgaagaaatcaaagcaaccaatcacaagaaggagagctcagaggaaaagagcgacatagagtttaagacggacaatatcacatgccaaagggcactatccgatcattcgagaagttcat

SEQ ID NO: 22250 - DNA, 319 bp, Zea Mays
cttcagtggaaaatggcaacctgcttggaccttacttacagtagggctatcggtatggcactggcagtagaagccaaaaatgcaggacacggaaaattcaaggggtttggaggtgaaaggtcaaatcaagggtctcagaagagaaccaggttggtaatctgaccttttaatcaaaatcgttcttcgcctctcccaccttcatatccattctagcagcctgtttttattagtcccactactgcccccgctcctaccaatcagtcgagtgcccctggtactcatttccctgctcttcccggttcttccactagttgcttca

SEQ ID NO: 22251 - DNA, 1264 bp, Zea Mays
ttgaaggtctactcccaatggctgtggactgcaatcttcggcttcacagccaacaatgtttcctctggaacctccagggatgaaagattctctgtctgatatgttctcaggtttaaatgtgtctcctttggaaacaattcgagcttcttgggatgaagagtccaactgcatttatcaagcgaaaaactgaacgaacaaaagcatccatcctccaaggaaaagaagcagggccctgcatcaatttcattatccatgtatttcaccgggagcatagtgatggataagttaggagcacgatcattgtcagtagtagtgacactgatgcaataagcattgatggatccatttccctctgacaagccaaggaataaagagccatgtggggtggcgcgaccaacgaatggtagccccttggtgtcaattttgtgccactcgactgaattggtgtcaaatgcatatgtgccccaaagttgattgaatgataccagtatgtaggtgtcgaccaccacataagacgtgataagtacaactggcagcatggtataaacaaatggggtaatcttccaagggaagcaaggtggatgtggtagctcaatccaggagcatccctccaggtgggagcggtcgtcaacaatgacaactttggctttggaaagatcgagtacctcgaaccagggtgggaaatcggggtctgtgaaccagcagagagtcttgcacagagcataaaccttgtcccccattgttgttaggacagggcaccactttgtagaattgagagtcggcccgtgaatgaccttcttcgtcttggtgtcgaagatgacggtgtcacccggatcacccccgaccctaatgatccacgcgcggtgcactgaccgtagggacgtgaaggtcataccgccagcaacggtggtcagacgggtaactcggtgcaggctcttccgcttcacccgcgaaggaaaggaagtggcgacgcccatcttgtacacgacgtagggcatggaattcctagaccaatcccagtggcatgccacaaggtaggcagatcagacctggccttcatacaactcatcgctgacgatcctcgtcgggtcgagatgttctgtttcttgcatcagcggatcgccgtcaccgccgcacacgatctctagatcccccatctgaatctgatccggatcttcgcttccttccagctccactgatggcttgacccttccatgacggtcgcccgtctttctcttcctgtggcccatccttccttaaggtc

SEQ ID NO: 22252 - DNA, 338 bp, Zea Mays
cgatcggcgtggttcaccgtggcagagagttttaggtacggggaagagtcggcgtgtctaggaacggctcgaccagggtgcgggctcgtgatttatagccccgaaacggagccaaacggcgccaagggggacgacaaggggtgtactcgccattgatggtgagcggcggttacaggaagaaacgctagtgctagtggggagaaaaggaaggggcacgggaatggggaataaatggcggcgcgacgaattgctccacaaatgcagggcacgcaggaaggcggaggggtgtctgtagcatccattcgaatggcgacggcgtccacatcagctgaacccgc

SEQ ID NO: 22253 - DNA, 805 bp, Zea Mays
gctgtggatcgttggcgtcattatctccaacggagcgagtttgaaatccggacggatcacaaggctctcagtttcttgggcagtcaggagctgcattctgagttgcaacgtaaagccatggcaaagcttatggggatgcagtttaaagtaatctacaagccgggcaaggagaacaaagtcgctgatgctctttctcgggtgggctgtgtgatggcgttgacagcagtcagtgaagttcaacctcgctggattcaagaagttaccaattcttatgtgactaattctgatgcgcagtcgctgttgactcggttgtgtgtccacagcccggatgagtatggttactctctttctcagggagtcatcaggaagggcactttaatttgggttggccacaattcagctctccggacgaagttggtggcagcattgcatgacagtgccacaggtggtcactcgggggtgcacgccacttatcatcgattgaagaaattgtttgtgtggaagggcatgaagaccgatgtggaggattttgtcaaacagtgtcaaatttgtcaaaaggccaaaggagaaagagttcacccggctggtttattgcaaccacttccgattcctcaaggcgcctggcaggatattgcaatggatttcatcgaaaaactgcccaagtccagtggctatgatacaatcttggttgtggtcgaccgtttctcaaagtacgcccattttattgctctgaaacatcccttcactgcagcacaggtggctcaggttgtgttggatcaggtggtccgcttgcatggtcttccga

SEQ ID NO: 22254 - DNA, 292 bp, Zea Mays
aattaatcggaggagagttatcacagaccacgtgaatctgcaatcagaacatatgctttgactaaggctaatggaccatattcgcaggcgtccccgagaatagatcaataccaataagtcaaatgtggatatgatattaatcccgggtatatccacatctacatcaggtagaagcattcagaccaatatggttactcctcaacgatttctggcaaactccatatacataggagtacacactaaacgacaagtttagtttggcttttgtgcgttttatagaatattgaggcat

SEQ ID NO: 22255 - DNA, 780 bp, Zea Mays
tctgaacatgttcaggtcaatagtaggatcaacttagccttcctttttctcctaagtttatacagcaccaggttcccatggcttaaaggaatttattcacctatacgtgatctcccattttgccacaaaactctcaattcaaaaccacagggatttgctgcacaggaactctaaactgatcattaacactgaaattcagtctatgccagatactatttccagtctgaaaattcagactacactaactgcgctgaacttcttcagttcgactgcagagccagattcatctttcttttgctcccatttcttcatagggacagagctacctccccacatcaaacttgcacactaatatatgttgttcaactctgcttataaagatatggcttaatactccaaggattagtcacaaaatagctccaaaaatttggaaaatcacactggaccaaagctacagttgactgaataaccttcagtcaacgcagactgaaagtccaactttggacagccattacttcacttttggtgtgggatcacgcccaatatacttaaaggcacttattcactaacatatggtcttcaaactttctacaaaaacttcagtccaaaaccttattgattaagcagaacaagctccccaaacagcactcccaacactgatttagaattcagacactgcaaaatctgaaaaatctagaagtctgataacccctattttaagcagctattgctccactttttatgcagtaccaagccaaccttccctaaaggaacttgttc

SEQ ID NO: 22256 - DNA, 305 bp, Zea Mays
gctgcttgacgaagaggtacaacatctgcacgattatctatttggtaaagggaagctggcattggtatgagattaattgttattatgttgttgtttcctccatcgctgctttgtgcagggaaccggtatccatgctgcaatattcccaccagtcatacaaaagttcaagcctctgataaaaggagtcgtctacaacatcacatacttctgggttagagcctcgaacaatttgtacaagcctgttttcaatgagaacatgattacctttacaaactggacaaaattggaggaggttgttgaggttc

SEQ ID NO: 22257 - DNA, 420 bp, Zea Mays
cgtgtccccgctaacagcgcaacagtgcatggtcctacgcaagcctgggctcaggagtccccagagggtagaatgccagtcaaccatggcctccccaacccggcaaactccgttgtccacctcgcctactaaggagtggacacagatcgcccagcaaagggaagtggatattccgtaccaaggaaggaaagcacaatgggcaatcaactcgacaccttcgccctcaaagtaggatgagaagaagcacactgctacactagctccattcttccccgacatccttttcattcaggggagattggagtcatggcccatctctgatgatgaacccaccgtgctgggggaagaacctcaccaacgcgatgctcaacgatggagaaataggcgttgtaacgtgcagcgacatcacgaagctggaga

SEQ ID NO: 22258 - DNA, 458 bp, Zea Mays
gttctacattgctctcatctcagcaacataaaagggaagatttccatggaggctatcttttgagaccactcaccatgactgaacccgctgtgatacgctccagggaaagtaaccacaaactcccctgcgttctgaactaatctgtttggagatataagaaccaaccgctcatcaaccaccgaaggtaccaaaggaagtcattcggtaaaggaaggaaggagtagaactgcctgcagcagggaacccctgaatccacgagcacttcaggggacatcaccgtcgtcttatcacccagcaatgcaaaggtttctgcaccccagatcgcaatcccgaaatacaaaatcaaatgacagttacagcagcagagaacaggggtggtaggaaaattatgcaatgcggctgcctcacctaaggagttcacctccccgccatacccatggacgcgcaccacgtcctcg

SEQ ID NO: 22259 - DNA, 654 bp, Zea Mays
tgggcacaacaccggcgcagaggcaccaaagggtggtggtccatggcgagatggctcggcggcagcgttgcctcacttcggtgaggaatcgcgtgcaacaaagggcggagaaggggaaataagagggcgggggaggttggttacctcgagggaagactctggatccttgaacggcagtagtggcacgacaaaggctcgggtcgatggcgatgtcgttgtggttgcgcagaagaagtctggtgagcgtgggcagagagaaccaaagggggatggagcaaattgaggtgcgtcccgagctgcggacgtggatgtgaaactcaccgaggcaacatgcacggtggggcctcaacgtcgacggcgaaacgggcgcgtgaccacggcaggcggtgacaatccttccctagcgcgcacggttctaggcaagggtgggggctccacggatgcatgaatgagggagggggagagtgagtggggctctgggagctagaaatggctgggggtggtcgatcgtgggctcggcgtgcgacgtgggtacaaactccacaacatacacgctggacgtgcacgcagacggttggaggggatagggctgataggtggggccggggcgtcagcgagtgagcgaacaacacgcggcgacagggcgggtccacg

SEQ ID NO: 22260 - DNA, 441 bp, Zea Mays
gtggtggcgtagcagtggggagatgttgcggcggcggagcggatgaagacgaggtacgccgagtagccgataccaggttgtcaaggacgtcgggaccttgggtagctggcccttggctttggagttcgtagccacggtctgtcttcgccaacgaggttttgtccctctgttgtcggcttgttgcgagagagacgggagattagagataatgatcttgcttgcccttctcaatatgtggttacatgaatatatgtggcctagggccttaaccaatctctcctagacttaaggaataaaaatagaaactaaccactctttccaaacttagtcacacagggtggcctcctcctgcatgcgcgcagcgcgttctgtggctgcgcacgtcacgacggtgcctgtacatgcgcccccacttgacaggtgcatcgagacaagacagat

SEQ ID NO: 22261 - DNA, 499 bp, Zea Mays
atctgctccgcccgaccaactcaccgtcgattaacctgtgcaacgcaaatatctggtctagtgctactgatccacgtcagctatgaccgtatgcatcaccatcacgctacgttcggacatatgcacagcacaccgaatgggcaccggggtctctatagtgacccgtacattagaaggacggaacaacacaccatactgagtgtatgcccatgtatgctgacaggtgacaaagggctcatgacgacaggagaagccatgtcacgtgcgaccacaccatgagaatgatccatgggacccgccacataccactacaaagacgttagcgatggactcgctacaggagccagagtaacagacaacgccataccgggagtatggctacacatgaccctatgtaagacccaccacgacaacccgggggagccaatatctctctttactagaaaacagatctcctctataaggtcctacccttgagatataaaaggtaggcccccct

SEQ ID NO: 22262 - DNA, 431 bp, Zea Mays
aggagatgcgccaagagcgggaggagatacgtcgagagctgtgccaagaacgagaagagatacgccaggaaaggagggcgcaacagcaacaacaacaacaacagcaacatcagcaagcaccactgcctccaccaccaccaccagttccaccccgagataagcaccgggagtccatgagccataagccactgacatttgctagttctcctgatccactggacacagatgattggctgaagttcgtagagaagatgttgaacattgctcagtgcactgactgggagaagatgttatatgcttctggacgtctgataggacttgccgctgattggtgggattcatacactgctgcccacgatgctgctgacactatcacatgggcggagttcacgacgcagttcaggaaccatcatataccagctggattgatg

SEQ ID NO: 22263 - DNA, 638 bp, Zea Mays
gtatttgtgtttaatgtaaccgttgttctcagaggtaatgttcgagtaacgacttggaattgttgagtcgcattttaattccgcctgcatattcgtagagaaaaaacagatgatttactgtcagtatcttcagaggtaacagccgaatggttttttgcgacgccggcgttttagaggtaacagctgagtccttttgagccacaccagcgttttagaaataacgaccgagtggttactggtgacgtcggcgttttagaagtaacaaccgagttatatcgagccacgtcgtcgttttagaaataacgaccgagtggggactggtgacgtcagcattttagaagtaacagctgagttacatcgggccacgtcggtgtcttagaaataacaaccgagtgatgactgggcacttttagaaacggtgcctaacccgggaaaaccccatttgtaccgtgccgtcgcacgcctctgcattctgagccctagccttactttctgcttccagacctcctctgtttccctttgatcttgcttccgcttagttcgctgacgagattgagatggcacccaagcggaagagtcagaattccaccgctgcggttattcctcccatcgatcccaacagccaattacctttcgca

SEQ ID NO: 22264 - DNA, 557 bp, Zea Mays
gaggatttggggatcgagtttagaagagttctaggaattgactacgaagatatcttctcaatattcctaagaacatctctgatatgtttggttttgacttttgatcaagtcaatttggtcaagttttgtctttagaatcgaatttgtgaggatgttgttcgtgtaagtcgaacaactatggttgtcacacaagacaagtctggtgtgaaggagtctcactctagcgtctgatgtacatgggagaaaccaaactagacaagtttggtgtgtggccagccaggcacactatagacgtgtttggttcgacaagatattgagaatctagcatgagaatccaggcaagtaaccaaatggtgtgcattttaagtctcagtatcccgcaggcctatgttgtctgcatttgcactctttgaatgagtggccaaactagtccgttgcagatcctagactgcttagtgtgactgtgtgagtgaagatggcaacgagtaaagactcgtcgggttttgctatcctagacctggcccggtcaaactaaaaactccacacttcaatactcg

SEQ ID NO: 22265 - DNA, 1176 bp, Zea Mays
tggttggagggacagagttcaggcatttcttggtagagacctgcctgctgatgatggtgcagaccgtactgccggggtacagattagttggttgagacagtccttcagagtgtgtccacaatatgctgacgaggacaccgttcagcactactgtcgagcatggatcctccacttgtttggctgcgtcctattcccatacgcaacaggggactgcgcattgtggatgcacattccttgtctcaccgactgggacacaataggtcaatttagttggggctccgcggtgctttcttttctctaccgccagctttgtgaggcgtgtcgacggacctcctcctcgtcctctattggaggttgtgtgtacctactccaactctagatgtggttttggataccggtcggacgtccacaggcgttccctcctcggccttggttccatggtgttcctcctcgtcgactccctacgtacacatacatttgggaccaggtagccatcccatatggcagagcaaagcgggcatacttggagtacatcaacgagccggacacactctcgacatccagcgtaagtgttcaacaattataaagcatactaacaatttcgtagcatccaacgtctgatcttcatttatgcaggtaatatgggagccatacaacgcaccaggcctaaatgattgggaatttagtgatatgtgcagaaatgatgacgacttatataggatgaggtgtcctcttatttgcttctggtgcgttgagtggtaccttccatatagggttgcgaggcaatttggaaagaaccaacattggccgattctagattttccaaccgatgtggcgttgcacaagtaagtttggtttgtcaaataaattaatggtttattatcttctatgtacaaatgagttatgtggttcacgttcaggtttgatcatcgaaaacaaaagaagatcactgacttcagaaaacaccacgaggccttcattttagattggcaggatatggatgataacaatgacgaaaatgaggagccgcacaacaacaacgactacagatagtaccaggcttggtaccaaggtgctactcagacaaagttaaggagccagtggatagatgtcgattacgccgacatcgatttatctgaggatgaagacacgacgtatgcccaatccactagagtt

SEQ ID NO: 22266 - DNA, 430 bp, Zea Mays
cggagcaattgatttaagtcggcaatgacttaagacggtgcaacatgctcacgcttactcgacttagggtgaccactataccctactaacggagcaatcaccttaagtcggcattgacttaagacggtgcaacgtgctcacgcttactcgacatagggtgaccactataccctactaatggaacaatcggcttaagtcgacaatgacttaagacggtgcaacatgctcacgactactcgtcttagggcgacctctatgccttaccagccgagcaaatggcataaatcaggaaaagactccaaaaccagcacactgcacttacttctgcaatcgttcaggatgactgttgaattctaacaacagaaacaaaatgttatagtttttagcaccaaggacacattctagtaccctatccaccaagtatccgaac

SEQ ID NO: 22267 - DNA, 380 bp, Zea Mays
gaggcttatgggtcaaggggatgcagcgtagtgtgtatatatagtctcccaaggtcctggctgaggaaagaacgaacgacatgagaatctcggtgttcggtttgctgttggcccatctctgacgcgaggtaagagaacacctaacaagggatccctgctgtcagcgacattcgagtgcgatgtggatgcgaggaaatgtgcgggtgagggactaggtcggccgagtgtgagaagtgggacgcgcctgaggatgagctgtgggaagggaatgtgcttttctctttccttttttgtttctttttaattttcttttatgtattattttcatttttattttctgttttgcaaattcaaatttgaacttgttctgaaactaaatc

SEQ ID NO: 22268 - DNA, 668 bp, Zea Mays
attggtcacacaggacaacaaaaacttaaagaccatagcatttcagtccagttctgtaaggctgaggggcaggcctggtggctaacatgtgtatatgacccacagggagagggaggaaaaatccagttcctcaggaacttagagatattagaaatgaatgcgatggtccttggatggtggctggagatttcaacctcatctatagctttgctgataagaataattccaatattaatagggcaatgatgggccgttttagaagagtaatcaacgaccttgctcttaaggagattccactacatgggcgcaagtatacatggtccaatcaacaagcaagtcctgtattagttaagctggatagagttttctgctctgtgacttgggaacattggttcccaaatgttctcctccagagcacggcatctcatgattctgaccattgtccgctccttccgggcctcacatggaacaaacaggggaagaaacgctttcattttgaggcgttttggccaaaattggaaggtttccatgaggttgtccaagcagcttgggattcagtgcaaaatatcatatgtccatttcaaactctagacagaaagctaggggcgacagcaaggaaacttcaaagctggagtaataaacaggtgggccacgtaagaattcagctt

SEQ ID NO: 22269 - DNA, 324 bp, Zea Mays
gttttcaataggaatatggacatgattatgacgagacttttttctcttgttgattagatgaccacttttcgcatcctccttctggcttctgttcgtgagtggtccatctctcaacttgatgtcaaaaatgcctttcttatggtgagttgcttgaggaggtttatatgcagccaccacctgagtatcctattcctgagggcatggtttgtcgcctttgtccctccctttatggtctcaagctggctcctcgggcttggtttcagcgtttcgcttctatggtcactattgctggtttttctgttagtagtcttgatcctgctttgc

SEQ ID NO: 22270 - DNA, 351 bp, Zea Mays
caagaaagatagtgtcagacagaggaacccagttcacctccaaattctggacaagccttcagaaagctatgggcaccaagctagatttcagcatcacctatcaccctcagacagacgagcagacagaaagagtcaacaaggtcctcgaagatctattaagagcctgtgtgctaacattcgatagaagttgggaatccagtttgccttatgcggagttctcgtataataacagccatcaggccagcatcaagatgtcaccgttcgaagcattgtatggacaaaaatgccagacccctctcatgtggtccaacgtaggggaaaaggcactggaaggacctgcctttgtcaaag

SEQ ID NO: 22271 - DNA, 521 bp, Zea Mays
gtaactcagcaaaccaaggtcactcatgttgaaagtgtgcatcatatgcctcttgaattcttctattcttactactgatggtccacatattatgagatcatcaacatatactcccaccaccaaaagtgattcaccagctccctttctgtaaacaacatgttccacactgcattttttaaaacccaaagagatcagttcagcgtccaattttgtattccaagctccgggtgcctatttcaaaccatatagggccttgtgtaatttcaggaccttcttaaccttccctggatcttggaagcctggtggctgggacacatatacttcctctctcaaatcaccattcaagaaagctgtttttacatccatgtgacgaatctgccagttaccatgtgctgctagagcaagtaggactcttactgtttccaatctggcaacaggagcaaacacttcatcaaagtctatcccttctctctgggaatatccctttgcaacaagtctagccttatgttttaccacttctc

SEQ ID NO: 22272 - DNA, 1290 bp, Zea Mays
gtgatatttgaccaactttggaactaaattatgcttgatctagtgagcaaatgactaggatccttatgacaaagttgaagctggcatataggagaacaactttgccaaagggtggtaggtgtgtcactgcttggaacaggaaataaaattgacccaaacttgctctatcagactactttggaatgggattcagaatgtttagttaacgaaagaagatcataggtgtagtgcaccttgtggccgctgatcccatgccatgattcgcgcccatcggtaaagatcatgatgcgtttgagcgtggataaacgttagaggtgaaaatatttgtggaggggtggatttggtcactggccggctcgaccaccgtacccacttgcccgcgcgatcggccgagctatcgccgctggaggtctccattttcctttacacgccacgcaagtacatgcttaccacgtcgctgtgaaggtgtccgatggtaaaacacgtcccaaagccctccgtttacccgcgtgccacgacgaccgaccctagtgaaaaatctaagcaccatcgtgagcactcctatcccaaattcgcgaagcaagcgatcaatccttttaaattgagtgccctccctgctcttgttacgcacccagcgtaccacccctcactctagatcatcgaccatagcccgagaattccggatttcccaaaaatcagttggaacgccatcgtgaaacacctcgccatggccagtccttcttaggttagttcatgtccctctggtccatgttttagcatcctctagtgttagtgaagctcactgagctccccgattgaacgctactacaacagagcatcgagaacatcatgtcgccgcctcagagcaccatcgagaacgccctcacgtcgaacagccctcccgtgctcccttcgtccaaattcgctcacgtaccacacctttggtgagccaatgatactcaacttcaatttaaatgctaccacattatgttgcttgtaatgggctcgtcagaactctagcccgatcgtggctagggcagatgcaaattaagaccaggccagtcgaactaggttaggggatatgctcgggtagtctcagcaggcatggagtctggctgcttattacctcaagagggggtcgtcggcgatgagaacacgtgactccggccaggtgtttgaccggggcgccgtcagggacctaaagtcgtgaagaaatagaaataggtggacctatatgaagttgtcagtgacatagtggaacagtgccgcgggcgctttactagatgttta

SEQ ID NO: 22273 - DNA, 327 bp, Zea Mays
cagcattgataggcagtaacccgcacgagtaatggtgagtcattgccctcgatatagtaacgtgcgagtaattgcgcggcccacgtatcgtggactgggcacgccgcctgtcagtggaatggacaggcgcacgccttatccgtaatgaatgcaaagtcgcgtgtagcctagaggcgtcatgccaggttccgcccgttggcttatgccgcgcgtagtatgccacgtggcagcatcgggtctccgcctgagcggggatcaggagtgtatgcggacaggtccggacacgtgtcggcaccggacccccacctgggccctgattaaagcccg

SEQ ID NO: 22274 - DNA, 370 bp, Zea Mays
ggagtttgcagtagcctctacaaacagcccagctgatcagctcgagagaggctgcacgaacctcatgttagtctcctcctagggaccgccattgcgaccatgtttgggaagaccaccgagagacctggggtacatgcggagtctcagcactttccccccagcttaaggagattcaatggccatccaacttcaaggtctcaaacgttgataagtacgagcccaagcaaaacccaggtggctggttggccatctgtataaccgccacttgggccaccagggcaatggaggatgtcatgacaacgtacctgcccatcattcttgggtaggacacggtgcagtggttccgacaacttccccgccattacatcaa

SEQ ID NO: 22275 - DNA, 519 bp, Zea Mays
cctccacatgtctgttgcgtcgtcatatacactactagcttcatccccatcatcgcatgaatggcccaccaaaatcaggatccaagccttgcgggcgcgcgacatccttttgctgttttattttgccaattattctgttgtagatttttggtgtagtttttgggaagttaatctgttatggattttcttgtgaatttttcggaatcacggaacctacttggttttattatgcctccacatgtctgctgcgtcatcatatacacttctactactaatagcttcatcccggtcatccaaccactgtggttttttggtgcactttttgttggggaagaagccactgtggttgagtgcatcggttctaggtgtgaggtaggcggaaagctcatccaacgtttccaggatttgaagaaagagactcctttacatgtggtacctttgatgaaagtagagcggaggatagccatatatgtcattgaagtagtcttgcatcaaccaatcatggatggtttcatgatc

SEQ ID NO: 22276 - DNA, 281 bp, Zea Mays
gcgacacaacagggactgggctagagcgatgaggcggccttaccaggcggggagcaacgtgagcagcttgctagggtcgaagaagatggccggagaaggcacgtgaggcggtgcagcggttccgcggcgtgcacaggagcaggacgacacacgaggaggttccttggtgtaggggttgttgtggttttgtggaagaagagagggggctgggcgaggttcacgagtcacgacgacagggtgtgttgtgtgtatatatagtatacagagagaaaagggtgtgg

SEQ ID NO: 22277 - DNA, 820 bp, Zea Mays
gggccttagagtgcgaccctctgctgaagaagtcagtgctttggttgcctcgcttggggagattcctgatgacgaacggcaggttcattttgaggtgcccctgaaccctagtgatgcagagataagcgctatgcttgatttgctagctgaggattcatccgatgctgctcctgcttagacgttggtagtggcgcccctcccagaggctgatacgactttggatgttcagaagcctgtcagtgctcgcccgaggcgcccttgccgaaccaatcagcctgatccttctgttgatgagcagaagaagaaaagaagacgcctccggcgagtgtccagttttggtcaggacgctggtacctcagttcctgctattgcagaagtgcctgcgactggatttactgacgctgaccccaatgggtgtacccaatccgctgttgatcccatagtgggtgccccatctgttgctgatcccaatgggggtgctgcttgtgttgccaatgtggatgatgaggaagaggaaaatgagattcctttgacttggaaaaacagtcggcagttcatcgccagtggtgaaagtagtggagttccctctcctgctttgtctgccctcattggtctgcaagaactgtccctggccaactttgatcagactctggaggatatggtcccagaggacttgttatcggagccagtggatgatggtgcaatggaggcttgcgctgacgtgcccgatgctggtttgaggtcatctcgtgcctcgtcgaccttagagcgcgatctcgagggtcgggagactgacttggatcgtcctggtcctatggaa

SEQ ID NO: 22278 - DNA, 703 bp, Zea Mays
cacatatctacagaaaacacaatttagttcatcaaacatacagcacaactaaaacagcgcgtgcagtccaaaacagcaatcaataaatttcagctcctatataattcaagaatcagtcgtgttctagagacttgaattattctaacacttcaccgttggttagagttaaattagtcaaattaggaccatcaagttgactcataaattttatccaagtcatttcgtgctctagatttaacatactcaattaaccacgcgttctccacgataatcaacattgaagcgcttttcaaccaataatttgcattttaacttagacatcacctgagcactactacttttcattcgcaaccataaccatacacatttagaccacaacaagcaattcatcgcgactacaaacttaaccaaagccatctaacaagtcggctagccagagtaacaatctaggccgctacacatcctacacgtcggcttgcatattatcatcgcaatccgagacaacacatatataacaatcacttaacgaatttgactcctattcagcattagttggctaattacagcataagacttagcaacccatttagacattgcaactcaaaacatgggtgggagcagattaattaacgtttcttaaccttttcttcaacttaaacaagacaacacacaagtcacatagaacaccatattttaggaggtc

SEQ ID NO: 22279 - DNA, 444 bp, Zea Mays
tatagtcatggctgcagcaacctcaaccaaggctggcttctcatcaccatcaaccaatctcagcacgacaagaagcggtaaagaagctctaagacaatcctcaattgaattccaaaattcttgagagaaaacaatgtcatatgcttttttacctgcctctgttttggataccttggattgagtgaaaacatcacttgaaaatagacctttcaatgagttcttgtgcttgtgcaaactcttcatggtaaggaagacaatagcaaatctagtagcagcaggtctcacaagatccatcccatttgtacgcaccctcatttcactaagtatcctctcatgtctataaataaaagtggtgacatgacgagcacgagcaataagcttcttaaaatccttcagttttcctatgtcctccaacataaggtccaagcaatgtgctgcacaagg

SEQ ID NO: 22280 - DNA, 572 bp, Zea Mays
cgttggtggcgataactaggataggagtgtgatcgagacacatccaatttaccaccaccgtcacaaatccgcggtgcgccgtgggctgaccaaggcactgcttgaatcgttgtaaggaccctctccccaaattcgccaccttctcaatttcattttgcacctagtgtatttagtgatcgtgtaccgtggagcgccgcaggcattccagccatggcgggccgccgtggcacctctgtgtcatcgccggagtttaaccgggggggaggaagatgcatggtagcggttgagatctggaagaacgaatgtgattagatcttaggatacctctttgcgacattaaatcaggggcgtaagttcggtattgggtggctaggatctgaacgtggatcctcgatcagagggcggttgtcgtgtaacggttgaagttaacctagatctaatcgtgaccgtagatttctaatccgacgaccgagagctatccataccctttcagccgtgtcattttacctaagagtccctgtgttttatcgaaaccaacccgccgtccacggcagttataaagtatttagacc

SEQ ID NO: 22281 - DNA, 432 bp, Zea Mays
ctgcgcggtaacgtcaccaaggccaggaaggtgctgggcagcaagggcaaagggaaggggtttgccaggttggtgcgaagctccgtggtgggtgacccgctcatcaagtatgccaggctgatcagggacgacctcaaccagtggatggagctgcaggagctgacctagagcatcggcaatgtcatagcgtcgactgccagaagcacgccgtcgttggtgagggttaagtcggagcatggatacccagtgtccaagaagtgcagctatgtcagggagctgttggagagagatggggctcatcgagtcgtcctcatagtcggtctctctggtatcgggaagtcatgcctcgcacgacagattgcttctgatccgccacttagtttcgtggatggtgcagttgagattggttttgggaggtggtgcagcagggca

SEQ ID NO: 22282 - DNA, 643 bp, Zea Mays
gacacaattttcactagccagttctggactgaactatttaccatggctggagtgaagttacaaatgagctcagcattccacccacaaaccgatggtcagtcagaagttgttaacagaataatcaccatgtatctgcgctgtctagctggggaccgtcctaaatcatggctgaaatggttaccatgggcagaattttgctataattcatcatatcaatcggcactgaaatgttctccattcaaagttgtctacggacgggagcctaaatcaggttctgcaccgcaaccgctggcttgagttggttcaatagttttaacaggttctgcatagaggatgatgacaacacgagtcgaggcagcggggatgggggcactagcatccacatcactatgctggacggtgtcataaacgtgaagtcactcttcaccctcgccaccatcctggccctagtgtggtggtcctcctctgacgagcccaggctccctgatggtgctgctgactacacgggcaacccctacgccacggcaagtccgacctcgtctccttccatgtatgggtcttcacctctgtagcctcattgcactatctgaagcagctcgtccgttagagctacagtcacaaagccagttttgacagaaaccta

SEQ ID NO: 22283 - DNA, 870 bp, Zea Mays
gcaatattaaccagaagaaacacttacagtggaatcaaatattgtgatgaacctgctatatttgcttgggaactcatgaatgagcctagatgtgtgtccaattcatcgggtccgtatattcaggtagattactatgtgaagaaccccttcgcttagaaagtgggcatatgagaaatcattaattccctatcattaaacctggagtttatttgcagtcttggatagaagaaatggcagcatatattaagagtttggacagaaagcatcttattacagtgggtactgaaggattttatggccctgggagaggtgagagactgggcgtaaatcctggagactgggcagcttcagtctgctctgactttatacagaactcagctgtcaaagatattgattttgcctcggttcacgcctatcctgatagctggtctgtatcattacattttcattactgaacaattttaattgtaccatgtcattgatgcatctttgctacaggctaccaaaggcaagtatggaagaaaaagtcaagtacctttctgtctgggttgattcacacttgaatgatagtgaatacgtcttgagaaagcctgtcttgtttacagaagtaggttacctccaacatgcagaagctaacagcacagttgatggagacattcttctaaaagttgtctatgataaactatacgattcggcaaaaaagctgcaagcaggaagtggcgctcttatttggcagttgatggtcgaaggcacgcagatgtaccatgatgacttctccatggtggcacgggatcgtccgtccacatataagctgatgaaggagcagtcatgccgactgcagagtctatatggaaaagagggagaccctac

SEQ ID NO: 22284 - DNA, 633 bp, Zea Mays
agcttcgcgccctccaatgattagttttctcgttagatccatagtggtgagcatatctatggcaaaggaggttgggtccacgcgtgcgttatttccctagcaaaggccactgtgacctcaagcttttccattgacagctactgcgacctcagcctttgtgttccttgctctagcgtgcagtctaggcttggcaacgggcgacctacgaggataaaaaatgggataggccggcttgcccaacgccatttttccagactatatcaatgctagtttgtacaagaagttgatgttgataattgttgaaatgtattgtgtgtgttgtgtaggggttctattttggccccttgttgtatgagtccttggtccatctaactcaaatattaataccactcccaaccttggttagggttagggattctatttctatcatgatatctagctaggtctacatatcttccctcccaccctcagccatcaaccccttgctcctcttatcccccatccgtcgccacttggctgtcggcccctgctctcgcggttccctcccataacgagtccctcttaagcggctatggccactggcacctcccccgccgctaatgtcgccgctccacccagcttgtttaccatcgg

SEQ ID NO: 22285 - DNA, 600 bp, Zea Mays
gaaaattttcctgttggcgtgttctactaccccattggattgtgggtggtagacaaatatgaacactgccttcgtgccaatggagttgcagaattccctgaagtcttgattgtcaaattgtttgtcgttgtctactgttaactcggacggaactccgaagcgacagacaatgttttgctagaagaacttttgcgctgtcttcgacgttattgttgacacagccatggcttcgatccacttagtgaagtattcgactgcgacgaaagcaaaatttaggttgccctgtgctgttggcagtggtccaacaatatcgagtccccaacgttgtagtggccaggtgtgtgcggtgagctttgtaaactacgaaggggtgcccatgcgaggtgagaatttttgacatacttcgcacgagcggaccactctgttggctatgcacacaatggctagctagtagaaaccttggtgcatgaccttagcagcaagagctctaggtcccgagtgtgatccgcatgttcctctatggaccccgcaaagaagttctatgccttcgacttcagttatgcattttagaatgggttggcttattcccttcttgtatag

SEQ ID NO: 22286 - DNA, 278 bp, Zea Mays
cgcgactgttcaccgttgtcgactgttcgtgcgatcgtctgccttcgcgcgacatcgattgtctgcttctgcgcgacatctgggtcaagtggaacttcatcgtcccaacgctcttgctcacttcgtgtggctgtctgcctccgcacaacattggctgtctgcttctgtgcgacatctgggtcaagtggaacttcatcccagcgctcttgcttagttcgtgcggccgtcttcctccgtgtgacatcagtcgtttgctttcgtgcgacatatgggtcaag

SEQ ID NO: 22287 - DNA, 656 bp, Zea Mays
cttcagatcaagcctttcaaccatctcacgacttgcaagattatggcaacttcctccatcaatgatcacctttactactttgtcttgcacttttgctctcatttgaaaaagattatgtcgctgtccaatttcagcttctttcatttgaacgctcaatatttgtgtaaccacaagagtggtactatgctcaaattcacttctcgtttgttcttccaatttatcaatgtcatctacatttcctgctttagcttcctcttcactagctgatgtatattctccatcatcagtcactaggatcacacgattatttggacactccttaatgacatgaccacgacctccacatttgaagcactgaataccactactcttggctgtagagcccactgatgtagaagtggatgctgctaatttagaacccatgattggagcagcagcgttctttccactataattgctttgaatgtgggatcgcaagactccagttgaaccttttgacgctaagggtgcaacagtaaaccttgagcttcctccagtcatggttcgtgcaccatatgacaaaggtttgttgttcttagcatcttgctgcagctagcgttcaacttttgtggcttgatgtaccaaatcaataagacgttggtacgactgaaactcaa

SEQ ID NO: 22288 - DNA, 707 bp, Zea Mays
gagccatgtggggtagttgactggttcaataaacttatcttcgagtaatctatggactttggccttggatgcttcggtcttctcgtctgacattttacggagtttctgtttttgggccgggccgaagggtctatggttagaccatgcttgatgattgagcagctgacgccaacgaggtctagggctgaccaagcgaagacatccttgttgcgacataggtaggataatagcttggcctctctatgttcgctgaggtcttcgctaattaacactgtctggtttggtattgaggcatctagagggactttttggcctggtcggtgctttgaatctatgctttgggtggtgctgctttctcatggcgtggaacaatgtggccttcatccttagagataaggcagtggacattgcgttatcctgggttgaagtctcttttaatgttgcgagcagtctgttggtctctgtaaattgttattgcgccgagaggtcctaggattttcatgcaaaggtaaagaccgtgaattgttgctgcaagtttgttgatggaccctctccccaatataacaaatgcatgatgaaggagccaacaagagtaagaggaaatcctcgagacttcatcaataaaactaaaaggaaaaaagacaacaatgccctttgttgatttcatagttcataagtacaggtttaaggacatgattgcaattttc

SEQ ID NO: 22289 - DNA, 581 bp, Zea Mays
aaattttattaagggaagttgctctgttcttaacaaaaatccagagataaagagggtagaaggtggtcggttcagaagaacactgaagatcaaaccctgacaaatatctgatgaacgtgataagatcagggccactgttgaatcagatgggcttgcgcgatctagtgaggagaatcaatccggggatggaaaacttcgaacgtggcgcaattccgtgaacccagtcaagcgtggccggagttagtcgccggaggtcaccgtgactcagttaacttttgccgcggtgtcacccatgcctcgatctccctcactgtgcctcttccctacgtggtatacatgcgccaacgcagttatccgtggccatagatagctagccggaccgccgtggctataagttgcaccgtgatccacggcggggtatgcacacctccactcagtgagttgatcgcaatccaaaattcgcgctgcctcagctccctcttcccaaattgattgtgcacggtgaaactacagtctcttacggctgtatagccccaatcccaccccccaatttcacccagagccgccgcgacaccattttc

SEQ ID NO: 22290 - DNA, 318 bp, Zea Mays
aaaatttgttctgttgtttctgtttcttcggcttccaaggatttcaccttggtgggctctgaaggcccagcttcagtctcagattggtgctttgaagcttcggcatcagaggcttcaatttgcacttcggaagtttcaacaattttcttcgaagttgtgcttgaagactttattgtctccaacacatccagtacgttaaccattcttctcctcttgggtgtcatcatcggcattggcattggcacctccattcttgctgaagggcttagaatttccaatgactttgtttcttcagcccttggttcttctatattttcc

SEQ ID NO: 22291 - DNA, 685 bp, Zea Mays
ggggggtggagggtgggctaggcatgaggctaggagatctccggcagcgcaatagtgggccaggaagggggagcgcgaaacgccagcgtgggaaggcgaggcacgtggtcaccatgcagcggggggggggggggtattggagcgcgttgcggagaggtgaagcttcgcggtttttatgaagtaggcagcgatggcaaggagttgcacagcatgagtgtttgaaatatagatttaaggtggcatttggttcagcccgtaatcagattatggaggggaatgaatatcaatacatttgtttggttcagcccagcctgcaatctactaccctgtaatccgacaacagcctattcacttgcgattccgcctgactcagggtgttattggataccgctgccgctcgggaactctctggtgcgttgatatgctattgctcccgcaggtgagttgttgttggagagtacgaggttggcttccaactaactaatcccaaacaaacacaataatagaagtggaaatcgttaacaaaggtaacaagcaaatcttgttattcgatgagctataaccgatagcagtgttttttgttttcatttactttgacggtccctgaaacgaaccaaacaacacctaaatgtctccgtttttttatttaatttaagagtgcaagaaaaataaaacacgctctgtt

SEQ ID NO: 22292 - DNA, 463 bp, Zea Mays
gtggtcaagatttcccgattgtccaatatgctgatgacacattattgatattggaagcttgccccatgcaattatttttcctcagagcagttctaaactcttttgctacctcgacgggactcaaagtgaattataataaatcaagtatgtacccaatcaatgtttgcccggcaaagttggagatcctagccataacactcaactgtcagacagggtcaatgcccttcatctaccttggtgtccctctaggcctgtcaaaacctagaatctgttactttttaccgcttatccaaaggattgaaaggagattgtcatgtacttctgctctcctttcccaggccggaaggttggagttagttaactctattttctcagctcgtccgactttcctgatgtgcactctgaaaattcctgccgccactgtcaagatgatagatgtttttccggaggcattgtctctgga

SEQ ID NO: 22293 - DNA, 906 bp, Zea Mays
ctgggatgtctgcacagctgtatgctgctgcgcaacgtccacagtagcagtgcctggcattgggcggttgacaacctatggcgtggaagaagcagcttcttcctgcaccaggaaatccactaaagtctcggcgcggtgctcaacgatttgcaccatcatgctgagcaagtaaacaagcaaaaacctaaagcttagccccctacctggcgcgccaaatggtagagaggaaatatccggccgggtggtggagtgcaccttccctaaatcctaagatgaggaggggcctaagcgttttgcttgttgcgagatttggggatgaacacaagaacgcgcaagagtttagagtggtacgggccgctagagcgtaataccctactccactatgtgttgtattgctcgtgagcttgagttgtgtcttagatgacttgggtcttttttccgaactgtgttgtaacgttgcatgcctccccttttatagctcaagggggcacgtacaagggtactgagccccgacatgtgggcccagggacaaaatggagggaaataactaacgcctgcaacgttcgggcccaccccgagtgtagtaatgtccgtagtgtttatagcattggcttctcttggctgcttcctcagtaatacgcgagtcgtcatgagtatagtgtatgtgacagcaagccgcctgccaatagattgcacaggcacgccgcctgcgagctggcccagttgctgcctactagaggagtagagagagggcgcattaaatgctgagtcgtcacatcgcccgccagcggagtagacggggcacattaaatgccgagatggcacatcgcgtgtcaggcggcgggcctcctccgcattaaatactgaaatagcgtatcatgcgatgtgcggcgcggcccgcggtgc

SEQ ID NO: 22294 - DNA, 473 bp, Zea Mays
gcgtaggcctgttcctgaccgggagggctgggttaggttcgaacctcgtcgacgtcaacttcccccttcgccacctccccgtcgatcgatccctgaggatctccggggtaggtgttttaactgtctggcctcctctcatcgggcggcggattgccgacgttcggtgcgctgcttcaagtgttgggggctcggacatcgtgcagttcagtgcaaggttcgtgctgcgccggtgatcaaagctttagtttcggtgtgggatcgtcttggccctcagctggttcacaagcctttggactttcctagacgcgccatggagtggcgcaaggtctcttcgccgatcccggccatccagaggtccggtgtggctgatcctaccttgggtggcacgaagaaacgccgccatcgtacgcggggtcgaaggcctaagaccgcccccgttgcaccttcggaggaatccagtgaagttgcacctc

SEQ ID NO: 22295 - DNA, 795 bp, Zea Mays
ctcggtgtcggacgagtttcttattctggtagggggtagggctggaggggcttcttccttctgctcagtctgacatccttggcttttggtcttcttgcggatttttcttgcgggggcgagcttcttcagcttcttgtcgtaatccatcttcagagtgcggtaggcctcacgggtgtcggtttcctcgccttctgctatctcgaggctctcttgaagggacaccttttcccttgtaagttccctgacttgttgctccaggctttccacccgggagtttaggtgagtgcagtgggaggcaaggtcatcatattggttatcaagggtgtggaggtatccagccatgtagacaatggtggggtcatcctcgatagggtctccccctgacagggcctgaagtcttttcctccaggcgggggtatttttgttgctgggtgggaagtagcggaggggggtttcaaagattactctgctgtagctttggcatagttgtcggagggctttttgggcaacattctggcaagtatctaggaagcggtatccggtgaaagtgacttggaaagaaggatggttcgggtagtttcggctttctcccaggtaaactgccatagagcacttctccattccattctcgagatactccttccagtcatattctggcttcttgcggattcccatgcgaagcgcacaacttcgcaatagatgtgggaacccctccatctctgagcagtaggatgtcctaatgaccagagagtcttccatctggaataggaaaagaagggtctgtcaatatcgggg

SEQ ID NO: 22296 - DNA, 464 bp, Zea Mays
tctcttaagcatctgtaataaatcacaatttatctaagtgctaaaatgtttttataattaacatattttgttataacattgtttattcagggatctcagctttaataaactgagtggagaaataccaccttcttttgctagcatgggagctgtagattacatgtaagtagtgacatttccataaaaatgaaataaacatgacatttcattgtgctcctttcttaaatgtgcatctaccaaaattgcctgcagatatctatctggaaattcactcaccgggaacatacctggatggttattaagaagaaacaagatcgcgtgagtattaagccacttccacactctgaggcttcaacgctgaatcaagaacccatatctcttataaatagataggtcaatgagccgatacctacagacatccacgaataataccacatagctttatttaccaggacgttttaaag

SEQ ID NO: 22297 - DNA, 1175 bp, Zea Mays
ctaacacgcaaaatttcccaagactcaggattcccacagacaggactgcgggttattttctgataaatgcagggtttcttacgcaaagcgcccaggccgaaggggtaaggaacgagatcggccgtcggatctataatgtgcggtccagattatatcagccgacgaccaacacccttataaaccccgagccgtccgatcgagatcgatcgaccgcgatttaatttctgctcgatcctattccaaccactggattcacgatcgacgccacacagcattcgactaaatagtaactaatcatgtgcgtccaatgatggatcaacggctaggatcgcgtctccttggccccgccaccggccgacggcggcgcatagaaatatgacggcggcggccattgccgcacccagccgactaggaatctggcgccccaacaccctagaaaaacctagctacacgacgattacacaatactgatgactttggggaggtacttacgatagttcgcgcaggaacttgccccaccgacggcacacggcggacacgcagcgacgacgaatcggcggcgtccagatcgtcctcccaccgattcgacggcaagttagagtcccaccgcgacacacccgtgcgatcagtgtagacgccgagacaccgcgatacgcatccaaaaccggagcccgcggccctatctcactcgcctcatgaagtgagctcccagcaatggcagcccctggtgtcctattttctaggtgcgatggatcagtcgggaagggaacaagaggagcacagggagaagcaggtgcttaaatacccgagcgagcaggggagaagagatcggatcataccggccacccgcaaaacctgacgagtttgttacaagggaggagacgaaactggcaagtggggtccacgtggcagggagtatgcacaggtgaagctcagatggaaaggctggccacttgggcccacaaatcggcgaaacaaggcgcaacacagccgtgggatgaggggctgatcgcagccgcagtagctgacccgtggggccgaggtgtcggcaccaaggggagtttgggttgtactgtagaggtgttagttgggccagggagtgagaaattggcccgcacgtgtggtcttccctttttttatcctttttctgatttcttttccaaatttgaaacttc

SEQ ID NO: 22298 - DNA, 288 bp, Zea Mays
tttccattgtggggaacaaggccactaggcaacgcattgcccaaagaaagcagctcaacagcagccagtttccaacaccacgacaagacaaggagcaccacagcaatcatcacgaggccatggccaggtctacaatcgtagaaaggtgaaccatttggatgctgaagcaatccaggatgcacctgatgtggcagtaggtatgtttatagttgaatcccatccaacaaaagtactatttgatactggtgccacacattcttttgtttctacatcatgggtagaagcaca

SEQ ID NO: 22299 - DNA, 392 bp, Zea Mays
cgtcacaacaaaatggctatctccctctttaactcttacagatacctcgtgatcctggtaccaaacagccttaaatcgaagcggttggcgaaggcgtcttctttctttccccaccgagcactttcacggagccatcgctgttgctggccttcattccaactgtcgtcgttggcctagcgtccatgtttttcctcttcctaccctattgctctctattacagctgacttacctgttattcttcctcctccgaccttgtttgtcaacgaactggtcgtccggtgacacttatcgtcgacgaaggagaagaacggagtggatatcggaagaacaggtaaggagcgaaggagtggagttcaaaatcggattaatttcttcccctttcctctgtctt

SEQ ID NO: 22300 - DNA, 536 bp, Zea Mays
aatttcctccctgggccactgtggtgtgggcccgtctggtcgggtgcgcgcaccgtatcgctcctgccctgtactcccgctgactcgtggggtcaccttgttagccctatcctcttcctcacccaaccgaagctgcgaataggatggtgtccgccgtgacccccgccgtgcttttcgggattctctcgccagaaaactgccggtcggactcgtgcgccctgagtatttatacacggcccagcaaacccttccccatcggcttatccatgtgcttccggggaaattgaagaagcctggtggccgtcgtgtgcctatccgcgtgcgccgctgccatggattcatgcgagtgtaaccgttcagggcgagaagtcggaactgggagcctcgccgggtgtccaaggtcatgttcgttgcagctccgggtgtgtagaccaactgggtgatgggaaattcctcgccgtcgtacaacttccgccatggtaccgctcctcgccatggccaacgtcacccgtacgacaatcaatggtaatattccc

SEQ ID NO: 22301 - DNA, 523 bp, Zea Mays
cggactcctcccgagtgtcacgttgttgctgagcctggtgatgcccttttggctattggttatggatcaagttaggcgccagtggtgatggtggtggcagctaagcccaggaggcttgggagtgactcgccgaagcaacggacgtcgtaggttgttgattgcccacatactcagggatatatggagaatagcatgaagcaatatgcaagatctgctttggctagttatgctatgctttggcttcagcaatttccttctgcttctggatcgtgaattggcacaaccttgttgtgtgtccgttatcttcctcacagaataagcagaacgtctcatgggctgattaccatgcattcctctgaagcttctaccccctctgcctctcggggctggtggcctataggaagtttgctgtattcctgaagactgtgagctttgctggctgctctgagtattattggccctgtcatcatttgtgttaggattatggatcgttctaacatgcctagggtgaagtcatcctccg

SEQ ID NO: 22302 - DNA, 434 bp, Zea Mays
ctgggtcttggtcatctgatggaggtgagtttgggagcctgttttcatggactgaggggtcttcagatgaggatttggattattttgctgtgttggatgtggccgcggcggagtccatgctgcagcttgaagcgcacgaagcgtctggtcccccgactggggcgatgaccgaggagcaccgccggcgaaaagtggtgtcgaagcataatgttggtgagatatcgcgaagtggtaggcgtcaacggatggggatggaacgaacccgtcttcgggtagatcgaggtggccaacgagatttgctgtcctcgacgtccgggacgtgtattagggaggggatctgtggaatctttttgagggtgaggagttgaagatgatgttgtttaattttcgtgaggcaggccttatcccgaaggctgagccgatgtagcatgttt

SEQ ID NO: 22303 - DNA, 561 bp, Zea Mays
tttgggatgatacccatctccctataattaaacaacattatcctcaattcctcaccctcaaaaagcttccgaagatccccctcgcctatgctcgccccagtcggcgaggacaacaattctcgtttaccaacccggtttacatggagacggccacgctacatccccatacgatggcgcctgccactccacaaaaattcacccacactatgttttcccaccacccttcgccgcctacacccagcactcgcactaggaagatccccagcaccctccatacgcggcgaagtctcagccgcagccacatccaacccaacaaaataatccaagccttcatccgaggactcctccgtccaaggaaacgaactcccagattcaccatcggactcaaaacactcagacatagaaccaaacaaattatcatcggcaggcactacggttgaggccgccacaaaatcagtatagtcagcagtggttgcttgtgcaggcccaaacgtcggaacctgtgcagcaaccgaggttcagtatcacagagacaacagtattacacttaaaatctccaaa

SEQ ID NO: 22304 - DNA, 462 bp, Zea Mays
atttcagttaggaagtaacgtgagctcctggattctggtgacataaaccataccatgaacttatccttccttctcatgaaactttccaagaacatgtagttagtgccaaatctggtagcattccatttcaccaactcacctccgatgactttcttcatcatactgtgtaaacttgatgagttgtacatccaactacatatcctttgggcgctttgaatcatcgcttcatgatgtgcccacttcctaatgtcctttagcatcagattaatggtatgtgctaaacatggctgtcatactatatgcttgtactctatggcttctctgctcagcatcttacaagccttcttaaagttggaaccattatctgttacaatttggacaacattctctggttcaataatcttcaagacatttttgatctcctgctacatcaacatatgtatgagtggccagtaaaaaagg

SEQ ID NO: 22305 - DNA, 389 bp, Zea Mays
ctgatgaaaacatcccaggataggactccttgtgaggaggagtgagctgcatgcatgcctctccaccaaatttgagcctcccccttcaacagctgtgtgccaaaacgaacacgatcaccatacacaatctcgaaaacatccatcttatcctccacataagtcagcgaatccgtcgcctcaaccggagtaccacagccatcaaaggtgtccagcttcatgcccatccactgcatcagagaaagaccattgatgggaaggggcacctcagccccgccacctggagcagcacccactgggacagcgcccccgggcactcctccacctccagcaccctgagcagcacccgcaggggcaacaggaatagcttgcctcagaatggccaactcctg

SEQ ID NO: 22306 - DNA, 1084 bp, Zea Mays
gttttgggctaaatctggcccgagtcggccaagaaacggggagaacgcacgcccgcgcgcgcagtgtccaatttgcacagaggcccctgacggtttgatatacctataaagagccctcctcactgatcctctgtctcgctgacatttgcacagaggtccctcgacttctgcttcttctctaactcgaccccttggccacggcacgctcaccgccgaccaccccgttgctcggaccggccaagagcaacgatggctgcccaaattagctactgggcaagcattaccgacccgaggcgaccctagaacaggctctaattgtattaatccggcactggatttgcctgaccacggtgatggcgaacaccgtacacagatcaggatgttctggttgattaagcgaggtcaagctcaatgggtcgagcagacgacgatcacaaacacgtgtgggtgctaaaacatagacaagaagaccgagggcggacctggaggcggctggccacagcacgatgtctcacggtggcgcagacagatgatttgggggaaccccaaattcagcggctgtagtggctaattgaaggtgggaatgggtgctctggcttcgtgataacatggtgcagcagaccgggccatcaatttataggagcttaaagtggtggccagtgaatttggtcttgcacggtggcggccggagaaaaaggagatcactggtgcaagcgattggtggcatctaccgtggcggctctccgacgatcatcggatatagataacctgagctattgcgacgtggttaagggcctgaggcgtggcacagtcgcggtgaatgacgcagactccggtgacggccgtatagccacgtcgccggcgcaagtggtcgagggacagcgaggccacagtaacccaaacccatccgcgacgagatcttttcatggttgagcgaaatccactcgcctgaggcacgaatcgcgacggccggcgcgaatccgggcgcaaaggatgccagcggtgagggggctggacctgggatcatgttcagttcactgtacaatcagactcccttcagacgcctgacacaacaacttgcaac

SEQ ID NO: 22307 - DNA, 358 bp, Zea Mays
agtctgcaattgttgcgccgacaaatgctgctacttggctaggaactgacaagcttcacacaaatgctgctacttggctaggaactgacaaacttcacacttctgaactaagtctgctgtgtccttcttggctgtcgcccagaagaaccgtgctctgaaagccttcccgaccgacgttcttgaggccgcatgaaccccacaccgttcagcttcatctcttccaacaagtgttcacccatagacgtgtcgatgcatctcgtaaaaacacatgtggctccacgtctgtacaggacattgccaataagtgtgtagttggcagactgccgggcgtggagctcgacaactgctttgtcatccg

SEQ ID NO: 22308 - DNA, 391 bp, Zea Mays
aaactttggccccacctgcaggctcgtatcctcccctgaggcgggcccgggggccactgtcggtaccctgaatcaggggtaccccttactacagtatgaagacgcggtgcccgtgcgacgatctgtagccgcgcggtgaacagcacccgactccaccatgtggacggctcaaggggcgctacgtgaccagaaaagatgatatatctcatgatgcaatcagttggaccggacctccacgagcaagtgtcggacccctgtacgcacaacccggacccccgaatacggtccgggacccccaagtagcgtgccaggtcccttggatggagtccagatccccccgagtaaggtccggaccacccataacgaggtcccgggataggggatacccagg

SEQ ID NO: 22309 - DNA, 392 bp, Zea Mays
gacggaggccgagtcattggatccccgatagaagtcttcaatcaccgccgcctcggcgacttcgggaatgcggttcctcatggtctgaaacctctcgaggtatgaccggagtgtttcatcgctctaacgcctgatggatttgaggtcccatggctgcgccaatttgtctaagagggactagaagttggcgatgaaatgccgactgaaattgttccaatcgtcgatgcagtgtcggggtagatgtcggagccattgcagtgcatcctgccccaggacaatgggcaagtacgcagtcatcacgtcctccgtcgccccggcggcccgggcgacagttgtgtagatggccgaccaaccgcccgggtcttgcttgggcttgtacttgtcgatgttgg

SEQ ID NO: 22310 - DNA, 684 bp, Zea Mays
gccctagtccttagacgaggagtaggcttaggtgtttgccttgccttactgatggacacaagaacacaagggtttagagtggttcaggccaccggagcgtaatatcctacatccattgtgagttgtattgcttgagaacttgagagtcattggtttgagtgtggatcgacccgcctactacggagcaagtgccctcccttttatagtccaagggaggcacattactagggagcttaggccccaacaagcaggcctaggagtatttatagtatggaacgtgaaacatcggatactgctgacaacactagatcttcctgagcgtgtatcccttcttggtcgtcgcgtaggaccctgacatcctatcttcctgttttgtcttatcagagtacacacgcagcccttgcggtaggttgcggcgtagtatgatacgctgtcgtgtgtaggtgtgggcggtgtcgtctcgtctcctccacatgtcccttcatgtctcggtaatgcacgaagaacagtgaagtcataatgaagggcaacatattgggtcaatgctcttgcctcgggaacatgtgggtaacagtaaaaaccgcacgttacagacctggcgtgcctcgcgcatttaatgcaggggatacgctacctgctgttagcgtgagcaagtatatgtcccatctatacccaatgatggcg

SEQ ID NO: 22311 - DNA, 1013 bp, Zea Mays
gtttctttttttgactatcgtcttgttctcagcaccaagcgctgagcccgcgtgtcgtccttcatagctaccaaggcggttaagcgcagtgccgaggcatatgcggggtcttcgtcctgcccccactgtacccaagagaccacccagaagggcgttgaggtggtccagcccactcctatggcaccggttgagcccggcactgtcgcggccgaggtggttctcacgcgccccacttcgctaacgaagtccatcaccatctccttcgggaaggagacggaggcaggtgatacttcatcgggctcagcatcgcccatggtctccgacctcttgcgtgccatccccaatacccctaaagttgtgccgagctcgtgggtgagggttaacgaggaggtcggtccctcggagccacctagggggtcgtttgaggagatcattatctagcctcctctctcaggaggtagtggtgacctcgttcgcgctgcgccggacccctcgatatggggagggctgaccttgacgtggatgtccaccggggagacacgtacttcgtcctcgacgacaccgaggagcgggagctgtgggaggagatgagggtggtgacctaggtaagggcgttgcttccctatgttaggaattctttaccctttgtagtgcgatgatgagagtttctccttctacaggaggtcatgacgaggtcgatggccagtccatcttcgttcgccgtgaacggggcgttggggccacgttccaacaccatcgggctgcattgctttgttgtcacgagcagctagtgttgaggagcgccgaggtggcggacttgacgtcctggtgcgtgggactgaaagaagagggcacgaccgatcgcgcgaaggtgtgtcggctggcggacaaagtccgtcgcatgaaggcagaggcggacctacgccaggaggagatgcggcagatgaagggaaaccttcaggtggtgatggtgcagtgggacaagtctcggtgtcaggtcgccgaagcttccc

SEQ ID NO: 22312 - DNA, 606 bp, Zea Mays
cgctccttaggcattcattgtgcatatatatttagataggatttcgaccacgtgtcacttgaagatttatgctgagaagcgccagtgcaaggaggacaagacgagtaaaaatgactgaaatcactagctggcgatggcgtgcaagagtagtagtagtagcactttagtttggtgaccggatggatggatggatggacagagttatttttgccgattgctttcccaacaaattgacagcgagtatcagatagcagtgattcgtcgattaggcattcgactccctgagaatgcattgaatgccaccagtagcagtagctagtgggtgcctttcaattccgcagctttcatggcttggctttggctccaaagcagcacgcaaagtgcgcgcacaacaacattatcctacaaatggaaaaaaaatcgtgcgcacctctcttccgctctcgctctcgatcgctctctcgtggcatgcgttatccaagattccaacgcgctgttcatcatcggtggcttcattatcgtgttctgctgatgtggcggtggccaatgggattgcaaagctggattatcacctcaacgtcaggttcggctttggatcaaatcggc

SEQ ID NO: 22313 - DNA, 348 bp, Zea Mays
aagaggaagaggccaaggcaaagccccccaacaacccaaaaagttttgttgcatgttccatgacgaagattcagcgcacccaaccagagattgtccagaaaccaaagactgcatggccagagcggccccacaaacaatcaaagagccatcgctcacacttatcaccctcaccagtacctccatcctctatacaaaaataaacacccataccacactcagtcgcagctgaattacaaccaaagtgcccccatcatccataactctagtaccaagaaagattaccactcccacctccaccgctccctaattaaaccagcaacttgtcaaccataaccacccctaaagcaa

SEQ ID NO: 22314 - DNA, 701 bp, Zea Mays
cgaccctggccagcaatgtgaacgatgtggggacacatgtcctagatccaactaagaagcagacatgacaccaaccagaacacattccatgtccctgactagggggttgtcatcgagaaggcatgtgtcatttgttgggtcggatgtattatcagttgggcagcctatgggaaattgttccccatcatctatagccttaggcacgagggagactccaatctagggggtgaaggcattctaccggttggccctcaaagccctcctcgatgccagcaagattcaatgttaggcagagttcgtactccattggggccctaagagcggggaacatcgttgtcgtcctagcctgggcacacccgtgctgggaaatgtcacttctgcggcccctaaatcatcttcaaggcagcctcttccccttgacattgcattggactagtcctagctagtcactgctaggtttaggcatctgtggacatggagtggcgaataatcaaggaggaggaaggcgtccatgtccaaacgcgggctcaactagaagacaccatcaaggaggctcggacgactattgcattaagacccttcaaaggagaggaatggaggagaccgttcggaaggagagggaggaggacaaagcaaccaacgtcgttgcatcacaaggctaagagaacaccgaagaaattcgtgagatgttgtggcatcga

SEQ ID NO: 22315 - DNA, 629 bp, Zea Mays
acggcaaacagtttgacagccaagacttcagggatttctgtttctccatcggcaccaagcatgtcttcgcctcggtataccacccacaatccaacggcgtcattgagtgcaccaacggcaagattttcactgccatcaagaaaagacttctcgacgacaaaaagggcaaatgggccgaccaactacctaaagtggtatgggccctaaacacgacagaatgtcgggcaaccggattcacaccttttcgtctattgtatggatccgaggccatgacgccacaaaaagcatggtcgcacagaacaagcacatcagcagtccctgatgtcgatgaaccaatgtccaaagatctcatcgacagagaccacgtcctcgccctacaggccctcaacaaatatcaggctcaaaccaaggcctggcgcaacaacgcggttgtcccaagagaattcaacaaaggagacctcgtactcgtccggaccacccggacagaatcacggggcaagctggagccgaaatgggaaggtccattcatcggcaagtcgaaggcatcccccagcgcgtacatgctggcaacaccttccggcgaagacttagagcactcccttgtaattcagcaaacaatgttgttttgg

SEQ ID NO: 22316 - DNA, 507 bp, Zea Mays
ggagggggacgagctgaggcggaactcggacgtggtggagatcctcaggaacacgcagttccgccgcctctgcaagcgctccggccgccggatacccgagcggatcctcgaccacgagtaagccagctacccctgcccgccgccgctcatccactcagaacgcacctgtgagtgactaatccgacagacgacgggtgcatggcatgcatgcagtcgtgtgatctggctaggcgacctcaactaccggatcgctctgagctacacggaggccaagaagctcgtccaggccaacgactgggccgctctcttcgagaaggatcaggtaggtaaaaccatgcaatgcaatgcaacaagcatctggcatttctgttgagatccaaagcgttgagcagctcaagactgaaagggagagcggggtgttcagagggtggaacgagggcaagatcctcttcgccccgacgtacaagtactcgtggaactccgacacctacgccggcgaggacgtgt

SEQ ID NO: 22317 - DNA, 362 bp, Zea Mays
gtcaggttcagctcacgcgcgcgcgcgcgccgacgcgcctcggcatcagccggcttgcttgagcccattctggtgtggtgactgtgcggtgggagaggagaggacacggctctctgaaacttggggggctcatatgtcagtggcgctagtagggtattcacagaacccctccgacaagtgagtacgtcgtcgatgtcttgatgggtattgaaatgtgtcaggtatcacagcgtctggacggtgggccatgggggtcacatgctagcgtattgtgttgggatatacggagcaatgaagcgcagcgtttacggcggatcaagtgggcttggtcctcgtgctctcacgcagtacgcgtacgccta

SEQ ID NO: 22318 - DNA, 440 bp, Zea Mays
gttttggttcacgttttacgctgaaatttgaccgagccagaatccgtgcacgatcgaacgtgcgcaattttcacgccgtaattttcgggccccattcgctgttacgaaacaagtctataatttacgtaaatttcgtattcatttacgctatttcggttcacgttttatgattaaatccacccgagccagaaccctagcacggtcggctgcacgcgattttcacgccgtaattttgggccccgtttgctgttacaaaacagatataggatttacgctaaatttcgtatttatttacgctgttttagctcacgttttacgctggaatccgcccgagccagaacccgcgcacgatcgtctgcacgcgattttcacgccataattttgggctccgtttgctgttacaaaacagatataggatttacgctaaatttcatactcat

SEQ ID NO: 22319 - DNA, 677 bp, Zea Mays
ttgtcatgatatttggtatgaaaaatgctggtgctacttattagagggctatgaatttgatctttcacaagctgttgggaaatattgtggaagtctatattgatgatattgtagtcaaatcggctgagtttagctctcatatagctgatttgcgcaaagcctttgataaaatgcgtcggtatggtctgaaaatgaacccacataaatgtgcttttggagtgtcggctggtaagttcttaggattcatcattcatgaacatggtatatagatagaccttgaccgaatcaaatctatttggaatgtgggacctccaacctgtaaggtcgaagtgcagaagtttctcggcaagataaattatttgcggaggtttatttctaacctagccgggaagattgatgccttcacccctatccttcggcttaagaatgatgccaaattcacttggggggcagaacagcaggaagcgcttgatctcatcagaaagtatttgtcttcggctcccgtattaaaagcaccataggcaggagtactgttcagattgtacattgcatctgaagataaggttattggggttgttctgatgcaagtgaccgaaggaaaggagcatgtggtgacctacctaagtcggaggctagtggatgctgaaacaaggtacacttttatcgaaaagttatgc

SEQ ID NO: 22320 - DNA, 582 bp, Zea Mays
ggatgctagagcagactcactccgaatggtgaacccaaggattcgaacatggagtttatacgggttcaggctctcgccctagtggcctagtccagtgtagtgttgatcgtagtattgctttcaggactatgttacaactggtgtgtgtgtgtgtgtggaacgaaggaggtggtcctacccttttatagttcaagggttggaccttacagaggggacttgtttcctatcggtaagggcatgatttgttgccttcggtagcccttctaacgtcgtcttcctgatatcgccttcggggtcgtgcgtagccattcacttgatatggcatcccaccttatctgctcggtatacgggtcactatcgcaagtccgatgctgaggtgcctatagcggcgcttagcgggtcccacgggacagagttagggtatgtcttggggggcgagcgtggcgtggccctacctttcgtcatgaaccccgcgtcaccctcggtatggtgcaatgatccgtcctgcccggtatgcatgttactatggagactttgatgcttaggtctcctatgatcgaggttgactggttccacaaggca

SEQ ID NO: 22321 - DNA, 399 bp, Zea Mays
cgagcgatgcggagctagagaggagtgcactcgaggggagactgacccaccataaatggctgaccgtattaactacgtctggcatcgagccatagtagagaaacggtccgcctcccactgatgacctgtgagcccctcggtctacgacgcactcatgacatacaagcccatcggaccgcagtgcactcatgacctattgagactaggcctgagtccgcaggccatctacagggcccacaatacgacaagcaacgccaagatctaggctacggaggccaggggtcgacgtggtgtagaggcagtaatgatggcgccaaggctccacaccgccacaccgttcgtcataatttagcacgagcagagacgaacgggtggccaagatgcctacggacaacgcga

SEQ ID NO: 22322 - DNA, 688 bp, Zea Mays
tccctcccctcggcccatttccggcctgctcccgtgtgcgcgccagcccgccctgcgctctctttctctccctcgctgacgaaccgaccccacccgccagccgccctctctctcgcacgctcactcccactggcagaccggccccagctgtcagccagttcgtcgtccttcttccccctccccacgtacggcccatcacggtcacctccggccatcacctccgtcccctcctccgtcttctcgccgcatagggaagttgggcaccgccccgtcctcaccgcagcggccgcgtccttgcacggcaccgccaccgtgcggtctcgtcatcgccgttgtgcggcattaactccggtacggtgcacctcaccggcaccatggagctccaccgctccccttccctcgggcgcctataaaagggccgccccgagctcctccttccccgcaccggcctcagccacccctctcctccctcgtccgagctcaattcgtggaagaaccatcgtcgtcttcctccccggtgagcccttccctctcttctccctgcccctctgttggtccatcaagcgattgcttaagcctcctagcttcgccacaccgccacgaacgcagtacaccactcacccaccccgattcctcgcccaaagctcaccgacggcaaccccgccacgcagctccgccacctccccgc

SEQ ID NO: 22323 - DNA, 530 bp, Zea Mays
ggaggatgtttctgatgaaggtgtacctactgctgaagctgagcatgttggtgctgaggaaggtgaatctaaagatgattatagcgtcgtgccatctaaacccagccacctggagtttgggaggtccactgttaccgaagatgatatgcctaagttgacgaagttaggctatttcagtgaagccaaagaggaactaattcgctttggcggagaagaaattactccaaagccagaaaaggatgaggtggtagtttttaaaagcttctttaaagcaggattaagatttcctttgaatgagatgattgtggatgttttggggaagtttgggatttatcttcatcagctaactcctaacgccattgttaggcttagagtctacatctgggctctccgaagccaaggggcagaaccgcttgccgaaggcttctgccgggcacatgagcttcattatcagacaaaagctagagaagatgggctgcacgagaacttcggatgctataattttgcttatcgcaaagatgtgaagactc

SEQ ID NO: 22324 - DNA, 650 bp, Zea Mays
ggagaagctagcagagcttcaccgacagatcgagatggtgagccggagcatagcactcgtggggtgacctgaacgctgcgtctgctggacatcttgagccgcgtctggaacgtcgtggttcgtgccatccatcggggtgccgctatcgcctttgttgtcgcccaacttcgcactagggctgatcttcgcataccgatggagcttcctcaaggtgcttcatcgatggccttcgagaatctaattcagggatatgacgaggtcgctggcgggatcacatgcatcatgtcctcagaggacttgctacattggtgaaggatcggtgaggtgaccaaagggggtgaatggaagccaccaagattctatttcgagaacaccaccatgacttgattcccaaatctcacatgaaccccaaaagacgaatgaacctacataacatagtagtatttagtccagcgttgactgaatacaccaaactgctacataggaaactacccaactatctgcaaaaaatcatagtgaaaatcgtagaacagagggagcggcagtgccagacttcagagcgatagtggcgggcagcggcagtgccgagcactagagtggtagtgtcgggcaatgaaaaatgccagatttgcctcaaactttgtaggtag

SEQ ID NO: 22325 - DNA, 401 bp, Zea Mays
cgcacattgtttaccataccagtggcgccggtgcctttcccacacgtagacgggtatctgaagcaccggctggagaggtggtgcaacttcagccatggatcgttgctcgcgctgttcagggccaggggcgtcttaatcctcgaccttaacaccaaggccatggaggaagtctccatccccgacttgcacaacaaggcgacgatcttcatggctgaatatggtgctaatcggaatcagacgtggctgccctacgagatggacgtggtggagttcttcatgctccaccttggtggaggtactgtctcagagattggatctccatagatgttactatttctttcatgctattatatttttagtctcttagctatttatttttagtctcttagctatttattttt

SEQ ID NO: 22326 - DNA, 369 bp, Zea Mays
gggtttgcaattaatttgtataacttccctaaaagaatttgattgatatatattgggaatggattagcagggtgagatagtaagcaaggaaacagaaaagcatataaatataagtaatcactatataatgaatactgagaaggtcaaggttccatggaagataactggcatatatgagaggcagaataagggaacattaggaaaatacatatatataactaacgctggtggtaacctgaaatggacgcatgacgttttcaaaccgatgccttgtatacagacagaaacataaaccaggcttcacacgaccagccctaccccgtctctgttttgcatttgcacgagaaatccaatcttctactatgcttg

SEQ ID NO: 22327 - DNA, 731 bp, Zea Mays
gccgcggtcacagaaaaaggtacaaaggctcactgatgcatggcagcgctaagcagattcatatcaaggttaggcaagaaagcaatgtcattctataaattgcttaagaaggtggacaaatttcagtggtccacagaagcgcatgaagctctagaggcactgaagaaattcttaaccactccaccaatactcaagccaccgcgccgagctacgcctggttagcctacagaagatttgctgctatatatctcctgcacgactcacgtggtaagcaccaagttagtagtcgagcaggtggaagaagggcacacaaacccagtacaacatccagtttacttcatcagcgatgtcctcggaccctcgaagataaggtatcctcatgttctgaagctattatacgcggtacttctaaccgctcacaaacttaggcattactttgacgaccacaaagtcatagtagtcacaggatttccaataggtgatattcttcacaacaaggaagctgttgggaaaatagccaagtgggcgtacgagctcagagctcatgatatagaattctgaccccgcacaacgataaaaactcaggcactagtcgacttcatatcagagtggactgagcaccaggtcccagaaagcctagaggtcactgaaatatggaggatatacttcgatggctcgctgagactgcaaggagcgggggcagggattctctttatcgccccggaggtgaa

SEQ ID NO: 22328 - DNA, 592 bp, Zea Mays
cgaagtccaccactaagaagcttttgaaaactacaatctcatcttccttcgactcaagattggtctcatcaccagcaaaacgaatgatattatcatcttcaacgtacccaagtttattcaagagctcttggtcactaagcttgatggtagactagccaatatcgatgtagccaggctttgttggccgaagatcgttgtcttctcccgcagcatccaaagcaccctcctctatatggtcttccttagcaacctcgttagccttcagcctcctcgtcctggttgtccccttcatcacctcagaaattacaggacccacaaccatggtgtaaagagtgtctttctccctcccaagtgcctacgacgaagttggggttaccaactcagcagtcgaatgaatcctagccatcggaggattgcctaagatcaagttcccaaagcatgcaataaaaccagaggaatggaaaaagcttcggaagcagagaatttgacgtcaacatgttggtgcaagcggtaaatattgtggtagtggcatgggactgactgggttatataggcatctgggcgcagaagtcgaggagtcatcccatctaag

SEQ ID NO: 22329 - DNA, 737 bp, Zea Mays
gccttactcctttctgctggatccatagcgtattgggaaagcaaagttaatatttatggtagccaaaatgggttcttgatgagttgtaacgtgggaaagagaatcttgcctgagatgttgggttgtatttcttgcttgcaaagatacattacagtgctatttggattacatgccttgtatttcaactagaccatgatcgtgcagaattgcaaatggaactacttaatacaaaatggaatgaacagagaatgtgcaactgaagagggaggcatttttagcattatatgttattgcaatgctagtagaaaagggagcacagtgacacgtctcaatacatggcaattgattaatgacatggcatggcatttttagcgttatattttattgtagtgctagtatgaaaaagggggaacagtgacaacagccacacatctcaatacatgacaattgtttgctgacatggcatcctatcctatatcaaacatagaaccttaagctcccaagttaacctgttcggcctaactgcttaagtcatgtggcatacttagcagtcactaaactgtctaaaaacatttaaagtgataaaatgcacgaaaatctgcaaattcagtgcaggtaacgcttggccaagtgaatttgtatgtattctgggggacttggtctatgttggataaattttattacagttcccatgtttaaggatatatggaccatatgcattctatgcttaggttatt

SEQ ID NO: 22330 - DNA, 677 bp, Zea Mays
cacttgggtggccaggaactctccgaagaagatatctctgagctgaaagcattcgctattgctggcgactacgaacctggatccgtgctctttggtggtgtcgacgaagagattctagggtgcatccctaaccgtgccggagcaaagattgtcaatacaatatcaaagaacatcggattttcggagcttgaacgagatctaagcaattataggagacaacatattactgggagcttgttctattaaaattataaggtataaattttaaagtttgcctctttgacttattaatttttaaatttcaagagcttcgggctaacgtgacttcgtctttttaacagagcctactattgagcaaagctttaaagctacaacaggaaaatgaagataggaagaacgagcttgttatcagtaacttggaagaaagagtgaaagaacttgaaaatcttctagaagaaaaagattcaaagattaagactaccgaagcatacctccgaagctcaccttcggattaagaatcaagctattcgaatttctgatcaaaacaaacagcttgaagaagtaaattcaaatctaaaggaagttgggattcattttgagcatgagattaaagatttaaaggataaagttaaaacagaagcaaagaaaagttctaaattatctgaagccctccaaat

SEQ ID NO: 22331 - DNA, 630 bp, Zea Mays
tggacggtgagatgttacattacatgccatttatataatgacatgagcatatgagcatataccttaattaatctttctttgacaacaattgtagattctctctctttgatggaatgatcaacacgacggattttagagcgtcttggcggtcggcatccgggtccgggagctccggtcctagctctcgtcggctcactgagcaagagcttgagatcgtgaggctgcgtgaggagaaccgttagcgcgatgagcagttgagggctcaaactgagcagttgagggctcaaagtgagtactatgccttagtccacgcgcagcatcagcagatgcttcaagtaagcccaatgcgttattactgtttattcattgctttacacatccaatgcgtactactaatatgcttggtcaatagttactagctcagcagcagggcattccctacgtggcccctccgcctccgccgcaatggacgttcatccctatgggccctcctccacctccggtaagaaattctatgtccattatctagttacacagtaaaaacaatgacttgtgccgcactgcactcatgaatatgtattattcttgtattcaacagggacttgtgccgcagcagcctcagtttagcac

SEQ ID NO: 22332 - DNA, 282 bp, Zea Mays
gaagtagtctgggccctaaacatgaccgaatgtcgggcaaccggattcacaccttttcgtctattatatggatcggaggccatgataccacaggagataaagcatgggtcgccccgaacaagcacatcagcagtccccgacgtcgacgaaccaacgtctaaagacctcatcgatggagaccgcgtcttcgccctgcaggccctcaacaaataccaagctcaaaccaaggcctggcgcgacaacgcggtcgtcccaagagagttcaacaaaggagaccttgta

SEQ ID NO: 22333 - DNA, 470 bp, Zea Mays
cagactccagcgcaaaatggctacgtggctggatctcacgtatagcagggttgtaagcacagcactgtcagttgaagccaagaaatcggggcaaggaaaaaccaagagatatggggtgaaggatcatctcaggggtctgaaaagcggacaaggttggtaattcgtcctttcaacccaaatcgttcttctcctcatccacccacatatcccttcaagcaacatgtgttcatccatcccactcctgcccccgcctagaacaatcagccgagtgcccctggtgctcatttccccaccctccctagtttctcaagttgctgctttaattgtgggaagtccggaaattttatcaaagattgcccctatccgaagcagaacaaattaaatttccaactgacttcggggaacgtaactcaaggaaagggaaatgtggtcaaccctccagcgggcaagaatatgaagaaaactaggcg

SEQ ID NO: 22334 - DNA, 629 bp, Zea Mays
gaaaggggctggccgcggtgaggtgagttttgcggtgccggaaacccggattggggagaaaccaaaattcaagctctcggaggcacggttgctaacgattgttggtggctaggtgggtgatgatgttatgcagctaggggagggctcaatttataggtggagcgagcggtggccgcgaattttggacgagacacacggcggtcggaagtgaggaagaatgctggtgcagtgaacacgtgttcaccgtcgtggcagtaactccggtggtcgacggggagtttagagggagtcacggcgatgcgatggcgtggttaggacacgcggtggccaacagcgatggcacgacgacgttgagcaactttacccgcgggcggtgagccaggggaggagtaccgcggctgaccggggtggcttccagcttgacggcggcgacgatcttttaccccgagaggttatccacaagccgcgagcgcgaatccggacggcggcaacacgaatcgtggcgaagttcgtcggcggggagctgagctggtgttctgatccgatcggctactgtaccatggcgagtgctccatcagacaacctgacagagcaacttggagcatgatttattctcaatttccaatgac

SEQ ID NO: 22335 - DNA, 569 bp, Zea Mays
attaaatatgaattttccaagtttctagaatttgttttgtattaaaattgcatttactaattcatttattcattttaaatgagttctggactgggcgcataaaaaccagagaggtcaagggctaacttataagatttcccgagactcagattactgctatatggactgcgggttgaatctcaataaacccaggggttcttctacaaagtgggggtcgaaacggtatggtttagcttcggccgatggatcgcggatgaacgttcctgattagatcggcataactgcgaaccggtatgcattgtggaccggccgatcccagatctacggatgcggtgctgacacccccgggatctaatctctaccacccgtcactcaatcaacggctcggatgggcgcccggaaatgatacgcaccaaccagatcaccgccaccccatgtgaatccaacggcccagacaccgtctatctctcacccaacggaccatggtcgtcttcttcctccccgcgccctaccatccccctttctcactcttcatggctgtttgctcgccgacgaacggcgtatccggc

SEQ ID NO: 22336 - DNA, 679 bp, Zea Mays
gctctgtcagaacaactgatgaagaatgtgatggtacagtatatgcaaaagatcacagatgtagtgaacgttgtcgccaatgaactctgcgccgcgatcctcgtcggcattgtgattcgtgcactctggcgtgcggataacggtcgacgatgaaaagatcttgcacgaggatgaccttggggcactgttttgccctatcgacgtacccacttgcaccggcgatgtggctgcacgaccatcaccgtcgtgccgccgtctagctcggttgtgacacgccttaagtcatctcaccactcgtcgcaagccatgaagactcggcagtgaccgccgtagaccgtaaaccagtgagggccacgttagcaactccggtgactcttccccctttctcaccacaagcacttccccatccaaattcaccctcctcgcgtccgtcctctataaattgatgcctcggcccgttacgctagattgttatgaacccagagcacccactctcgccctcaattagccaccatagatggaagaatttcgttcttcccccaaatctgttgcctgcgccaccgtgagacgccgcgtcgtggccagtcacctccaggtccaccctcgccctcgttgtccatgtttcagcgcccacgcatgcttgtgatgctcgtcggctcgaccaattaagctataccac

SEQ ID NO: 22337 - DNA, 330 bp, Zea Mays
caagaatactaaaacgagagggcagagggcatgagcagacctgaatcgagctggccacggtgaggatacattcacggtggcggaaacttagtttgggggaagtgagcaattcgtagtctctggtggataattggaggcaagcgtggtgcgttgacttcgtgataacatggcgcaacagacccgaccatcaatttataggatcgctaagcgatggctagggatttggacgaagaggcgcgacggtcgggggaataggaggtcactagtgctcgggttagtggctttcaccgtggcagtacaccggcgatcaccgtgcatgcgagacgcgac

SEQ ID NO: 22338 - DNA, 523 bp, Zea Mays
tcgtctcaaatccgaggtaagaccacctccctactctctgtcctactctcatctatgtgtagtgcccttcggattaggttttgggacactaagtcatggtgactacgctcgacggtgaagtgccgccgtgagtccagttctgccgttgtgtttgagggcgaaaggttgaagatggtgtcggggccgtaggatagagatcctgtggttggcgggcgtaccgagctaaaggggtgcggggtccgttgatctccgatcgggcgggctagattgtatatcggttcgcactgtaatgagaaccattgatgtcagatccgagggatagaggtgcctagcggcttatggttcgttgttaaccattgatcttcaatcgggcggatcccgttgggtacggagtcgagcgggcggctgatctaatcctcaccatcagaacctgatcggacggccgaaaatcatcgataccccttcgttgcgccaattttactaaagaaaccctagaatcgttggatatcaacccgcaatcctg

SEQ ID NO: 22339 - DNA, 534 bp, Zea Mays
tctttgtgcatctgtgcgaggcctacctcagaattcttcctcatttcggactctggaagtatttgtatcattgtcggcctgggatggctggggggggcagcaccaactcattggtggtgcaagtttggagatgtgccgcgtgaggaagacagaatacctcgacattcctctcaaggatagcattaaagggtggcgccttgagtggtttattgtggaaaaccactgcaagtccctcccccctcggtcggggaggcagccagatatacgtactccgagctgggttgagtctccgacttccttggaggtaacagaggctagagttctgcttgctgagatatgtctgctcaaggagagaggtctgactaccgaagttgtggttgctaacttcgtcttcaagaatattcagcctttgaaagacagggcgtatccagcttacttgtacagtggtatcaatgactctacccgggtcatcaacaagaaaattcctactgaggatctggtgagccgactagacatgattatgaggggtagagt

SEQ ID NO: 22340 - DNA, 385 bp, Zea Mays
tccgggaaagggcagaccgagcgctgcgcaggtatgttgttggttttgcgaggggtgttgtgtgtgttcgttgtttgaaaatgttgttgtgctgtcttcacaggtgatgaacgaagaagatgtggaggaactcgctggccttgaaagctcggtgacctagagggatgcttcgacggaggcgggagccgaagagcaaacgacgcttccaggaggtgtcgttgagggtcctacgacggcagatgcttcgacgcaggttgagagaatgtaatgggggtagactgatagtgttagttttgtatgatactgaagatcggttgttgcgcaagttccgacgtccgagcttgcgcaagcaaaccctgatgatgctatgagtgatgatattttg

SEQ ID NO: 22341 - DNA, 510 bp, Zea Mays
gacgggcacgacgctaacgtgcagggcccatgggctagggactcgggtgagcggccatgcgcgcggcgggctgacagggggacccagcgggaccgggcccgctgaccagcggcggggggcaggtgtgggagcagtgaggcatggggtcgcatagacgggcagggtccgcctgtcggcgaccaagagaggggaaaggagggggtgtcgatgggaggctaatggtaggccctggctattagggtcgccatcttcctcccgcccgtgcatggcgtgggcaccatggccgggactggctgctatgcacggggagagggggacatggggcggtggcggttggttggaaaacctggcacgatggtgttgtgccgtcgccgaccttcaccggcggttgctcaacggagaagagagaacgggggagagagaaggagttcggccagcggtcttaccttgagtggagctcgactggggtgggctttggtcggtggtggcggtcctcggactggaatagcg

SEQ ID NO: 22342 - DNA, 551 bp, Zea Mays
tgcctcaaggcaacgcttagggtgtgtgctgatgcaaaacaagaaagtcattgcttatgcatcgcgcctactcaagccgcatgagcagaattatcccacccatgatttggaattggcatccatagtgcatgccctgaagatatggaggcactacctaattgggaacaaatgccacatcttcaccgatcacaagagtctgaagtatatcttcactcagccagatctcaacctctgtcagagaagatggctggaactgatcaaagattatgacctcgagactcattatcaccccggaaaggccaacgtggtagcagacgccctcagccgaaaaccttttgggataaaggaaaccaactttttagaagattggaagaaggaatcagctcaactgaatgcatgtttgggaaacaacagcagcctcgaagtcaaaccattgctagatgatctcatatgcaaagctcaacgcctggactcagagacagcaagacttgtggaaaaagctcgcaaagaacaacttccggacctcaggacagatgaacaaggagcctttt

SEQ ID NO: 22343 - DNA, 382 bp, Zea Mays
aaattttgcatcagatgtctgaaacattctctcttatcagcttgtgggaaaactagttccacagcagtcatcaaacccttgccggcatcattacaaatagctagtttctccatattccctatggcccttcgaagctatgtcataaaccaaacccaattatccttgctctcagaatccatgaacccaaacacaaccgggtacatccatttgtgtccatctaacgctgttgcagctgttaggtgaccattccatctaccattgagtgcagttgaatccacacttaggtaaggcctacacgcagcacgaaacccttctatacaaggttcaagtgcacagaaaaatatatggaagtacaccttttcatctacaacttgggtgtcta

SEQ ID NO: 22344 - DNA, 442 bp, Zea Mays
tggcgtcaatctgactttgtttaatggtcgactttccgaagatggtatggcttggccgctagggccgatcttcggaatcttcatctccactttccacatcaaagtcatcactgtcatcagaatcttctgataaatccaccattatctcctttgtgatcttctctgtatttgtttttgccatagattcataaaacccagcaataaaagggtccacaaccttcgtctcctcggccaccttcgtcaccttagacaccttctcctcagacatttcttcaaaacttcagtatttcacgaagttcgaaaatcaagcaagagctgacagcaagagaattaaaatttgagaaaacagcgcaagcaatagaaatggcgtagcaaatgccactgttgtgggtttctatgtatacgcctagtgcattgcaacttggcatgccccatttgtcat

SEQ ID NO: 22345 - DNA, 308 bp, Zea Mays
taaaggaaatcaaattcttgggtcacactatctctcaggctagaatagctgttgatcctgataaagtgcaagaggtgatgaactggaggccaccaacaactgttcgtcagattcggagttttctgggattagctggttattaccgaagatttattccggacttctctcgaattgcgaagcctattactgagttgctgaagaaagaagtcaaatttgtttggagtcagaagtgcgaagatgcctttcatgctttaaggcagcatctgaccacagcaccagtattggcgcaacccgacagcagcaagcct

SEQ ID NO: 22346 - DNA, 436 bp, Zea Mays
gtgttgcggaggtatgacgtgcagatccatcaattgacacctaatgtcgtggtggccctggcgaagtatgtctgggcagtggcttcgtatggcggtcagccctccgtagaggtcttcgccaagaattattgtttgcactagcataagagaaaagttggaagcaagattgcacagtttggatcatgcacctttacgccgaggactgggaagacttcggcggaagttgttgagctagttccctgcgcccgcaacaagtggggcaactggtatgattattggttttatgtggcgggaggcgaggtcgaagacctccctggactcccggcggccgtgatgtgctcccactgctatgtggcattcccgccgtttgaggtggcggaggatgatagtgacgaaggggcccttcgttgtgctgcccgcatgagtagcgggcgcg

SEQ ID NO: 22347 - DNA, 1008 bp, Zea Mays
tgcgctggatctccgggtgagccccgtcaaagctgaccgcggactccatggaggctatttgacgggcctcgcgacctcctcctcccccgtgtcatccctcgcgtttgaaccaagttgacgccgcacagagaaaagtaaatcgagcgagagagagagagtgtcgccgccgaacccgagtgtctcgggcaccagggcatccgtggggccttccggtgctgagccgtgaccctgggagctttgactgccgtcaatttccacgccggtggcgctgcgcaagctcaatcgcccgtccgactggatagatcgccgccaccactgcttctcctctacaccgtcgtccagtgtgccgggattggtcgtggcgtatcgccaagacctggcgtgtgtgttcagaaacttgccggtgacgattcgcgcgccagaacctcggaattgctcgtcggacttgccgttcgaccaccgcaccgctccacccgccgaccgctagcctcggagctccaatctacggtaaacactcccctgccacgttggataccccccctcggctacgtagtgcaccatttagatcttagaatagttcgttagggcgtattttggtcgcggacggcaatggcgccgccgtggggagcctcgccccgtcgccggagtccggcccgtgggggcaaacaaatctcggacattgataggactttcaacggttcaggttaaactagtgtaccgcttcgcccagcctcatttcggccgttgatcatctgatgtgtggttgagggctgatcgcatatacattaaaccgtggccgtagatctcacatcctacgctcatcattgcgtaccggttcgttggatggcccttttaatcgggaccgtcgatttagaatcacacggtcagagatcaatgataccccttcgcgggtactttttgttgaagagaccccggaaactttgttaatcaacccgcggtcctagggcactgttgtttgtgtctcaggaaaacttaccccgagacccc

SEQ ID NO: 22348 - DNA, 618 bp, Zea Mays
aaatattattaggttcgtggttcagctccttgtttcgtatatgcgcttggttcagtttatgatatcagcctgtggggaaggtatttaggaaggcagtcggttgcttggtttaggactgtgcgggtcggggtcgggcatcgagtactttccgtgtttatgcttgcaggttgcggcgtgtggtgtggatgcaagaatatcaggtccctccatttggttctgtcgatctttgttgccaacagatgagattttggtgggatttcactttcaacatgtaaatatttgccaccacaaacggcaaaaaagaatgagagaataaagggatcacgtgtctcgtcatagagagcactacatactagcaagtaccattggaatagtcatcggtgtcttttgggcataaattcttgcgctttatctacattttgggctttggagtcatcttttttttcctgtcgagaatctaggggttagggattattcatgaccggaactttgacgattgtcccctagctgggatggtattgtgctgatactgtcatcttgtcatttcttgtttggctgacctacactgaatattttggtttcatgtttctatcaaagttgtttagcatagaaacgaat

SEQ ID NO: 22349 - DNA, 604 bp, Zea Mays
atttcctatgaatttagcaagtttctgcaataaatttaatactaaaattcattttcaaattgattttatgaatattatccactgtctggacctcgcatcgatttccatagagtccaggggttcatctacaattctcccaagacacagactacctccctataggacggcgggtttattatagggatctacggggtttcttttgcatgatggcatggccgaaggggtatggagagatcctagtcgttggattagatacgggcgcgccagattaaatcattattcctgcgaaccggtacggaatcgcatccgttggatccgaatcaaacggtgagggttttattactctggatctatcgttgtccgtccgatccagatcgacgaaccagatcgaaacgtggtgaaagggtatgcgcggactaatcacagccgttcacgccgatccgacggcgcacgatctccgccccaacagggcacacacgcacggcggcgccgccccacggtggtgcgccatgaccggtggagctaaactccgtatacacacacctgttttctaattcagctcagatactcaatgcggaaggcttaatgaagatgggggtaggtt

SEQ ID NO: 22350 - DNA, 463 bp, Zea Mays
gtgggagaaatttttaatcatcgcaagcagaaggccaagcgtgacaaagagtccgacggggatcacggacggtggcccaataagagaaagaaagaaaggctgagacacgatgagatgctagtggcagtgacaagttagaagggaaataaaccaccaatagagggtcagagtgtgggttgctgagaaaattcctaggtgggggagcaccacccgagaaaggaacagaacccaggcagggcagcaagcgagagaaggcaagggttgccttgccagacgagactgggtgcctgctgatcttcgaagggttggagtactacgcgccgagaagatatcggaagtcggaacgacgcgaaatattctagactcgacaagcatctccgattgtcctcgactggtccgaccacactattacttacgaccgtaccaatcaccagatcacatcctccgacccgggtgatacccg

SEQ ID NO: 22351 - DNA, 604 bp, Zea Mays
cctcgacgtcttcggtatgcgccatctgcagcaacaacacactcattcagcaaaaaccgcacgtacccacacatataaccacacaaaaaacaacctttacctactctattgcccggtcggaccgctccctgatcgcctcttgaccgtgcggaccccacatcctatcaaagagtgcccccgccaactgcttcaccacagggtcttcgaccttgaagatttcacgttcaaaattgtcgtccacctggttgaagacctcgtaatgcctacaccccttgcgtgacaaggcattcatggccccctcgcaggtgacgagggaggcgaaggacatgaaacctgtcacaatggtctagagcaccagcagctcctcctgcaaccattcaaggaagcaaaggcctgcttcttggccgggcacttcaaagtcagcagtccgcgcacccagctcgcggtacgcgtccacgaattgcgcgtgcgtccgctcaacctccatccgcgtcgaggactcggccttgtccacgcggctgcgtagggcgttgaacctcgcctccagctcctcggcgcgttggtgggcgagactgccctccgcccgcgccaccttggctttggc

SEQ ID NO: 22352 - DNA, 732 bp, Zea Mays
tcgaaagcctctggcaagctaagcacggacagccctccgttttcgttgtcggcatgtcaaccctctcctcctcctctttctcccgtgcactccatcagcagtgcttcctcgctctaaaaatgggagccgggcactgaggcggaagagcaaggcgcccttcatccattagccagccaaggtaaggagggaaccacccatcctcctcttccacttcaagcatcatcagtgtcgatccgacgttcccagtcaagaatcaatttcgacgatcactattttggtccactgcaaaattgtaaattctcccatgtcatcagttcttgcttcgttcccttcacgttctgactttattgttcaaatgctcatccatgcaatgggtttacaaccagcattcgcaaacttgaactttcctttttttacataaaaaaataataaaaaagaggttctcttttatgttccggtcacatttcatttactggcacgatgaatttctctgacaacattcttcgcccaccgtgcaggtgatttctgagccagccaggagcttgacagtcacagggatggagcagtacgaggtgctggagcagattgggaagggttcgttcggctcggcgctcctggtgaggcacaaggctgagaggaaaaggtatggatggatgcttgcttgctttgtttccatggtgtcactcagcctgcctcgttttgctacaggtatgtcttgaagaagatccgcct

SEQ ID NO: 22353 - DNA, 812 bp, Zea Mays
gaaaaatgatgaggtggtagttttcaaaagttttttcagagcgggattgcagtttcccttgaacgagatgattggggaagttttggataattatgaaatctatcttcatcagctgacccctaacactatcgtttggctcagcgtattcatctgggccctttgaagccaaggaatggacccgaatgctgaagctttctgccgagtgtatgagctgcattaccagacaaaggccagagaagacgggctgcatgaaagcttttgctgttataacttcgcatatcgcaaggatatgaaggccccggtgcttagctatcgcaccaagtggccaaccggttggaaaagtgagtggttctatgtcaaggccgatgagaagaagagggagaagttgaagacgctagtgatgagcccgctgagtttaagcttcgggttgactaggcccctgtgccgcatgacatcggggtcaccataccaacaagctgtagcagaatttagggtggtggccgaaaagattagcaccagggatctagttcatgaatatttggctaacagaacatctccgactttgagcgaatttagcatgccgaagctaaaaggaacgaagaagggacttgagcttgtgcagcttccttatcggtttaaatttgagaaacaatttaaagaaccttgccaagagtggctggaaatgattgaaatagtgtgtaatgaagtgctgggaaattacacaaaaaaagaggatcaactgattactgtggccttcggtactcgaccaaaacgaaggttaaaccaggtaatggatgccttaaactttgaat

SEQ ID NO: 22354 - DNA, 358 bp, Zea Mays
tgagagtctaagtccgtgtgagcctgtgttgtagcgttgcatgccctcccttttatagctcaagggggacacgtacaaggatgctgaaccccgacatgtgggcccaggaacataacgaatggaacacccggagccactaatgctgggccgggtgcaatctccttgcgccatgatatccgtggcttgcgtagtattggcgtgcaggggaagcttccctggccacgtacgagtgatgatgattgtggcgcatgcggcagtatggttgcgccgcctgccacgggaatggacaggcacgccgcctgtgggatggtctggtcaccgtccgccagcagagcgacagggcgcattaaatgctgag

SEQ ID NO: 22355 - DNA, 468 bp, Zea Mays
ggttttggagcttgtttatgggatatagaagtcacccctatatgagtattcgtaagcatgcgaaatcgtcttaagtcgttgctgacttgaatcgatcgcttttgttagttgggcatagtggtcaccccgagttaagtaagcgcgagcatgttacaccgccttaagtcgttgccgacttaagccgattgctccgtaaggagggcatagtggtcaccccgagtttagtaagcgcgagcatgttgcaccgccttaagccattgtcgacttaagctgattgctccgttagcagggcatagtggtcaccccgagttaagtaagcgcgagcatgttgcaccgccttaagtcgttgccgacttaagccgattgctccgttagcagggcatagtggtcaccccgagtttagtaagtgcgagcatgttgcaccgccttaagccattgccgacttaagccgattgctccgttagcagg

SEQ ID NO: 22356 - DNA, 550 bp, Zea Mays
cttccctgctagtccgtccctccctcgttttctttctttattgctgtttcgctctcttgtatagtgttgttttttgttttgattgaataaaaagttttcagctgtaggggcttcccctaccgttttcccggtaaaaaagaaaagccggccgtgtttgctgctgcaatggtgagcgaacttggtttctgaaatctgaaggcatggtgagaacgtattttgcgtaaccggggtcattggctgatcatcttggaggatgctaatggattagcggccttcctggctttcttggtcagcaataatatctaactctttggactatgaagtgtcctgatgcggctgactggctgagtgttctcttaccgattgccacacatacgagtaacagacaaggatgaatggtttgccatcttcgttggactgcgaggaaacttggattctgaaggctccacgagaacatgtctgcaacgtcagaggcattgacagatgattttgaagcctggcattcatcatggcggtttgttgaccgacaatgttcttgatgggctttgtg

SEQ ID NO: 22357 - DNA, 460 bp, Zea Mays
aagacctttttgtatcttaggcactattacttccgccgaagggcttaaaacttctaacatttttgttccttcagtctttggctcttcggccttatctttaccagtctttgcctcagcttgctcggctgagggtgccttcggcatggtggccggttcttcatccttctgcgtagaaggaatttgctcctttggagcaacagctgaagaacttttcccgccaaacttgggcaccacggccggctcaatataacggggccggtgggtgaggactttcaactttttactcttcggtgcaggctcgcttggagcagccgaagcagcaacctttccagaggttgcaccctttcttttctgcccccgtggcgggtagcgatagtcagggtacacaaatccaatagcatcaaaaaccctatttaatcttttctttttttggctcctgaaggccgtagatagtgcatta

SEQ ID NO: 22358 - DNA, 505 bp, Zea Mays
gtgcaggctcttggcatcctgtcctcttgccttgtatagtcgaaacacaggggtaggactttaggttgcgttgtagcctgatacgatgttgaacgtaggggtgtacggatggagtcgtcctgtctcctccgactgtctactcatgcctcggtaatgcatgaggaatagtagaggccataatgaagggcaccctttgagccaatggtcttgccttggtaacagacgtataacaatgaatcccacatgttgcacactgggcgtgccatatgcatttaatgtgggggtacaccacctgccactagcgtgggaaagtgtacatcccgcccgcacctaatgttggtgggcccatgtgagaggcttacgtcaggagccacccatggcttacatcaggcgtccccggccatgcgtcgtcaccggacctctatctggggctctgggcaaggatcaggttcgagatcgtgtggcgatccagtacccccggaccctccttgaatggggatctaga

SEQ ID NO: 22359 - DNA, 641 bp, Zea Mays
cggcgacctctctgcgccaaaattagtgccacctccgtcctgattcgtgggcggtatggtgtggataacgtcggggagggataactcgtacgtggcgccatctcccaggcccagccggagttactcaccggcggccgccgtgactcagtgattccaccgcggtggcgctcatgccgtagttctccctcactgtaccttctaccgacgtggtcgacatgcgattgcgatactatcctcagccgcgaggtgatcgcaggaccgccacggctataaatagccattgggttcacggcaaggtgtgatcatcgcaaacacagtgactagatcgaagtcaaattcgcactgccctctccaccttctcccaaatcgattgcgcacggtgaaagcacagcttcttacagccgagtagcctcaatctccaaccccaatttcaaacagagccaccgcgacgctgttttccctcaattcggtctgctgcgccgccaagaacagctcatccgtggccagaccactttggtaatgctctgcccaaatcaaatgttgtttctgcaactccgttcgcttgtgaagctcatcgtggcgttcgattactcaatccggccccggttgtgcgggaacgcgtgcccgtggtcacggtttcc

SEQ ID NO: 22360 - DNA, 828 bp, Zea Mays
taacagtgacttgggaaaaactttaagagctctttagagaatgatccagtgagtatatgagtgtggttactatagcaagatcgaagttgaattatagatcaacaactttgtcacaggaggataaacaagatatgaaataaaaatttgagatctgggccctgaaacttgctttgttagacgctctcatggtgatcaccatggtacagtgactgaataagatcacggattcagctccccttgccgccggtaaccctcgcgccatgatccgcgtcatcgccacgattcgtgctctctagcgaggagattatcacgatagggtaaaaatcttggcaccggataggctcggacccggtcgacggtgagctcgtcgtacccacttgggctgcggtcgggcaaaatggtcctcgccggagttggccgcctaccgaccgtgtgccacatgccttagggcattaccacatcgtagtaaaccactaaagcatgtctggtcatcgctggtgaccttgccacgatgaaatccaagaatcctttgcgccagtgctctcccctctctacggtcgcgagcgcgccattccaaattcaagagccacctccctcgggccctataaattaagggtgccatcagctccgctaggtaatcacacacccaacgcactagcccgtgccttagattgtccaccatagcgctccaattttgaagttcccccaaatcagtcaaaactccaacgtgtgtgagctcgtcgtgcccacctcgctcttttttcagctctattatgtgctcttgatgcttcttgacctggccaattgaattagaccgcgttagatcgt

SEQ ID NO: 22361 - DNA, 414 bp, Zea Mays
ggacgtggctgctagggttagggaggtataaatagaataaaactcctccaatcctaatatccaatggctcagatcgaccgacacttgaaaaaactcattcagactccaaacaaggcaaactagtagtcgattgaaatcgtctcgacgatatctatgcatctacggtctccgatcatcagtaggacacaccgtattaggattttaaacatggtttggtttttagggtattatattctaccccccttaaaagaattcgtcctcgaattcagccacttctacaaatcaagacattcaccaacggtaaaactcggtcaaacaccctaaatagactcatatagtagactagtagccttgacgagatcatgaaaagagtttttcaagaaataacctctaagtcggactaatttaccaaag

SEQ ID NO: 22362 - DNA, 785 bp, Zea Mays
ggaacaatgagacggaggagaggaagaaggcgcgccgcgataggttcctcccggccgccgaggaacgggaggcgtcgggcaggggagatgaccgggttctggagatgatgcgcagtttcagcttcatgcaggcgaccgaggaggatttcatggagggcatgaccgcatacgagcacaacggcgttggcgacggcacagcgcacgggcctgtcgcgccggagccgcctgcgctgacggcgactagcctcagcttcaggtttcagcaccagatgcccgaagttccaacggagacggcgctggtttcgagagaattcactgcggcaagacaagagacggcggtagtttcgagagaactgacagcagcgagagacgatgatggacgacaacgagaggaagagaaggaaccacactttcctttggaaccattcgctccgttgcagacggcggcagacatgcaagaacaccggcacgacgaagcagaggaaacagagttcctggcggaggagccggcagaagagcggagcggagaggttgcgcaggaggaggcagcgccacccaagaccgtcgcggccacgcacaactatcagttcctgactgagcgcgacttccgggggttcgtcagggagccggaggccgtgacggtgcgcgtccaggaatctttcgtgccgtcgccgcctccggcgcaccagcccgaggagcgacgggtggtcgacgtctcctcccgcagcggccggttcctcacggcgagggacttccggccggcgaacgagcccgacgtgtgcgag

SEQ ID NO: 22363 - DNA, 377 bp, Zea Mays
gtttatgagtgcgaaatgttattagaacagattaaaatatctcgagggtattcccaagagttgttggaattctcggaacgtttctttgggtagtaaatatgaatttcagtttttattctaatattatttaaatatctaaaatttagcatttgcgaagaactataaaattctagaaactcgataatatatgtatatatttttctttcgtcgagttcgttctagatctcatgtccttttcgcggtgtcgttaaaacatcactcctcgcaatcggcgtgtcgctcgcgtctactcctatctacccttcttgcctcgtctcgatgcgcaatgcccatatgctgtgcctgcaaccgcctttttccctcacccattcctttcg

SEQ ID NO: 22364 - DNA, 417 bp, Zea Mays
agaagtccatgtaggacgggcctctttcaaccctttatctctctcaaacggtcacgagtaccgatcaatttttttcttttcttcaccatgaacactgagtcccgcaaggacctccacacaaagaacgaagtttcttgcttagcttcacaacttgtgagaatgggggtgagaatgagaatgaaaaaacaaatcaagagcacaagagtttgcaacactcaagaacataacactaagtctctcttcactcaaatcgatcggatgcacgcttgtgtggctttcaatgcgtaggagtagttgcaatgatgtatggttggttggagtagctcttatgtcttcaatgtgatggttgggaagtatttatagccctcaaccacccaaatagccgttagaagaagtggggaaaaactgcacaaatta

SEQ ID NO: 22365 - DNA, 408 bp, Zea Mays
aagaaatgtggagaaaatctcaacccaagttggactgtcagactgcctgaggtctgaagttcagactgacagtgttttgagatgaactttgagctcgattttgaaggggatccagtgactttttgtgagtacacattatagcaaagatatagatggatgatagcactacaactttgctgcagatcattgggtatgttgccatgaaaatttgtgagcaaatcgagcctaaactatggctgtcaggttgactaaatactgcagcccatggtacagtgaccgttgaggatcagatcgccagccccagaaaagatctcaccggcagtggctttccgccgtgattcacgtcgccggcgtcatgattcgcgccctgggtaagtggataacgtcgtaaggttaaaagatcgtcac

SEQ ID NO: 22366 - DNA, 285 bp, Zea Mays
cagctgattgatgcagtgaaacagttatctggacgaatagaggtgatggagaagaagcaggtctcctttttacgatataagctcatgaaaacatttgcatctattatactgaaccatgcaatcttaagttttggaaatgttatatgcaaaaaataaaccagaaattgcacttggaataggtgttctgatagcttagcatgaaaatgtaggaaccaagagaataagtaagaaacattatgttgagtaaatctttgcacattattatatgctgatactagactgcag

SEQ ID NO: 22367 - DNA, 1042 bp, Zea Mays
acctgtctaccaaacgcacaggccaccaacaaatgctgaactgtttcctctttctgatcacataacaggcaaagttcaagatgctcaagtcctcttctagcaagccagtccacagtccagcacctattgaggctcgcaagccaaatgaaaaacttacatttcggagggccccaggttttccaaacccttttagccggtttaaaggctactgaccctacgaagaacctttcatatgctgacttggaagagtagcacctggaagcagaaggggtccaaagatgcacgtcttgtacacccggagccaaattgaactcatttaggatgacctagagctgtagaaattccatctacgtttgagcattactgcacctcttatatgtctgacaccaacaaccattgttcatagtgtcctgtactgtttgtatctgctgaaccttactggggatgagcttgataagagagggtgccaagaccgacaaggattgcccatggagccacctgccataccaaaacgtgctgctagcaccatctcccaccgcagttacaagcgaagcagtgaacatagcaagaccagaacatactgaaaagaaagaccaaaagcaacatgaccaaaactaccacactattgcctgtgcccctcctaaaggtctcccaataagcttcaggaggccctttgctctagctgagtaccaaaggatgcactcataagttacagcttgcaacaccgttgtaaggcttggagtagagccgttaaaaacacagttgtcctgtcccaagccaccaatattgccagtgaattgaaccccttctgtagtccattgttacctctttaactgcctggtaggctggtaccactagcttgagaatctatgggttgatggttgggctgcaatggagacaaaagcaattttctgcaacctgcaaaatggtgaactagattttccaggcgaaaacacatgaaatcaataggtgctgtgtggtcttctcttcttcatcagaaggggcaagcagctgggtgggaagtcctcttttagtgatccgg

SEQ ID NO: 22368 - DNA, 375 bp, Zea Mays
gttgggagagttacgacgacaaaagagaggtgatgcgcacaataaagtccaagaaactaatgggatagaagatgcgttgtggatctcagctcgtcaattcataacattaaacgatcgcatacaggacatgcgtaggtacgcgaaatctgtgagttttgatagcccgatgcatgcagagcagaggaggttgaaggcggcaaatgagaagagagcacatgatgcaagggaatgggaggcggctagagccgagaaacagatgttggataatcttactgatcgtctcaagggaagtgagtgagaaaaatgatactataattttgtttgtacaatttatttatcctgactttgcaaacttatttttctcattatatttgc

SEQ ID NO: 22369 - DNA, 601 bp, Zea Mays
gcagtggcaaccacgacccgtcctgggccatatggatcagattagatcccagtcttcccgaaccggtatacttccaccaccacaagattccccatcaatgcccaaggaagcgccataccgcaacatccccagagccctcggattcgatcacgacgacactggcttaatcgggccgaaggggtacgagcatctaatcgccaccatccattgccagatcaacgccccctcatcttccaccttagctcccgtcgcagtggcccacgcgaccctcctggcggcgcacccgccggcgccaggggacccagtcccccgatgacctggattatacgcttacccaagctatgcaaagcagagatgaagccaaactacaaagagggttgtttaccatcgatgacgtagcaggcactcccgtccacgacgcaaatcggatccatggcatcccacatccccggcgagaaattcccatgctcccagccaccaatctcaccatatgaagtcatgaacatgttcggtggactctggaggctttcctcgatcgtctgctaagccccgagctatgcacccaacaggatgcacacgcggcggaccatctttacctctg

SEQ ID NO: 22370 - DNA, 770 bp, Zea Mays
gcagtgggtgtgatctttcatcatcgcaggcagaaggccaagcgcgacaaggatcccaagggggacctggagggtggcccgataaaagaaagaaataaagacagaggcatgacgaaatgctagtggaagcggtgggacagaagggaaagagaccgccgaccaaggaagccactcaccttttcgagaagctactcaaagccccatatctgaactactgctacctggtctgacatgcctacaaggactgcgagctgttgagaaggttcttgggtggaggaacaccgcacgaggcaggagcgaaacccaggaagggaggcgagcgaaaggacgagatcagatgtctgctgatctttgggggttagattactatgcgccaagaagacatcggaagttagaacagagcaaaaactccaggctcgataagcgtctccggttttcctcaactagtccaaccaaaccatcacctatgatcgtgccgacaacatagagcatatcccccaacctagacgatacccgctcattgttagtcccatcgtagggtcggtacgacttacgaaggtgttgatggatggaggaagcgggctcaacatcctttactctgctacgctcaacgccatgggcttagaccgagatcacctccgactgacagaaggacccttccacggggtcatcccgggaaagcgggcgaccctgcttgggcgaatcgacctcacggtcacatttgggacaccgaccaacttcaggaccgagaccctcaccttcgaagttgt

SEQ ID NO: 22371 - DNA, 837 bp, Zea Mays
atgaattgtatctccatcaactatatgttaagaaaacatctattagagacatcatatccaccacaccacatcttattttgatgtttatagtagaagatatgagagttattaaaagtaagatatggctgatgccacactaagctataatggctcatccaccgctgttgtccggcaaaccatcacattctgtgacgcgggacgtcgagcaactcctgacttggggcactccggtcccatatgacaaaatcccccattcccattcagccattcctatcgtgcaagccatcacacactccggacgttgggcccacattgcagactacggacgcccacatgacagccaccattagttttgcacacaccgaacccacgtctgctcgcgcaaaaagttgcctcaatttgacactagcaggagcatttgaccatgattgctttttctaaagaaggaaggcttataagccggtagaagctatgttggctggccggtatggtcataaaaatgtgcaagccgtgatgacgacataggtcgcgtgggctgtgtttctttggtgcggcccaagtagctaccaggaggtcgcacgcttcttaccctgacccagcttggctttagggtcagtctcccttgctttctctgcccagcgagccctcgccctctagctcttcttgctagcgccgtctacatgcgagtctttattttggaaataaccaaaggttctgaacctgcattgtgctaactcgtcaatcattcctgaaatgcgattcttttttttcattcagagttcggttggacaaattaagatggattgagatcttagttgttaaggtagaagcaaaagc

SEQ ID NO: 22372 - DNA, 743 bp, Zea Mays
gtacgatagacgtaggatttatactggttcgagcaaaacgtctctacatctagtcatgagtggcttgtgctaccggtaccattgatgatcaaaattggtagtaggggttacaagcaaggcaggaaaggaaggagagtcttcaaagtctcttgttcgtggtggaggtagttacaaggtggagtcctagttaagttttggcttggcgatggggctccaaccttcagatcctcctcctattcgtgggtcttctgggcgttgtctcgtctgggtcgtccttgtgtcgtccgtccaagagaagcaacctccatgtgccctctccagacagacgtcctcctgtgcggtcgggagccgaccccccttatagactaaggaggtaggggttagcccgcggtggcttctttggaaaggatccaccggttaatggtaaaaccgagcctctttaccgtgcggttgggggccggcctcccttatagactaaggaggtaggggttagcccgcggtggcttctttggaaaggatccaccagttaatggtaaaaccgagcctctttaccatgaggtaaagtcacgtgtgcttgtggttgcctgttgtcccgtattatttattacggacgacgtagatagtgtggccccgagcaccatcacttgggctatgtcgatctctggccttcgtagcctgaaactcgacgcggcttgtcgtgttgcgcgggatccagtcgaggggtttcccttcgacacatttac

SEQ ID NO: 22373 - DNA, 419 bp, Zea Mays
gcacaagcgacgacagaggaaaccacgctcaaggccaacagcaaagctcctagtctttagggatacaacaaagttcataccagccaccagccccaagaggcagaggaggaagaagcttcagaggaaggttcagttcccaacccagaaggttgttctgtttattctgtggggaggaaaagggacatacaacaaggatgtgctaagtcacgatccagaagcaaaaaagaaatagatgaagccaaagcgcggcagaatcacccgaagcaggtcctgtacactgctttgtgctattgtccatacattccccagtatgtgggcaaccagcagcccacatcatcagttgctttggaaagtcattctcaagctgcatgggctccgctaccaccaccaccaccaccacctatggtaccaactttgac

SEQ ID NO: 22374 - DNA, 577 bp, Zea Mays
tgaggcaggagttctgctagctgaagttggagtgttgaaggagaggggtctgactgcagaggctgtggttgctgactttgtcttcaagaatattcagccattgaaggacagggcatacccggcctatctgtaccgaggcctagctgactccacccgggtcaccgatagaataattcctgttgtggacttggtgggctggctcgaaatgatactcagaggcaaggtatcaaatgttggtgcccctgttgcctactcggcctggaacttgcctccttccaaggcctttacccatttcgtgtcaaatcctcctgctggtgatggcggtttgggccttagagtgtggccctctaccgaagaagttagtgctttggttgctttgcttgaagaaattactgatgatgaacggcaggctcactttgaggtgcctttggatcctagtgatgcagagataagtgctatgcttgatatgttagccgaggattcttctgatgccgctcctgctggaacattggcggtggcgcctctcccagaagctagtaaagccttggatattcagaggtctgtcagtgttcgcccg

SEQ ID NO: 22375 - DNA, 1378 bp, Zea Mays
taggtatctgtcatgtaatatattcagaaaaggagaacatacctcagaatattagcaaaaggaatttgcatcgtcactatatttgtataattccatgctagaatggttcaagcggtaaaatttaaaatgtcattgtcacaaccatgcgggggggggggggggtgcttgctgctgttatgtggggtgggagaggaggggatgggagggagcaatggctctatgcttgcttaggctaactccaacagagtacctatcgtgacacctaaatctattatagatatctaaatgacactatagcatctcgaacaggtaatttaaactcgatacccattttagatgtgatgtgggagagtacctatatattgatggccattttctcaaacgtgtatttgggcacaaaaatatttgggtctcgtctttcggctgactgcataacacgaacgtgtatttggattcccatttttgcatattattgttagagttagccttagattgaaaccgttacattacctatatatttatagcccctattggacttgtattaaaaacaaactagagcagtagtctttatagatttggacactcctttcctaacaaaccaatattctttcctaaataaactttattttatttactccaaacttatcaaaggctttctttagatttcatctattccatattctcctcaactggatggacttctggggcggcaggggttgcaacccctcactcacgcgcctcctttacgacacccaaggtgagattgcggttcacaaggggccggtgttgggcctccgttgcccgctaggcccaatgctgcagcccacatttaggcctatgacatctcccccttctccactcagcgtgtcctcgcgctctattatagtctagttgttgatgcagtttgagggaagaggttctccaaatgggattgcctagatcctgacaatgagacgatcgtggatgatgttagccaagatctagttgtcttggatcctgatgatgatgagctcaaagtagtaacgatagttgctagaggtgaggatcgatcggtgtatggctacgtcaagagtgaatatctgcatagcttaaggagatctctcaaagctatgtaccttgttgctgcgaaggatgaaggctgccatacgacgacaaattgtcaacatgatgcacatagattgtgttgttgttaggtctagcaagtcaccaaacatgaacttgccccgttgaagttgtttggcgagaggctcgagtgtctcaagtcatggatggtgttgatgtgttcttggtagcgaggaagtggcaattggcgatgtcgaagaagatgaaattgacgaaggaatgataccttgcggccactcacggatcataaggatgc

SEQ ID NO: 22376 - DNA, 1001 bp, Zea Mays
aattcctccaacaatgccatcagcacaggtgttaaatccaagtgtgcaaacagaggtggttcagattctatcatatctaattccactatcgacccaggtggaaaaacagcagacaatccatgtaatagcacccaggaacgttgatatggaatgatcatccacttttgggaccaatgcaccttcatcggactattagctgccaaccaatccataccaatgatcatatcatatgaagccagatccaaaactctcaagtcagtgtcaaacacgcagtgttgaacggaccatctagcgccaactagctggcaagaacacttcaaacgattgccatccgctacctgaaccagcactgacttggccatatcagttacacctgataacctcgatgccacccgggatgcaatgaatgaatgagaactacctgaatcgatcagcatcaccacttcaatgccttgaatcagtccccgcaacttcagagtatggttcaactccaatcctttaacagcagcaatggagatggccaaacattcagtctctatgatctgatcctcgaccacaacatcctcaggaatggtgtcttcatccccttcatataattcccagagttcctgtagagcatgtaactggactgtgggaggacacttatgatcacgcgaccacttctccgcacaacgctggcacaaccctttagctcgacgataagcgcgcaaggcagcaagtttgtcatccaagacacgagcacgatgttgttcagccggctttgtttcttcgatcacagctccagtcttgtcgggtcgtgctgtcaagaaaggaggcactgaagatttgccatacccctttcctgacgacgcccattctggacgtcgatgctccaaacgtcggtctgacgtggccacctcttcctgcagcaaggcgagagcgcaagcagaatccaaggaagaaggccgttgaagaataatagcagcacgaatgtctgaacgaagaccatccacaaaacgttg

SEQ ID NO: 22377 - DNA, 478 bp, Zea Mays
aaacttttgatactagactagaaactacaaaaccaaatttgggggggttttatattccaaactacccctatttatttggatctaaatcacttaaatagggacataatggtccaactctcaatctgatgatctgacgaccatgatcccttcacagatttgcttcaccatgatgcaacctccatgatggctccacatgccgcctctaattccctccaaaaccacgtcgctatgttttgagcccaaaatggtgaaactattgttgtgtggttttgagactcaatcaccatattgtcataggtagcatacaccattcacgtcacccacatcctagacacatgtcctgccaatccccaactatgtcgtcgactcgacccactgcaccatgtccttacgcatatcggtgtccataggtgtcaaccaccacagctaatcatcttgctttcattacatcacctttactatcaaccatcgcttcctg

SEQ ID NO: 22378 - DNA, 425 bp, Zea Mays
gaggaatcatcgcttggcgcgtggttgctctgtgcgcggcgtctattcctcatcgcgggcttggaccgaccggatcgggctcgggttcaccatcgccgccgtcggggcttctcggcgaatacactcggtcgtggggctgattagcgagaacggcgttcaagtggtcatcaggagcaagatcacgacagggaaggcttagcggtaaggaaacccccacgctctcgatctaccactctccttggtctggctcacctaaacctcattagggattggcaacgtagcggggcgcggcaccaccatgggtcgacatcggttagatggggtggctggggcgcacagcagtagatgattgtaggcgcttcctgccgctgtcggagccgcgacttccaggagcgtgcggcgtcatgtggcaccatggagaagat

SEQ ID NO: 22379 - DNA, 389 bp, Zea Mays
caagaaagcagggcgcaacaacagcagctgcaacaacaacttcaacaatagcagcaacagcagcaagtgccattgcctccaccaccaccaccagttccaccccaagacaagcatagagagttcatgagtcataagccacctacatttgcaagctcacctgatccactggacgcggatgattggctgaagtccgttgagaagatgttgaatattgcgcagtgcacggaccgggagaaagttctttatgcctcaggtcgtttgacaggtcctgctgcggactggtgggattcttatactgctgcccacgatgctgctgatactattacttgggcagagttcagtacacagttcagaaactaccatattccagctggtatgataaagatcaa

SEQ ID NO: 22380 - DNA, 340 bp, Zea Mays
gaggggccgaagaccagggcatttctgccttgctcgatctccaaccatagaggggtcagggacctaggaacttctacctcaccggactcctgaccacaagggggcagaacccaaacattttcacctcgaagctccacctcgcccgaccaccgggggtgaagggtcggagactttgcccaatcacctgaatgtgagattccctaggccatactgccttgaccactacgaacatgaagacatgcgagtcaaactctatcacgatgtggaaccggaacgacaacacgagagcatgtgtgtcaatatgacgacgtcatccatcagggcatggagactaacaccg

SEQ ID NO: 22381 - DNA, 714 bp, Zea Mays
cgagtggtaacggccccggtctagctaggcacggagcgcgtgccatgctcgacagtgaatttggctcattgggctggcccaggcacgacccgacgataaccgggcttggaaaccggtccggtccaaataacgttggcatatgaaaatcctagcccctcgtcccgtcgtccacaccgcatacgcattcatgcacgcgacgcctttctagctctctcgtgaacggcgaaccttctgccgcgcctccgtcctcggtactttcgccgcatcggagctccaccgctccaccgtctccgtccttggtactttcgccacataggagctcctctactctactcctcgagtcctctagtcctcctccctctcggtatacccaactcggagtcggaggcgacaacgacacgacgccaagtcgccgaacggccgaagacctggtgctctggtgcttgttctccggctactcctgtcctccccctctctaccttgacctcaaaggcgacgactgaactggtgctctggatctgaccgacgtaggtaatctgtcgtaaccctaacttactctggatgaccggatctgatatgctactgatctacatgctgttgtgatgagatggactgatgaaccgtgattcttggaatccttgcaagtcttggtggtgagcagtcttgatccatgaggagcctgtgcgcgcgacgccatatccacgacaactcgac

SEQ ID NO: 22382 - DNA, 609 bp, Zea Mays
cacatctaccttgccttgagaagcaatccaatctaccataacaaccatgtgctccaacaatcagtgcctgactgctatgccatgtttttatcttggtcagttaatgagcaccagtcacaatttcctagtaacatccgagtaatctatttcttatctttgtactaccttattgcaacatgattgcgcctttttactcgaggcttgaacacgctagtgtattggaagtgccgagtcagaaaagacctgcagtctcaactgaaactcgcccgcttcgctaaattgtcaacatcagtagctgccacctaaaccttgattcagctctttcataacatgtccaaaggatacaacacgctaagccaagttctcagaatcagacccacttcaccataattgggacctagggcagtttgtgttgatctctgtgtaaggtgtggggtttatatcaaggttggttcccaaatttggcgtattgcaaaatagatggcactatggcacccatggctggttctgaaatttgccacgttgtgaagtagattgcaaccgtcaatttccccccttttttctcgtgttgctggggaaatcagtaagtagctaattagtgtcattctt

SEQ ID NO: 22383 - DNA, 525 bp, Zea Mays
gtgggccagaataaaaattgtttttgcgaattacaagggcgaactggccctgatgagttaaacaaaaaatttgcggagattatcgatgttccaggagtgctccaagtcttcgttgtttggcgttgcgagcctgtatgtgctgggggaggccttcgtcttgacaatgaaagggccctcccacttgggctccaacttgcccctggactctgtccgagcagttcggacgagtacgaggtccccttcgctgaattccctcgggatgactgtgtggtcgcgccatgcttttgtctgggcttggtatttgtttagagcctgtagagcgaagactcggtctccatccatgagatccttcgaagtgggttcgtccacgtcggggacagctgacgaaactgttcgcggggacccatgctttatttcttgtggggtcatggcctccgatccatatagaaggcggaaaggggtgaacccagtcaccctgcactcagtcatgtttagcgcccagaccgcctcaggtaacaaatcggc

SEQ ID NO: 22384 - DNA, 968 bp, Zea Mays
gatagcgcgatgaccatgagggagatcagcgagctctcagttgtggttcgtctcaaccgcgtccatctctgactgcatcgtgacacaccaagccgtgtgtttctcggcttccgcgaaggaccgaggctcaccgtcgtcgcacgcaagatgcaactctcctgccagaatgcgagacgccgggcccggcaccgacgggtcgatgaaaaggtcctccaccttatgataccgcaatggctcgttgtcatagcacgcgtcgacgcgcttctcatcgtgggaaagcggggtaacgagactccactgggtcgtgctcgacatgagctagcatcggagaggatgttcccggaggggttaccgtcggtgctggagtacgtggtggtgaagagctcgctgtagctggagtcgtggctggagtgtggggtggcgaagagctcgttgtagccagagctggagagcatggcgctggagtcggtggagacttgggggctgggtagacctactcggagaagagttggctactcccccagctccctcaaagtggacgtactcgatggtgaagtcgtcgtacgtcggagtcgtgccgtcgtccaccgccttgtcccatgcccaccatcgccctttatcaaacactacatcgcgcgccgtgcgcacacgctgtgttcctaggtcaagaatgcggtaggccttcgagccttcctcgtagccaatgaacacccctgggtgctcctgtcgtcgagcttgccgatgtggccaagctccttggtgaacgcgaggcaaccgaaaacccataggtgagaaaccgtcggcttgcgcccatgccaagcctcatacggtgtcatcccgttgagtgccttggtgggcgagcggttgagaatgtagatcactgtcaccatctcctctccctagaagacagccggcattctcctctgattgaggagagcccgagccatccccacaaccgtctggttgcg

SEQ ID NO: 22385 - DNA, 702 bp, Zea Mays
aagtacagaggaggagccgtcgtcgtcgatacctgcatatccggaccacatagagcaagcatggggccgaggtgatttactgtgccctcggaattgcactcgtatgcttctcggatggggagctgggcggcgttccgtgcgtggtgggtggtcaacagaccggttgccggactggcgccgctgggggatggccctgtgccgctgtgccggtcgcctggggagggagatgatacgtaagccatggagtggtaaacggacggctgggattcggtcgggggtgtagttcggtgggatccgatatccaccgttggatcggtaatggatgggcaaggggtcgcggaccggtgatccatccgtgaacggtcgagattaaaacgtcgacaccgttttgggtagatcgcttccacaccgttgatcatcacgtctaggggcgagtcaaaacagtaccaccggtcttcacaaggaagaagatgcactgggatcgtagatgtgtggatggatggcccagattgaagcaacatgtacccttttgagttatttaatcacagccgtcgatctctggttgtgtggctcaggttatgtactcgagtccgatctaatctaggccaccgaatcgtgatcgtgcggatgtcgtttggccgtaccccttcgacctctgcatttttgcagaagagccccttctctttctgtgaatcaacccgc

SEQ ID NO: 22386 - DNA, 475 bp, Zea Mays
ggtctttggaggatggggaattggaaagtcctttctcgtgggtggatgaatcttctgaagatgacttagattattttgtggcattggatctggctgcatcggagtctccattgtgattcgcccctcgcgaggcgccggtgacctcgactgatgcgggcgcaggagactcgcgaaggcagaggatgggtgtgtcaaaatagagcatcggtgagtcttcgcgaagtgtaagaagacatcaccgaatgggcatggagaggtcccgtcttcgaagtgggccgcgattggattagggtacccgtcgcgagttacttgcgtcgatatccgggtcatgcatcggagaaggagacctgcgggacctttttgagggggaagagttgaggttgatgttgtttaattttcgggaggctggtcttattccaaaggaggagctgatgtaatagtatgtttccctcactgttccgttgcgatgatgagt

SEQ ID NO: 22387 - DNA, 753 bp, Zea Mays
ccacaagacgatagttctcatcgacggctatgatttcaaacaatttctggttctttgctatccacctccaaacaatcttgataacaacatggtaggaggcggcagtttatctaggagctgtgtccaccaccatacacatgatagccaagattcggagcaggcaggcatggacattggcgtagttgtggggtctggctcttgagggtttggattcagcgctgccatggatctcctagagttactgatggtagtgtccacaagctcacaaggcatgtgagagatggtgactgcacatagctttagactattaggaatggatttacagcgtgctggttttagtcacaaaagtgtttcggaatgcacatagaatagaagtgttgatggtttgatgtctcaaaaagtaaaagaattcttgaaaggtacaatatgttcttttgtagaatcaacgtaattgaaatgataatttctttaacgttctcttgtttttgctatgtttattgtgctataggcacttatggattttaagcactggcatattttatagtgtatgttaaaaaacaaatcaagcacactcatgaatatatatggttactttgtagaagaataatgccaatttctctgtattgtaaactagctccattgctagatatggggtgaattggtactgccactagcaagtgcattttatccacctttttccagagtttggtttggttcattgatattgaataatctagtggcatgtttgttggc

SEQ ID NO: 22388 - DNA, 488 bp, Zea Mays
ctgtgccgttgactttacaaatcacgaccctgccctcgtcttcaacctcccgacacggcgggagatggcgctgcgctcctctaggtgatgcggctccaataacgcccacaccagtgcacgacgccagcactatccgagccctagggtcctagccgaagggatactacaagtatgggccatacttgtatgggtgaaatacgcagtagcggctgggaacaaggactcacccgaggggacgaagacgcggccgatcgacgatgcagtgccgcccgccccgttgcgcgcaccctggcgacgaattcggtccatgaactgccgcccacgaaccaatagtgcattcgatagtgggcaaagctccctcgtggttcacctcaggcgctctctggttgcttatcggtggcgcgaggtcggatcaatggtggccgcaacactccatctctcagctctcccatgtggcgatactgttctcgatgtttgcaacgcggaag

SEQ ID NO: 22389 - DNA, 500 bp, Zea Mays
cgaacatgggccacatcctgtaccctttgaggatctgaacaatgatgtgacacatgggcttcttctatacatggtttgcagttcagcatggtttgatcaaacgtcttatgtgtagtaccatgtattttataaatgcagtgttccacgtgttaaactttcgagatgcttacctgcaggtggttgaggaattcgggtcgttcagcaactgagggcttcaactacgtgcaagttttcgagatgtttgactctagctagcacctagcacgccaactcatctaagaaacttctttgcaccttgccgatggagggagaatcgtcctcaaaaaccacccggttacgttgcagccataaataccaagcactattaaagcctttcttcttgtctttatgcactcggttgcaaactcttctccaccagtcagcaaaagcgatatcctctacaccagaggagaggtgaccaagaacgaaaggagataggaggttgtaacaaaataccgagc

SEQ ID NO: 22390 - DNA, 540 bp, Zea Mays
gtgctttcgaactcaggcaacctcatcctacggtcaccgactggcatcatggtgtggcagagctttgaccacccgactgacacgctcctacctaccatgaagatatggaggagctacaagacgcatgaagccaacaaccttgtttcttggaaggacgccgacgatccctcgttgggtaccttctctttagccggggagacagacccattcatacagtggttcatccggaacggttcggttccagaatggcgcagtaatgtgtggacagggttcacggtgtccagccagttctttcaggcaaataccagcgttggggtatacctgacattcacatatgttcgcactgccgatgagatatacatggtcttcactacctccgatggcgcaccacccattcggacagtaatgagctactccggcaagctagaaacaagtgtctggaacagaaattcatcggagtggacaacgcttgtagtctcgccggactacgagtgtagcaggtacagctactgtgggccttctggctactgtgaccactct

SEQ ID NO: 22391 - DNA, 301 bp, Zea Mays
ccaaagtacatacaaatgcccacccgacccagccaaaagactcggccagcactcaagccatgatcctaaactcacgccatgatcctaaactgacgccaccactaatgaccatgcacactaatcaggaaactaactgctgcacatgctaacagacgagtctcacgccacttcacactacatgtacgcatgtaggcttcgtgcttcagcacgcacgtcgtatcacacggcatgctggcctctctccttgcgtacgaatacgccggctcaagtgaacagcaactcacacgtctcacataatttt

SEQ ID NO: 22392 - DNA, 932 bp, Zea Mays
gttagagctacatcaaccttgaacaccagcagatcggtggggcagagaacaccaaccaatcgacgcttcaccattgagtggatgtggcaaaggtcatggtggagggcgatcagatggttcactggcgactcatcccgacaacaggctgaggcatgggctggcatagcggaaggggccaggggatcggtctgtccacgtcgctagtagacgcaggtggggtcagcaaagtgttccacatggggcgcaggcgacggggctgcatgtggcacatgcggacttgatggggagagcttgtgagtagcagtggcagaggtgctgggatagcaagcacaaccaaatatctgaaggtgtgcataggagggggttgtgccaaagagagtgaagtggggagtagggtgattgaccaccttgaaggggagttggttgaggatatgtgtagcagtgttcaaggcttccactcaatagctagcagggagagatgcctaaaagagaagacatcagatcatgttattggtggtgcgaatgaggcgttccagtccggtcattctgagaagtgtaaggacacaatagtcacaactaaacaccatgggagagaaagaaagaacagaaggtggagttgtcgaacttgaggctgttgtcgcgctggagagcatgaatcaggcgatggaactaggtggagacccaagtgaagaagtgtgagagggtgtgaaatgtgtcagacttcaatcatagtggaaaagtctaaagaaaatgagagaaatcatctaaaatcatcatgtagtatttataaccagagaggctgaatacaggagatgtctagggatcacaataaacaagatcaaaagcctgatcagccatagaagtagaagtagaaaaaggaagacaagcatggtggcctagctgtcatgcatgacaaagactctcaaaatggc

SEQ ID NO: 22393 - DNA, 538 bp, Zea Mays
ctgcagggatcacaaacgtgcgaatctcgccaagggtcttgtgcaaatctcttccttccacctagggctagctattttgtgtaaattccaatgggagatatgccctagcttgtgagatatgcgagcgtcaagtgaaatttgttggcactgttcaccagtgacaaaaccgatgtcaaaccatgtcaaacgacctcggtttgaattcaaaattttcagagaggtgccttggatgatttgggtactttttgctatttggtacaagtggttttggcgccagcacaaaggtgaacacctttgatctttggtctagggtggtttttggtacttagagaaattttgatggctctagtatgcttcccacttgatgtactaatttgaggttgttgttgtgcctttttgcaatatttttcttactagattttgtagctttactaatacacttcatctttagtcaaggttcctttttatgttttgatcatttgcccacatttttttccttgtaatcccatggttaaggtttaagggcttaaaaggattt

SEQ ID NO: 22394 - DNA, 417 bp, Zea Mays
ctgcaactctcccccagctgggaaggacccttcaaggtaacgggaatacgctgacccgagggtgactatctagctatgactgaaggagtgcctccccctagtgctggagcatctcgtaagttctatccataggagcaagtctgaggggtcaaatttgtttcccttttgtaactaggtaacgcatacgtgtacgccaacccggtgaggtccgtccccataaacccggcctgttggtctgcacacatgcatgataagttataaagaaaagaattaccccctcagatgtgcccctatgatagtttcatcttactgctccatggtcttaccttgcagttttttagatattattttatctaacccacccgaacagttccctttccatcagacataatgacttctgaattgaacagccaggat

SEQ ID NO: 22395 - DNA, 1115 bp, Zea Mays
caacaactttgtcacaggaggataaacaagttatcacataaaaatttgagatctaggccctgaaaacttgctctgtcagacgctctgatggtgatcaccatggtataatgactgaataagatcacaggttcagcccccctcaccgccggtgacctcgcgaccagattcgcgtcggcgtcacgatttacgcccggtcgaacgcggataacgatcctcggtgaaaaatcgggtgctggggatgagcttgggacactgttctgccctggccgccgtacccacttgtctcacggcgatccagataacctcgccggaattggccgcgtgccgctcgggtgccacgtgcctaaacactgtgcttcatcgtagtgactcgccttagcttgtccggtcatcgctggtggtcttgccacggtaaccctgtaccagtaactctccccctctccggccgccagcacgccaccacaaaaatggacgccaccgcccttggaacctataaaacttagtaatcacacacccaacgcaccagcctgtgcctcagattgtccaccagagcgctccaatttttaagtccccccaaatcagtcaaaactccgtcgtgagtgaggtcaccgtggctagctctttgcaggtccattcacaacctccttgctctcgtttcaatacccctgtgtgctgtagatactcatcggcccaaccaattgaactaaacctgggtagatcaccaggaacactctgaattgtcctcggtttgcgccgtcaccgtggacagagtgattgtgagccagaaccttgcaattgagtgaggaattagtgtcgccaagggtagaattaggtattgagcaatggagaagcatagtcgttgcgttttctggccggtcttggctcgccagagccattgctccgccaccgtggtcagggatctcaagttgcgaagaaacagaaaagggagggaccttgatgcaaatgtcagtgacatagcggaatagtgcgtaggactccttattagttatttaagagactagggtcctctgtgcaaagccaacctcgtgggtgcgttttgcctgtcgtgggccggctcgggcttagattaagcccgtcactgtttatgattttcc

SEQ ID NO: 22396 - DNA, 324 bp, Zea Mays
tgaagattcaataaacaagctcattgtagatatattcccatcacttgaggaaaatgcaagatcaatagcttatatgagcacgtgtgccatcctttcaaccaaaaatcagcatgtggaccaactcaatgcaaagatgattgataaatttccgggcaatggaaaagtttatcatagctttgacaatgtcgatgatgattctagaaataactatcctattgagtttttgaactccatgactccaaatggtttgcccccacatgtgctcaaagtaaaaatcaatagtccagtgattcttctccgcaatcttgatcctaataatggctt

SEQ ID NO: 22397 - DNA, 555 bp, Zea Mays
gtatgcttttgtaaacttcatcaaagttgcctttactttgcatcacaacagattttgcagcctaataaaattatgtgcagtcgtcctttgaccatcacaattttggaaaacatacgctcctggtgggtctaggaactctacgattctaggggattgaacttagaaacggtaggaaagggaacaaaccatgctcctggtgtcgtccgtcttgcttggcggtccgtacgtgttgtcgcagatcgatcgatcccctgttggtgcttgcgcgtgaaggtaggggcgacgttgggaggggcaggtgcggcctaccacggcaaggtgtgccagcatcacaaagaggtgatggtgctgcgatgcttatgttagggttggggagctcagtttggcataacgggaaggggaagatgagccaccgttcgcagccgcagcccttgcgcggactcctctgtggcgtccttctcccagcgcaggggtcaactccagctccaccctatagatcagctcgtccttctccaccccatacccgccatctaaagagcagacactttggcctca

SEQ ID NO: 22398 - DNA, 726 bp, Zea Mays
ccgtgatctcctgaagccagcgcaaggatcgcccgggattgtcttcgcctctagagcgttgaatcgctcgtcgacgtcgaacaaggccgaggaaccacgccttcacgtcgtcgggatcaccctcacgataaaagactggtgtggccgccctggtgatttcgcctccctctcctctttcctttggtgtagtttcgctcggattaggtcggtgggtcgccaaatcgccgcgtccggccatggagccaccatagggagaagcgtctggccgccggtgttaggagagactcagagcgcgatgtcgaacgtgggccatcggatgaggcacggacggtcccgattagtagccggaagtaccccttcgcgatagtcgatctgcgacgtccgtttctgatcgggcgagcgcgattcgatctggttactttaaatccaatgcattcgctgataatcggacggcggagttcggataccggttcgagtaaacaaaggtctaatctgggcgctcggagtgtaatcggaggctcgggattgtccataccctttcgctgcgcgctctttccaaaagagaccctagtattttccgtaatcaacccgcagtctacttcaatagttctctgtgtcttggtacaacttgcgctgagacccctacacttcacagtaattgacgcccagtccagaacagtataaaaccagaaaacttaaactataaatggatttttaatatataaa

SEQ ID NO: 22399 - DNA, 460 bp, Zea Mays
cgcaaaagggagcaagcaccggtgccccgtgttttgtgcagttcgatacagatgttaacactagatggtaacgatggaagaacaacatagaattggtagagaacagcatagggaaaaataggttagagcttggagaagttgagtttgtgtttttcttcttgtatgccccgcaccaggcgaccactcagcctataaaaaccctcacactcgttcgccagaatccagcccattaacccacgacggcccaaagttccttttgttgtgcttcttcacttgatttgaagtcctcgttggccctgtagccacaccgtcaacatgttcactgctgacatttctccttgctggaaacgctgattgcccccaaacagtggcatgtggaaactgattctgcaactccagcacatcctcccatgtagccaattcaaccggcatgtaagcccactgtaccagtacctgagaa

SEQ ID NO: 22400 - DNA, 336 bp, Zea Mays
tgacatttggcgtgccaggtagagggtcagggtcccaagcctaaccccttgagtgatatgacatcactctcgcttgccgacgagccgcgtcgagagaggccactgacttctgcagaagatggagaagcagtgcctcaagaggctctccatcgacctcaggcagtgtcttaacaggcgtgcaattgccatcaaacgaagagcgacagaggccctaaccacgttgattgaagttgccttcctcagcaccccgctagtctccactgcactcgaggtcgccaccatcgacccctagccgcacacagtggcattcaaggtttccactgtcgaccagcgacc

SEQ ID NO: 22401 - DNA, 502 bp, Zea Mays
catgagacacaacgcgaggggatcgatcccttatagaatcggcatgataccaaaaagggaaggggttacacaccagggaaaaactcaccaaggtgctcatgacatcttgataaaggggagtgggtgaatcctcatctataaaggacaccgacgatagcatcgtaacaaccctgatcctggcttcaatctcggttagcacaagcggcgcggaagaatggcggttaggatcattgattctagagtataggtacatcggtttctggcgggccatcagaggttcgatccagctatgcatgaaggttcgcaccagccgtgcgctagagagaccatgttgcttcgatgtcttaactaccgtcaatagattctccacttcgattttgaggctcgcctctccaccatgttgccactcatccgtagacaccagatcccgatcggtgaatggttgggcactcgaggccacactcctcacataaaaccactcacctttgtgtcggacgaaggg

SEQ ID NO: 22402 - DNA, 659 bp, Zea Mays
agagatcgccctaagatgagtgatcgtaagcatgtttatactaggtcgagtaggcatgagcatgttgcaccgccttaagtcattgccgacttaagtcgattgctccgttggcagggtatagtggtcaccctaagttaagtaagcgtgagcatgttgcaccgccttaagtcactactgacttaagctgattgctccgttggtagggtatagtggtcacgctaagttaagtaagcgtgagcatgttgcgtcgtcttaagtcactgccgacttaagacgattgctccattagtagggtatagtggtcaccctaagttaagtgagcgtgagcatgttgcaccgtcttaagtcactgccgacttaagctgatcgctccgttagtagggtatagtggtcaccctaagttaagtgagcgtgagcatgttgcaccatcttaagtcactgccgacttaagccgattgctctgttagtagggtatagtggtcaccctaagttaagtgagcgtgagcatgttgcaccgtcttaagtcactgctgacttaagccgattgctccgttggtagggtatagtggtcaccctaagtcgagtaagcatgcagattgataataaatagttcgagtgcccttgagaatgaagtctttttattgatgatgtgttttctg

SEQ ID NO: 22403 - DNA, 299 bp, Zea Mays
gttgggttctgcgttcgtctagcgtgttggattctgggagtatcagggaggaccgtcgtggccacaatgttctagcttgccaggggaagcactgtggtcaactatcatcctccataatacgtcgtctagcgtctcgtgccatggctcgcgcacgcatgccacttcgtcgtggctgcactgatcgttgctgtgcatatcccatctgtcccttggcaagcgctggtttcctcgagcgtggcttcgatgttggcagcattttatgtgtctgggcaagatgcggtggggcagatgctgccgtg

SEQ ID NO: 22404 - DNA, 371 bp, Zea Mays
cgaccactccagtgaaccccctctacgtgccctggctgggagtctccctgacccccaggttggccgtccgaagtcccagcggtggagtgacgctagcccggattcttctggagattcttgcctggcgccccattcctataaagaagccctgctagccacccccacgtttccagtggctgcaaccccggggacgacagagatacttgctggtgaggggaagacggtggctggctcacgacctgaggtgcagagtcggctggtgccccagcgactggacgaggacggctggcaggtggtgcagcgcagaagtaagtttcgcggtgatcatcttccccgtcgctggtcccaggtggaccttcggggaaaatgct

SEQ ID NO: 22405 - DNA, 472 bp, Zea Mays
caccaagcttgccttcgcctcagtctatcacccgcagtccaacagagttgtggaacgcgccaacggaaaaatcttcacagctgtcaaaaagatgctcctcgacgaaaaaaagggcaagtgggccgatttgttacccgaggcggtctgggcactaaacacgactgagtgcagggcgaccgggttcactcctttctgccttctatacggatcggaggcaatgagcccacaagaaataaaacacgggtccccgcgaacagttccttcagccgtccccgacgtggacgagcccacgtcaaaggatctcatcaatggagaccgagtcttcgccctacaagctctaaacaaataccaagccgacacaacagcagcaatattccgcccataaggaaacactttccatgcacgaaccatacgagatgtaaaagagtcttcgccggccgcgcgggggataggaacattcctaggccaccaa

SEQ ID NO: 22406 - DNA, 501 bp, Zea Mays
gggtggtagtggatctcaaggtcataatctttgatcaattccagccatcttcgctgatggaggttgaggtctggctgagtgaagatatactttagactcttgtgatcggtgaagatgtgacatttgttcccaattaggtagtgcctccatatttttagggcatgcactatggctgctaactccaaatcgtgtgtgggataattctgctcgtgcggcttcagtaagcgcgatgcatatgcaatgactttctcattttgcataattacaaaccctaagccttgccttgaagcatcacagaagacgacaaaatcctgatggatgtctagcaacgtcaaaacggatgcggttgtgagcttcttctttatgatttggaagctttcttcacacttcggggtccatacaaacttattgtctttcttggggagctcggtcattggtcttgctatgctggagaatcctttgataaaacgtcggtaataccctgccattcccagaaagctt

SEQ ID NO: 22407 - DNA, 463 bp, Zea Mays
caggtggtatcagagccataggactggccgtagatcgcagccccaaccttaaaagtttgccttaaaaagaaaagacctcttacctctaagaagaatcctctctcctttccccgatattaacagacccttcttttcttctaccagatggaaggctcttttgtcattagaacatcctactgctcagaggtggaaggattccctcaccttctgcagagttgcgcgcttcgcatggggattcgcaagaagctggagtacatctggaaagaataccacgagaatggaacagagaaatgctctatggcagtctacctgggagaaagccgaaactacccaaatcaccctcctttccaggtcaccttcaccggacaccgcttcccagacacttgccaaaatgttgcccgaaaagccctccgccagctatgccaaaactacaatagggaagtctttgagaccccccttcgtt

SEQ ID NO: 22408 - DNA, 356 bp, Zea Mays
gttctatgtgaaaaacaacttggttgcaagggaagatattaaggggattatccagcaccatatctggtctcgctttggcattaggaggccatccactgcccttggaaacgacatacaagcatgtcaggctgcctttaatacaatatgcacttacataggcaccaaggacttagtccaggaacatattgcttatagagtgtggccgctcacaagtggatgggagatgccgaaggaagctgctgctgggtcgtaggtggtttgatctatctgaagtacatattcaagtacaggagccaattcgatgagccgaatgatgactggctggatgccatcgaagcaaccagtgatgaattgat

SEQ ID NO: 22409 - DNA, 306 bp, Zea Mays
atattcgccaaatttcacgcccatccgatattccaggctttaatttcacccaattccccgttttgagcgatcgtttccgagccgagtgcccaaatctcattttcttcgcctaaattcaaaccaagcacacacttcactcatattcacccatataaacctattcgtgaagtatcggctcaattccatgtcatttcgtgcctcaattcgaattccaaacctcctatggcactttttatcgttcaaacgccgttttcacgtcgtttgacctctcgatcgtctcatctcttgttttctgtgccatatttc

SEQ ID NO: 22410 - DNA, 599 bp, Zea Mays
agcaattgcgaagttctagctcaaaaactctctgtccacggcgatggcgcacaccgaggacaatctgaggtgttcccggtgatccaacacgggctagttcaattggctaggccaataagcatctatagcacacaagggtgctgaaacaagagcgaggagggcatgaatggacctgcagagagctagccacggcgcggcgttcacggtggcacggtaacccgatttgggggaagagagaaattgggaggctatggtggctaatcggaggcaagggcgggtcctctggcttcgtgacgaccttgagagctagcggcaccatcaatttatagtgcccaaggtcgatggctccaaattttgaaggagaaggctggtgaccggagagagaggtgagtcactggcggctcagtcgtggcgcctgccggtgcaacggttctaaaatggcaagcctaggcgtgccacggttactactacacggtaaagagctatggcttggcataattgaggtcgctggagtaccacggcgacaccggcggtccggccacatcgcacggctacaggcgcagttgataagcttcaccccgcgaccaaatccactcccc

SEQ ID NO: 22411 - DNA, 417 bp, Zea Mays
ctttccggtagtgacatatgcatgtctatctaaatgtgactactaatgcgttgctatctttaacgcaacctaagttctaaacctatcaactaacctagcaagctagactaggaaagatgagcacagaagcaataaaaacaaagtaaatgcataaacataaatgagttatggagtgcaaactcccatgttgactttttagtgaggttttgagaagctttgcttttcatattaaacccatcgcaaggcaagctctcaattgagtaaactccacagattgccgacgagacttccccactcacaatggaactctgtgtggccttctcctgaaccgctaccaccattttcactatcgagatttaggccaaaacactaagggccttgtgtccccgcatacaacatggttaggacctctaggat

SEQ ID NO: 22412 - DNA, 477 bp, Zea Mays
ggatacatgatcttcgggaaggatgttgtcttttagatggtcctaaatcttagagatccatgcatcgagaccctcctaagcaactggatgtggtgctaaaaggtcgccgggaacctagtagcgcacacgatcctttgtaggttccacagatggaacaccattaggaccactagcttcgaggtgctagtttcaccctcttcaccagttcggcgggctatgcggatggtctcaacagccgtcttttgaagatgtcctcaggcacagatgcccaagttgatgccctcgcagggaattcatctgtcgccgagttaccgcgaggaacatgttgcagttcaaaggcgtcgaagtccttctctagctccctcacatgaatgaggtatgctgtgagttggtggggtggataggacatgagccacccttgccaccctgctggcgtgggcgcttgccacgcgggttctggctcctagtcgtagtcgc

SEQ ID NO: 22413 - DNA, 783 bp, Zea Mays
ccgccgtacttccccctgctttgcggcttgagcagataagctcgccggtgaaccgccgtcgcacggccttgcgccgcatgtccaagcctcgccaccgcaccgccacgattcactttagctccctgttgatcaccggaatagctgccacgacgttgaacacttattcactgtgtcggtattcttccttatctccggccgcctgcgttgttcgaccaaattgcgcgccgccgtcgaagctccctataaattgaaggccgggactgctgcgctaggtcattgcgaagccatagcacccgctcccacccttaatcattaacccgagtccgtgaatttcccttttcccccaaactggtctccgccacagcgaagatcaagctacccgcgaccagtgcgatttaggtcagtccatgtcttctgcttcaccgtttaagtactctcatgtgtctacgatgcttgccgacccacgcaattgagctaggcaccctctggtcgccgggaacacgattgtctagccgcaacgctcacggtcaccgtggccagagccaaccaagcacccatttgcgaaattaggttaggggattggatcggggagggtccaattcggtgttagccgctcggagaccccagtcgttgccccatttggccggtccaggagctcactggagctcggtcgcgctcgacgtcgtcgaggacctgagtctgtaaaggaatagaacctcgaggacttttctgcaacctgtcagcgacttaggaaaacagtaacaaagcccacttcaagttatc

SEQ ID NO: 22414 - DNA, 387 bp, Zea Mays
cgtccctcccccgttagaattcggcggaggacgagatctcctactgagaaggatcgctgccgcacgaccttgtcgtgatagcgccttagagtctgctggtatcgtgctgattggattactgcattcagccgttcttcttcgagtacatcgatgtcctccagcctggtggcttcgacttctgctatgctttcgaagatcaaccttggcgctccgaacttgaggtcggctggtaatactgcctctgacccatagaccatgaagaaaggagtctttccatgcagagctcggctaggctgggttcttaggctccagacgacatagggcaattcccttatccattttcctgcgaacttttcattcttatcgaagacctttttcctgagtgcc

SEQ ID NO: 22415 - DNA, 1184 bp, Zea Mays
tacacggttattggaacgttttctagaccaccatgcatttccgaaacaaaatccataatgcaatattgcggaatcctgctttcctgcatcacactaaggaactccatataatcacaatcatgagttttgttgcattgcaattgccctttttctgtatctttctttaagaattcataattatgctcaaagttaaccagatcaatccgtacagaaataacattctctttagcatcatcataaattttttaagtttcatcccagccttgcactgtgtttgtttcgaacatgtattactcatccttggatttccaactcccctttcagcattctttccttccattgaacaattcaaccatttataattcttccgctccctatatttcttcaacggaaatccaacctcatatgcatatcgactataaaaattatacgcctcgtccacattacaaaatgtcataccaaatttaggtatcaatcttatatcaatattgtctggttgtgcacagaaatttaacatttatgaatcaatgacgcccaaacttactgtggtgctgctacagcactacaaaagtatgtacgtaaatgatattatgatcttatcggaacttacatggctttgcagaatgtgagatgtgtcctgatcatgcgccccaatatgtctcatggggatgcgttgatctgctcctaccatctctgccaatcttgtgttgtcatcaatatttccaggtgccctcaacgccgccggtggagtaacagctacactgtctgcgtctacggttacaacattaggtacaactacgatgtccatgccagtaaacatacttggttgatctatgtcctctgtatgtcctcccgtcgccattaaccaccgccaagagctcaagaatatggtccttttgctatcgtataggaaaggctactaaaaagttacgccacagtctcaaaagaatatttccttccttattttaatgctcctcaaaccgtaacgttgagaataaagcggtaactatcccacatttatcacaattttacagcactactttcctaatctcaaaccaacccatatctacgcacacactggtcacgtatatacaatagcataaatggtctgacatctcgatattacatggtttatgatgttacgtttcatgttcttatgtagtcgtaaacattgaacaaacttg

SEQ ID NO: 22416 - DNA, 594 bp, Zea Mays
ccagaagccattatttgtggctcagcagttaagaggccctgcaagcacctggtggggaaattatgtggccattcagcctgccgaacatcaagtcacctaggacgaatttaaattggcatttcgggagcactacattctagaaggagtgctccatatgaagcaagaagaattcatgaaactcaaacaaggtggagatactgttatgtagtatctcaacaagttcaataatttgtcccagtacgcaattgaccaggtcaatactgacctgaaaaagaggatttgttttatgagaggcctcaatgatcggctacagcgaaagatggccacctgcctcgacctctcctacagcagggctgtcagcacagtgctggcagttgaagcaaagaacataggcctagggaagtcaaagggctttggaggtgataggtccaatcaggggcctgaaaagcgacaaaggttggtgatccgacctttcaatcaaaactgttcttcacctcatccaccctcctaccccttcaaacagcctgtattcatccgccctgccactgcccccacttcaacaacttagccgagtgcccctggtgctcgtttccc

SEQ ID NO: 22417 - DNA, 544 bp, Zea Mays
ttactccacaaaacgagagccttccagacgaagtgtccgcccctccatgtcggcgccgtaggaggggttcaatcgccaacatccagatgcggcggaggagactcgccggcacgctcccactcgccctcccgtggcttcgccccctgatcggcctgtacctccacccagtattgcgtcgtcttcgtgggggatgaggcggcgctggtcggcgacaacgacggcgactacagtcctcgctccatagcctccctctctgcaccgcgtcaccgcttctcacatgtaaccaatctcattcatcacgcttagtcagatcagttgattttccttcgttagggttattctgttgctttcttcttcgtgcgcacatccgttgttgtcttcttcgtgcccctcccccaccctaacatgagtatggtatggatgacccagttcttctttaaccacactgttattgtcttcttggtgacgacaacattcatgcccgttcccatccttgcttgcggagatgcaacagttccactggcacattacttactgctattac

SEQ ID NO: 22418 - DNA, 307 bp, Zea Mays
ccagcatactatctaaagggaaccgaacccccgctttcataaaacttctatagacaattaccttgtcagctttgggcagatggacattactctcccctccagcccgcacaatagaaatgtgaggaaagtaccttaccctcatggcatcaatctgtccttgtttgattgttgacttttcgaagacaacatgacttggcctccaggactgatctttggcaccctcattttcacattccgcatcaaagtcttcaatgtcactggaacccttagatattgcagctaatgtctcatgtgcgatcttttctgc

SEQ ID NO: 22419 - DNA, 727 bp, Zea Mays
cagtggatgattattcacgtcaaatttccttgctgctttgccgttgtgacaatctttcgcagcgtcaacagaccaacctcttcaccgctggcttgggtgagccattgaggaccgatgtcgaactccaagggccaactaatttgcagtcagcaatcaaccttgctcgagcatatgagtgtcgcatggtgctggctgtaagcacacactccacggtgcgccctgcagcccgtggcgtgagtacgcctattaaatcagttgttggaaaccaacgccctcggttcaagcgtctttccagtgaagaattagcagcaaagcgggctagtggtgagtgctaccattgtactgaaaagtatactgccgatcacatatgtgcaaacaaaggggttttcttgctggaattaacagaagataatgagggtggtgaaacattggatgatgttggcatctctctccatgctctcaccggtattgatattggcactaccatgaaactttctgtttgtttgtatggccgtcagttagtggccctcgtggacactggttcgacacattccttcatcaatgattctgtggtcagccagctgcagcttcaagttgaacctcgtccaggtctgacggtgaaggtggccaacggagattgggtaactactgcgggtgtgtgcactcaactgcctctggttattggagaagctgatttctcgatatccttctataccctaccactgga

SEQ ID NO: 22420 - DNA, 334 bp, Zea Mays
acaaggtcccgggacaggggaaaccctggcatgagcaagggtccggtactgacacgtggccgggccttactctgcgcatgcgctccccgctcaggcggagacccgatgtggccacgtggctcgttgcccgtgacataagccagcgggcggagcctaacgtaaggcccctagactgcgtggactctgcatttattacggaaaggacgcgccgcctgtccacccagctgacaggtgatgtgccccctcagcatttattgcgtcctgtccactccgctggcaggcggcgccagggccaccctgcagacggctcacctgtccagtccattgtcgaaac

SEQ ID NO: 22421 - DNA, 585 bp, Zea Mays
cacgcacgcacgccgagaacccaggccacgtcacctgcccacgtgccccacctcccttttgagcatcgcccacacctgttctctctcccctacctcatttcgcacaagctcgccctctctcacgctctgccctcgctactcgcgctcgtcggagaaccgcgcccgtcgtaccagtcgttcagcccgccaaaagccgtgacaagccacctcaagctccgtcctaaggtgaggaacttgttcctatgcttggtttaccttatttacgcatggtcttagctaatttggcctcgttggagttcagccgcgctggttcgctgcgccctgcgcggtagctggcggatttagcctcgcatcgtgccctgcattggtcagtagtgctccccttccttcgccggagctagtccgagccgtagcacgccagattacctctccccacgacgaattttgctcgccagagtgacctttgctttgcctgatatttcccctccaccgtctacctgtctctgtcccgttctcatgacccagacctcgccatagtgcttgctgagtcctccccaacctctccggctacccagaccaccccta

SEQ ID NO: 22422 - DNA, 803 bp, Zea Mays
agctccagttttggcattgccagattttactcgacccttttccattgagactgatgcatcaagcacaggaatcgaggctcttctgcagcaggatggccatcccttggcctttgtgagtaaagctcttggacctgtaaatttgggactttccacctatgagaaggagtatctagccattttacttgttgttgatcaatggcgtacttacttgcaacattcaaaattcatcatctatacagatcaccgtagtctgtctcaccttactgagcaacgactccataccccgtggcagcacaaagtttttaccaaactgctcggcctccattatcgcattgtatacaagaaagggacagataacaccgctgctgatgccctgtcgtggcgaccacatcagatcgaggaatgttgtgccctttcagctgcttctccgctatggttacaggaagtgattgatggatacaaggcagacccacaagctctcaaactgctgacttcattggctgtgtctgaccaggtaccctacactctcaaagatggcatcatcaggtataatggacgcgtgtggttgggtcactcttctgagatacaatctagggtcattttagccctccacgctagtgctcttgggggacattccggatttccggtgacatatgctcggatcaaacaattgttctactagccacatatgaagcaacagatctgcgactttgtcgctgcctgtgtcgtttgtcaccaagcaaaaccggatcggtcacgctatccaggcctgttgcaaccactgccagtgcccagtcatgctt

SEQ ID NO: 22423 - DNA, 714 bp, Zea Mays
caacatcagggcaccatgatcctcgacactgtcgacgaccagattggcctctgacttatgtggttctttcgctttctccttccttgaacgtttgtagtcaaccgcccagtggccatagatgtcgcatttgcgacaccgaccttttctccgtggtgtcccctcggaggtcagtttgactgaacccgaggtcccaccttctgatcgtggttgcgccttgtgcttgggagcagtggcaccggagccaccacctccctccttgtagttggagtggaagcgatgcttgtttttctcgaaccactcctcggcgagaagaagacaccccatcttgtcagctaagaagattgttgagtgatctactagatgtaaatgtgaagaagttcagtttactgattgataacagatcagctcaagaactctccaaaaatcttgtttatcatgaaagaagcaaacacattgatacccgatataattacatccgagagtgcgtcagcaatgggatggtagatgtggctcatgtgagttctaatggtcagttagccgacgctctgacaaagccacttggccagatgaaattctcagaactcaggaggcaactgggtgtcgtcaagatagaaggttgacaagattaagggggtgaatgttgcatttagccattctgtaatcatgtcaatatgttatcagtgcatttagctgcattagctcgggtagttaaat

SEQ ID NO: 22424 - DNA, 313 bp, Zea Mays
tacactaagaaaataataaggagtcggaatggatattggataagaaagagcgtgagatatttagaagaggagaggcagtggagataagtgaggaaatttccctttttaattactatgtaatcgtctacatgaatcctatttttaacacaataataaacattccaagtttcagctaactgaataaatgttcagtgcacaacatgactaacagctctacttggaacgaagctttctgccaattcttagtgataacaagctgaccttacttaacaaaatttgttcagaaaagatagctctataaacttgttgtagc

SEQ ID NO: 22425 - DNA, 406 bp, Zea Mays
gcaaaacttggaaacagtacatctagacaaatcatcatataggtagcctacatgaagagcaaccaccaccatctaactagcatcgaaagctagcaacacccaaatgtcagcttgggacaatagatcgcaacaggaaatagggtgtcatctgaagcaagcgacaataccttgtagtactcctcacaacctcgcaggtcgggttctcagtagcgaagggcaacgctgcttgaagtggccctgattgaagtggcagtacggccctgcttgaagtggcggcgctgcgtgcgacactgcttccgcccgcaccgagccggatgagggagaacaagctgggaatcaggtgatacctcgccggacgaggaggatgtgtcgccgctcgtcggctacagctgcagccaccgcctgc

SEQ ID NO: 22426 - DNA, 582 bp, Zea Mays
aggtcgccagtgacggcgaacatggggaacgtcctggcggcctggatgaaggaggcataggtgtagaagcccttggcggggcaggcgtcgttgtccttgtgcaggaatagggagccatacagctgctcgctgacgagggccgccacagggacaacaggggcaggggcaggcctcctccactgctcagggccaccgtacctcgcctctgctacgtggatgacaaggaaagtgaccacagaagcagtagtccacaaggcgcaagaatacgccattgtgtctgacgaccagctttgtgtgtactttcattgttccgcctcacctccgcttagatcttggctagcttcttaggcttctcttcctcctagccgtaaaagagagggactgagggaagagatcttggctagcttcttatgcttctcttccgcttagatccttcctgctcgtcttcgttgtgggctactcgctcggcctcctgtcgtcgtccacccgaccgtcaccgcttagatcttggctagcttcttatgctattttatattgtgcactagtactctagtagcgcaacttactatggtattacattgc

SEQ ID NO: 22427 - DNA, 410 bp, Zea Mays
agcgcgtgggttagccctgaccgttggattcgtagtgaacggttgagattagatcccgcgtacccttccaccacgtttcaatctggtttgtcgatctggatcggacggacagagatagatctagaataataaaaccctcactgtttgattcggatccaacggacgcgattccgtaccggttcgcaggaataacgatttaatctgggcgctcggtgtctaatccagcggctcagaatcacccataccccttcggcctggacattttacttaagagccctcgagaaaaatacgaatcaacccgccatccatgcctggggttttctgagtcttcagaatgttgcaccgtagcccctgcactttccataatttgaggcctagtccagacagtgggaaaacttataaaataaatt

SEQ ID NO: 22428 - DNA, 519 bp, Zea Mays
gctcgccgggccatcgctaaggaataatgtggaagggccagcgtcttgttctaggcatgacaaccgtcggagttgccttttcttcttcttctccttgacaggtgcagctgggtggttcactcagcgtgaacgcttccggcaggtaccttcgggtttctggatttcctcatcttcgccaaactcttgcactgtcgcaattgccattggctcagtgcgggtagagttagatggttccccggccagcaggctaagtatggcatccatttcagcatcatcggtactggatggcatctcaaaatgagttagtttcttagcctcgggaagattccgaaggggagcaatcaaggcctcaatgtcctctgggggcgcactctatgacccgagctaccatcttgagcaggaggattggagacaaagttagagaaaggactatgcagaggtaggttccatgcagagtaagctaagggagcaccaacattcgagaccctacccctcagtatcatatccagtcggcttaac

SEQ ID NO: 22429 - DNA, 1287 bp, Zea Mays
ctcacgcgctctatctcaatgggcactccacgcctgccgacgccctgcacgccgcgctctcccttcctgatcactccacaccggctggcatccttcacgccggatcgtcagcgatccattggagcgaggagccatggagacatggaaaaggtgatttttttttagtcttcgtcttcaactaatcaactgttttttttagttttgactttcttctcagtgacaattcgtacaatttaatccattgcagactcaggggccagagactcaggacggcgacttgcaagtgccgctccttgatgataagaactgcgccggcagcaaggcgccattggtagttcttggtaagaagtgcttcatgttctgatttgttttcttttcggagaataagttatgtacaaacatactgccttcatccattaatatttggtgctggttagttcaaaatttggctaagcaatgccaaatattaatgaatggaagattttttatagcaaaaaaaaaaaacaagatccagattctaaatgtatgcttccctttctctaaataactgtcgttctcgtttcctgaaaagatatacaaattcagcaaaaaccaaatataagaactgtgaaacattatatggtatggttgatcctgcagtcctgtactaaccgctggagtgtggtgtggtgccgctgctgcattcagggttcgagtgcttggagagcacagctttcaatggcatctcgacgaacctggtgatgtacctggagaccgtcctccacggcagcaacgtggccagcgcctccaacgtcacgctgtggttcggcaccagctacctgacaccagtcttcggcgccatcatcgccgacgccttctggggcaactacaacaccatcctcgtctccctcgccatctaccttcttgtatgcacgcacaccctccctgccttttctttttcttctcctagccgttgcatccggcgctcgctgattctgtctgcgtgcgtgcgccactgcaggggatgattctggtgaccttatcggcgttcctgccgacggacacggtgctcggcggctcctcggtgttcggcgcgcacacggtagcgttcgtggggctttacctcgtcgcgatcgggagcggcggggtgcggtcatcgctgctgacgttcggcgcggagcagttcgatgacgacaatgcggcggatcgcgagaacaagctgtccttcttcagctggttttacctatgcgtcgactttggcccgatcgtctccggcctgttcatcgtgtggatccaggagaacatcag

SEQ ID NO: 22430 - DNA, 765 bp, Zea Mays
gtgtattgtagtggtggtggcgtaagatatttgattgaggtgtgcgggtatatgccgtaatatggttatactcgcgacgaagaaagatgcatgtattgtgtaacccaacgtttaggttgctgtcgtataatcatgcgaaggatgctcatgatggtcgtgtgattgaggaggtttgtagtggcaagcgagaagtaagttgagtttttcaaacggttagtggatagtatctatcggtgttgtcatgatttttgttgtatggtaatgtgatgcttcactttatccatcattacattccatgcccagtggataaataaatgtcttgttgattggttaaaggttttatatgagcgttatcgcagcccaataattattggaggcgagtagtgttcataagtcgatctttgttaaaattgaagaacaatccgataagatatgcacataagtgctttaggtccttcagtagcaaatgtagtcttatagagttttatgccatgtgttaatgcctctatgttagaccccctaaaatgtgatattttaggtgacttgtgtgttaactaatttaagttgagcaatggttaaaaaacgctgattaatctgctccaacccatgtttttgagttgcgatgtcaaaaatagtttgctaagttttatactgtgttggccaactcctgttaagtaagagttagttgcgttaagtgattgttacatatatgttgtctcggattgcgataataataggcaagccgacgtgtaggatgtatagcag

SEQ ID NO: 22431 - DNA, 376 bp, Zea Mays
tgttttttatacccttcagtaatcaaaagcaagtgaccaacattggtgcccacctccggtgaactcacaatgaccacaacaaagctacatcatgctgccaaagaaattgacaacaacaatcgtcccactagtcctgagaggaggaagaggaggccgaagctttggagttattttcaacacacatccaagaaagttgtactgtgtgttttatggcgaaaacaaaggccatacaacaaaaacctaccagataacaatctagaagcagaaagaacttcctactgcagccgctcagccatctcagccgaatgaagtattcagtacatcttcgtactactcaccttacatcccgcaatgtgtccaaccccaggaccccaag

SEQ ID NO: 22432 - DNA, 555 bp, Zea Mays
gcgttgtattatttgatcgttttttattttttaagagtgtgctgaatcggtgaggagtgagggagattttaagtcttttaggctaacaattttggtcttcttttgcgagcagctggagttgttatatggtggtgtgtgtgaccttggtcctaccctcgaaagagccgaaaaccggattttgttccattatctaaaaaaataatgacagagagatgataggtaacacgaggagccggagaggctcccgagctaacgacactttggaacctagccccattcacgtctagaggatccaaaccactatggttaaagctctcaccgcataatcagaacatcctacatgtagctgggcccagcgagcgcgacagatggtagaccgctagttagattagaggcacaaaagatagtgggagccgactcctagaacaatccctgttcaaaccagcgcaaggcatcagacaagtcaccggaacatccgactcgtgtgcagggcctaaccatgcatatgttaaacaggtccttaacggataaggactaaccatgatagatcatatc

SEQ ID NO: 22433 - DNA, 531 bp, Zea Mays
cattatcagacgaaggccagagaagatgggcttcatgagaattttggctgttacaacttcgcttaccgcaaggatatgaaggccccggtgctaagctaccgcaccaagtggccaactggctggaaaagtgagtggttctatgttaaagttgatgagaagaaaagggagaagctgaagacgttagtactgagcccgctgagtttgagccaagggttgactaggcccttgtgtcgtatgtcgtcggggtcaccatgccaacaggctgtggcagaatttagagttgtgactgaatagatcggcactagagatctggtgcaagaatacttagcctatagggtattcccgacgttgagtgaatggaatatgccgaagctgaaaggagaaaagaaaaagaatgaacttgttcgattgccctatcacttcaagttcaagaaacaattcaaagagccttgccaagaatggctagaaatgattgaggctatatgcaatgagattttgggcaactatactaaaaaagaagatcaactgatg

SEQ ID NO: 22434 - DNA, 644 bp, Zea Mays
ccgagtttcgtgtgtttctgacatcgcgttctccaccgtggtccccatcctcccctccgctctgcagtagccatcacaaccaccctccgcgatggccacggagcaacttgccagtcatcctcggtggccgcgtccgtgagaagcctgctgcttcctcgagctatttacacttgtgcccctctcattcctcattcacttgcctgcaatctctctgctagggtttcgcttgctcggttccctatccgcactgtcgccgtcggtcatggtccgacacctatttacacttgtgcctctcttgttcctcattcaattgcctgcaatctctctgctagggttttgcctgctcggttccctatccgcactgccgccgtcgttcatggtccggcacacgctatggcggttggtcgcggtgcactgcctgggccacgtccctgtcggtgaggctagcgtgtttgtggtcgcggtgcactgctagagggaatatgggggtctaggaggtcgacgttgatggacggcggcacctgggtcttctcttgctccatcatggtcgcgatccatgggattgccccagtgagggtttcatgaaatcctctatgctactcgatctcctcatgatatagtaaacaacaacctctgctatttcc

SEQ ID NO: 22435 - DNA, 450 bp, Zea Mays
aaattaacagctctgtcatttcagttattgctagagagtgagaaaaccatgcaagcacctgcggttgaaaggatgagcagtgagatcactgttacaagagatcacgacgaagagcagcaggaggctctgcggcgtgcgatcatgctaggggttgctgatgtaaacatgccatcaacatatggtacgttcaacgaaaatcctacttctgaaccagccgaggcctccccattactatcagacagcggaaggcgcagggcagtatgggaggagtggatcgcaaggatcttcgagaaggatgaatcagggcaaatggttccacggagatgatcgtggcgacagctcaaggcatgcttgcttgatgggtcggtttcttgatgctgcttccactctgtttcgagcctattttgaaacttcggaacggtaatgtaagatgagtaggggttagggatt

SEQ ID NO: 22436 - DNA, 628 bp, Zea Mays
gtcgcgtggtctcgacttatcgcacggagtatctcaccggggcgctggatgtatggacatcggttttggaggccaggggcgaccggtgtcgcagggagtagatctcgccggacttggaccgctggacgtcgacgccgaggggcatggctgcacgcttgaaggtaagatgggaactgttggattcacataaattccctgtgcgtatagagtgcttaggatttgagctgtgatcacggggcgcggatttgtgaagtccggcgggccaccactgtgttcaccagcgcgcggccgcagtaaagccgccgccgtgctcggttttggcggaggaggaagacgaaccggggccgtcgatctcgagattagcggttaggattagaagtggtggtgtggtggtccggaccgtaggattttaaatgagcggcgtagatcagattttgtgtaccccttcgtctcgaaggattcgggcggtcggatatgaatcatgtggttcaaatctgggtcctgctttcataaaatcgggaccgtcgattctagatccgatgggcgcggtatattaccgattcggtcatgtgtcgttcgatctgggcgctcgctctctgatcggatggccgaccatgcctggtacccc

SEQ ID NO: 22437 - DNA, 472 bp, Zea Mays
ggacgaggcagctaaaatcctagctgcagcaaccaaccatagctttggatcttcttccagcatggggaggaagaagacaggcttggggcaaagggcagcgcgacagcaaacagggctaggcgaagagcggcacagcgagaatagtgcagggcagcaaggcggggtgtggtgccggtagggggcgatgtagtgaacttgtgatggatgcggtgggtgtcggcgcggggagggaaagaacacagtgtggtgtgagtagtgatgggtattgggccgggccggccagatctaagcccatcatgctttgggtcaattgagctcgaatcgagaaggcctaaaaaataggtcatgctatattagtccaaagattagaaacaatgacatagcctggctctaaagcatgatgtgtctttgtcaaaccatgtcagtccaagcctggtctccatataaaacccaatattacaaccacataaac

SEQ ID NO: 22438 - DNA, 716 bp, Zea Mays
acaacatctacataggccacgccccgcaaaatgtcaggagcctcccaaaactctggtatcaagcgcagcgtcgcagtcggcaagctggtagagcttccctgagctacgcgcaatgctagtgtgatgtgtgagcacgaagcagagtacgcgatggcaacggtcgacggaggatgcaacgtagttgatgcgggagcagacgtttacgtactccctctagtcctccttgagcagcaggtgggcttagatgtggagcgtcatgtggattcgacaataggtcgggggaggaagaaggtctggcctcagggtggtagtagattcggttggagtggacgaaagtgaaggtttaggtgcggagatgagagagtactcataggcatattgagtgctaggggtggcttctattttgcacttcaggatagggggcctgctggagctatgaacagttcatcgggctgcagaaaaagggatagagagcgtgatagggaggctgctcaagttggtcataactgtggatttattatattaattaaggatatacttttacagtaaatctatgacacatgcacatattgatatgtttttatataaagttggtcaaatataagaaaacttgtctagaacaacaacggtcagatgtaacattctttgggtcactagatgtcgctttgaatgagacctaaaggcctgtggaccaactcgcaaccagaactatacat

SEQ ID NO: 22439 - DNA, 531 bp, Zea Mays
cgagagaggtcccggttcaatggatgatgcatggatgggttcaaggatagctagctagcagctatagacgatttatggagtcgtaggtcgtagagcttttctttgcccagaatggcagggagtgagtgcgccctcgtttctaatgattgtcccaaatccgtcaaagtccctgccgcccgccgtaccccgtctacgcacacgccactgatcgcaggcgccatacacgtttccatgtctacctctaccgcctgccgcccgtccccgccctttgccttttttaagcaaatgccctgccctgcgcgcgagagcagccgcgaggccaggccaggccaggccaccgagccgagcatctaggcatctagctatagctagctagctcgcgttgctcccggccggtcggtatctactctcggctggtggagaagaagtaacttgttctgactcatccgtcgtcggtccatgcaatgcagggagacagaactgatggatgcgtgtggcgttgggcagcatgcgcctcgatgctttccgcct

SEQ ID NO: 22440 - DNA, 849 bp, Zea Mays
gtcctcaaatgccttgagaagatcatcgaggcttgctagggatatatcctcttcgtcggaccagtcatctattttggggggaggtagggctagaggggccttcttcttcttctctgtctggcatccttggttggtggtcttcttatggatcttctttttgggggcgagtttctttagcttcttgtcatagtccatcttcaaggtccgataggtttcacgggtgttggcttcctcgccttctgctatgttgagactctcctggagggatgccttctcttgcttaagctctttgacttgccgctctaggctttccactcgggagtttaggtgggtgcagtgggaggagagctcgtcgtagtggttgtcgagggtgtggaggtatccgaccatgtatacgatagtggggtcatcttctgtgggatctcctcctgacagagcctggagtcttttcctccaggtgggggtgtttttgttgctgggtgggaaatatcggaggggggtctcagagatctctcggctatagttttggcacagttgtttgagggcttttcgagcaacgctctggcaagtgtctgggaagcggtgcccgatgaaggtaatttggaagggagggtggtttgggtagttctggctttctcccaagtagactgccatagagcacttttctattccattttcacggtactccttccagacatattcgggcttcttgcggataggaggtcctaatcacccaggggttttccatctggtagacaaaaagaaaggtctattaatatcgggaaaaggggaagagtgtttcttgggggtaagaggtgttttcttgttaaggcaacttttaaggtcagg

SEQ ID NO: 22441 - DNA, 271 bp, Zea Mays
cacgcgcgcgaagttgcctgcggcacctcggaatttctcatcggactacgctcttcgcgatcgaccgtcgtgcgccgtggggcagtgtgctacatcgcgggaatcacggtacgaactcctcccacatattcgaatacgtccctattgcgcgtagcatctgtcgagtcagagtttagggcactggagcacttgattgggttttcaccggcgaggttcgccgtgaattgagggcggtgccgccgtgtttctttctgtgaagggggaagacacg

SEQ ID NO: 22442 - DNA, 422 bp, Zea Mays
cgggaataagaggagaggacaccagagagaaagaacggttgcgccagccaccaataattacgcacgaagcagtaaatgcaatgtgggagacggacagccagcacgacagctgagcagaggaggcaagcggcactagcgagcatcaatggtgtatggcagttactagcagcgcatgagtgcgggagagcagaggacaggacgaagcacactggcgtgctccacagaagcgaggagacgcgcacggagacgaggagacagctaacaggcgagctagcgcggtgtcgaggcagcagaacaggtggcggcgacgttcgaatgcaagaacgaacagccaagtgaacggataaaggtgatgtgctccgtacccacacgtaataggctgaaagaaaagaaaaaaaagctagggcgagcgtccgacgttt

SEQ ID NO: 22443 - DNA, 419 bp, Zea Mays
ccaccagattttgaaggtgcggtgctaagcgattagccaagactttggataccaacttggcgaagctgtgaataaggctaattggcctgtagtctccggctgtcttggcatcaaccttcttagggataagtgttaggtacgcagaattcatcatccacaatttgcgtgtgttaccttggtgcaggttgataactgccgccatcagatcagccttaattatgtgccaacaagttttataaaatcttcccgtataaccgtctggccccggggctttgtccgagggaaggctagcaatagtggcccggacctcctcctctgtaatgggaaggtccaaggccccaagatcaacattagcactgtggcaagcctccaaatctagagtgaactcacgctgcttcgctacccccaacagattggag

SEQ ID NO: 22444 - DNA, 880 bp, Zea Mays
gatgaacctaccaagaggcaagaggataataacatgatcgagcacaaggatgaagcaaattgttccaacgaagatgaaactgtcgagaaaccaaagcattcaaacgctgtgcattctaagaaggtaactgtcacgtggatgatcatgccaataatgatatgtattgtggatttatttgtcctgaaaggaacaaatgggcaatatctattcttgttctcatgcaggagaagtccaaaaccaatggttgttgctcttgtggatctgcaaggaagcacaaggcgtcttgtagtctagccacagcatcatcatcaagagagcctccaaggtaataataatcatatgtgccatacctgatattatccccctccccagagaatcggagatgttctactggtaggcaatatgttctctgaataataataaaaaaaacttcaacataacacattagttggtcacagttgttatttctattgatagcaccttggtttttaattagttggtgaaacccatccatcagggccaagggcgggcaagggaaaggccagagaggaaagaagcagaagaagaaagagcaagcggaagcagcagctgccaaggccaaggagtctgcaattgtgccagacctaggagctctttgcatctgaacacaagcagcagatacgccagccctgcttttcatccacctgtggcttatcatctcatgcttagttgaagcgaacgcagcagatctgctgcgtgctgactgagggaccgacgtgtaattcatccacaccacacgacaggaggggcgatgatgtcgctaaactagcaggttttgcgatggtatagaatcacaatcgtgtcattggtgtcatgcttactaaacaaatcttgttttgac

SEQ ID NO: 22445 - DNA, 1154 bp, Zea Mays
gtttgttttggttctgctttcttcatgaatgaagataagtgttgttattactgagactcgactgcttgatgcatagctagcagctcagcaatcatattggttgctttattagtgtaaatggtttgtgttagattattgttttatgtctaagtgttatgggtaggggtggtaatgtatcatgatccaaaatgtttttcatgatttatttgtgcccttaatagagcatgatcctaatatgatttgatcctcagtagcatcgccgcgccacctggttagctgcctatctgagttgcatgtgccatagcagggccatcgcctggccagctgcctatcagtgttgcgtgcgccatagcaggtgtgcctcctcccctcctacaccctcgcctttctttcatcgttgggcggttgtagccgtcgttaccccctcccctctactcttatcctcattgcatggcattggcctgccccctcctcgtcgtctacggcgctgtcatgacccccttggccagccaacctcctagtcagtcaaggcccccctccttagccccaccgtcgtcactcccaacccgggccttcctatgtccgccccagcaacgccatttccccctcgccggctagaggctcgaccgcccctggtctaactggccttggcttgggcaccgctggcagggcctaggcatgatggcttttggcctcgggctatccctggcccttcctattgttgttccaggggtcctcccccaccgatgctacaactcactcattggttgtaatcttcaccactattaaggtggttgtggctgctgtccgggaacaagaacgtgttgtcgtccttgcctgagaacacaaacgcaacgtgacaaatgccctcattgggcaacttgtcgaggttgcgcatcatttgcttagatctccctacctcgaccctctcctagcgcccctgtggttacgcctccctctacgtacgaggccactgtcatcgccaacctctatgccatgcaacgagtgtccaaaacatcctctctctggttctcgtcattctcgacccgacttcctccacctacgtacattgacgcgacctcgtcctcctcactctacaacgctacatcctggacgaccatatccttatcgatactgcacctctcactatccct

SEQ ID NO: 22446 - DNA, 452 bp, Zea Mays
ttgacatttgtataatataatattttgatatatgtttaatttttgtgggtacgagtgacccgatgggtaacccatacccacatgggtatgggtatgggggtaaattcatactcgccaatgtatatgggtgacccgatggggttatttttgtgtcgtgggtatgggtatggggtagtaatacccggtgggtatttacccattgccatctctatttcagaggctgtaggataaggctcttgctattgaagacaagcgtgttcaactaggagacttgaagaggatggctatttcacaggggcagggtagcaacaatgttcgtcctcgctacatttcgccacagggtacacctactcgtccaggaggaggacgacgctcagctcagtatgctccacaggggtctccacggacaccccccactcgttaggctgctcccacgggcaccccgacaaggc

SEQ ID NO: 22447 - DNA, 474 bp, Zea Mays
tacggatgatggctacattagtgcttccgacggtgaggatgacgatgatgactctagtgatgttgctgctaatgatgatgttatgcttggtgttgatgctacggtgaaccttcgaagcatcatggtgtagcgtgttcttagttctcagcctgaatcatcagagaagcagcaacggcataatttgttccagactttcttcgccatcgagaatcagcgtgcctgtgttattattgatggtggaagctgcaataatttggtgagttcagattttgtcaagaagcttggcctgaccacacatccataccacattcagtggatcaatgattcaggcaaggttaaggtaacacacatggtacgagtgcatttctccattggtatgtattctgattatgcggattgtgatgtagtacctatggaagcttgttctcttttgttgggtagattttgggaatatgatactgatgcacgtcacaa

SEQ ID NO: 22448 - DNA, 342 bp, Zea Mays
tacagacgcaaaaaactcaagacgaacgctaacagaggctggaattttggtgctgccgaagtggctgcttttctggtgtattcatttgcttaaatagagacaacagtatggaaactaaagatagaccatagtataggtagatcatacaatgattagctacctaaacttggctaaacatgttggaactcactaacgctcaagaacagaagcgtcacctcctctttcttcagcttagggtagtgccatgcgaagaggccccagttgccgcagttgatgcacttccccttccccatcgacgactttttcttctgtcaagccttccactcgaggtgagaaggagct

SEQ ID NO: 22449 - DNA, 665 bp, Zea Mays
actcaccagagtggcccagccacgggcgggctgttcttcgcgatgcggcggaccaatttgggggaaaacggcgtcgcggcggctctaggtgaaattgggggtggagattgaggctatacggccgtaagaggctgtgttttcattgtgcgcaatcaatttgggcgaagatggagaggacagtgcgaatttaacttcgactgagcttcactggtggagatgaaagcacctcgccgtggctccttgctcaatttataggcacggcggtccggtgattgattcgcggccacgaggtgggctgttagcgcatgtcgaccacgtaagaacgaagcacagtaagagagatcgacgtatggcgacagcgcggcgaaccgcgctaagtcacgacggtcgccggtgagtaactccggccgagctcaggagatggtgccacgtacgagttacccttttcccggcgttatccatccttcaccgtgcacgaatccgggcagcgatcaacggcggcgagctgagctggtgttctgatccacccaaaacactgtaccatggcacatcttcttcagtcgcctgaaccggccacaatccaacccaattttctctggattcttgttagcaacagagcgatctctcttaataaaatttgttcactaaacatcagtctaaaaact

SEQ ID NO: 22450 - DNA, 609 bp, Zea Mays
ctgctgcagggcctgacagctgaactggcaaactgaacattctgaacaaataacctacaaaagaaaatagaatggacagcttcacaatgccaaactgaaaggacaagttcagcatcagtcataacccaggttcacaagctaactattacacagataaccttacacaagctaactcatactcagataactcttacacaagctaaccttacacagataacttgaacacagctaactcttacacagataaccattccacaccacacatactactctacttcatctgacgatccacaatctcttcagaattcacatcattcagtgcccattccccgccacccatatcttcatcttcagcaaattggttattgaaacattcagataatggtggcgaaggaccagcttcgagatcttctaaacgttgtgcttcctccagcagtgactgagcaagctcatacacgcgccacattgagaagttcactgacacctctttggccgtatctggcgaatccattatctcgtttccggccaaatctatcaactctttcccaactacatgcatctttgcaatggcttgtgcgaggtcactacgaaccgtttcaaatcgggtta

SEQ ID NO: 22451 - DNA, 516 bp, Zea Mays
caggaacgtgagaaatagaaggaaccataaaacatgaagtgcgaagggtgccatgactaagaacggggtcggaagtgccatcagcagtggtaacaaacaagaaagcagatgatggacttaatgaacaaagagaactagaatcatgggtcgtgtgaaaagctcctgagtcaagaatccagggcacaacaacacctgacaacgaggcacctgaggtggccctggttggggcacacgagcaacaaccgaggagaccatataggaagctgacgagatagcataaaggccctccatacgctccatgcgccgagttaggtcgagggcccagtcaggaggtgactgaggcgaggcagaagcagtaaaagtagaggcacttccacggtgacgtggaggacgacgcctgcacttctcaatggtatgtgtcgtcgccttgtagtagcggcaaaagacaacaacagcacatcctgaagcaagagggaccgctgctggtgctggagtagtaggagctggggcaggcga

SEQ ID NO: 22452 - DNA, 537 bp, Zea Mays
cgcgccaggctcatcgcagcggcgagcgtggtcggattatggatgcgcaccgcatgactgagaggcgggaggaggcctccggtgaagagttgcactcgttgagcttcgtccagccgaccggcacggggcaggagcgtctggaaacgactagagtactcctccacagatccggtgcgtcggcactccgaaagttcgaacagcggcgcggaacggagtggaggtccgaacctctcattcaggaagtctttgaatcgaccccatgacggggcaccatcatcttcttcaagctggctgtaccacaggtgcgcgacgtcgtccagatggtatgatgccatccgaacacgttcctcccccaaggtgcggtgatgccggaagtatgattcacatttgttgatgaacaacatcggatcgacggagccgtcgaagcgggggaagtcccacttgcggtgctggatgtacggatcgtggtcgcgctgcccctcgggtcgccgaccgtggcccccgttgtccgaggccgacgcggacttgtccttcatg

SEQ ID NO: 22453 - DNA, 421 bp, Zea Mays
tgcatttattgcggagaggacgcgccgcctgtccaccctgctgacaggcgatgtgccgcctcagcatttattgtgacctgtccactcagctggcaggcggcgtctaggccatcctacaggcagtgtgcctgtacagtccattgccaaacagtacgcccgtgctgcaagatgcactgtgtccatcatcacttatgcgttgccagggaagcttcccctgcacgccaataccacgcagatcgcggatgtcagggtgcaagaagattgcttagcaacaccaagtattacatccattatattcctgggcccacatgtcggggcccagtacccttgtacgcacccccttgagctataaaaggggaggcatgcaacgttacagggacagagacacttagaaaaaaacttagacttagatccagctcag

SEQ ID NO: 22454 - DNA, 455 bp, Zea Mays
agaaaatcagagaagaagacaaagggattctaacctaattgggcctgcggcaccctattcggcccaccataccaatccctcgcgcgcggcccagtctccctgtgtctgcttgcgctcacccggtgccacttcctggtgggtcccgcaggtcagggcgggtcttcttctccccaactgaagcgcgaccgcggcgctctgtatcagcccgcgtggaccgcgccgagctccgtatccgccggggttagttgtggagggaccgattctcgcgggaagtagaggcataagatcacctgccaccgcccgtcctctggcccagctaccccatcaaaattcctcacgcgcagaacacttgaagctctcgcccaatcgcccaagctcggttcgccgccaggaaatcgcgtctgccgtgctcggtcccgatccatagccggtatgcactccttatccaccccgag

SEQ ID NO: 22455 - DNA, 805 bp, Zea Mays
gggccctcttgacagtatttcttcaacctttagaatgtactcagttctggcactgctcgccgtaccgttcgctcgggcgctgcgtggagccacacccatgcctgccatttcgcgtcatgctggaccatctgcctgctcgtggcctcgcactatgcagtggaacgccaccttcccgacgactcttccccttcttccccactcaagcaatgtgacggtttcctctctctccctccattaatagctccctccattaatagctgtcgccgtttcttctgggtccgtggtcgcctcatcggctcgtcttctgctggttcatctccccgcgagtggactagtctccaacgcctgtccgtttctctcctctctcccttaatccgtcattttctcctcaccattaaccgatctgtattttctccgccattaatggctgccgccgtgattctacttcaccggacgtcccttccccctttctaggctataaataatgtgcccatgacccctgagtccgtgctcgacctccttcttcgctttccccatgcgccattcctgctgccagcataatccatgcaccgtcgcttgccaaccatcgttgctgggccaattcgacgccgtcgagcctccctcgctgccagcaacagcttacccagcatctcctcgcctctgttctactcgcctgccgctgctcgctgtcgtcgccgtgattgctgctgcatcgcttggagtgctcccgaccgaagagcctcgtcgcattcctacacgttcttctccgcgcctgctgctgccgtcgcgccatcgccacacctaa

SEQ ID NO: 22456 - DNA, 553 bp, Zea Mays
gacactgccggcgtttgaggtaaccgctaagtgaagcctggaatttagctttcccgagtagtgacttggcactttttaggaatagtgcccgactcgagaagccccatttatactcgcgccaacgtgcatttttgatttctgagccctaacttcacttttccgcctcgaaccactcctctgcttccctgagatctcgatcttgctcgtttcgccggcaagactgggatggcgccgaagcggaagaggcagagctccgttgcggccatcatcccgcctatcgaccccaacagccagttgccattcgcgggtaaccacatgtccatcatctcgaaatccgacctccttcatcttgtcgacgttggggttttgcttccgaaagagctctgctcttggcgaatttgccgcggcatcaccgttccgacagaggatacccatgaatctgtcatttacgttccttttcttattcgcagtcttgctcttcccgtctctcccttttttcgtggcctccttgatttctacgaattgaacttgactcatctgaaccctaattcca

SEQ ID NO: 22457 - DNA, 336 bp, Zea Mays
atatgcgtggtggactctctgtagcccatcctcggtagcagtgtgtgcctcataagctcatagagaaacttggcggctagagtgaaatctgctggagaacgccgtaacccatctaagaacggaggtcgaaacaaggcgacgacgtgagcagtggcaggggctactccaccgtgagggcgaagaggaggatctgaagtgccatagcacaagatgtggagcctcgtcaatgactcaggaaatccaaagagctgtttgatttgagtagcatgcaatgtcacctcctctcgctcaaatctaaacctcatccactgatgatctgggtcaatccatactgtg

SEQ ID NO: 22458 - DNA, 627 bp, Zea Mays
cgccaccgccgacaacacgcgctttttgcgcgaaatggcgggcaaccaatttcaacagcacggaggaagagttccccctcaaggaccacgatatactacctatatggagttctccgaaacccgaccaccgctcttcgtcaaggcagaggaacctttggaagatgatgaatgggtgtgagtaatggaacataaattcaggctaatccgatgcaccgaggttcagaagctcctatttgccgctcagcagttaagaggccccgccagcacctggtgggcaaaagtttccgccatctaacttgtgggacatcaagtcacttgggaagaattcaagttggcacttagggaacattatgttccggagggcgtgctacaaatgaaattagaagagttcatccgactgaagcaagggggagattctatgatgcagtatctcaataaattcaatcatctctccaagtatgccattgaccaagtggatacagacctaaaaagaagaattgttttatgaggggactaaatgacaggctccagcgtaagatggcaacatgtctggacctcacatacagcagggctattagtacaaggctggcagttgaagccaaaaatgcgggacacagaaagtcaaag

SEQ ID NO: 22459 - DNA, 1276 bp, Zea Mays
cacgcaaccgctactgacaatgctatttttgtggcggcttcgaccgtggctgctgatgatgattcgtttggctctgtgtctaagtgttttgagtctgatggttctgggagttcgattgcatggacggaggagtcttcagatgaggacttggattattttgcagcgttggatgtggctgcagcggagccttcgccgcgcgcggagggttccgaggagctcccgggcgcgagtactgggtataggcggcgaagggcggtggcgaaacggagagtgagtcaattgtcgcgaagtggttggcattatcgtagtgagatggagagtggtcgtcttcgcgtggacgagactggtaagcgagaattgttgtcctcgccgattggggtgagtgtaggtgagggggagctgcaaaatctttttaagggtgaggaattgaggataatgttgttcaactacagggagatgggtatcatcccgaaggctgagccaatgtaatatatgatgccctcgctgtgtgtatgtaaccgctatttgtatgataaggctgcgcgctttcgttgatccggccgtgcccgtgggcgactcttgcacagagagtcttttggaaaagacttcgattttgcgcgcctattattccggctgcgcccttaggcgacttttgcacggagggtcttttggaaaagactttgattttgcgcgcctattattccggctgcacccttaggtgacttttgcgcggagagtcttttgggaaagacttcgattttgcacacttgttgtgctattccggctgcacccttaggcgacttttgctcggagtgtcgcacgcgagggtagtaagcgctgcccctcgtggtgactttggtgtggtcgaatgccgaagaccgtcgatgcggtctttttcgacatattgtgtcttagtttttgcgggggatttttgcggttatattacatggctccgcctcattaaaaacatcaccccccaggaggaaaagagtgcgggccggaatgatattgtttggtgaattacaagggcatgttagccctgaggattcaaacaaaaaatttgtggagattatcgatattccaggaatgctctaggtcctcgccggatggcgtggttagcctgtacgcgctgggggacgccttcgtcttgacgatgaaaggaccctcccactttggctccagcttgccccgtgactctgtccgagttgttcggacgagtacgaggtcccctttgtcgaattctcttgggacgactgcgtggtcgcgccaggccttc

SEQ ID NO: 22460 - DNA, 516 bp, Zea Mays
gaaagataaaagataaatagttcagcaattcacaaactagaaatatataatggcattcttttgcttctaaggtaactaggaagtactcgttccaagttcttttatgtcatcagcatgcatgtgttctccattagttggaggcattgctatttttcagaactctgctgcatgcacaattattttgaggctacctgaacatccgtacctttcgttttaacatttcctttccttttggcaggatacattcagcttgctcatcctatttgtttgcttcatcactgcttttggtggatcagatataaagaatctatatgctctgagggatgaactcgtggaatcaaagcaattccttcaagactggtttgatatagaaagtcctccatgcttgtggtcacatataacttgtgtggacaaatctgttgcagtcatagatttgtcaaatatcccactccatgttccttttccattatgcatcacggcattccaggcacttgctcgtctcaacttaagtaggtg

SEQ ID NO: 22461 - DNA, 583 bp, Zea Mays
atccgcagtgggtagcacataagctccagaaatacccgcagaagaggaagctcccggagtgaaattaatagaagaaccccactgagccgcctggtgaggcagacacggagctccaaactgagacggcataggcgtagacgatgcaggagtaggccggccagatactgaggaaaaccctgcatcggcacgatctgagaactcccaggcacataaagctgttgcggaggaagaggaactgaaaactgctgctcagcacttgacatcatgttgatagtgccctgagaagaggagaaagtcactggctcccatctgagcttcccattaggattcctcctacacaccacatccttgtggtcctgactgcagatagaacacctgccactccactggcactctgcacggcgatgcacatcaccacaacggaaacacaccagccccagcccgggcttaggaacagcccgaaacctctaagtacttcctcccgaagtacccgagtcagaagatttgccacggtacggatggtggcgctgatgctgagacttgcccctcttgtgggctggacctcccatgttgcccctcctcg

SEQ ID NO: 22462 - DNA, 475 bp, Zea Mays
gggagctcgggaacttctcgccggagttcgtgaagccgcaccttgccgtcgcttgggaccttcatgccctaatcgccggtgagcgcccgacctccattcccatgtagtctttcccttggttttacgctagagcattaggtgggttgtgctcggacgggccaggggcggcgatcgctggtgggattcctgccgcaaggtatggcgccgtcgtggcctcgagtcgggttgacgacggtgatcggggaccgtcagatctatgacatacggtccagattagatattgcgtaccatttaggttaggatagcaagagccgtccaatttcgctccaacggctgtgctcattagggcgtataccaattcacggtaggttccatgtccactggatgtcaatcggaccgtccaggatgaatctagggcactttaaatcagcaccgtagatccctaatctaacggactcagtcgcgtaccggttcg

SEQ ID NO: 22463 - DNA, 346 bp, Zea Mays
ggggtcgaagtttttcccttttgtaactaggtagtgcacacgggtatgccaacccggtagggtctgcccccataaacctggcatgttggcctgcacccatgcatgattagctatgaaggaaaactaccctctcaagatatgcctctatgataacaatttcctgctgctccacggtctcaccctgcagtttctgatcgtgttttatctaacccacctgcccagctcccatcccaccaggcataatgacatctggattgaacagccagggttgcagtttaggacctctatgcgaaagcagggggacccgacagcctgggggccggctctaaggaatgagtgctcgtgt

SEQ ID NO: 22464 - DNA, 709 bp, Zea Mays
cttggaggctgaagcagttcaggaaacccccagcatgatagtaggtatgtttccagtcgactcccatattgcagaagtgttatttgatacttgagcaacgcattcatttattacttcatcatgggtagaagcacataatcttccaatcactaccatgtcaacccccattcaaattgactcagccggtggtagaattcgagccgatagcatttgcttgaatgtaagtgtggaaataagggggatagcgtttcccgctaacctcatagtaatgggtactcagggagtagatgtcatcctagggatgaactggctagataagtatcatgcagttatcagttgtgataagaggataatcaagttgatgtccccattaggagaggaagtggtgaccgagttagtccttcctgagccaaataaaggaagttgttatcagatggctgttgatagcagtgaagcagatccacttgagattatcaaggttgtgtccaagttcccagatgtgttcccaaaggacttaccaggcatgccaccagagcgaaaagttgagtttgctatagagcttcttcctggcaccgcccccatctttaagagagcttacagagtatctggaccagagttggttgagcttaagaagcagatcgatgagctgtcagagaaaggttacatccggccaagcacctcgccttgggccacccctgtcctattcgtg

SEQ ID NO: 22465 - DNA, 660 bp, Zea Mays
aaggtaccagacatctatcttatacccctttctggattgatccaaacaatccagcagggcgtttgaggaaagccccttccagctcccgtgctcatacttctgctggtcctgctgctgctgctgccggtgcctcacgtccctcccttagccgcggatctcccacgccacgtggtcgtggtcgtggtcgaggtcgtggccgagggatgggtgcccgcctggcccatgggattgcagcattcttttctatgtcccggaatatttttgcagatgtgcatgagctggcaaggcgtcagagggagactgacgacaatcttcgtcgtcaagcttcctctatgggtatgccttttgcccctcgctcgcctgatgtgcctctccatccgcctcctccagaaatcaatgagtggcaccagcaggcctacggggtgccttttatgtcagctgacgatgaagaagaagaagaaacatactttgatgatcgtgagtagtttgccccgcctccctaccaggggatccgggtcaatcctcgtctcatcctccgccccaggatccttcaggaagtgttcctcccccggatcagtctggggaagaacactttgcatctcacctggcgcatcatttctttgctccgcatcatcctccgccttcgtggtgatcttttgc

SEQ ID NO: 22466 - DNA, 630 bp, Zea Mays
ggagagagaagaaagggagagggcgcagaagtccggagcagacaatagagcggaggcgtgcgcgggcagggccacggggcggagcttggcgactttctgtaccgcgcaggggagattccggttgggtttcaccacgcgccgccattgatccactcttcggctagctcacgtgcgtctgcgtcgtcaactgaggtgataacacatccatgtagtttgtctttttccttctcaacgtgtagcgctggtattggggggagctattggcgccgctatgctcacgaggaggaagaagcactctggtgccgttagatttcaatactgcggctcagatcatagaatagcgatacctcttcgtagcatgaaaatctggtctttgatcgtccaatctgcggcttaggttatcacgtgtatatctgtcgttcgtcgcaaatctcatggctatggatgcgtagcggttcagcctataacagatctaatccgagccactcgattttgattggatggctcagatttcaccataccccttcgccttggcaattatgctaaagagcccccgtagtacttatgaatcaacccacggtaccccctcggttgcgcatgtgtctggggaattttattgtttaaaccccg

SEQ ID NO: 22467 - DNA, 344 bp, Zea Mays
agaatggggctgagacgggcgaacagcggagggggacctcgggcgaaccagaggcctccggcgagcaatactcgtcgtggtggggaataatccggcgtgctgaggcctgcatgtgcttcgcgcgagagggtacgagtgttctacacctaggtttgggcttggggaggggctgcaatggctggacgtcgtgaggacacgatgacctgacgatggtgacttcggtgagccaaagttacccatggtgagacagaattgttgcagaagaagggcggggaaggttacttacctagagacgacgctaggggcagcttggcacggcgtgaggggactccggttggccggac

SEQ ID NO: 22468 - DNA, 453 bp, Zea Mays
ctcagatcgctaatgacctgccgcgcaccccggatgtggaaggctaccgacagagtcaacataatcaacagtcggtgagaggcgtggagcaacatcaacgcttcgcacgattgccggcatgaagaggagatgaggcgatgggaagagtacgaccgagatcatggtgcaccggcacgcagtcatgtcaataggacaaagtcaacagtagcctctacgaacagcctagcgctaggccggtcagctcggtgaggcgacatgacacgacatcactcgcctcccagggaccaccatcgcaaccatgatcgagaagatcgccaggaggaccgtgggacgtgcggggtctcagcccttccccctggctcctatcaatttaatggtcgcctaacttcaaggtctcgaacgttgacaagtacgagcccaagaaggatctaggcggctggttggctgtctacc

SEQ ID NO: 22469 - DNA, 400 bp, Zea Mays
cacgaattaaaaagcaggcagggccgccggcgtcgaagctccgtccagacccgcaacgattcacacgtgcatcagctgctcctcctcctcgactcgcgtccgaccgatgggacccacccacattccagcattccaccacagtgctggtccaggtccgagtccaccgcaccgcgtccctcccggtcccgccccccatcgccactccggctcgcgcgccgcggtataaaatgtatattcttggattagcctgtcctggcaagcccggccaccaccgtacacccaaaccccatcccatccccccgaacgcagaagatcccgtgccaaccaacggcggcggcggcgacggtgtgtggactctagactaggagccaatccagggccatccacccgtagccccgcc

SEQ ID NO: 22470 - DNA, 301 bp, Zea Mays
cacacccattgggatcagcatcagcagggtcacacccattgggatcagctccagtaaagagttccactggtacttcttcagcagcaggagcagaagggccagcatcatgatccaagcacgacacccgccaaagccgtctctttttctttttcttcccctcagcatgagcagtcggacgaccaacttgacgaagacgtttcgggcgagcacccttaggccttcgagtatccacggcttcctcaggctctagaatagttgcaacagtcaccgtttcagcaagggcagaatcagaggaatcccc

SEQ ID NO: 22471 - DNA, 553 bp, Zea Mays
acctgagatgcgctggccacggcaaggtcaaaccgctcgttgttcttgagtgatttgggggaaatcccaaattggggagttctaggggatgattcgaggcacgggttgcttcactggttgcacaactacctagcggagcaggcgggtcagcaatttatagtaggcttgagcggtggcgtccaatttcacgatgatgcgctggcggccggagatagggaagaacacgggtggctgtgaccgtggcgttcaccgatgcaacggctcaaggattatactcctaagggtgccacgattactaccgcgcagtaacaagctacggcatggcgcaaccgaggtcatcggagcttccacggcaacgctggcggtctagccacgtcgcaacggctacaagcacggtgatagacttcaatccacgatcaaatccattcccccatgagattttttaccttcccgtggatatcctctgcgtgccaagcacgaatcacggtgaccagctcaaatccggacacacggatcgccggcggtgagcttactgagctggcaatccaatccg

SEQ ID NO: 22472 - DNA, 715 bp, Zea Mays
ccaaacgcgccatgtgtccaggggcatccacgtagcctacaaccctctagaagaccttcaacttccaccatatcagctgaccacaacgggtctaggtacgccatgtgccccaggacctccacgcccccgatgggtccgagcgcactatgcatctgggctgtcaacaccgcaggctgtcaaggagttgatggtgtaaagtaatggttgtgcatagatgatgagacatgcatgatcgtgcccacatcccgcgccgtactggttgtcaggcccagacatcctgggtgtggcaatagtgcatcattgtggcacacacatggacgacgaccaccacatctggagagtacttcctccatccacgtgtaagagtggcgtttgaccatccacgacatgtgggcgaccttgccacaaaacttagatggacaattactccttcaatgagaggaggggtctggctaccaaaccgacccacatatcctgtaacaccctctcttttggacacgagcctagggtttaattggtcatcacaaaacttaatttcatctaagcttatctctcatattaaaagattcttatgctcatcttatccaatggagtctcactttcttattcttgttttaaagatggcatgtagccaccttaccgcccacaagagtacgggcagaaggatccacattgtacactcctcaacacctatgctggaaccaatgctagtcag

SEQ ID NO: 22473 - DNA, 568 bp, Zea Mays
gtactaaagtagatgctaattaagatgaaaggatacttatatatatgtaccgactactgctcggatagaagctaaaagatctcaggattattctgagaggggggacacgcaaaaacccgcggcgatgcccgtacaaccttttaggtgaatccaactaaccacagttactgccactggctagctagctggactggagtgaacagtgatgtatgtaccgctgctacagttgcttgtctgagatttcgatatgcatgtgcatggcatggatcgcaatcaaaagactgccctgccgatcgatcgacctccttcaattgtgcaaagacgaaacaattaggtatcctcggcaggatgcagcatcaagtaggtcgtcgtagtcatgcctagtgcccctgctgtccaatagacaatgagaagaagaagaattttgacaaaggttcgttccactgccatgtagctagacgtccaacgcaatggtgtacgtacagtcaataaccgtacagaagtaatttgggttctatatgaacaactgatggcacacggtggtagctgcgctcctcttcaattgtat

SEQ ID NO: 22474 - DNA, 512 bp, Zea Mays
taacacacaggccagaaataacgcacctgtccaacccaatggatgtttcaagtgcggtgagctaggccactatgccaacaactgcccaaggcgcaaccagcagacaccccagaaaggcaataatcagaggaatgaccagaacacccccgctcatggatctgttcagaacaagacaccgcagaaccagagcagaggaagggtcaatcacgtcactgcggaatcagtgcctgaggatgccgacatagtgtatggtatgttccttgttaactccatacctgcatcagttttatttgactctggagcatcgcattcgtttataactgagtcatttgtggaaaaacacaatatacctaagtatcctcttaagaagatattacacattagttcaccgggaggtgacatgaaggccacatactcatgcccccatgttaatatcaagattcaaggaatagatttttcagtcaacccagtggtcctaggatccaacagtattgatgtgattcttggatcaa

SEQ ID NO: 22475 - DNA, 923 bp, Zea Mays
ctttgatgtagagcattgatctagtcaccatacaaaatctggaggaaattcgccccaaacatgatctgtcagaccgactgaagaagttcctgatggtacagtgaccagaaagatctgttggtttagtgaatcggccgctggagaccccacatgtggattcacgccggtgaggtgattcgtgctcacttaggcccggataacgcctcggggtagaaagatcttcaccgctattgagccatgggcactattccgtccggccgccgtgtccgcttagccccggtcgcttcgaatctaccctcgccggagttggacacctcgcggtcttgtgccacatgcctcggcactttaaccacgccgccatgactcatactaacctatcaaatgatcgccggtgaggttgccacggttatggccaccaatcgtgtgcgctagtgcacctcctcctctccggtcgccgcgcgtccccatcaaattcactagccaccgctcaaacacactataaattgagcacaccctcggctccgttaggtaatccagcatccaatccaaccgcatgtgccctcaattactcaccagagcccgcgaattgctcttttcccccaaatcggtttccgccaccgtgaaagagccctcgccgtgactagcttgttccaggtctgttcatactctctgctcttccgttttagcatccttaggatctcctaatgctcctcgacccatttgattgatctagactatcctagatcaccaggaacacgtttgttcacttgttgtttgtgctgtctccgtggactggacgacttaaagctccactagtgaaattgattgaggggaaatgctcgttaggtactaaattaggtcttagccaaattagggcaccagccattgcgtattttagccggtacaagtttgccggagctcgg

SEQ ID NO: 22476 - DNA, 467 bp, Zea Mays
acaaagccgttgggaagagtcagactagcagagctgagatcaaggcttggggttggtagagtccaacaagattaagggggtgatttgttagaaactcagtcagtctgtaatctagttggtcttatatatttgggtgtggcgtagaaacacctggcagcagtgctgctcatgcccaggtgtccgtcaatttgtgtaagtgttaccccatcaaacgtatgtgctgcgcatgcccacttcgatccggaaaaaggggagatcgtggggcatttcgtttgacggggggaactggcatcatgcctagttaagttaatcagaaagacccaagaaatgagtatgatgttgagcagtgcaaaggaaagcaaagatcactatgatgttgagcatgtgtgtgggtaagtgtaaaagcgtcgagacaaggaacatcaagtaattcccctcccaaactacctcatatgatcaaattaaaa

SEQ ID NO: 22477 - DNA, 662 bp, Zea Mays
tttgcttttaaatctcagttttgtgagctagagaatatctataaggccttgagtttaccgaaatagaccctggcaacagaggaatgtgatggtcataaggcctgattagaggcaatttcgaaggcacaacaaaaacatcttctaattcctttaaaatctcccgtagaactgcatcatttttcccaactatttcttttgtaacctactccagaagcacaaatacctagacttcctctcccttcatccatttctccagttgcaacacagatacttgtcgcacttcctacacctctctagcatcaccctgtaaccttaccatctttcattgatcagtaaaggttaacaccttgttattccagtcacactccataggactctgagccttcaaccaatcataccctaggatcacatcatatgcttccaaatccaacaacctcatagcagtgttgtacaggtgccccccagaactccacactatctccttaactcttttatcactgatcatagctgtttcatttgccacattaacccgcacagtggagcaatcttcagtgaccaaccccaattttgctacaattctctggatgataaaggttgcagaactaccagaatcaatgagcatgaccaacatctgattctgaatcagagcttggaccctcata

SEQ ID NO: 22478 - DNA, 402 bp, Zea Mays
agaggaaagtggaaataaagggattacccaactaaataactgactttattaataactacaccaagttgcaggggatacccacaccttgatgacaatcattacaaagatccaacttcattacatgttcatcatgacaagcattccaacaaatgataagcaaactaactctaactaagactgactagactaagacactaaattaagcattattacagactccaactccatcaatctatggatccaaatctatccgggtcctgcagtcaggggtaccatagtcaaagcgaacacagggcggtgaacggtaagggtgctgaatcccgacaggggtgggagaaccaccatctagatagtggcgtgcagcgcactcagcacgcaattccgcaacctccgcccgaacct

SEQ ID NO: 22479 - DNA, 513 bp, Zea Mays
aatgcatccagctcaagtatgcttcggtagcacacccccggaccaacgggcaggtagaaagggaaaatggaatgatactataagaactcagaaagagggtcttcgataaaaatgagaagtttgcaggaaaatggatcagggaactgccctatgtggtttggagcctacgaacccaacccaaccgaggtttccatggaaatgctcccttcttcatggtgtatgggtcagaagcagtattgccagtagacttacttttggggcaccaaggctaaactttaaaagcattgcggaagcggaagcaacctgactcaaagaaattgatgtactagaagaggaacggttgaacgttgttattcagttggccagatactagcagaccataagccgctaccacgacaaggcaatacgtcaccgacgtttgcggtaggagatctggtgctccgtcgcatacaatcaggagaaggacatcacagactatcaccaccctaggaaagacccttcgtagtcacaaaa

SEQ ID NO: 22480 - DNA, 344 bp, Zea Mays
ccatcagacaagctcaggtgcgtgaccgaaccctcgaccctggtcttagtcaaagatgcaaataaaggaaccaaacatcccctcctagcacaagttaacagcgagcaaaagggccataccaaagaccatatcggataccgggctcgaccacgcctcctcaccgtacacgacaaaccccgacacatctggaggccctccttgaagctataaatagagatatccggagcttcaggcaagggacaaacacttcacggttttcatctccacggtgatattgacatttgtctcaatcaaccccagagacttaagatctttccctctcccaaccagcttttactctctac

SEQ ID NO: 22481 - DNA, 604 bp, Zea Mays
caaggctgagaccgggtatctgcccattcttttcgacgggtcgtctccaggagctgggaagtttggttacctgaagatccgacgtcgttgtccctagtggctgattgggaaacgaagaacttcagttcgagctttgtcacatatcactcaattgttaagaacctcactccaactctccaagccattgtagaacatagaggcgtattgccacttgcgatgattcgtcgttcacacacaaaatattatcatgtgctacaccaattctggaagctactagaggaaaatgtgaggaatataaagaaactcttgttgagcagatgtagtctagtggtctccgtgtgcttgctgcagtgtaaccaaactccaagtagatgtgctctgggctctggcatgtggtatgtgatgaagtcgaggatggtttcttgccgtttgatgaccagtgtagtcgttggttaacttgtcagtcgtaaactgatgttgtcagttaggagcggataaagtttgtgtgtgttgtcagtgtatctgtgtgtaagtttattggacagaccgaaagatacaccacgaacccagatgaagtaggtaatagtcgtatgtgaagttttta

SEQ ID NO: 22482 - DNA, 679 bp, Zea Mays
tgcgcccgcgccgtcagacccgcgcccacgtcgcccgagcactaggtaaagaccccgcacactccctcagctcgcccctgcctcacattcgcgcttcccctgccctcgcactcacctgccgtagtgccgccttccctcgctatcgctttgcagttctgccgtcgccgctggacttttgccagcgctttggccacggtgagcttcgcctgagcttggcgcaccgggaacacgcggtggtttcccctttcctcaacttttctgcctggtctgcgctcagcctcttccctgcacaggtcagagctcgccaccaccgctattcttcgacgtccgaccaaccggagcctccccgcgtcatgctaaggtgccccaagcgctggcttagggtatgtgaccctccctcatccctattttgcatcaattccgctttatcatggtgaatttcatctcgccggagtccccttcgtcggaccgtcacttcttcatagcgtccgaccactgcaacccctccccgagcccgaattcaggcctagagcatccctaccctctccctggaacctatgccggccacagagcgccagattaacccccaccgcagagggtattgctcaccggagcagccctgagttcactcgagagtcaccctccgccgtctgcccgcctcagccccgttcacgccatc

SEQ ID NO: 22483 - DNA, 436 bp, Zea Mays
gtcgagtcacctgctaggcgccccttgaacacacagccgaagccacccgcgcctagcttctccgagaacttcttcgtcgcgtcttgcaggtcagcatacttgaacgtagctatgccaacgacgctaccgcctttatcactgtcagcgatgggtctagaccaccacttcccattattccgcctgctgcaaatcactacgacgacgagaaccaaaaccaaagcggcaacaccagctaccatggcaatcctgttgcctttcccactctctagctctttcgcatgcagcaaggcgaaggtaaatcatcccttcgttaccgtcagcagctacgttaactaactcgccatgccacagggagcacccatcttcgccgccgtaagagtacgcggtgcaagagcagttactactcaagcaagcctgcgcgcattcgatcgcgctc

SEQ ID NO: 22484 - DNA, 493 bp, Zea Mays
gatcctggggcggagggtaagaggacgattggcccggatccccgtgatacggaggcgggacaaactgctcacgatcatcaaaataagtttcttcttcttcatcgacgtcgtctgctgtcgaaaaaggcaccccgtatgcctgctggtaccactcgttgatctccggaggaggaggatggagaggtacatcaggagagcggggggcgaagggagtacccaaggaggaagcttgacgacgtaggttgtcgtcagtctcccgctgacgtcgaggtacctcatggacatccgcagcaatgttccggcacatggagaagaatgccgcaaacccgtgggccaagcgggcacccatcccacggccacgaactcaaccatgaccacgaccacgtggcgtgggagatccgtggccaggggagggacgcgaggcaccggtagcagcagcagcaggaccagcagacggacccgcagatgtatgagcacgagagctggagggggc

SEQ ID NO: 22485 - DNA, 279 bp, Zea Mays
gtttgcatcaggtggtttgataaacgtgcgtgtgatttggaggaaatgcgttggacatggatgaacggggggcccaccctagcctataactccgcttcgttccttccctcattgaatccctcccccatcatctgcacagatttttcaaccaggaaccactctgcattcatggaaccattatttattgcgcgggcgtgttattgaagacttgtaattttccctgctatagtactagtacctgctgccgcggactcctctcctccgctgctatgctactct

SEQ ID NO: 22486 - DNA, 1015 bp, Zea Mays
acgacgcctgcttgaggccatacaaagagtagttaagcttacacaccatactcaggccagttgagttcacgaagctggtgggttggctacaatacaccatctcgatctgagtgtcgtgaaggaagacattcttaacatccagctggtggaccgcctagttagggatagagtcgaggccaggaggtgtggaggagcctgcaagggaaaaggcgttttcatcgaaaacaacatgtcgagacttaagagatgatgatgcaataggtgagaagatcaaggcactagtaccccttgtgatcagagcactcgaggaaaaggcagcgagtggatatgggcccaagtttgtggggagcggtggtggaggtgcgaataggaaggggtggtgccaaaaaggcgaagaaaggagtggatgactgatcaccttggaggggaggtggttcaggaaataggtggcgatgtggataccctcaacccagtaatgagtaggaaggaggcctggaattggagggtgcgaatgaggttggtgatggcgccaatcatgggctcggccttaccgttctgaggggaggtgtacccgcaattgcacgccgcgcgagagaaagaaggcatgagatgtggagttatcaaacttctgcccgttttcacattgcacaacctggatggtgcaaccgaactgagtcaacacccatgcgaataaatgagatagggcggtgatggtgccagaattacgaaggagggggaaaatccataggtagtgagagaaatcatctaggatgaccagatagtactggtaaccggaaatgctcggtatcggggatctccaaaggtcacaatggacgacatcaatggggtgagcggttcaggacatggaagagaagggtaagcaagtctgacgccaagctgacaagcatggcaacgcagtgttgccatagggtaggggattgtcgagccatagagatgcccgagagtctggataggacgtcgtgaccaaggtggccaagccaatggtgccacgtgg

SEQ ID NO: 22487 - DNA, 675 bp, Zea Mays
aagggacccgcttgacagcctcatcccgctcgcgcttctgctctgtggacccagcgggtcaggaccgtcttcccggaagagtcgcgggatcgtaacaaaccgaacggggtggctccgtgggaatcgggggtctttgggcggtggttccttgggccataaaaaccgtgcgcctagttcatccacccccgcaccactgggcgccaccaccataccgccaggaaaccactagagtacttcttgcggcagggcaaagcaagtagggagtcgtgtcgtcgtgccattgtgctcctgtggcggctccccatcgtcacagacctcccgggatgcttcaccatggtgtgcagaggatgctcatggaggcacgaagtggtgactgtgaccgtgaatactcgtcggaagttggattttgggcggagcgcaccgtcacgagggtctgggtcaccgcactgctatcctccgatgagaatcccctcacagcctttaccttcacctctgtgtgatttagcatcgagtgtggtagatagtagtgcgcttggggctagcaatttgtggccggatccagggtgccgtcgcagtgctgcataacaccgtgagccctgccaaaatcccagcacctccaacgctaaacccaccattgataagttcgccctgacctccacactacgtagcacgttt

SEQ ID NO: 22488 - DNA, 531 bp, Zea Mays
gacaagggtgttcaagtcattaaagagatgctcgaacgaaaggtggataagtacaaatgctttcgtcaggacagcaagggagttctatggtttgaagaccgattggttgttcctaagaatctagaactcaggcagaaaatattggatgaagctcatctttccaaattttccatgcaccccggcagtaacaagatgtatcatgatctcagatctttgtattggtggaccagaatgaagagggaaattgctaagtatgtacctgaatgcgacacttgccaaagaatcaaggctagtcatttgaaggtagcaggtaccttacagcctcttcccgttccctcttggaaatgggaggatatttgcatgtattttattgtgtgtttgcccaacacctcccggcaccacgattctatttgggtcattgtggataggttaaccaagacagctcatttcttgccaatacataccacccacaagatagagaaatatgcagagatttatatggaccaaatagtgcgtttacatggaattctg

SEQ ID NO: 22489 - DNA, 517 bp, Zea Mays
cggttagccaacactttggaaattatctttgctatgctgtgtgtgaggctgatgggtctgaagtcagaaataagtgctgcctcgttgttcttcgggatcagacaaatatgtgcagagttaagtttgttgaagtgttggtcatgcatatgatagaaataattcacagccagcaataaatcctctttgacaattgcccaagcagaccgaaaaaacactccaataaagtcgtctggtccaggcgccttctcagcatgaagatcatttatcgctgctagaacttcctcttcatcaaaaggagcctccaagtgggaaaggtcagcagcctgtagcccaagaaattcccagttcaaagagttcgcccgcacaggagaaatgcccaataaattgctataatgattgaaagcgagctgcgctttatcttcctgagagtaaacattccctgtctcagttacaaaatgctgaatgaaattcctcctgcgcctgccatttattctgagaaagaatagcctagaatttg

SEQ ID NO: 22490 - DNA, 617 bp, Zea Mays
tggataacgatcacggggtgaaagatctcgccgtggatgggctggaatgtactgtgtgcgtgatggttcataagtgcacaccgacgacgtggccgagcggcaatcaccggcgtgttcgccattcactgggtggacgccacgccttaggaggtttatcgtgtcagtatgagtcgaggtgactatccaatgaccgtcgtagttcagtcgctctgcggttgccacggtagatcgccgccgtgactcattcccctatcggctgccagcgcaattcgcccaaattaaacaacacctctcatggactatataaattgagcacgccatgagctccgtagggtagtcaagcaccaagccaccaagtcgtgccctcaattgatcaccagagctcgctaatttctcatttcccccaaacctgctttccgccaccgtgaaagaggcctctccatggccagctcgattcaggtccaatcttgccctctgctttcttgtttcagcaccctaacttgctcctaatactcgctgacccattcaatttagctaggcggtcctagatcaccgggaacgcgtttgaatgtccgtcgtgcccgctatcaccgtggacagaacgttttcgagctccg

SEQ ID NO: 22491 - DNA, 585 bp, Zea Mays
caacacgataagggaatcactacaaacttgatcgagccatcataccaggaggatttgacacgcagaacgctggtcgcgcagagatggcggagccacggcggagctttatcacgacgaggaattccggacgccggtctcaacctccgatcttgattcttcgcacacgcactccacacggagtgccgaacacccatgaccccacaccggcctccaaacgacggtgaaggtggagacacggctccgacggcggacgacccacatggaatggttttctcgatcacggggaagggacgactggtttcttgtggcgttcgggtggagtgttcgtgggcgagcaaccgcatttaatgtcccgcccccatggagtcggagtcgcaacagcagcaccggaagaagggggaagagctcgacgtggatctcacgatgcctgttgatgggtagactgcagggatgacaggtggggtcacgagtgcagcgacagagccgcgacgcgagctcgggtaacaggctgccaagcgggtccggttggtcagtggtgctatctcgcagtgcaagtccgggtgtctgatgcgtggacccctgggg

SEQ ID NO: 22492 - DNA, 482 bp, Zea Mays
acttaaccttctgccatcgcgcgtgatcggaggtcgtcgcggtgtaatccatagtaaaattgcttctatcaagtttgcagtatccccagtcctggatagcagtgtttagaatagagtttcggggcaccaggtcatagttggggatcgcgccggcgatgtgccatcgttggtgcgggcgacgccaccgctttggcatgtcggaaggagggagatggtttctggccatcggatccaaatctgtggctacgaattgaagatgcttaccggttcagtagttggatccgggtcgtagatcctcgaaacggacggatcaggttagatctcggttcataacatcgtggtcatcgatccagtattggacagttgtgatgagaggatgagtgaccgtttcgcagatgaaaactgggtcgtcgatcaggagtccagcggttagggtttgattatggcgtggcagcctttgagtcgtggatctctgatccagt

SEQ ID NO: 22493 - DNA, 738 bp, Zea Mays
caagggcgcacaacgacaaaggcttcttctttggccaccgtcctcctcctccctccctgtccatagccacagaggatttaggcaccgcattgcccccttcatgttgtgcatgtgtacctgcatgacaccgccctctaccgtcgttgtgtcatcccatcgccgccactactcctgccattgtgctccgcccatcggtggccagctgtccaccgctctccctcctcaggcgcctataaaaggtgagcctggagctcctctgcaacccgcaccagccacctgccaatctcctctctccctcgagctcaattggagacagcgctgtcaccttcctcttctccagtgagcactctctacctctctattcccctagagaataattaagtgagcccataagattcactacaccctaacgggcacaaaacaccttgctccacctcggatcaccccaaacacctcgtcggtgacctcaccactgcgattacctgccaccccgccgcggtcagcccaccccagctcgatcgctagtcaaattgaccccacacccaagtttgcctggccctgatcatgttgtagcacctccccgattccaagaaaccagaccaccgatggagaactaccgctggacttcacctgcgatcggttttcgctttagccccgaccatttcgcccccaacaccatcatcccctccccctctctggcatgtaggcccagccctgcagtgttatcctgtgttgtcc

SEQ ID NO: 22494 - DNA, 535 bp, Zea Mays
ctgtggagatcaccgttggtatatctgcagaattggctgctgtcccgggattggttgctgaccgggcacttttggggctagattcttccccaccacaggcgtgcacctctcaaccccttgcggtttctcatgccttggacgtggtagtcccacgaactccgtctgaggccttattgcttcctctggatgtggctgtcatgtctactactgctatgtgggggaccatggctccggccccagagcatgtccagggtcccttggcctctgttgatgagctcgagaccgtggagcagctggtgcccagtattgatgatgctcacgctgattcctctattccagccgtgaatctgcctctgcttgttttggaagaaagaggtcttggtgttgctgtggttctagacactgtgcctgcccagggtacccctcaccctgttgagaggcctatgtttgttgagccgcaggatgataccatttttagcagaggtgacctcccttcccaccttcaggaccacactaacaacagattcaaagtaaa

SEQ ID NO: 22495 - DNA, 714 bp, Zea Mays
ccatgactataggaagatctccatcaaaactctgatcgattatgtgtgtcatatcttcaactagaaatatcatgcacacatataggggggctattcctacactctgagttttgttgagacttatctatctctcggatggaacttaaaatcaagataagtcttatgaaactcatctctaaaatccttcttatacctaatatatgaggaagatttgaaaatcaaaacttctcttggataaaatgtgtagtgttgtcatcaattaccaaaaagggggagattgtgaattatctaggcctcttagtgatgttttggtaattaatgacagctatttgtggactaacggttcttggaaaaataagaatgcaggttggaccacatacaacagaaaatcttggagacttataagcattggttgtggatcaagtgaaggcaaaggtataacataggtttttgtttttgccggtctccaggagtttagagaagatatttgaccggattagtaggctagatggtcgtactattaagaggggtcaatgactttggtctatgtataacttagtgcctcataaagcatctagtggttgcatttgaatgaggactaacagcgctccaagtttcgagagttaaaaatcttttcgaaagcgtgtttgaaaagttgctaaatcatggggttggcggaccgtccgggccaagtgcgcggaccgtccgtgatcc

SEQ ID NO: 22496 - DNA, 443 bp, Zea Mays
atgaagttgagctaaaatggagtgaagaagtttgactaagttttgccaaacttgggccagtctgggcttcaccggatagttcgatgtgcaccggataatgtccggtgcccgggctggtgagcggctgaacatgttgctctcgtgtttctccgggactttgtcggctataattcactagacagtccggtgtgcattggacggtccagtgtgatagccgctcatctgtgccaacggtcggacgcacagttggtgcttgccacattaattagctcgacaaaggtcaataggacccactggacggtccggtgtgccaagctaccaaaggagcataatggtcggcaacggtcagctctgccgtagagggaaacatatcgctaactgttcagtgtccggtgtgcaccgggtagtctggtgcacatgcagacagggaagactgattgctt

SEQ ID NO: 22497 - DNA, 641 bp, Zea Mays
ttagtgatttcctttgagtttgattcctgcttgttcaatcacacaagatgagtaaatcgtggaacatctcattttcatgacaatgatctctaccaataccttctgcatgcttttaagtcaccatccagaattgtaatatttcaatcattgcttcatttgcttgttacatccagccatgatcttgaatacaactccttgacttcacacaaaacaaattaacatggcaaatcagcaaactgatcgttattaagataaaaggaatcattacctgtactctgtggcaagaaacataaaccaaagttaaatacaatttgacaaattatgttacattttatgatttaactttaaatattgttatatgaaaaatcttcaatttgctgctaggtttcttaaagaataaagacgtagatagcgtctaaactttctacaaaataaactcttgtaatttcattatgatgtaaaagaaatctatttgtttgacagagggactttgtcatttaatccttttaatgatgttttctttgcaataatgccatgattggtcctacaagatcaatggcgcgatcagatagactaaaccaacataggacagttccagccattcgtccctttcctccgtaagtatatatatagttcacttg

SEQ ID NO: 22498 - DNA, 508 bp, Zea Mays
gaaacgaaattagggcgctacggtggacgatcggaggcgagggctggtgccctggcttcgtaacaacctagcagagcagactggggcatcaatttatagaagatggtcgtgaggaggttgaatttggacggggaagcgcacgcggtgagaaggggggagagtcaccaaggtcgctaacgtggcactcactggctaactgtctacagcggtcactgctgagtccttgcagcttgtgacgatgtggtgaattgattacggcgtggagcaatcgcggtgaatggcgatctccacggcgaggacgtccagccacgtcgcagcgcaagtgggtacggcgactgggcacaacagtgctccgacttcatctgtatgcaagatcttttcaccggcgaccgttatccgcatgccagagcgcacgaatcgcagcactggcaaggatcgcgacgccaattcaccggcggtgagatacactgaacctgatcttgttcagtcactgtaccatcgaaatcat

SEQ ID NO: 22499 - DNA, 471 bp, Zea Mays
gagagagcgagagaagagagaagagagaaattgatcgctggctgtcaaacaggactgggcgggatctgttggccttcacgtggcaccaggcgcatagcagaaggcgcgcccaggcggctgagtgacctgggagggcgagatttctcgccggggttagatttccgccgagcggtcgctgcgcgatgcgggcagctccaccaacgcatcgaccttgggtaagtgctcctccagctgactccctttaccccctggaacctgtaggaccttgtggtagtgtgtgagcgtcgtgtgtctgccgaccattgctcaccagagatcctttatcagtagaccgccgtaactcgagtattgccttgttctcctcaccgttgcgagcaatatgcacgtactgggtttcgcatgatccctcccatcgattaggaccgatagtagattggttgaagcaccaccctgaggtttggcctcaccggc

SEQ ID NO: 22500 - DNA, 512 bp, Zea Mays
ttgggaaatagtcacgtcattagccaactcgtgttaagcaggagtcgattgcgttaagtgattgttatatacatgttgtgtctcggacttcgataataatagactagccgacgtgtatgatgtatagcggcctatattgttgctctagttagccgaattgttagatgacttggttaagctcgtaatcacggtgaatggcttgttgtggtctaaatgcgcatggttatggtcgcggatgaaaagtagtagtgctcatgtgatgtctaatttaaaacgcaaattgttgggtgattatcgtggagaatgcgttgttaattggttgtagtaattttagtgcactaatgacttgaataaaatttgcaagtcgaattgttggttctaaattgattgtcttaactcgaacaaatagtaaagcgttagagtaattcaagtctctcgaacgaggcgattcttgaattatatatgagctgaaatttattgattgctgttttggactgcacacactgatttag

SEQ ID NO: 22501 - DNA, 987 bp, Zea Mays
ccatggtttccagggtctcttttagcaatttcacactgccaagggttatctgtgatccttggccgttggatctctatctaacgattgcgattagattttcataaaacctgaaccagtaaacactgacagccgctggatcaagattcaacttgaatcgataagctacactagccgtcggatcgacgatcctcggccaagatcgaaggaaacataggggtaggctcagtctaatctggaacgttgatcaagtgatcaatgccccagggtcaccaccacccacgtcgagctaagcacggcggtgccactggggatcacggcggattcacgctgtcgaaggtgattctgcactctggtatgacgcttcctatctagcccggtgctacatgatgcctagatgaaagcgagtcggtctagagggttctcaccatgtttttgccatgcagacacccgcccacggcggagggcagcaccatggcggcgccgaccaatggcgagtaattcctcaatccttgcttgctcccatggctccacagaatcacgaacacgatccccggatcacgatgaatcttcctagccttcatccgagtctctggcgatggtgcagcgatcggtcattggcggtgactgggatttctcactccccactagcagcaacggtggttagaaccacacagtcgttgagcacgcagtgccaatgagggatgagaaggggggtgagggcgttgggcgtagggttttatatcccagaagggttggttgcatcgggtccgcaggagccgtgtggcgcggtgatctcagccgcgattgtcgcaatccagttgaggaacaaaactgacggagacgggccacctggtagcgatagtggttgagtcgtagctacgagtggtgtctgccacgtggggcccggccgtcagtgccgaggtgatatatgcgcggtaagtcacaggttgagcgggcccacatgtcgacgcctggagaagagtccaa

SEQ ID NO: 22502 - DNA, 293 bp, Zea Mays
tccttgtgcggcggttcgccttcttcacactcaaagaccagcgccagctgtatgactcatgggactgggcccccatgtcataggatggataccccagtgtgcatcaagggagacttctcgcgacgtttcgaggcgggagcgggggagtctgcctttaaagaggggttcatccctcgagtagcagccatgccttgctactctcccactcgcggcgtcctctcacctctgagctctctgcacccctttgccttcaaggtttctgctttgtgtcatcatagtttaccatggcattg

SEQ ID NO: 22503 - DNA, 700 bp, Zea Mays
tgagtatagggcagataaaatggcttggtggtgcagttgggatgggctgcaccgaatgatacacagtgctggcaagattgttcagccgctctaaaactacaagaaccttagacttcaggtcaggtcgatccttgcttcgcatttccaaacaacggaggccaagctgagttagctcatgcgcttctcgcacaggccaatttcctgcacgttggtccagaatgtcaataaggtgatcctcttccattgctctctcagcagtgtctgctagcccaattggtgactttgcagtcagaagctgcaagaacaccatgcccaaagcgtatacatcagattttgctgaaacttgacctgtcctctgatactctgggtccagataaaacagtgtaccaactagatctgttgattttcgaattgtatgtgttgacgaagtgtcccttaatggaagaaatgttgcaaggcctgcatcaccgattttgctagtgaaatttctgtcaaggagtatatttgcaggcttgaggtcacggtggataattggctttggttttgaactgtgtaggaagataagtgccaatgttatttcccatgcaatacggaaacggtggtaccatgggagtggggcagtgtctcctttgcactgcagccgatcctcaaggctgccattctccatgtactcgtataccaagcaagctctgtccagaca

SEQ ID NO: 22504 - DNA, 486 bp, Zea Mays
ctggactgggcctcatttacagagaagtgcaggggtctcggggcaagaaacctgagacacagcgcacagcagaacgggacggtgggttaatttattaagtccctagggtttcttttgtaattttggacggtcgaaggggtatcgtgcactgcgagccgttggattagacgcaggcgaaccagattagcccagtgctgctgtgaatcggtacgcatccaggatcgcaggatctgagatcgacggctagggttctatgagatccagatacattgttggtcgtcgatcgaccgctcgatccagatcaacggatcagaacgaatcgtggcgaaaaggtatggcaagatctaatctgagccgttcaccccgtgatcaacggtgggtatcggatcaagtcaagcaattaccttgacctaatctgagccctccgctctgcatctaacggctggcgtagcttcttcctcgctctggtcgcgcacagcagcgccg

SEQ ID NO: 22505 - DNA, 404 bp, Zea Mays
ctttaagagagtgggcttgatctcacataaagggaagagtaaaatctgccaaaaagtggattgtcagagttacactagctgaatttgtcagaactgaaatctgaatttcagcaaaaagtgccaagtttggcgctccttggtgatcaatccatgtgtctttagactatgatttctacaacaaacatggagatcaatgttgggggagtaatgtttagtaagggtcatgcccttgaatctgcttagaacagggagaaaatggcgtcccaaaacatgctgtcagactttaatttcagacttggttcagttatctaaaactgaatttcagtgagttttgctcaatttaagagctttcttgtggctaatctatggagttatggactatggtttctatagtaaaatgaaag

SEQ ID NO: 22506 - DNA, 472 bp, Zea Mays
ataccctggcctaggtcaaggacagacgcgggtccggtactgacacgtgcccaggctttatccagtgcgcttccactccccgctctagcggaggcccgatgctgccacatggactattgcccgagacgtaagccagcgggcggagcctgacgtaaggcctctgggccgtgttgcctctgcatttattgcggagaagacacgccgtctgtctatcccgctgacagacgatgtgccccctcagcatttaatgtgtcctgtccactccgctggcaggcggcgtccaggccatcctgcaggcggcgtgcctgtccagtccattgacaaacagtacgcccgtgctgcgaggtgcattgtgtccatcatcacatatacgttgccagggaagcttcccctgcacgccaatactacgcagatcacggatgtcagggcgcaagaagattgctccagcaacgaacattagttgctccaagta

SEQ ID NO: 22507 - DNA, 524 bp, Zea Mays
ttgagctcgtcggtgaaaagatcacgccgcggataggtccgggacactgtggccacgctgtccctctatcatttgtgccgccgacgtggccttacggccgtcaccggagtccgcgttgttcaccgtgattgcgccatgcctcaagcctttaaccacgtcgcaatagctcgggtcgtctatatccggtgatcgccggagagccgccaaggtgaaagccactaatcttgtgcgccagtgacccctttcttctccgaccaccaccgcgctaacccaaattcacgcgccatcgcccccggagcctataaattgagtgtgtcatcgggttcgtaaggtagtcaagcacccaatccaccaagccatgcctccaattactcaccagagctcgccaatttggagttttccccaaatcggtctaaacaccgccgcgtgaacacctcgccgtggctagctcatctcaggtccgttcatgccctctattcgcttgtttcagtgctctgatatgctcctggtactctctgacccgg

SEQ ID NO: 22508 - DNA, 400 bp, Zea Mays
caccatttgaggctttatatggcaggaagtgcaggactcctctatattgggatcagactggagaaagacagttctttgggcctgaacttattcaagaggcagaagaacaagtccgtataatccgggagaacttgagggtagcacaaactcggcaaaagagctatgctgacaatcgaagaagaccacttgagtttgaggaaggtgatcatgtgtacctcaagttgtcaccacttcgtggaatgaggagattcaaagtcaaaggcaaattatcccctcgctttattggacccttcagaatctttaggcgagttggggagatggcctaccagtttgagttacctaatcatttatctgatgtgcatgatgtattccacgtatctcaactcaagaagtgtctccg

SEQ ID NO: 22509 - DNA, 340 bp, Zea Mays
atggcagagaggctctcatagctcacgtggtgtttgcaggcccagtcctctggggtttcgtcaaaggtgaccgagaggggcatgtaggagatgatgtcgtcactagcctcctcctcgctagtagcggcgtccgagtccagcggtgcagggaacatgtggtggggggcagtgacatgcatgaagagcatgtgtggcgaggatagagctgcctacgacgtcactaagctgcgcgagacggtgacgagcagcgaagacgatagggacggtgcatggaatcggtgtccagacagacgataatggtggcttaatcggtgttagatggtaggagcttgtctaaacg

SEQ ID NO: 22510 - DNA, 661 bp, Zea Mays
cggcaagctagtaagccagaagactcggagacagtccatggaacgacaggacttcatccgtgaggaggttcggaagttgttgcacgctggcttcattgaagaggttcaccaccctgtgtggctggccaacctagtcattgtgccaaaagcaaacgggaaactccggatgtgcatcgactacaccagcctgaataaggcatgccccaaggacctgtacccgcttccacgtatagatcagatcgtggactctacctcagggtgcgactttttgtctttcctagatgcctactccgatttttcatcaaatccggatgtctagggaggataggaagcacactacttttgtaacggtagatgggttgtactgttatgttgtgatgccttatggtctgaaaaacgccctgccaacatttgttcgggcgatgagtaagacctttggggacctgatccgggacaaggtggaggtttacgtcgatgacatcatggtcaagactagaaggaggtcgacagtagtagaagatctaaccctggtcttcgacaagctgcgggcgacccgcaccaatttgaacccggagaaatgtatcttcggcgtttccgcaggaaagctgctgggtttcctggtttcataccggggcattgaagctaacccagaaaaatcaag

SEQ ID NO: 22511 - DNA, 810 bp, Zea Mays
cactggattcacccccttcatactaatgtatggatcagaggccatgactttgcaagaactcaagcacggatcaccccgaacaagcaccatggctatgccagacatcgatgaagcaacaacaaatgacctcctcgatggggatcatgtatccgcccttgaagcactgaacaaatatcaagcacaaacgaaggcctggccagacagcgttgttactcctaaagatttcgataagggggacctcgtccaaatcagaaccggcagaacagaatcctgaggaaaactcgagcctaaatgggatgagcccttcatcatcaaaaataaaacatcaccaaacacctacagactcgcaacacaatcaggcgaagaccttgagcactcgtggaacatagacaaactgaggaaattttatttgtaaaccaaccatttccagggccttcgcgcccttgtaacacctacagacacattactctggttgggcccgcactcttttccttacagggggtgaggtttttaatgaggcggtgccatgtaataaagcaacaaggaaatacctcacaaaaaagagacaatcatgatacaaaatgtcgaaaaagaccgtggagtcggtcttcggcattcaataccaagacattcaccacaacggcaagtctaaacagccgttgcgcgcgacaaacatgtcccatccaagcaaaaagggtgcagctggatcagcacaacaagtgcatcacaacacctaagggtgcgaagttgtccgagagacgcccagttctatccaagcaaaagtcgcctaagggtgcagctggatcagca

SEQ ID NO: 22512 - DNA, 988 bp, Zea Mays
caaaacatgtgtcgtgacaaaataatgtttctaataagtaggcgatattattacaaatctaactcaactggaacaatttgaaatagatctacaacgcaaatatattacgtaaataatatttcacggattatagacgacgtggcatgatctcgttggctagagtccggccacacaatgggctacatggctgtcgagtcgtgtacagggtacagacgaactcggccaccagtgtagatatgttctgaccgtgatgcataaccaggaaaacaacaaatataggagtcgtacctatggcgagggcaatggcgatgttgtccagggtatcgctgagagctcggtggaaagaactattctccgttgatgaactcgcacgcgctccacgtgaacgacgactagccacggccgcccaccgagatagaacaatggcatgactaaagtttccctcgcagctacaccttcctggcaatggtggcaggtgatgtcgagctctctatgtcttcggatatggcgaggctctcagcgttctcgtgatcggcccagatggagaacctgaggtacggggttgggttttatattccccacggccaggggagatctgccctgggacgttacaacagacggcaatctcggcggaggttgttttagtggtcaagcgtgcgcggtgttcggacttcggcatggtttgttacgataaggaaggaagacacggttctgaacgagcaaggcgcagagcttcgtacgtgatcctgtggtccacatgtcggcgacggcgactacctagaagtagacgtgtgcatggaaatacgactgcatgtgttgcttgcttgatgtcacacttgtgtcatgctgacatcatgtgcggcaagaggattaaataaaggaaaagaagagatgtggctatggggaatatggcaatggtgctgggccgagcgccaccacaggtaaatcttccttcatttttttctttttattttctgtttcctttttt

SEQ ID NO: 22513 - DNA, 526 bp, Zea Mays
gatccctgggcgcataatcatcggtaggtatccgcgtaacttactcgaattgatctccataccgtgtatcgggtcttggaccggggattgtcgctccctggcatcgcttggtgtgatcccggcggtggaccaccgctgcacctgggcggcgccgcctcgtgcgactgggaatcgggacgacgtgtcgacgaccgttgatccagagatggagggctgggaatagatgtaggagtaccctttcggtgattggatccgaaccgttgggcagatcggatggcccatattggatcacgtctcattaaatactgaccgtagattcatgatctggcggccagtagcacgcaccggttcacatgattcgcaatctaatctgggcccttgctttctgatcgaacgactctaaccacccgataccccttcagcgcgactgttttacagaagagaccctacacttgggtataatcaacccgcagtacacatgctgtataaagtatttacgcagtgacccagaattcttatagaatac

SEQ ID NO: 22514 - DNA, 605 bp, Zea Mays
tagaaattgttttggcttatatagagaggtgatgacatgccaaagtagtcatcgcttcctctatatcttgagtcgggtcaatacgcgttatgtgttcatgaattgggaagtaagcgcatgatggtttcgagttagagattagtggtttacggttcgtatgatttggtcgatgtgtgaatatacatgtgaatatgtatgtttataaaaatgttgtggtgtatgttgtgccttagatagtgataataataggcaagctgatgtgtatgttatttagcgggctatgccgttgctctagttagccgaagtgttagatgggttggttaagctcgtaatcacgatgatttgcttgttatgtcctaaatgcacatggttacggtcgcgggtaaaaattagtagtgttcatgtgatgcccaagttaaaatgcaaattactatgtgaagagtgcatcgatatatatgtatgccgggtaagattattgtggtagatgtgttactaattgtgtatggtaattctagcgcacaaaataatttgtataaaattagtaagtctacttgttggtcctaaattgattgttttaaaatggtacagtgttagaatggttcaag

SEQ ID NO: 22515 - DNA, 548 bp, Zea Mays
gcgggaatgaagatgtcgaagatcggccctggaggccaagtcataccatcttcggaaagtcatccatcaaacagagtcagattgatgccatgaagggaagatattttcgtaaaatgtctattgtgagagctggaggggacaacaccgcccctacaccgaggaagatgaagttgttgtttatagaagctttatgaaggcaggtcttcggttccattgagcaaattttttgttaaagttttgaagacatttgagatctttcttcatcaaattacttccgaagctataatcagaatgggtatttttgtttgggccgtgaggagccaagggctagaaccaagcgcaaagtgtttctgtaacatgcacgaactgctgtacgagacgaaggccactggcaaggagcaatatcacaacaattatggttgttatggcttcgttccttgttctgatgcaagatacccagttccaacatttcgaaaaagatggcccagggcctagatggaggaatagttttatgttaaaaataatctgattgaaagggaagacataaa

SEQ ID NO: 22516 - DNA, 629 bp, Zea Mays
cgctaacagattctaaatttcgaagacatatgaatgcaatcagactccataaaaggcagcaagtccaggttccaaaggaattccgacctccaccgagaaattgatgaagggacttcctgtgtgcttgcgtgcttcaagaccgtgaaacatcaaatgctaccgctacgactggccacttgcatcgcgtgcccccaacgtgcggcggggtcggcgaaggcgcccgagtcggagcaggaactgagacgtcaatttgcagctagagttgatggcgaggtggatggaggagcagcataatatccatccgtctacgacgatgccgcctccatggtcgttgaagcctctcttgccgctttggccggacacttccctccttcctccaccaataaaacagcgcatgaggcaaaaataacgtggggaagcagctagctgaccgcgagctgtggagattgggagacgatccacgacgcgcatatttacatgacagcaggttatgaatgtgggacgttaataatatagcaggaatgagggaactgttggacggctaaaattgtgtttttcctctaaagccacttttagggttggtttaagggttttcttatagatgcttttaatatgtgcatagatcgtgt

SEQ ID NO: 22517 - DNA, 766 bp, Zea Mays
gggagaggagtcaaccagcggtggcttctctaggaagaagtcgtaaggcaggggtgaagccagcattttaccccggggaggccacacgcactcgtgtggctcaaggttgcctggctgtcgtgtatttatcatggtggatgacgtggggtgacgatggtcccaggcaccatcatttaggctacgccgacccctggcttccatatcctggggctcagtgtggctcgtcgtgtagtgccctatgggaggtatgcgcactctggcctagttcgataggccataagtgcgccacaggctaagggacacgcgagccagtcatctatggtgggtaagtccgggaccgggcgcgagatccactcgagtggttcccttccaacacgtccatcctcccttgtcaggcttcaccatgcccggccctaggctcgatgtcatgaggttcgatcgggggcgggtccttctagggttggcgcaccttcctcttctgactgactaacgggccctggcgatcaggagctctttcctcagtgtgctcactgaccagtgggtcctagggactggtggttgttcccccggcagtagcccccgagcccccaaagggggagtatttatcttttggggtggatgacaggtcagatggtgtcttgtctgttcgtttcccgagcaattgtggcgttcccttggaaattggtgccacttctgtggagaccgtccccctcttgggctggagtcgggtgctcttctaccctctttataaacctcgggtggtcgc

SEQ ID NO: 22518 - DNA, 753 bp, Zea Mays
cgcgcgccgtgtgtgtgtgcctgcggggatacacactatatcacggttagtgaggagctacatttggaagaaagctacagcctcctcttattttttgttttagcttctatcattttcaaactacttgtttaaaactccaaggcaaccttgaccgattttatccaatcctgcccccaaatagaaacacgctgtagagactataaatgcagtagtaatgcacacttgagaggggattaatagggtagcatggttgttccatttccatctttattcttgtgcctaagcctaaaacatcaattattgtggaaaggaaggaatgttgcgacaagtgttttcttcagcgaaattgcaatcgcagtttgtagagagcatgttggcactgccaatgatggtgcagtgtgtaccagttttagcggctcctatgcctcccaaggttcgtgctgagcacatatgcactgcaacatcggtatggcactatggtcgtgctttatcggctggagagacaggaattgaatccacatcgtggttccaagcttggcttcacggaaggtttcggtgatcattcaacaccgacacagcaacatataaccaccctagggcagttactaggggctcctagtgagagcctacccacccaggattgcgcccagctactcaaaaaaaccaagggacaaattcccactttcgacacataaaaaagaagcaatgcacgttatttaaaatgatagttcatatacgagtgtttattgtgta

SEQ ID NO: 22519 - DNA, 425 bp, Zea Mays
ctccggtgaggcaatgcctcggctcaagcttggagaagcttcacaacctctcgggaaagctgcccaagggctaggatgaggctaggggtcgttagaaaggattggacacaacggccatgctcagacaatgatggcgggcggtggcgcttgctttcaactgcgaacaccggtgatctccggctcgggtggggatttgggtgcgcaagtgcatactactaaggcctttgggggcacttataagtgagggtaaggtgcagacgcacggggcggggcgaccacacgcggggcgcgcgctgccgcggccagtccttgctcaaccggtcaggcaagcgatcgaacacgtggcctcgctcgatctggtcattttcaaacgctaattggctcgtgatcttctcgtaacacgtggcctcgctcggtccctgcac

SEQ ID NO: 22520 - DNA, 378 bp, Zea Mays
ggcgcgacggctccagcactcactcactcagctagaggctactactactgcactccactggcttgtggttggctgctgaagtgagcgtggaacttgcctggatgcaccacccatgttgcatcccgacgatcagagatctatttcgcgcgggtggtggtggtggggacagtgtctgtccactgaccgacacagaccttagcttccaagaagacgcatcgcatcgcaattcgcacgcaccaatggaagagaacggataaagattgctcacccccctagctcttctccttcgttgttcctcttgcaataatgcagcaagagcttgctagctcgaagagagtaagtgatcaaggtgctactgctgcttctaaagcgtcgtcg

SEQ ID NO: 22521 - DNA, 825 bp, Zea Mays
ggcacgtacatggtgtccgcctgttaggatgggccaccattaccatagtggctaagggtagtcccagggtcaccttgacccagcagtagtgagtacctcaatcttgaggtatcaacacagtgataatcaccttggaagttcattgattagagcgacaactgtttagggttgggaacgtgacaacatcggctaaccgatgataaaagatctgtttaattcgctacctaacttgttatgggttgtttaaatttccgtgtctaagattaatttttaattcagacgactaacattaggtaagttttgtctcttgcaacttgtccgttctctcttatcatatttcatatcctaaactttactttataatgaaaaacaatatgtggttggttggtggtaataccgcatgagcgcgagtgcacgactggtggaaccaaaccaacttcaagcgagatccctgacacgtcaccagcaaaaaaaaatctttgtttcatcgtcagtgaggaggaacatgagagaggagagaacgggtggcgcgatgcgacgtcggctgtcgtgctcgtgaccgcaacctcctaccgcgatcccgatctgccgctccgtccgtccggccggcaagtccccgcctccgcctccgcgcctgactgtcccctccccaccatttcattccaattgagagccgtggggaccaatcaaccctagatccacctcgtccctccacgcgacaggagaggtatctccctgatccaactccgcatggcctcctcctccttcgcccccgacgaccagaccgacgccgacttcttcgacaagctcgtcgacgacgacgac

SEQ ID NO: 22522 - DNA, 529 bp, Zea Mays
ttcgaatattgaagacaagctagtgtattttgcacttttggatgcagtgtcgttggctcccattgttatagagaaaggggccctcgttagttactcagggcgatccgaatgttgcaccgcctggttgtggaaaaaggaaatgaagggcgtctagtaaacaccttatgtctagtttaggggcgaactggcgatggttccgtcaattgggcaattgggggatgctgctctgcttgggtcgaggtcttctgtgcggggatgtctcatggattgggccactatccctgtcttcgagaggatgagattaggcgtttatttaaggttgaagagctcgagctgctgttgtttgattataggcagcttggccttcttcccaagagggagcgccttagcccttgcaataacgtttctgcctatttttgttttgtagatgttcgtgtttgcaatataatatttgttttggtttcttcgccggtctgcgatcgacaatttagacatgaaacactaccctcgtcctccttggcgattggat

SEQ ID NO: 22523 - DNA, 714 bp, Zea Mays
cttaaatttccattagaaagttgcgctttaaaggaggtatcctccgtattcatttgagatcttctaagctggtattggggatattttattctgttttcttcttaattaggatggctaataccatccaaacaaagagctattgtctccgtttgttgtgtaactaggatggcttacctccaccccgaaaaagaatgcgggtctatgcgcttcgacaagcattccttttgcgacagtggtacctacaagtaaccagttatgtggggattgattacattgtgcttccactataaactgcacttgttatcttgataatggttaaatccgagccactaaagtgacctttttctcttaggaccactatctgaatactcctgcccccttccccccaattcccatggtggtttttaaaggttggttttgctgctgttgcaggtaacgagacaactaatgtactctttgaattggttaaagcttttattctgttttgtactcgtgtgctcttatctgcttgttgttactgttccgtaagaattttctttatccacaccattgtcagataagtcatgaccaagaccaaaaaacaaccagataatatatactaatagggtcatcatatattgatgaacaatggcacatgaatatatcacttctgttgctagagcaattgaattaacttacataaactatttttaattgaacatgcatggtcatgat

SEQ ID NO: 22524 - DNA, 910 bp, Zea Mays
ggtctgcccgcgtgcacgacggaaaccgtgaccacgagctcgcgttcccgttcaaccctggccgaattgaccaaacggtggccacgatgagcatccagttcataccaagttgcgaaaacggcacttgagaggcgtagaaccttaccagagtgggctggccacggacgagctatccacggcggcttagagaccctagttgggggaaaatggtgtcgcggcggctctaggcgaaattgggggtggagattggggctacacggccgttaggaactgtagtttcaccgtgtatactcaatttgagaggagggggcggaggctgtgcgaatttgggcttggatcatcacactgggtggaggtgtgcataccctaccgtggatcatggtgctatttatagccacggcggcccggccagctatctacggccatggataacttcattagtgcatgcataccacgtagggaagaggcacagtgagggagatcgaggcatgggtgacaccgcggcaaaagttactgagtcacggtggccgccggtgactaactccggccacgctcgactgggttcacgggattgcgccacgttcgaagttatccatccccggattgattcactggatcgcgcgagcccatccgattcaatagtggccctgatcttatcccctgtgttcttcagatatttcagtgctttggatctttaggatttgtctgaaccgaccaccttccaacctcttgatctcttgattcttgctaaggacagagcaaccttccttaacaaaatttattcactaaacatcagtctacaaatttcatataggatacttgggtaaaaatcgaacgaattcaaagatatggcgcgcccaaattggccccatatcactgtgaccatttctggttgcagtttcagtttcag

SEQ ID NO: 22525 - DNA, 904 bp, Zea Mays
agacgggcggctcaggtgccaccacccagggcggtggcaagaagaagaagaagaagaagaaccgtggtcatgataggccacaatctggtgctctggtcgctgcagctgtgactgggggccaggatgagcgcgacaagcgcccccggcagtagggaagtgacagtgggttgtgccttgtccaccccaacagtcgccacagtgcctcgaaatgtcgggagatccagaagctcgcgaagcgcatcagcgagcggcgcgagcaggcctccagggatggctcgccgcctcgtcaacggcctggcaaggagaaggttgatgaaggcgacctgaccgcgggagaacgggacctcgggtatcaggcccccgagcaagttctcaaagaaatcctcactggagacttcgactccgatgatgacaacgaccgccacaagaagctatacgttatgtatggcggaagctgggagctcacctcccgtaggaacgtgaagtccttacgccgcgaggtcctttcgatgactccaggggtcccgaaggcagccccccatcagcggtggcggagcaccactatctccttcggggcatctgactgccccaaaaacatgacagggctggtatactaccactcatcaccgctcctgtcatcgccaacatgaagttgcatcatgtgctgattgatggtggggctgggctcaacgtcattagccacgctacgttcaagcagctgcagatcccatggtcccgactggggccctcacgcccattctccggagtgggccctcaaccggtgtatccccttgggagcatcgcaccctcggttacattcgggaccgaggagaacttccgcactgagaacgtccagttcgacgttgtggaggttaacctcccttttaatgccattattggcagg

SEQ ID NO: 22526 - DNA, 360 bp, Zea Mays
tcctgtccactccgctggcaagcggtgtccaggccatccggcaggcggcgtgcctgtccagtccattgccaaacagtacacccgtgctgcgaggtgcactgtgaccatcatcacttgtacgatgccagggaggcttcccctgcacaccaatactacgcagatcgcggatatcagggcgcaaagagattgctccagcaacgaacattagttgctccaagtattacatccgttatgttcctgggcccacatgtcggggctcagcacccttgtacatgccccccttgggctataaaaggggaggcacgcagcgttacaagggaagaaaaacttagactcaagcacacttagacccagctcagg

SEQ ID NO: 22527 - DNA, 330 bp, Zea Mays
gataccttcttgatttggttctttgattgagtgatgtatttgtggggttatatccacaataaaacctagtatagtaggtacattctagcatgtaccaacatagctgtagtatagtaatgataggtaggtggcactctaatcaactgagctattttgacctaaaaagccatgtgttgtgtaccgagctatctatcttatctacaaatctctcttaccctatgtctctaacccagatggtcaataccaggacagggggaggagttgatctgcctgcacgcatacgtcgaagaagggcagtaattaattcagaatcgcagatgaatcccccaa

SEQ ID NO: 22528 - DNA, 643 bp, Zea Mays
ggaagaagaagaaattccgctgatccgtaagaatagtcgtcaccacagggtcagcgacattcccatacaagccttgtcagcgcttgtcagcctccaagggttgtcaatatctgattttgaccaggcgctggaagagatcatccctgaggaccttctatcagagtctcctgaagctgacaatcccactatctgttcatagatcccagatgatggtcctctgccgcgtgatcctgccgggcaagaaatatcccgcgtagtttctcgtgtttcgtcgaccctggagggcggtctacctcgtgaagacgctgatctgagtcacctggctcctatggacgtggctgagggatcttcagccttagaggtggctgccatggaggacccagcccccaagggtggtactcggagcgatccagcccccaagggtgttgaggcaggctccccttctactacttccatggacgtccatgttggatcgctgccagtccaatccaaggaggccgtggtgacacatctatctacgactctcactggtctggtcactttagagaccagtgaaccagacgccaggagtctgccgcctgctgaggttcatccgagtcatgcctttgatatcattcccgctgatctcccctcgtcaagcaat

SEQ ID NO: 22529 - DNA, 666 bp, Zea Mays
actcacggtggtttggacgcgcccacgtcgcgcgtttccctccgtagccttggacgcgcccacgtcgcgcgtttcctagccactcccccatgcgcccgacctccttctgagcctgcacccactcgctcactcccctcactcagtagcgctcgccagcagaccccctcgcaccccctctctcgcactacgcgcgcacccgtggagcaccgccgttgtctgccgtccgttcggaggccgctgtcgagctcctgtcgcgtccattgccccagtgagctccgcctccttgtcagaaagacaacacaccctctggtttgcccccagcctctctatttccctctattcgcgctcaccggaattctcgtcgcgtagtcgtgcctccgccgccgtcgaccaaggtccctgctgtgtcctcgctgttgctcaagcactccaaagctgtctctcgaggtaactaacctcctcatgccattaattctacattccctactctgttgtctgcacaatcactcgccggagttgagttgcaccgccgtcgggccactctgttgcggacagtgccctctggtgcctcaacgctagtgtcatgcccaaggctaagcccgccgtgtcaccccgaactcgcctaagctttttcctagcaccccagacctttgtcgtggcctcgcc

SEQ ID NO: 22530 - DNA, 472 bp, Zea Mays
aaagaatactcatgaacaatgatcatcttggcaatcaatagtctagtgtgctcatgatcatattcatcagggttaacaataatagatccatcagttgcagtaaatgtgagagtaccttgaggaagttgagattttgccttagccaatttgttctgaaactgtgtgcacttctgtatatgacgatttaactgtgaagttgccccctggatggtatgcatagcttttataatagaatttgcatttggcttttgtcaccataaccccaaactccttcttggactgaacatggatctccttaaaatatttccagcaaccagcacgctttcctctctttgacttatctttggaaggagacggctgactaccacccttcaatctttttatgcctcgatttgtcttctgagcctttgacacatgattgcccttcgattcctccccctcctcctcctctgcatcatcatcatcatccccc

SEQ ID NO: 22531 - DNA, 448 bp, Zea Mays
ttgtgttgaaaatatttttcatgctatcaagctttgtgttgggtttgtcgttttagctttctaattctgtgaccgtaattgcttttgagcttcggctttttgttgcaatcatcgctgaaatggccgaagagaagaaaagtgtggatcccgcactcgctggtttctatgaagccatagagaggaccaatgttgagaaaattactgatgagatgttagctaggctatctagagactcaagtgatagtgagagttgtgatattgagagtgacaacgatgatgccgaagatcggacatggaggccaagccatgttgtgtttcaaaaatcctccgttaagaagggacacattgaggcaatgaagggcaaatattttcatgatatatctattgtgagtgctagtggagagaacatcgttccgcttcctgaggctgatgaagcggttgttttcaa

SEQ ID NO: 22532 - DNA, 271 bp, Zea Mays
gttgttgccttgttcccgccagtatatggtggtgcccacaccataaatgcacttggtgtgatctcacagtattacaacctctcctcgtacaactacaatgtcatgcacaaacatcaagggatacaatgttgcgtgcaaaactcaagggatatagtgttgcgcgaaagcaccaaggattagaggtgtctattccccacttctaatcactacgaaaaaccaagagcaaacactaatgataacaatctaactaacctaagcacttcataaacac

SEQ ID NO: 22533 - DNA, 395 bp, Zea Mays
gggaggggcagttggtcgaggtcaacgagggtgtagcgcgtggggtactcgtaggtgtgctagagagcaaggagaagagctcacggagaggaggtcgtggaggtcctagagacaggggatgcgggtgtggaccgacgccgtcgcagcagcagttgcgaggacgaaggcgccgtcacatgtcgacctctcgagagaccgatgtgcgagggtgagctggaggggggctccactggacagtgagagcgttggtaggggactgaaacaccaagttgggccgggccagagaagtgtggcgtgatggccatgctagtgggctgcaccaaataacacaacccacacgtcgtcgtcaccagctcaccgcggcacaaaaattgtaccatatcggtcagtaagtc

SEQ ID NO: 22534 - DNA, 1362 bp, Zea Mays
cgagaatttacccgctcgttattgtaataaggggcccacgtataaacggtccatgttatagggtcccacttgtaagccgctatgagggcagagttgttagtgtgtctgtgtgtgcttgtaattaatcacgttgtaatgacccgctgtaaccccccaagggagaatattccagggataacgtaggtaactgagggcacaatcgtctttgacagggtagagttgtccctcggttacctataattacccgcgtacaacaccattgcgggggacgaaaaaacactattaccctaatactctgcattaaacgacatcaaactatttcctgttctcccactgtttgagcaaggcagaccacgagttagcgagttccaacattcattaagtctaaatcgtcagattttagagtagatctgtcgaattcgatatggcagggtttgcttggacacagaacactgacatctccttcatcatcttcactgtcggtctcacctttggcatcagtattacttttcttcagaatgtgcttttcttccattagggcgacgatgctagaatctttcattacttatgaaataggagttgtttcagttgtatctacttccccaccttcgtttgttaacctagtagtcgacctaatcctggccattgcaagttgagtcgaagctaaaccaaaaattggaaaatgatttgagacgaagcgtgattggaaacttggaagcacgaaaacaccttcagctgcagtaaaaaaatttggcagcacaactacaccagtgcaatgaatgttgtaaaatactaaaaccaaccaatctgcttatatagccttgtaagtggagaaggcgaaccatcgtgacactcacaccaactgatcggtagaccaacggaacccatgccttttatttgtttttttaataacaagctcagagaatgtgttttttggaccttcggcacatagaagccttcgtacgtttcgtggatcaagcacgttataaaaaacgatctagcacctcgaaggggctactgttagggtctccttctgtcgaatgtcctcgaaacaaactaactgttttaattcatttaacaagcgtactgcaggtctaaatgccgaaggtaaaatatcgaaccgagggacgcaaggtatacgacaaagtttcagcaatcattatgatcgtagcttcggctcaagttaattccgaaggtctcgcagcaagccaattcaatagtagaaggacaactttatcctcagaccttagtgtttgcattagagtgaatgtatagagattaggggcacaattgtaatttcatctgagttgtgtgctaggtctataaatagatgaagagtgtcccatgctgttcacgggctgg

SEQ ID NO: 22535 - DNA, 874 bp, Zea Mays
caagattaaagctggatagtagaacaacaactttgttaaagatagattagcaagttatcacatgaaaatttgagatacgagccctacaaaatggtctgtcaaacgctctgatggtaaccaccatggtacagtgactcaacaagatcacaagttcatcccccctcgtcgccggtgacctttgcgccgtgatttgcgccatcgccatgattcgtgctctctggtgaggggataatcatggcggagtaaagatcttggcactagataggcttgggctctgtcgcggatgagtttcaccgtacccacttgctcgtcgatcagccgggatagacctcaccgcggttggccacttaccgttgtgtgccacgtgctcaagcgttgtaccacgtcactgtgaatcgcgtcttgcatgctcggtgatcgccggagagccaccacggtgaaagccactaagcttgcgcgccagtaaccttcttcctctctggccgccagcacatcttcgcaaaattggacgccaccactgagggagcctataaattgtcgcccccgcctgctccgctaagtaattgtgcacccagtaaaccaaccctcacctcagatcgtccaccagagctccccaatttgggatttcccccaaatcaaccaagaacatcgtgcggtgtgacctcgccatggccaaagtgtttcaggtccgttcatgtccgctgtcctcttgtttcagcacccttacttgctcctgatactcgctgacccatccgatttagctaggcggtcctagatcaccgggaacacgtttactcatccgatggtccgcgctgtctccgtggaccggatgatttggagccccgttagtaaaattgagtgaggggaaatgatt

SEQ ID NO: 22536 - DNA, 507 bp, Zea Mays
gacgaacaccacatctgattcgaactaaacgccaaataaacttagcaagttggccgtggaaaaaagacgatcgattgtctcattctgggtacaaaaaaccattttgcatttcccttccaattacgcttgagtaaattatctttgtaagcacaacaccactatgtaaataccacatgaagattttaatcttcaaaggcatcttagccttccaaatgtctttgtgccaccctacattgacattagttattagccccttgtacatcgaatgaacactaaaggacccgtccgccgataagtcccaacgaaacgtgtcactcgctgtgtttaatcgaacatgaacaaggtgagccactaaatccatccattgttcgcgtagctgccccactagacctcgacgaaaagaaatattcagcggaatggtttggaagatattagcaaccaccacattttttcgtcgaaccaatgcatatagttgcgggtatatttcttttaggatccctatcctca

SEQ ID NO: 22537 - DNA, 603 bp, Zea Mays
cgaaggtatcaagacgagcactcacgaatttgacgaaacctagtgctagatgcatcaggggtcagccggggatagggaacatgtacaactgtgtcccccatctgattccttttatacctctaaggcctgcctaagccacctggcgacggccacatctcagggagaagtgcagcactagaggaagaagggctaaccctcatccaattcagaggtatagctcgcgccataagaggagcaactccgtgctagagataagaaccaatgacgcccgcacctataatgcctttctcccgaaggatgagtttgccccttgagataattagagatctagcccttctcaccaggtatgtcatccagttggggagcctcgagcagaacgtccaacacaaagcagagaagacttggtcccggtatgatcccttgaccatagttctgcaaataaaaccattgttgatgccagcctctgtttgacaacgaaagtggaaccgggttatattcgcacgacctccggttgtgtagacagatgctcgagcacccaattggccacacctccatcgctctccactcttccctcttccacagctcgacgcagaaaaaataccg

SEQ ID NO: 22538 - DNA, 433 bp, Zea Mays
acttgcttggtagtatcagggagaatatgtgtatcaagatgttattttgagggcttgtttggtagcaagggattttatgccccctcaatccattccaatccgcatgcaacaacacaagccctgagtgattctctgacaaggaacatatgttattataaagttgtacaggtagttgtattcaacatgatgttagtgcgagcaggattatattcaggatttatttggaaatgtagttctgaggtccgaatcaatcccttggtgttggttgatttgtaaacctacaagttagacttaacatgcatctgacagctctaggcattccttattgcattgggcatgggctgattgctggtatgagctgatctttggaaggtttaagcacagtgggcatgggtatgaactgattggccaagggttcacactgtttttcatg

SEQ ID NO: 22539 - DNA, 405 bp, Zea Mays
gttaaggcagtggatgccggccgtctataatcacgtcatgttggtatggtatgtacctgggaagcagaggattgtctgaatgaaagacgttacggggggaaagctccatttccactcaaatgttccaacagatagatttggagggatgggtgttgagttatatccacacaacgaacccctacctacgacgagtgacgacagggtccgtttccgtatacattgtatgtagtatacagagctgatggcatcttgtacgcacgcacatatgacacgaacaagctcgtacgtacgtacgtacgccatgtgtggggcgctcgcctcgctctcgtcgtagatgacacgccgcaccgcagcagcaacaacacatgtattttgttttatgacaatgtgacggtggactagtgg

SEQ ID NO: 22540 - DNA, 329 bp, Zea Mays
agcaaacacccccaggtgctccagcgacgacccgcgaccctcgaaccggcataacaaacgtggagcacgccatgaatacgatagggaaataggcgtaccgtggggatgaggaggtcgacgccgatgatgtcactgcgccatcggacgcgggcgggacacgatccgcgcagttgaacagacaatcaccggggttcctctacgcacgtaggccaccaacggcttgttgcccatggattgtcctcaaccacccctcggcacaagaacgctgcgacacggtgacggcggcggtcatggaatacctctccccctctcacactggcgttggtctg

SEQ ID NO: 22541 - DNA, 564 bp, Zea Mays
ctcaacaagccccaggagtcgtgctcggtgagttcctagttgaatttactgtcgctactgtactttttgatcccggagcatctcactcattcatagccactagttttgtggaaaatcatggcattcccactacacacctagaaactcctttggtcacccgaaccccagggtcagaccttctatgccatctcaaatgctctcaagtcaggattcttttaagtggggtagtgttcttggcagacttagctgtcttgccatcctaagggattgatgtgatcttaggaatggattggttaaccaagcacaagggcatcataagttgcgcagataagaccgttcttctcactgaccaccaaggaaggtcagtttcatgtcaggctcaaccaccctcccaagatccaatggtgtttaatcttgcagcagaaagcatatctgtagtagaagaattcatgcatgtattcccagaagaattgccaggaatgccgccagaaagagaagtagagtcctacattgatctaatcccctgcactgcacccatcgcaaagagaccataccgcatggctc

SEQ ID NO: 22542 - DNA, 416 bp, Zea Mays
gcgttactgtcgcggcggggacgtggcaaacccgtgagaacagctatcgcttgacgccgcagttgatcgccagctaaggccggcgatggttatcaccatggccgcgacagtgactcaccgcggctataaattcaccacatcctctctcccttcactcaaatcaaccgagctccgaccttcgtctctaaattgcgaagccatagccaccactcccatctccgattagccccggccggagaatcgccgttttcccccaaatcagtttaccgccgccgtaaaagcaccctcgccgtggccagccacttctaggtctgatcatgctctctgcggttctgtttcagtacctgtgtgcattcgtgatgctcatcaacccacccgatcgaactagaccatcccaattcgcgggaacgtgtgct

SEQ ID NO: 22543 - DNA, 423 bp, Zea Mays
caggggtcacataaccaaaatgatgatgtctgggaccatcaccgtccccacgtcatccgccacggtaaatatgagacatctaggtagccccggcaccacgagtacgtgtggctccacccggggtaaaacacttgttttacccttgtcttatggctccttcccagggaagccatcgctggtcaacccctctcccagcctataaaagagagaggctggccttagggcaagggagatgaaaaggagagagctcttggggaaaccgaacgcctcagacggacacgagcccacaaggacgaataggaggaggaggagcgtcgtcgaggactaggaggccggagcctcaccgagccaagacttagctaggactccacccagcagcttctaagctccacttccaccccaataaatagacttggatagcct

SEQ ID NO: 22544 - DNA, 570 bp, Zea Mays
acgtgattgactctatggtactgatccttcttctgccgtttggtgttgaagtctacacttgatcctccggtaatcatgtggatgaccccacgaaaaggttgttcagcgaagtcctcttgtttgggtgctagtgggggtggtggaggattttggtagtgtggaggtggagggaggacttggatctcttggtgttgctagtacatatggttgggctagttgggatggattggttcattgtggaattgttgctggtggtattgctgggatggtaggtgtgcgcaacaaattgttggttgtcggctggctgatttctggctattatgtctttggtagccttggttttggggcaatccctagtgggatgtgtgcagtcttcaccatgaaagaggcagtagaacctttacggctccggagctcggcctctgcctctgcctctggtgttggcgccactgccctgttgtgtggggtactcctggcgacaagctgtgtctccggtggggtgttggttgacgatgatgttcacttgttgctggttgcggttttgtcacacccgaatttaatggacaaagc

SEQ ID NO: 22545 - DNA, 518 bp, Zea Mays
ttcggtgaaggttatcaccatggctgtcgatgtagatcactgggcttataaattcaccgcactctcacccccgtcatccaaatcaaccgtgcactactcttcatcccttagttacaaagctaacggctcactagccaccctgttatgtccaccatcatcagagatcatcggatttccctgggatcggtctcttccgccgccgtgaaggacccctccgtggccagccctcctcgggtctgtactcgcccatttggctcttgttctggcttgtctttaacttcctattgctctcagagctggccaattgaactttaccaaagcccacactctggaacatccagtcgtcccatagaatgccgccgcggacaccctctctgttgaccaactcttctagtcttgtttagtccaaattcaagcatgtacttagcctctggtgaacccgtgaagcttccccgagcttcaattttagcatccatgccgttagttgttcagaactcgatcaccagggtcatttcgcc

SEQ ID NO: 22546 - DNA, 386 bp, Zea Mays
gcaccatccatctcctgacgcattacgacgatgaaactgatgtattataggagtagagagtagagactacttccggacaaccaaaaaaattcttataatcatcaaaatatttcaaatacaatctcaattgccttttgtttgacgagttcatgacaaatggaaatcaaatacaatttcaaagacaatctcactggccctaaagctttttgactatagagaagtccgtgcataatggaaatcagccgagtctcttgagtcgtgacgatcgaagatcacagtaccaagataataccctcacaagataacccttcttgtcagttgcatgtttagttccggctccgcgtacttccttctgctcgagatcttgcatactaacgacagcgcct

SEQ ID NO: 22547 - DNA, 395 bp, Zea Mays
aggtaccttctatcggatcacctcgtcctcaatttcgttttgcgcacgaagttaactgaatccggtggccggggtgatagaatttgatggagctccggcgtggtggccgccatgagcaggggcgctccccagctcggctctgttgggggaggaagacgcacagtcaccgttgatctgaccatcggcggcccagattagatcgactagacaccggttcggtggatttgatctgaccgtagagtcttggatcgatggcccggatcggagtaggtgcgcaccgttagatggcgatctggtggccaagattggataccggttcataaagggtcctaacttaatccgatccgcagaactctaatcggacggctcacgtggctagataccccttcgtcgat

SEQ ID NO: 22548 - DNA, 704 bp, Zea Mays
gcagtccaaatgcacgaacgcgtttgtggatgcggggcgagcagtaaaaagcaaaggcaggtccatttcaggggaaaacacatttcagagaaaaacacatttagggtttctaatgtggcataataaaagagatcaaaaggcatctatgccttatagtgtaggtagactaaaaaagggcagcaaaaacatgcgtgctttcaagtgtacatggagaccccattgcaaagattcaaaaccaaacgcaatgtctccatactggaaagcaatcagagtttgggacccttctactgagcaacgaatagggtaaaggaaagtgaagcctgaaaaggatctatttacctccaagaaacgacggcggcgggggctggacgcacgttgaggcagcggcggcgtcgctgtcggcgctagcagcgtggtcgttgtggtaagaaggagcaagcagaccgagagccttctaggcggtgccggcgtgttttcctttttttttattgaccagaggaagctagaacggtagtggtagagcaaggcacgtgcgcaggtaaagcaaaagaagctaccggcagccacgcgtacgacgacgatgctaaacggcgtgtagacgtgcggctcaggtttttcagctaacgtggaccgtgcgtacgtggaggaagccgcatcggcttaatagaaagaaatacttgaaatcttagactccgacacgcttt

SEQ ID NO: 22549 - DNA, 365 bp, Zea Mays
gaaaaatttgggttcaattggagcatttttggctggtttgggcatttcaccgaacacgtgggggtggagttttagggtttcggggaaatggccatttgaggtgggaaaaccctcccgaaggagctaggaacctgcaaggatacacaagaggcacaaaggaacatttgcaaccagttggtttcacagggattcacaagaaattgaagaaaacacataaggggaggaagagaggtgcttcactggtggcaggaactcagagagacagggaaaagagagagaaggggatacacaccagagatggaagggaagatgcacttggacgtcgctggtgaagagatcgccggagaggaggggaggtcgctggc

SEQ ID NO: 22550 - DNA, 494 bp, Zea Mays
tatacacatcgatgacaaaaatgggtagtccgtcacaacacaacaaatgtgacgcggcccctatgaccaaatcgaactcgtcacaaattcgtcacaaatctttatctgtgacgatatatacagattccgtgacgcaatacgaacgtcatcgatgataagatctctactagtgatagaactcaacatacacgctgtcagtaaagagtttatagcatcccagtcttttcattcaacacttaacttatccttgggctcaacatctcctttaacatagtccctcgagtctccttgcctttaataatcgcaatgctcttctagaccatgccaaataatttttcatcccttctaatttaatatcattttgcattagctctaacttcttaactggttctatatgagcaatattatctttacttgaagatggagccacatccctttttgttgacaacaattcgacccatttaccaagaacctgctcaattccttgatttccc

SEQ ID NO: 22551 - DNA, 363 bp, Zea Mays
tctttaagccgatgttggacagcggaccgtcttgcaaggcatggtttggatcatccggagtactgccccctatgtgaccaggaaaaggaaacagtgcaacatctcctagtggcttgtgttgttgcttgacaagtgtgttttttccatcctgggtttgagtggcctccaactcctcactcctgggattgctgatgaagtattccaagattggtggaaagcagctgaagcaagagtttgtaaggagaagaaaaaaggctttaactcgctggtggcgctttcttcttggaggatttggaaacatcgaaatgcttgtgtctttgatggggtgcccccaagtgtatctaaagtcattcaggacattaa

SEQ ID NO: 22552 - DNA, 277 bp, Zea Mays
gaaccagtgagcaagctgaggagcagaggggcagcacaacaaactaggagtaacaagcataggggctgctgaatgaggggtggagggaaaggacacaccatcatgaagagtagagcagcttgacaggtttactagagaggaggaacgacatgcaggagacaaggaatagcgtgccgggcaggaggaatagcgcgtgggggagtaattgcgcatgggaggatgggagtcgtgtgcgggaagaacatgagtcacacatgggaataattgtggtgccata

SEQ ID NO: 22553 - DNA, 439 bp, Zea Mays
tgcttgggtcgccgacggagatagaatcaatgaactgagaagggacatccgacatctgcaggatcagctcgctgatcgagacttagcacttgactgggctgtacagtctcgtttgctaatgtgtgctaaggaagcaagggctcaggcccgaattaaagaacttagctcgactgtcgacaacctgcaggtttactgcaatacgttgcatgaggaagtccatatactatactcacaactacaccctagtgagcctgcacaccctgctgaggcggaagccggaccatctcacgttgcgggacgcgcgctgggtggggagttagacctttttgagccccctccttctttgaggttggttgatgtctggactcccacacctgacgatgaggccgccaagagtaatggcaagcaggaataatggtgtaataaaagtagagtagtg

SEQ ID NO: 22554 - DNA, 380 bp, Zea Mays
caaaaaggaagggtcctcaaagaaatatttgactgaggatcaatatcgtgaggttagtattcaatttgtttactctttttgttaattgttgcaattgatacaatatgtaaccttgtgtgtgcaggtgatggttccatggatggcgctcgtgcctgatgcatactatgcttggtgtcgacattgggctttcgaaggcttccagaaagcatcgacacatcacaggcaatgtcgaggaaccaattctaaccacaagtttggcagcgacgacatgctccaaaaagctaaaagaatggtaagtttgatctagctatgtcgatcaccaaatagtatgattgcttatgaatgttttttgtttatacaggaagctacatggccaaaat

SEQ ID NO: 22555 - DNA, 657 bp, Zea Mays
ccggcgttgtgattcgtgctcagtggcgcgcggataactactagaggtaaaagatcttggtgtagagatgagctcgggtcccgttactgctcagttcaccgtacccactagcatcatgacgtggctgagccatcgacatcgttgtgattcccggtgagcttggttgcgccacgatgtgaccaattcaccacgtagctataaccgtggcaagcctggagttactgccattgaggcgttgtatcggagggcaccatgacaaactcgtccagtggaatatcccaccgccatcgtggtcgtcttcgtctcaaattggcaaagcacgtagccggcttctttaaattgagcattacccttgctctgcctctctgttacgcgctcataccaccctcagttagcctctctcgtgcaccgtagtccccagtcaccggattttccccaaatcgggtcactcacgccgccgtgagacaccctaccatgatcagccgttcccaggtccgttcatactcctctgtgccatgatttagcatccttgaatattaacatagcttgtcggctcaactgattgaacactaccatgatagggcatcgagaacatcacctcgccaccgcggaacacttccgagagcgcacacacgtcgacccactctcccacacccg

SEQ ID NO: 22556 - DNA, 633 bp, Zea Mays
aggaaagcagccgaggcacctccttacccaaggctcaccgtggaggtcttccctacaggcactgaggcccctccccgagggtctcctgcctcagaaaaatctccgcctcgcccgaagtcaccaccgctccgttcgtctcgcccgagccgatcccaggcagataggacagaggcacccaacagccggtaggggacactcacatttaatgcgcacacctaccccacacagaggcataggagcacagtgactaacaagacaacaatcatatccatgcgcaacagcataattacgctcccgctacagtgcacgcacgtcgcctgccatccccccgatgggacatctaatacgataggagaagcagaccggccctcgggaatatgacgaccccaagcttcacagcatacatctcctaggtgtataaatacaacggtggtttcttctaagaaaaggggcgaacactcagtagttttccaccaagtctttcgatatcggcacttgcctcaatcagttctagggacttagggacttcccctctcccgctgcacttataatccctactgcaagcaccccggtgcgagtaatataagcctcatcccccctttgctggaagtagggctttgtattgcccgaacc

SEQ ID NO: 22557 - DNA, 502 bp, Zea Mays
gttcttgactcagagtgcctgacttagtgggtccacatcgtgcacgtacctatactcactggcagttatctggttgaacaaaccctagctctgcttttctctgccattagtgtccctctgaaattatcgtttgcccgcagttccacgcctgattctgttgctttgtggagtccaatggcacccaagaaaaagaagcagaggagtgttgtgcccatcattcccccaattgatcccaatagccaagttcccttctgccgtaattatgcctctatcgtctctgaatccgacttgcttcacctggttgagattgatgttttgtcgtcaaagaagtcgtgctcctggcgggtttggcaagggatcaccgtactcatggaggatacccacgagtcagtagtttttgttcctttctttatccgtggtctaggtttaccaatttctcctttcttccgtggtcttcttgatttctactctctcaacttaacacaaatgaatcccaactccg

SEQ ID NO: 22558 - DNA, 582 bp, Zea Mays
agccagtgtttacatgaccggaccgcgggttaattttacaaaaaccaagggtctctttgttaaatcatccggctgaaagggtatcgagggtgttcagccgtccgatcagatcctgatggtgaggattagatccacagccgctcgaaccggtatcctaggggaaccatcggatcccgatctaatggtctcgattcaatgtgcgctaatctcatctcgtccgcaagatcggatatcaacggtgcacaattagtgtggtaacgcagtagcccaaaactcatatcaaccgtgcgttgattgatcgatggcccgcacggctcccatcctcgtcaaccaaatttttctaccatggcgaccaggcacggcggagcgcccaccccgcggtggcgccattaccgacgaagtcgtgtcccatgacccggccacccaaactcgacaatgatcacaccatagggagagaaaggaacaacgaacgtttacagggcactctcaccaaaaatccgggcgtggtgatgatggcacgcggcgatgcgcgggcccgcagcaccagtgagaaattcctccacgatgcccacaccttcacgc

SEQ ID NO: 22559 - DNA, 838 bp, Zea Mays
aagagctgtaaccccaaaatcttctttcgatagaccaagttcagctcttaaattgttggcagcaacagcttcatcgatgcccaatgcagtttctcccccagcatttggtaaccccaaaattaggtgcaccgtatcctttgtaattttcagctccttccctgggccggctcgaattgtcatgtcattgtggtcgagcttttccatcagccaagctaaatgtgatctgctgccgagtgcgtccagtctcatatcaagaatactagaaaatcccctacgtgcaattgcttggcgctgtctgtcatttaatatctggatgcttactaatacatcttgggggttgcatctgacgttaagcctctgctgaaaaaaagtatacaatgaatatcgtaaacatttacatctgcataatcgtaactcaatgtttaactcaaacatcaacacaacatgatttcacgcataaaatgatatattgccatagaccataaatctctaacctgtcggggtggggggcactactttcctccgctttgtgactaccttcttcaaaactttcccaggactgtcgcccaagttacgcttcttggataatggcataaagtcatcatcctcatcagcagcctgccatgttttgggtctaacagtctccgtcggaacacggggtatgtcaacgctgaagcactcctgagtagactggattataatccgttttggattagaaggaggtcggtctacgttcttcatgtctgatgttcctgccaaatgaaacaacacatatacataaaatacgtaaaggatcaaaaaaaaggtaagcgcaagtcaattcagttcagttcatgac

SEQ ID NO: 22560 - DNA, 305 bp, Zea Mays
ctggtaatagagtatcccttgccagatcctggagtctgttgtttgttctgaactggggtagtagcaatcctctgtgggcaaacatttgcataatgtccagtcttctcacacttgtagcaagtagtgcctgcactctgtcctgaaaatttcgtcggagtaccagtgggggtagcctaacgagtcggtggagtcccctaggatgaatgctgagctgggcgctggcctctgccagtgcgaactagtgtaccctagggtgaactgtagcgaggacaaacacttctgcttccctatccctaggatatcgc

SEQ ID NO: 22561 - DNA, 273 bp, Zea Mays
gtggacagaagacggtattggggagatcggcgtggaggtcacacaacgaacaagacgatcaacatgttgaataacctagcggcccggtgagtcaccacttggtggacatggcgagggtcgtggtgaaggagatgggggtgatacactgttggctcggtccggatgtggggcagtgcactcacctacgcatgtcgctgatagacatgcacaaagttggcgtagcgaggaggggtcagtgccaatgagggcgcttgagataccctcgatggcacg

SEQ ID NO: 22562 - DNA, 377 bp, Zea Mays
agactttagcttgtaattttcaccttctttaatatcacgttcgtcgtagagcagggagttgcggcttggattgcaaggaagtaggaggcttgatgctgaatgacgtcagtgagctcggcgtaagatggggcatggcaacagggcgatatcgcgacgcgaaatagagaatgatgacatcatttggagtgacgagctgggcgagcttcaatagggccgtcgacgacaaacttgctgcccgagcccagatgtgacgaggaggaacgacgatggttgtacggcttttggcggcgtgaataaacagtggggtgtcaaggatcgaactgcgcgggcacgatcgacggggtgctccgtgagcgagctccggcgcgggcaacgac

SEQ ID NO: 22563 - DNA, 751 bp, Zea Mays
ggcaggtgagccgaagggaaaccactcgagtggatccctcgcctggcccgagactgacccaccataagtgaccggccacattaaccgtgcctggcatcgagccacaacggaggcgccggtccacctcccactcatagcctatgagcccctcgtaccacagagcactcatgacctacaaacccctcggactacaacacatttatggctcgtgcatgcctcgacctcctgcacactcatgacctaccgacactaggcctgagtgcgcagaccgctgatagggcacaacacgatgagccacgccgagccccaggatacgaaggccagaggttggcataccccgaatgatgatggcactcgggccccacgctgcccacatcgtctgccataaagaatacaagacaaccatgcaactctggcgcccatgagcacgtgtggctttacccccatggtagagcgctcagttttaccatcgctcggtggctccttattaaggaagccaacgctggccggccctctccttggcctataaaaagaggatgatggctcaagaaagagggccatggaatgctcaaactctcagatcctctggcacatggatagacacacacacacgaggacgaaccctagatgagaagacgcctagaaggaccaacaaacaggaggaggatgcaccaacgaggaccgagaggccggagccccgccaccaagccaagacttagctaggactccactctgtaacccttagctccac

SEQ ID NO: 22564 - DNA, 402 bp, Zea Mays
ccggcgagcggaggctaggtctcggttgcgtgtggccaaggatctagaagtcaccaatcctaaaagtgagagcacgggaatatgcagaaggacatggggaagctgaccgcgcaaccaatcatatgaagatggagcaagctcgacgaattttggtaaacggtgacgttggcaatttactctttcgacggcagacagtgagcgaagaagaggagaaggcgcgggtgcgttcactattgacagcgctcgtgagaacggctaagtgtggggcggagatcgtgggagcaggggggacggacatgtgagggaaggagcagagggagaggactcatagccgtgcttctcacgtcgtgggtgtaagcggtcagggaagaaggccgagctgcccggtggggcacacctgcc

SEQ ID NO: 22565 - DNA, 1259 bp, Zea Mays
tacgcaagcaaaaaaaaccggcgctcttcctgaagcttgacatccagaaggctttcgacacagttaattggggttatctcctggaagtcctccagaccatgggttttggcactcgttggcgtgagtggatttccatcctttttgggtccgcctcgtctcgagccctcctcaatggccgacatggagcaaacatccagcacaggagaggggttaggcagggagacccccctttcccctatgttgttcatccttgccattgatccgctgcagcgtatcctggaccttgcagcaagaaatgggatcctttcccccattccgctaactacaacaaaactgaggacttctctgtatgccgatgctgctgctatctttatcaacccctctagagaagacctcatggcagtcaaagacatcctgcacgcttttggctgcgcctcgggcttgatcaccaaccttgagaagagctctatccacccgataagatgtgataacattgacctagaccacgtgctccagccgttccaagggacccgggggaccttcccgtgtcgttacctgggcctccaacttcacacccgggcgctccagagaattcatgtccaacctctgatcgagaaaatccggaaccgtctggccggatggaaaggaagcatgctcaatcgggctggtcgtctcacgcttatgacttccgtcctgtccgctatgcccacataccacttgtcggtctttcccctcgtgacatgggctcgtaaacgcatcgataggatccgccgatccttcctctggagaggaaaggctgaatcaaatggaggccattgtctcgtggcttggccactagtcagcaagcccaaaaccctaggcggtctgggcatcctcaacctcgacaaattcagttgcgccctccggctaagatggctttggaagagctggacgacagaggatcacccttggaaagggtttgatgtgccttgtaaccttgcggacaggctcctctttagcgcctccaccatcgtcaccgttggagatggcaagacagccaaattctggcacgacagttggcttgatggcatggtgccaagaaacctagcaccacacctcttcgagctagtctcaagaaagaacaagtcagttgccattgagatcaatgacgggaattggattaggtcgttgcgaggcaagattacctccacggtgcagatcgaggaattcgtctccctctggtttagactccatgatttccacctccaaccacaggtgtc

SEQ ID NO: 22566 - DNA, 430 bp, Zea Mays
gctgcttccaggaagcaaaaaatttctgcggagccgaagctttcggctcccaaaaaatgaaagtcctcaactttgggccctgctgaggcgaaggtacaagatccatcagagaagattgctggcacctctttgtcctcttctatcgacgttacagagatcttgaaggtaatgactgaacccatcatgtttgctatgctaagtcccctggggtcatatcggactagcttattatagtcaaaggagaagggggtcgaaaaaggcgcggaaggggagaagaagactgcttcggtgactggggaaatgagggggtcagaagaaacaacgcatgatgactatgatgaaggctatccataagaccgcacccccggtctcggcaaaaaaaacagttgcccctgttgatgtcgaagctgatgaagcggtcgctgaagct

SEQ ID NO: 22567 - DNA, 781 bp, Zea Mays
atttatacaaattctagcaattgtttttatattcaaaatctatttttaactctattcctctgatttacaaaatccctggactgcgcaccgaataaccagataactcaggggctagcctgcaagtttccctagactcagtaaaccacgagttggacggcgggttcattacttgattttgcaggggttcatatgctaaactgtcatggcgaaggggtatgggcggccctggtccgcccgatcgagaaccgacggcggtgattagatttatatcttatcgaatcgttacgaaccgagagctattggatctagatccaacggcccacatcctacgatcccgagatctgaccccaaccctctgatcacaatcctgctgtcgtggtggatctaccgaaggaatacgcgcgtcgtctaatcacagccgttcactactaaaccaacggtcaccaaaccttcttccttctcccagcgactagaacggcggcgctgtccaaaaacccacggcggagatcaacgccggccactcaactatccgaatcctgctccgatatctcgatccgataggcgcaaaccgaaatagaggtaattgcgaagctaggtttggttatctcaccgagtattgaagaatgaccaaacccggatgcgacgaagggtggcttcttgcggcgacagaacctccggcgaggaatccgtgttgccacgccgtccgatccctcctagcacgccgacgaaccgcactaccgcgtcaccagacgactcccgacccaatcctcagctttccccc

SEQ ID NO: 22568 - DNA, 626 bp, Zea Mays
aatcacttggaatcaaaccaaaccaagcctttataggttttagtgaaacatccagatccactctatccggctcagattgaaaaaaatatacctgtcttcaagttggaacaaacgaacgcggccttactggaagaggctgggccaaacggatgaggctggggcgtctgcctattctgacggtggattagcatcgtcgttggattggatggttccaggcctatagcgaaagggacgactactgctgtcttgcagctggagcctgatccatgggagctgagggtactgtaccaaccgaggatttcgttgcgtcgcgggggatgctttagctgttagcgcggttactgatctggatatggctttattgggtccttcaaggtccctatacttaacgaggaatcctcaacgtgccgcccagaagaagggtgagtgcctgttgatatcgatgtaacccctccaccaagtgcaagtctgggcgctacacctgacctgacctagtaatgaaacgtattacgtccccggcggtgtgcacgttcgcggagaagagcacgcacgcacgtacgcaaaggctccgaaacgacagcgaaaaagaggaggcggctgctcctgaacgcggggaggaagaaacg

SEQ ID NO: 22569 - DNA, 612 bp, Zea Mays
cagaaatcgcgcaggagcgacggtgatttcggccggacgctgcgcacgtcaggatgaagatccgcagtaaccgggggctctactggtcagctgtgctgggatataagcctgcggctggagaagtcccgccaaggtggcccactggtcaacggcttgcggcaagcacagctgagggcgtcaacacgagtgcgggtgaggctgagcgccagggatactatggctgggcgacagggttggagacgtagccaggaacgaggcaggtatgcggtgccctggtgtgcatggaagctagctaacgacgggtcccgtgtagtgaccatggaagcatgaggccatgtgctttagcctgatgtcatgtgcgactaggattcataaaatagaaagaaaaaaatgtgggctcaatggaattccataggaaaagggagtgtgggctgattttgtttttcctattttatttactcctttctttttttctattttgttttccttttctcttttcctttctattcttttttcaacttaaactcaatttcaattataagtttaagattgcaagattaaatgcacaagcaataaaactccaatatgatgtctggcttatttatttatttt

SEQ ID NO: 22570 - DNA, 540 bp, Zea Mays
cacggaccaatcccgcctacgccacgtcacgtcacggcgtagctactgggatagatatggaagtgcgtgaaagcctcgatccaactgaccagctcgcgctgtccccccgatccaactgtccagctcgcgcgtgtccgcacggatgagactgaattgacattgacggcatggtggtggacacgacacaagtgggcggggcggagcggaacggaaagcctgcgccaacttgctgtagagctcgtggcggcggcaaggacgcaaggtgatcatcggaggacatagagtttggaacttggaagcgtgagcttcgtgcgtgccaatcaatgatccgcaagccgcgaccgcgaacgagggaaaaggcggtttggtaggtttaggtagggggacttgtccgcgaagttacaggtaacgagaactgtcgttgccacaagtatctcgccacgccacggggacgggcgtggaaaaaacgtagtacctggcaagatgaaatcggcgactgacaagcaacctgtgtggtccggtaactatcgttgctgcaac

SEQ ID NO: 22571 - DNA, 316 bp, Zea Mays
caacaggtgcagcaatggcacatcacggggtgcctgtacaccaggcggaatattttcgcagaacagtacaggaaggcagcactagctgaggcaatctactagaggtctgaggcactgggcagtgggcactgcaagtttccagctccagctcgcagatccatgcccgccgacggttgccaaattcgttgcccttttcagcacagtgacggagtgaccctgacggcctgacccaatcttatgtacgggggatctgcaggctgcagctgcagccactacgtatgcttgtttgccctgaaatcctttaactctccctctc

SEQ ID NO: 22572 - DNA, 693 bp, Zea Mays
cacaaagtggatcgaggccagggcagtatccacgataacatcgaagaccgcccagaagttcttctggcaaaacattgtttgccgattcggagtcccgtccgagctcacagtcaacaatggcaaacagtttgatagccaggacttcagagatttctacttctccattggcaccaagcccgtcttcgcctcggtataccatccgcaatccaacggcgtcgtcgagcgcgccaacggcaaaatcttcaccgccatcaagaaaagacttcttgacgacaagaagggtaaatgggccgaccaactacccgaagtggtctaggcactaaacaagaccgaatgttgggcaactggattcactcctttttgcctactatatggatcggaggccatgaccccgcagaaaataaagcatggatcaccccgaacaagcgcatcagcggtccccgacgtcgacgaacctacgtcaaaagacctcatcgacggagaccgcgtcttcgccctgcaggccctcaacaaataccaagctcaaaccaaggcctcgcacgacaacacggtcatcccaagagagtttgacaaaggagacctcgtcctcgtccagacaacccggacagagacacggggcaagctggagccgaagtgggagggcccattcatcgtcaaggcgaagacatcccctagggcgtacaggctagcaga

SEQ ID NO: 22573 - DNA, 357 bp, Zea Mays
attaaaccaggcccacatgtgtctttcaggcctaccaagggcctggtttctctgtttgcacgcacgagaactaaaacagggggacctagggcaccgataaccagacctagtgccgcaccatttggatacaccatatcctacgctgaagccctcgtcggcaacatggatggtggaggacggcggagtggggaggacggaactggacgtggttcgtctgcgggcaatcgtggtggccgcaccaacgggcaaggcagtttgatgaaccacagtggctttagactgatgatggaggtaaaactgatgataattcaaccacagtggtttaactgatgatggaggtaaaactgatgataaaac

SEQ ID NO: 22574 - DNA, 525 bp, Zea Mays
accagaggagaagtggtgttgcgattgcggggttctagtcgtgttcattggaagccggatcctctgtgtgatatctccaccaaatcgatagttagctacacctgacggaagatcgggcaccccgttcctattaagtggtattcaaagactcaggtattaccgtcaggcttaccctagtttagtttaggtttttcatcctataactccagataattgccatacaaaaagaaattccgctgtcctagaacccttgtttagcctttgcaattttgttttcagtttggctttgttcagttcgtgtccgtggtcgagtcgtgttgctggtttaggctgtatcttcgtcgtagatcaactgccctcgctagccgctatcccatccaccattacccagatcacaagtcgatccacccattaatcgacttgccctcgctagccgccgccgcgctagccctagatagattgcagatacgccgctatcccatccaccattacccagatcacaagtcgatccaccccattaatcgt

SEQ ID NO: 22575 - DNA, 404 bp, Zea Mays
atcaaatctgggccgatcactaggcaatcaatgacccacatatcatctatccacaacatcactcgcatctaatcacaatcgttacgcagtagatggacgtcccatgcactctattcctccctggaacacgctataggcggagcccgagcggaccatggcagcgccattgcagcgttgccctaatcgcgcgacccgcacaacgaacatggatcccgatgatgctacgcgtagctggggttggggtgagtccaggggacaagatcttaccggcgatggcgactcacaggacgctacccacgcagttatgcggttcagcggcggaagactgactccgatgggcaatctagttgtccccgcgggcccaattaccacaccggtgccacaacggctttccacgagcccca

SEQ ID NO: 22576 - DNA, 547 bp, Zea Mays
gcttgctggagcgtggaacaaatagcccatttatttagtccttcatggttggcccaattcggcccacaaccacacgctcccattccatgccatccggtcccttgtggccttctcctcgcccgctcgttcccaccactctgctctgctctcctcactagtctgctctccccaaaccccacagaaccctaccgtccccgccgcgccgccatggccgccgccggccggccgtggcgcgtgataccgcgtcctctactggagaccgtacttcacaactatgcgctccacccgcgcgtgccacagccgctccttttccacgggccacgcggcgtcggcaagtccacgctactcctccaccgtctcctcccgcggtggtccgaccagccccacgccgtcgcattcatcaacttcctccacccctcgccgagttctcccgccgcagccccgtggtcccttctccccgccgacccagcgtctccccactcgctgcacgacctccgccttcgcctcgagtccgcgcttgagggcctcgcccgcgccgccgtcctct

SEQ ID NO: 22577 - DNA, 645 bp, Zea Mays
aaactgggtacttgccggaggcgtctccttttctttttctgttcatcagcagaaggatcggatggattggctcggcaagggcgcctcgggcgagtaccagcaggtttctgagtatctaaggtcgtaccagcctctgggaggggcgccaccaccaatgccccagcaggagcagcgtcagaagagtcctcagccagcaaatcaagcatggcatttatcttcgcatcactagggttcaggggcacctcaaaatagacctgccgttcatcatcaggaattcccccgagtgtggcaaccaaggcactaacttcttcagcagagggccgcactctaaggcccaaactgccgtcagtagcaggaggattcgacacaaaaagagtgaaggctttgggaggaggcaagttccaagctgagaatgccacgggggcaccaacatttgacactttgcctttaaggatcatctcaagtcggctcaccaggtccgtagagagaattcttctgttagtgacccaagttgagtcagctaggcctcgatacagataagctgggtatgccctgtcttttaacggctgaatattcttgaagacaaaatcagcaaccacggcttcagcggtcagacccctctctttcagcaatccaacttcagca

SEQ ID NO: 22578 - DNA, 319 bp, Zea Mays
gcagcctctacggcaaggaattcctccgcgcgcacactgtccccgcggtggaagtcttcccgacgcttcactgcccgaacgccacaccttgattccccgaccgaacgccggcgtacaccgaattctcaccggccgtgcggcacgaaccgaggaccgtcccaacgtccgtgctccccccaaattggcggcggtattagggtttctggggaagaaaagggaggaactcggcccctgacgtgcagctttatgatcccaaggaggattcggttgagcagtccgtgcatctcgcgcaaagaccgacgctcaatccggcgtcgcg

SEQ ID NO: 22579 - DNA, 460 bp, Zea Mays
ttctcatgtaactgatacttgggctttaactccttggagaaagatttcttatgtgactagccacgtaaatgttgtacttgcacgacaacaacgtaaaagagcgttggaacatcatcgattagtcacccgaggtaccaaagaatacatgataattacaatgcctaacaacattaatacttggtctgctggctctgacaatacaataacataggtcctaccaaaagtatcagaacatcaatgacatgtggttattttcctgaagaatacatagctgcgcttaaaggtataacaacaacacgcctctaatataagtaatatatagaatgctagataatttgtagttatctatacgtataaagttcttcttagaaaaaattctttattttttaactcatattttttcctactagcatcatatcaaggtcgatcattccatggaacactagattatgaatgtgag

SEQ ID NO: 22580 - DNA, 1012 bp, Zea Mays
tagagttcggtccacgatggcgaacggcgaggaaatgagctccggtgagcttgtaccagccggattacttgatgacgggtgctctacttcagctgaaaccaaattcaagccctaacaagcgtttccccccaactaatttcactattggacctctaactcactctgtccacagtgatcgtatgatcaacagacattctaatgcgttcccggcgatctaaggcagcttaactcaatcgagttggtcgaggagtatcaggggcaggtatgggtgctgagacaagagggcagggagcacgaacagacctggagtacgctgaccacggtgagccaacacacagcagcgcggagaaccaaattgggggaagagagaaattgggaggctctggtggataatctgtggcaaggacttgtgcaatggatgcgtaattacctaatagagctgcgggtgcactcaatttatagcatgcttgagcggtggccagtgaatttgggttgggcgcggtggcggtcggagaagaaatgagtcactggcgtggtgattcgtggccttcaccgtggcagacccaccggcgacgagccaggaccatggggcggtttatggtgactcaccgtgacgtagtaaagcgttgaggcacgtagcctggccggataacggcgaacgccagtgatgccagcgcgattgaccacggcgggacacgacggccggtgagaacagtggctggagtttatctccagcgatgatatttcttaccgaggagcgctatcagtgcttggccgggcgtgaatcgcgacgccggcgtggatctgggcgcaagatcaccggcggcgaggggggtgaatctggggatcttgttcagtcactgtaccatggtggttaccatcagagtgtctgacataccattttgtagggctcagatctcaaattttcatgtgatgacttgctaatctatctttaagaaagttgttgttctactatccagcttcaatcttgctatagcaatcactcccaaat

SEQ ID NO: 22581 - DNA, 514 bp, Zea Mays
tctgccccgaggtgagacgtccgttcccgtgcttggtttcccttattcacgcctcaccgtggccaattcggtctcgccggtgtgcggccgcgtttgcttgccgcgccccgcacggtgtccggccaacccagccccgtcccgtgtcctactgtagatccatagtacttccccaccttcgtcggttctagccgagtcctatcacagtcgattgcccctccctgtggtcgaaattcctcaccggaattgccccaacccgcccggagccttccccagccgttctcccctctctgaccccggtctcgtggccacaaccccaccagcgagtttgctgagtcttcctttttagttctggccaaccccggcgaccccggaaccgctgtagcacgaacctgccccaactccggcgacctcaccgccgtgagaaggagcggcgccgcccgcagccgttaacccctcccgatgttgatctccaccgtctaatcccgatcgcacggtcaagatcgcgggataccgc

SEQ ID NO: 22582 - DNA, 366 bp, Zea Mays
aaagaagagaaaagaaaatgaaaaatagtactgtgcactgaatgggccgagcgccacctatttggcccaccagtagatgcctcccgcgcggcccaagacttcctatctcgcgcgtactagccatcgcggacattcacgtgcacccaaccaagcactgacaagtcggacccgcctgccatcgactcggcggtgagctttcctaggccgtctctgtttggcgtgtggaccaggaaagtcagccctatcccttcgaaaccaacccacccgtgcatggcggacgtcgccggtgcctctggattcgggaatcatggcacaacccgtccctctccttttgacccggactgtggggataaatgggagcctcgg

SEQ ID NO: 22583 - DNA, 683 bp, Zea Mays
gtggtcaccctgagtcgagtaagcatgcagattgacaataaacagttcgagtgcctttgagaatgaagtctttttattgatggtgtattttccaattacagaatacaatgccgtcccaatagcttttgaaatctagctaggggtaaaacttcctgagatgctctatattccatgagttccctatttccctgccatccatttgagtaagacgatataatccaggccgagtgacttctgctactatgaatggtccttcccatagtggcaacaatttgtgacgtccttcccccgttagaattcggcgaaggacaagatctcccactgcgaaggatcgatgccgtatggccttatcatggtagcgccttagagtttgttggtacctggctgactgaatcattgtattcaattgttcttcttctagtatatcaacatcctccagtctagtggcctcagtttaagctatgttttcgaagatcaatcttggtgccccaaacttgagatcagcaggtagcactgcctccgaccataaagaagggagtgtttccatgcaaagctcggctaggttgagttcttaggctccagaccacatacggcaactctctgatccactttcctgcgaacttttcattcttgtcgaagactttctttctgagtgcttccaatatcattccgttggctctttc

SEQ ID NO: 22584 - DNA, 456 bp, Zea Mays
ctcgcaccgtgcgcacgccccggggagttccgccgtcgttcgctatgaccgcgtgcccattccactgccaccgttgggagctcgacgcgtctattgcctcagtaagctccaccatgtcacccacagctcgggacgccctttggttcaccctcatcccctctggttcgtctggtccacgctcactggttcactgccgtagctccgccgccgtcgacccgtgtcctcaccatgcccccgttcgtgtgttcctgagacttacctcaaggtaaccgtcctagccccaaccttattttcccctatcttgcatttactcgcccgtgattgctcgccggagtgttccccgacccgtcgtggactcccctccgccgtccggtcacctcagtcccattcacacaaacccgaccccaccatagtgctcgccaagtcctccccaacctctctagctatccggaccga

SEQ ID NO: 22585 - DNA, 1138 bp, Zea Mays
ttttggtggagagatgtcctaaagaacatgaccacttacaaagagcttgcccaagtaaatatgggggatggccgtaccatacaactatagaacgataggtgggccaacaagatacaagcaaaagaattccctgagttactgtcgtggtaaaacaggctatgatgttgtctcacccacaagagatgttccacacctccatgtacagtgaggcttatcagcaatatcaaatattcaccagtgtgatacaaggacaacacacccacggccaattggacaggtggacatacgatggatgggcactcaaatactcttctcaacgatcatacaaacacatggccaggaatgtatggacccacccgatatacaactggatatagaaatcaaaatgccagccaaaacaaaaggtattcttttagctactaatcaaagacaggctcaacaccggatccttactccggagaaggggcatgaacttagactcatacatgtgaaaattgcatactacaaagagaggaaacagtctcacatctatttctaaaatgtaactcagctcgaagatgctggcaattgattggtgtcatgccactgcgcatctccaacctgcccctagcaatctagatgatcagaatgcacctgcccagccctggaaaatggaagccattacaaccatgtcatggtgcatatggaaatgccagctggatatttgaaaatatacccccatagtggaagcctgcaaagatatgtttagaaaagagatgtctttaatctgctatagggttaaacccgggctagcggaaggtataagaaactggatacaacacttgtaaagcacacatatacaaacagcttgtacagatccacattttgagcaataaaaaatattgtaggggcaatccctacaataacgcatttttaaaaaaataacccaacattgttttccctttgtgataacgccttgctctcttgagaaaatcacccattttcagacattatatggtacatagaacatttatacatctacaatatagtacattctattttcagcttttggtggactagactaaggttctggttggaagccctagaggtaatatagaacggctaactattagctagttaattattagcctagggctat

SEQ ID NO: 22586 - DNA, 393 bp, Zea Mays
gaattaccatgtgctttttaccatacttatcactgtttcaacaactatggctcggacaacacgttcatcagataggctcaggtacgcgtccgagccccagatcctggcctcgactctctgcacggtcaagatgcaaatacatggactagacaccctcctcctggttcaagtcaacagccagtacgaaggctataccgacggccataccggctataggggctcagactcgtctctcctcccataaacgacaaaccatggcgctcctgggaaccctccatgaggttataaaaggaggagtctagggcttcatataggggaggagaacacttcacaggttttcaccctccacgacaatattggcactcgcctcaatcaccagggacttgggatcca

SEQ ID NO: 22587 - DNA, 503 bp, Zea Mays
cggacgggggcggttggcggctgggaggacggggaagggctggtgggcgaggagagcgatgcggggatcgtgggactgtgggagggtgtgcgttggtggagggaacgcgcatcggacgggagaggagatccacggcatatcggacgatcgagatagctagatggcagaacgacagaacagagggaggcagactactcttacgtacttaataagtagtacagatataatgcatggtaccctaccctggattataatgcaaaactaaagttcaccattcctgttacctgttttgtttgtttgaagcacatgcatgcaaatgttaggctgttttcctgtttcaagcacatgctgcaaggatgctaaagctagctagctgtgcatgcacacaacctgacatcgctagcagagttgctgttaccaactgaaaaagatcttccatagattagttcaaaagaaaagcattctattcatagtcacgtatgctgtgtagatgagataaaaag

SEQ ID NO: 22588 - DNA, 1726 bp, Zea Mays
ttttattatgttgctaattaccttagtttcaggggatcacttgatgaggcatatgcaggggatctatcatttgcagattctctgcaagcatttggtgctggtctggatgatcctattagtgttgccattggaggtcagcaaaccgctaatgtatctattgcttaaatgcttagttctgtccttccatcctatctatatctagtaaaacaacaacaacaacgccttttagtcctaagcaagtcgggataggctagagttgaaacttaacatttgtgtttttttccgtttctaatttctagttgttccactgccactttgagtgttttggatatttacggcatatttttttaatgtctgtagatcagaacaatggatccttagaatataaaagtacagatacatacatatccatgcactcattaattaatcaaattcctcctatttaaaattgcagagcatgataattgatagctacaaatttagtcatttgttggtgtttctctattgaaattctctcaaaactatattctttactatgttgcagggcccgtgatgtccaagtttactactgctttcagggagcttgggacatacaaggaactccttcgttctcaggtactataaatcatacagcatgaaaatggacctataatttctgctgcataggtagttcgtgtaacacaaaaggaatgaagaattgaaaggaaaataacattactgttttgcagtctgagttttcatttttgaactcaacacaagggcttgctcctgtgagtctgggcatgatttgtatttttttattggcatgatctgtattagtttcagtttacaatattcacatcgtttcttttcttatgtttttgagttatttctggaacttctatactcaatctgccacctgcagtttcacatgtttaccacctataaggttcttggattactttgtaaatttcaaagatattcaataaacagaaagcacaagtgataaaataagttggcatttgcagaaccacaacagaaaaagtatgactgatgcattttttatttgttgaaagatatatctaccactatccttatgactgtaatactgtatacttctccttgctcaggatgccacgacgctggttactgtagtgaatgctgtacagttttttttctcctcctttcatgctaggtagcaaatcgttttttccctcctgcgtggggttacctgctagtatttctatgtctataaataacacagataggaagaaattgccaattggggtccttgcgtccagtactggctgcattatctagaagcaggaattttgtgttgaatagaataatcatttgttctgcgatggagtttttgtttgtcctcacactgatgtctgtagatttattaaatttcttttgctcaggcatgctgatatatcacatgtataaacaggacaaatgatattttttgcattctaattataataagcattttccctccaaacagcttgagcacatgcttagtgatcgcctgtcacagttcattaacgtggatttaaatggtgtgaaggtaaactctcctctcttctctccacttgaaaccgcacaacatagcatacttgtaactataggttgtaactgaagtaaacaatatagtagttcaggtgctgattttcaatgggcaaataacctttatgcatgtgggattagacttgaacgctcttgcttctgagttcagataacaaca

SEQ ID NO: 22589 - DNA, 764 bp, Zea Mays
ttggctcaagaggtaagtgatgtcttgacagaggagcggttgagttcattggatccacctcaacatggattagggatgagcagtaaatcatcgaaaccgcagtaaaaatatggtgcattgtgtgttgattacattgtttcttagctattaattgtgtttggtttgtaaaatcttttagtactagcaatcttgatcacttgttcatcctaggttgcaaaccaagtttagctcaacattggctagatgatttgattctcttgttatactaattaaatttccctagtatctttaattttagttaaaatcgtctattcacccatcctctagccggtgtccttgatcgtgtagctgcaacaaaaccaccagttaggccagatcaacaacatcaaatcacagccaacacaaaccagggaaggattatcctacaatcaggaacaaacccaagagcgacaaagggggaggaccaatagaggtcgtggccacgatagagtttcttgtcaagagcgcaagccatattgtgtattttcatggcgaggacgtcgggcacactaccaaggactataccttcactaaaaatacaaagaaagaatgacaataacgaactaggaataagcatcgaagactatcgtctaaaccttgtaccaacatacatatcaacctcattaccaaaatctccaaccatactacccacaattcaccctagctcattaacagccacaactactacaccaagaaagactacaactcccaccccctacactcca

SEQ ID NO: 22590 - DNA, 562 bp, Zea Mays
ttcatcagttcgtaaatttgcagtagtgaaatgacgcgcgatgattatgaaatttgtttgcgggatatagaagtcatccctgtatgagtaatcataattacgtcagatcgccttaagtggcttgctgacttaagtcgattgtttttgtagtggtcaccctgaattgcataggcatgaacatgttgcaccggcttaagtcgccactgactttagccgattgctccattagtagggcatggtggtcaccccgagttaagtaagcgtgagcatgttgcaccaccttaagttgtttccgacttaagtcgattgctccgttagtagggcatagtggtcaccccgagttaagtaagcgggagcatgttgcaccaccttaagtcgtttccgacttaagtcgattgctccgttagtagggcatagtgatcaccccgagttaagtaagcgtgagcatgttgcaccgccttaagtcgttgccgatttaagtcgattgctccattagtagggcatagtggtcaccccgagttaagtaagcgtgagcatgttgcaccgccttaagtcgtagccg

SEQ ID NO: 22591 - DNA, 381 bp, Zea Mays
ttatatgcaagctctcacgtgattgcacctgactttcaatagaaccaaagcagtgcttcgggcacgtttccaagcacagtagtcctctcatgctgagagaacacctttgaaagcacgggtctaactaagcactcatctcattaggccctccaagtcaccatctaaaaaacttttctctttagatagagccctgacagtagagaaggttttcagcaagtcattatgacatctgttgccaagggtgtgacagttggctagaaagatttggtagttttcataagtcctctcaaatgatttatttcatcctttaggtcatcgatcttcacctgagcgctgctaaggttgatagccacttcggtggatgcttgcatcagctttgta

SEQ ID NO: 22592 - DNA, 521 bp, Zea Mays
aaagaccagagtatagttaggaacaaagggtttgagttgggaaacatggaagacatggtggatctgagcttctggtggtagatccaagcgataagcagctggcccaattttctcggtcactgtgtaaggcccaaaatacttgaatgctaatttgggataaggtctattgaccacagaatgttgagcataaggatggagcttgagcaacacctgttcccctacctgaaactccctgggaaccctctttttatctgcaaaaatgcttatacctctgctgagctctagccaaagtggccttcaacatctcactatgctcagctctgtgttgtacaaactggacaactccctcatcctcctacccaatgactaaaggaactccaaggacagatgcttcatagccataaagggcctggaaaggtgaacaacctaatgatgagtggaaagaggtgttataccataatccggctaatgatagccaagacttccatatctgagggttggagtgtacagcacatctgaga

SEQ ID NO: 22593 - DNA, 711 bp, Zea Mays
cttgaatcgacttagtaagagcttctcaaatatgtggctccaaacactcttggttggtttgggcttcggtcaagctacttgagtgctttctaacacgaagtcatgcacttcaacactgaattaaagtgtcttcatcattatgaatatccttgcgctaatacttatgttcaaaatttgaatcccaagataaccatgtggcctcaatgtgactaagccatataaataccttgcataacaatgttagtcacataaccatgtgatcagtagccaccaaaactcaaaatgagataatacagaggctcacatggttggcgtccgactacaaatgggtcaactaggctcattgcatctttgccaatgattaatagcggaggatgtcatcatcattcccaccttctcaaaatgggaaccagatgatgcactcaacctaggtggggtttgccgaggcccaacaaattagggttgtctagactccaacagttcattatgaacaccaacttaaggagaggtccaatcgccccaaaaatactagtccaatgggggaatggtggttgacccttttaagatggtttcctcctcccaaattaagcgagatggtataattcagaggctcacatggtcgttgtctaactacaaatgggccaactaggtcaattgcgtctgtcaatggttaatagtggatgatgtcctcttccatgactaatatatctt

SEQ ID NO: 22594 - DNA, 459 bp, Zea Mays
cggatttcgggatcttggatggggcgcctgagaagggacgtgtgttggcgagggaacgactggtggagctccctgtcgccggggtgtgcttcggtgcgtccaagcgcgccggtgtcgctgcctggtgaagacgacgcaggtgcgccgttggatgcgaaatcgaggatcaggattagaacccgtgtgacgtatcggtatgagtaaatggtagccgtcgtgattcgatcaaacgactcaggctcaagtggggcatgtgcggggccgaaccatggatctcggatccgacggtgtcgagtcagagcaggttttaatcagaccgatctaatctgggctgctcatgggtgatcggacggctgaaaaccctagataccccttcggccaggccatttcgcataagagaccctggaccttttggaaatagaacccgccgtccatcagtgattttccctgtgtctctgg

SEQ ID NO: 22595 - DNA, 2518 bp, Zea Mays
catagtaaaagcaatgtacctggaaaagccaaaacacctaagaatttggaacagagagagtaattaacaactaaacttctggctatttatttttggcatacagagaccataaactgtggttcatcctagaaatcccaacatattaacagataaattataattgatatttctaaatagggtctgaacaactcaaacaaagtcacaaagattgcataaggaaacatacatgctgattgctgacagcacgaataagtgcaaacaaaagggactacattatcaacatatgaatcaaaatttcacaactgcatgattacaataaggctcctatatcaaccccgaagtcctaacaaggatttgtacatagtgaacatcttttctctagcaaatgtagaagccaattcagtagtaacatttggaattgtcactaaaaagacagtgtagacacatttagacatgcaatgcaatgtaagaaattgcaggatgcatgttgacaaagagaaatgtatttatgtacctgaattggaaacaaaagaaccagcatgagtgcaccgactaatgctgcaggaccaagctgtgcatatagaaggaccatggaaataacaatgcggaaaggagcagaccataggctgtgaagctgctggcacacttgctgcaaaggtacaaatctaaattagaagggtgcaaaaccaaaagccataaatggctagcatgcatggcatccacacatggcactttctccttccttcagtccttccatcttttgtaacattgacccagtctaacacaaaagtatacctgaagggactccgcatcagttgaaatcaaattggtaatcctcccagaagcaaactttctacgactatcattagttagtcgcaaagatttgcggaaaacagctgcaatctgcacaagaacaaaaggtcaaatttcaatgtaaactttgatgaccatacctaaaagaaaaattcaaaacatttaacatagaaatcatatagcgggtctgcattctagatgataaagacaaattcgcattgaactaatatcactaccaacaaaaccaggtatattctatgatgttaagggggaatttgcaaaaacaatctcattatgtcattaagttccctaccaatatctacctggactaaaaggctttgtagggaatccacatgttatgacaaatctggagttttgatccccaatccaatctaagtaaaagcaagaatggtctcaagaatgtggaacgcgagatttcaattttcaaggatgcatgtttactgtacaacctcttacagaaggacaataaaagttcttcatataaaagaaacacataccaatgtggacctcaacctgaaacccacacgcatgacgttctgaaagtactgtgcctcagcaagaaccccaagtgactgaaaatgagaagagacgtaagtactataattgctgtttcaactgcaccgaaacaagaaacaaatgtggtgcacagcatgcaggaaacaaaatgacccataccactcctgcaaagattgagaaagcatagatgtacccgctccaagatggatcacctttttgcatagactggaaaagggggggaaacaaagtttattggtgcaaagagcataataaaggtgcgctaagaaatgcataatcgcacagtctgttctagaatcaatgcacttcagtagcactgttaatgatgggtaggggtcatggaatgagaagtgtacctctaacaacaggttcaatacaagtggaccaacaaattgagaagcatcattgccaatctacaaagttagggagagaaagatgagctgctgagaacatcacaaagtgtttgtaatggaaaatattgaaaccgaaactataaggcacatcatctaaagaaaacgtaccttgaaaaatccacccagccagaacctgaaaatgaaaataactaatcactataggcagatacgttgaaatcagatatataggtatcgagtgtcgaatgtgcaaaccttccccaaagactactatgaagagctcgtaacagccaagggtttggtttttgaagctcatcattccagcgtttctggaacctgagataggattgccacgttaaggtttgcaagctcaagtatttagcatttcaacaaggaaaatgagaaaacatactggctatacaaagtttcagtctcatcccagctatccaatttccagatatccttatctgtaatgggccttctaaatccttgttgcattaaaggagtcatccatgaaaagaatattcctagcaaagtcacaagatagcaaaacctgtcattatttgaacagtggtagaaatttaattctgtccgtatacaaattctattcacttactggcaaatatgttggcatgtctctcagggcaaatctgctcaccgccgggaagaggttcataatcagtattatcaaccaacacttcattcctgatcggggtataacccggatatggatccaagctaggcagataaaccaccatgagaattccaaacaagaactg

SEQ ID NO: 22596 - DNA, 419 bp, Zea Mays
agcagaaagcagaaaaatacaaatgcttccgtcaggacagcaaaggaattctatggtttggagatcgattggttgttcccaaggaccctaagctcagaaagaagatattggatgaagctcacctttaaaaattctccatgcaccccggcagtaacaagatgtatcatgatctcagatccttatactggtggaccagaatgaagagggaaattgccaagtatgtatccgagtgtgacacctgccagagaatcaaggccagtcatttgaagacagcaggccctatgcaaccccttcccataccatcttgtaaatgggaggacatttgcatggactttatcgtgggattgcccaatacctcccggcaccatgattccatttgggtcattgtggatagattgaccaagaccgctcatttcctg

SEQ ID NO: 22597 - DNA, 281 bp, Zea Mays
ggcaagcttggtacggtggctggagtagtttaatggccggagtttatccacgacgaggattcttactcgatcccaggtgctatccacacgatccgagcacgaatcacggcggcatgagcgagaatccgtgcgcggctcgtcggcggcgagtttctgaacttgttttccccgatgcactgtaccatggcgaggtgggttcagttggcctgacagatcaaattcagggcaaattttctctaaattttgtatggcaacacatccaaggctctgcagcaaaattg

SEQ ID NO: 22598 - DNA, 419 bp, Zea Mays
cgggactagttgtgatggagggcgctcctgacgaaggcgcccctgttactgaagccgagcaggcagatgttgaagagggtgatattggtgaagacgaaattgattataacactgctatgccatcgaagcccagccatttggattttgggaagtcaactgtgtctgaagctgatatggctatgatgacgaagttaggctacttcagagaagccgataaggggttgattcgttttggtggggaagagactatcccgaaaccagaaaatgatgaagttgtggtttttaagagcttcttcaaagcagggttgagatttcctctgtacggtatgattgcagatgtgttggaaaattttgagatttaccttcatcagctgacccctaacgccattgttaggctcagcgtttacatctgggccctt

SEQ ID NO: 22599 - DNA, 894 bp, Zea Mays
ggggttaggaggttagggttccaaaccttgggttgggattttgggatgttacaaacctaccccacttaaaggaatctcgccctcgagatttagactggatttgggaaaagataatggtattccctcctcaaggagtcctcactctcccaggtagcttcctcttctccttctctgctccactgaactttacagagcttcacttctgaggtgcgggtctttccgatagctgaatcaagaatcttaactggcttctctcggtactgaagatctttctgaatctgtactgcctcttcttcgatgtgactttctggtgcttgtaggcatttgcggagctgggatacgtgaaacacattgtggatgtacggtatgctgcgggtcccactctgccaatgatgggatagggaccgacgaatcgcgatgctagttttcctttcacttggaacctcctgacaccacgcatcggggagaccttgaggtagacgaagtctccttcttcaaatctgagctctctccgcctattgtccgcataactcttctgccgactctgagcttcaagtaatctcctgcggatcagggcaactttttcttctgcctctttgacaaaggcaggtccttctagtgctttttccctacgttggaccacatgagaggtgtctggcactttcgtccatacaatgcttcgaatggtgacatcttgatgctggcctgatagctgttgttgtatgagaactctgcgtagggtagactggattcccaacttctatcgaatgctagcacacatgctcttaatagatcttcgaggactttgttaactctttctgtctgcccgtctgtctgagggtgataagcggtgctgaaatctagcttggtgcccatcgctttctaaaggcttgt

SEQ ID NO: 22600 - DNA, 739 bp, Zea Mays
ctttgcactgctgtgtggggcccttcgccagtgccagaacgcagcgcgtgcgtgtcggcctcctccttaccctggcatgtgggacccctggctactattcctcttctccgctccggcagcttcggcgtgggctgttacatgtgccgcacgaccgaacgaagcgggcgggtcgttcctggcgctggggattaaaaccccgatggatccatgatttttccctcttctatcccccgctcgcgctagcacatcgctgttgctgtcgccgtcgtgtgtcgtggagaagaaacgccactgccggcgccgttcctcgcataaatcggcggccggggaccatgaagtaggtgcgaggtatcacctggtctcagggaagctatccccaccaccaatttgatgaacggccggtcggaactcgggcaatgacacatcggagcagtggcgtctgtcgcgggccgcattccatcgtgggcgttcatctctgcgcccgaatccacggtaaggaacctacaactgtgaccgcctccgtcttctctacgcgttgctcgcttctggtaggaaaaatagggctccagggcaccgggcacgctactcaccggtgggaaccgccacacgggctatgggcaccaccgagctcagccactagggaagaagatagctcagatactgtcgatcgactctcggacggccctgattagatcccaagataacccttcgtagtgattaaatccaagccatcagtcgg

SEQ ID NO: 22601 - DNA, 338 bp, Zea Mays
ggtctcctagagtgcgctacagtccagcaggccgaaagctctgcctctcggctttgagagcctacctcggaacaacgagcagggccctcttgacaagagagggagacctttgtccatcctgagcccacgaaggaaggacaaagcccccacggtccgagaccgcctccttgacaaccttcaaaactgcgatatccacgaccacctcggcgagcggttgcaccacaacaatcgacgtcatatcacgcatggctagcaccctcgacagggtggtcgctatgatagtggggaagatcgaatccccttgccctagccatcaggtccctaggtcctcatccgag

SEQ ID NO: 22602 - DNA, 1120 bp, Zea Mays
ttctgctgctagattaaacaccattggatctttggtgggtggctgagcctgacatgaaactgactttccttggtggtcagtgagaatgatggtcttatttgcgcagcttatgacgacattatgcttggttaaccagtccatccctaagatcacataaatttcgtgggatggcagtacagctaagtctgccaagaacactaccccacttaaaagaatcctgacttaagagcatttgaggtggcatagaaggtctgaccctggggttcaggtgaccaagggaatttctagatgtgcagtgggaatgccatgcttttccacaaaactagtggctatgaatgaatgagatgctcctgaatcaaaaagtacagcagcgggagtaaattcaactaggaactcactgagcactactcacggggcttgctgagcctcttgagcgtcgacgtggttcactcgtgccctgccatgatactgggtcttgcttagctggttgttggaggagggtgccttggaggcgggtgctgggcactcttggggccaatcaccgagttggagtaggtaggcacggatgtcttcaactgaggacaattattcttgtagtgactggggtctccgtagtgccaacaggcattggctggaggttggttgcttgcaacggagggggcctagagggaactttgaccctgctgactgaaacatgatggagtggacccagctggcttgttgaagcttggtcccttgggtggaaacccaaaagatcgaactctctggtgcctgtcctgctgctgagctcggaggacttggaacttcctcttgaggtgacccttttcttcttctctagccctttccacttgtatggccttgtttgagaggtgcgagaagatgagaaaatattggctggcgaggatagtcttgagttctggtcttagccctttcaagaaacgggccatcttcttggcttctgtgctgacatcgtcaggcgcatagcgagccaattctgtgaacttgtggacgtattcactgacagatctccctccttgagttaattcctgaaattcatcttctttgagctggacgatccctaggggcacatgatgttctcggaaggcggcttcaaattcta

SEQ ID NO: 22603 - DNA, 397 bp, Zea Mays
gacgaagttgaaccaaccactgccgaagctgacagtgaagacgaggatgatgacgacattttaaatccaagcaaacgcaaccatattgagttcgggaaatccacagttacggctgaagatttggttttaatgaaaaaattaggatattttggagagaatgatgacaagctagttcggtttgctggggaagaggtgattccagagccgaaagatgacgaagttgtagtctttagaagcttcttcacggcaggacttcggttccccctatacgacatgattggtgaggttctgaagaagttcgagatttaccttcatcaactcgcccccaatgccattgttagactcagcgtgtacatatgggctttcagaagccaagggaagagtgcgaacgccgaag

SEQ ID NO: 22604 - DNA, 506 bp, Zea Mays
gaggcgcaccgcatggggagggttgagggtatagatgtccaaatggtacgggtcacccgttagcccgaggcccaacacgattttgcccggtaccaacctgacccgttattatccatgctcggaccggaccgtgtttgagccgccaatccggcatgtcgtgttttgcatgacccgacccgatcaaaaggccggcacggacaccgaccgcatgtccatcgaataacccccctcgcccggcacccgaccccacgggcccactctctagaaccctatgtggctactccctgtcccggctccctctccgcctccgtccccaaatctgaaatcctctccgtcctgtcaccgactcgacgatcctccctcgtcggtaagtcacgcggttctagaatggtaagctcagtttggacatcaatactcggtgatggccggtaagctttgagccttcgtcgacgctctaagcctagccctgtctataatcctcccctgattctttgctcccctcctcg

SEQ ID NO: 22605 - DNA, 388 bp, Zea Mays
tcaatgataacgaaaaaagagttattaagttgggggcaaaaggagacaagaaaaagaacaaaaagtgtcaaaggtgtggcattgctgatggtcacaatagtcgcacttgtctatctatggaggagaataggcttcggttggccttactggtcgaaagagagggcggcccataggttctaggaacaagggttcatctaatgctccaaattggaatgagacatgcacttcaaaaaaacattgcggtggtgtcacagacaatgattcatctagtggggagtagatgatttcttattttatgacaaatgtaatgtagtgccatacttgttattagaaatatggatgaatttataaatgctggaaccagtcgatattcacaaagtataagtaa

SEQ ID NO: 22606 - DNA, 385 bp, Zea Mays
ttcgtctcataagacaattcatgcaagttgtagaaacatttcacattcggctgttgtccttgactcctcatcgcccaaatataaacccctatcctgatgatggcttcaggggtaagctgatgaaggtagacttcgaaggttttcagtacttcaaccagcatactatccaaagggaactaaagccccgctttcataaaacttctatagacaaccacctcgtcagcttcgggcaaagggacattactctcccctccagcccacacaatagaaatgtcacgaaaatacctccctctcatggcatcgatctgtccttgtttgattgtcgatttcccgcagacaacatggtttggcctccagggccgatcttcggcatcctcagtctcac

SEQ ID NO: 22607 - DNA, 484 bp, Zea Mays
taaccatcaaccatactctacggctcgcatccgacgcgcctcgcctggtcttcatataaggaccccaaaccccagcgcccccactcctcaccctacccattttccccacccaacacgtagcagcgtcgccgtcgtcgcgaagctgttccgctatcgccaccgagctccttccgtcacccttgccatgatgagcttcgccttggtgccagctgcttagtactcgccccaatccccctccctttctttgtcctcgctcaccgccgttactcgtgcagtcctggagccgtcgttgtcgaacaagccgccactgtgtcgttgctgtctctgtggaaattccgagtctcgcattgagataaggaatctcccctgccccctccattttcatcccttactatctgtcccgcacgattgctcgtgggagttgctcgcaccgccgccaagccgccccactatgaaccctcactctctgatgcccctaccccag

SEQ ID NO: 22608 - DNA, 569 bp, Zea Mays
ggggaagtgactgcaatggtggatattgctcatcggagcacttcaaccaccatggatccgcaaggtaacatgggcaggggtctgcaccgcgtaagtgctcgtaagaatagcaccgatcgactcattttccatccttgtgtcgtgtagcgcaattaatatgtgagcttgagcattgatgcgtcgagatgtgctactccgatgaggcttccgccgttgaggggttcgtgccaccgctctgttggtcggggaaggggaaagttggggagaacgactagtaccattagattagacgtcgatgatggatattagaagatggcaccttttcagctcaatttgatcgaggtcgtagactttgggatggacggttgagttcataagccgcatactggatcagtttggatgaatcgggccattggatcccgatctagcggaccatatgtgacactggttcattaaaacctagatccaatctagactctcaaaattagatcgaacgaccaaggatcacagataccccttcgcgttataaaatctgagcccttgatctcaaatccagcggccacgatcac

SEQ ID NO: 22609 - DNA, 297 bp, Zea Mays
gggagtccagaagggttttcgggggaaggtaggcttcggccccgtagaccggggagtacggggtccctccgggggtccatctagttgtcgccaccggagtaggagtctccggcgaagacatccttcaggtccccctcgggcgattgatacccgaggtcccattcagccacggccacctcgccgtcgttgaccctttccttgccaggtcggcgatgaggtggggagccgtccttggaagacttctcgcgtcactcgctgacgtgttttgcaaggtcgatgatctcgtgacactccgcg

SEQ ID NO: 22610 - DNA, 431 bp, Zea Mays
gaggttttcatgttgtctagttcaagtcatttcccctgaaaattcgctacattgggatacatgcgttattcagttgttttcactgatttttgctgggatctgcggtagatgttttcatttttctttcttttccctgaaaattcacaaggtcacgatcgactcgttattgccgctttctcaggattgttgcgtttgccattgtcagtaatgtatttttccttctaggaagtttactgatcgttgttatggtgctctgtttttagattccatggccaaaaataataaatgtggtaaaattaattgtcattgctggatttgaatctctctttgatggtattggttgtggcaggtcagattctaccatcagtgtaatgatagagcgatacgtgaggttctctctacacataagtaaatttaatattataacaaaa

SEQ ID NO: 22611 - DNA, 764 bp, Zea Mays
aagaatacaagatgtgaaatgagagaaacaataaacagcaaaaggaaactgcagacccactaaccaaagtttgaggcctttagatcatctatttgcctctgaagcagtagaggattccattgcatcaaatacgaaacttgatcggggacaggggcgccacaagatttcaactaggccgaaacagagttgaggacattctgcaagcccaaaagttagcaagagaacccgtttgtcaacataaataacacaagtcaaagatcagctcacctggaggttagaaagaaataagggaagtcacagagctggaggcatcgacgcactgtctgatgatagagtgtcgacagggacaatgttgagagcatcattcggggagacctcagctccaacaacaggtagtggattcccagcatccgtatcactggcctctaaggtgaccggaccgacaagagcagtaggcgaactcatcaccataggtcccttagattgaaccggtgatgacccgacatggatgtccatggaggcagccgaagaggaaccaagctcggcacccttgggggctaggtcgtcctcagcaccatcctcgggggctgggttatccacagtggcacctccgaaagctgaagcaccctcggtcatacccacaggagctgggtgaccttggcaggcaacatcaagagccagtgtgtccccgtgagccagaccaccctccaagttcgacgaagcgagagaaactgtctaggttatttcttgcccgacaggattac

SEQ ID NO: 22612 - DNA, 558 bp, Zea Mays
aagtagttgtgagctcatctgcctctgcggcgagatcatcgacaaaaggtaatacctcagtgatggagtcatcgccgatgttgttgttgccgctgcccatcgcgtcctcactaagtgccatggtgcagaggcctcccctagtgttagcgagaagtagagtccgttcagcttgtcctcaaccaatctcccaatctccatgtcgctcgaggaagaagatgtgtaatcggagtcatggtcgaggttgctaagggaggcgaggaaggaacactctttgatctagtccttcttgaggcacttcttcttgagcgcctccttgtctaacctccccttagatctgtgcttgccggaggtgtactcgtgcttgcccttgcgccgactggagtggaggtcgcgctagccatccttcggcttgcccttcttggggaagtgggcgatgaagtggtcggggtcaccatagttgtagcatccatccttagatccgccatgccgccaattcagacaattgttgtgaaactgcttgaaccggttggcaataagcgccagctcctcatccccaag

SEQ ID NO: 22613 - DNA, 328 bp, Zea Mays
aacaagcgctttgtcacttgagatcagcttcgtcttaaagagcctgaacactaaaatggctagagtaagaaccactgctagggtgtctcatgagggagatgagaccgaagcgaccgaagcagcgccaatattagaagtggtgaggcgatcgggtcttgttgcgttagaggaggctattgccgaagttgcctccaatgctgaagttgaacagattgtggctgaaggcagaagtgaggatgaaagtgaagaggacaacagtattctgagcccaacgaaacctagccacattaaatttgggaaatctactatgacagcagacgacatggtt

SEQ ID NO: 22614 - DNA, 797 bp, Zea Mays
atcctctagcatcaaatccaagcagtgggctgcacacggtgtccaaaataaagttggaatcctttccataaggattcttaccgctgctttgaaatttaccccattgttcgtaacaacttgcaccacattttccttgccaacctgatttatgtgctgctccaacagatttgctagcatgtttgcatttgctacctcgcttgaagcgtccaccgaaccaaggaaaaaggtccctgctggactgttggcaaggaaattgatgatatgacggtggtttgtagaggtccacccatcagacatgattgagcaaccatactccttccaagattcctcatgtttcttcctgagttcagctgtccttccaacagtcctgtcaagcaatttgtccctgcaatcatggtatgttggtgacctataaccaggaccatactgaccaatagactcaagcatgatttcccaacttcttgaattaatgacattgaacggtatcccattctcaattaagaagtcagccacatgatcatcaacaatctgttttgactccttatccttctttgtgagatgctcaagagtagtttgagaacacttagagttattcctttctgcaacaacttcctccggtgtcttacacaacatggaactaactgacttgcattgcttttgggtttgtggtttaactggaccagaaaccatgaaggagttaatagcagcttgagctaatttcctcttcacttgttttcctgtcgtgccagaacttggtacttctcttgcatcactatcttcttgtccctcttctacat

SEQ ID NO: 22615 - DNA, 408 bp, Zea Mays
ctagctcccaaacatggcggactccaacaaactccgccaatcccctggccatgtccggggttttgactatataaaccgatcccgcgacccccttcgactatcgcctcacctcctttgatcggcctgcgcaacaagaaagaccgggcaccaccggcgacaaagaaggaagagcgcagagagagaaaggatgccgtcgcggttgaattcgtggagaaagggagcagatgccttgctgagtccatggatgtgatcaccggtgtctttctaaccagtttggcttatcgtcgtgctcgattgagggttggagcgcttctgatttctcgctgaaattctattccccgccgcggaccacgctccaccgtgtccgccatcgactgctacccaaaccgtggtaagaacccatcctac

SEQ ID NO: 22616 - DNA, 1036 bp, Zea Mays
aatagagggcactcgagaccttagaggtttgaggactagtagagagtctcgggcttctaagtgtttatcatgaataccctaagcccttaagggctctaacttttagatcattcatcatgagggccctagagtatgtggtcctacttagatcattctagtcgggggcacctgaaggcacaagacccaaggttttggaccattgcaaactatggttcttgaaagtaggggagtgtcgcgaactttagagtgcctcaggatgtcgagggccttgaggcctttgattgttctggtaggacatggtataaatatcttatttctttggagtgtcccgagatgaagttccctagagggttaggccccttggccaaaggcagagcaggttctcggggcatgaggccttaggagcgatggtcctagtagttaggtctcacaatcatttcttagttaggtctcacaatcatttctcataccaaggttcttgaatgtgtcctggcatcatccggaggttagccttcttcatgtgctagcaagatcacaatacacaagattatcttttacatccacaacccatgtgagatagttgtgtcaacctagagcgagttattcaaactcttactatcattgaaacatttgagttacttaaaaatgttgtctgttataatgggatgcaaaatgaagacaatataaatcacgtatcaatgatgttgtaaaaatatcatgtgcataatatcataatggaagtaaaaaccatagaggcgtagacctcaaattgggaataatccaagttaatattagatgccaagtaatttatgtaatttgtataaagcatcttaacttaaggtagtaatcaaaattgatatagatgtcagttaattcacaaacaaattaggtacacacattgaggatagtcactaagctgtaaatttagtatagatctcacggtagtaactatggtgctatcttgtgtatgaccaatagaaatgtgaattgatgatagtcatcttttaaaaaagatgtagaccatatattctaattt

SEQ ID NO: 22617 - DNA, 634 bp, Zea Mays
aatggttggagacgtcctgtatataggagaattgtattttaaaaaattagtaaaatataataaataatacaagttgaaggagaaatataggtgaatgactggagatgaccttaagactggagaaagaaaaatatccggtggcaaactggcaaagaaatgatagagtagagcaatgttcaaaaaagcgtgattaagtgcccgcctaatcacgattagacgctaagcggcatgttagcgctgcgcttaggccctgggcggtggtttccgcagtgggcgcgtgtaggcggcgcgtgatttacgctatgcgcgctgaggcggaaaggaggcgtgtggaagcggggttcggcgcgcgggaaaaagatgagcacggaagctgctgcgcgagaatagaaagtgaataggagggaaagaggcgggagctcttgttgcccgggagagagtgaaacatgttgggagttgtagctgttgttgcatggaagaggaggaaaacagggccgccgccagactggtcctcttccctagccgtccagagccgccaccgtcaatgtcctcttccccttctggtcaagtcgtccaggctgccggggtcagcgcctctctgctccttttccctagctatccaggcatgctctcc

SEQ ID NO: 22618 - DNA, 286 bp, Zea Mays
ctgctcattaattaaagaacactatatgtcaatctgtatagtttgcattatataatttcattttatgcccagattgcagaagcaaaccttctcgtaactcaaatgttacataaactgaaacacacatcatcataactcaaatatagtttcataaactgaaacacatatcaacgtaactccaatgttaatttggtgtaagccatcaggcgctagcacgccaaaagagcctaggtgcggtctgcacacctgatcgaccttcccgctcagtaggtggtcgtgttcttcc

SEQ ID NO: 22619 - DNA, 837 bp, Zea Mays
ggagacacgagcgattatcctggtttaggctactcaaggccctacttccagcagagaggatgatgcttatattactcgcactgtggtgcctgtagtaggggtttacaagcacagcgagagaagggaagtccccaggtccctagagatgattgaggcaagtgccaatatctaagacagagtgagagggtgagtgttcgtcgacgtgtgttgtgtgcatgttgatgtcgtcgatgtcgatcccccgtccgtggagggacccctgccctatatatatgccaaggggagcgtccttagtgaagtcgggtcttgtattcgaacaagagatgcctggcgtctgtcgtgacggcgtactacgcaccagattcgtgcatgttaacttcccgtagagagctgaggccgagaccgaggggttgtccgtacgcccgagcccccgagggagaggccacccatgccgtattggttgtaacagcgccgaggtataggtcaaaggctgcttacggggtgcgccatcatcctggcgtgtgatgacgtcgagattccttgcagcactcatcgagattagagcccctgcttagttgatgcagaagtcttcccgaggcgctagccgagccgtcccttgacatgcgctacagtcgggcggagtagttgtctgcgggattcgcggcatagtcagtggccgaggccgagctcgggcaaggcggagaactcgctcgaaggctgagcttgatgtcgggcgaggcggataaattgcccgaaggctcgtccgctcgacttgtcgtattaggcgtcccatcggagggcgtcaggcggcgtgcgcgcactgtttgtgtaggcata

SEQ ID NO: 22620 - DNA, 462 bp, Zea Mays
ggagttcataacatgagttgaattgaatttaaagggagggattataaatgggagaagaatatagaaaggaaaaagagaaaatagagaaatcccagctgggccgttttcctcttcggccggcccaactcagcttctctccccgctcagcccatggcgctcactgccgtacacgtatgtggcttactagtggggccgccctgtcatcacctattccttgctccgtgcgcatctcaacagaacccgccatgctcgcatggtcagcactccctcgccgcgatgttcgctgttcggttccctccgctcggacttcaccgtggtgcataaaagccgaagctccgtgacccccttccctccatccaccaaatcgaggctgcatcgagtcgttgggagcctcgcctggcatggagaggagatcggagcatgcacacagagagagatcggggaggtagaatggaatccacc

SEQ ID NO: 22621 - DNA, 340 bp, Zea Mays
gtcaattcttccctaggatgacatctatcccttgagtacccattactactatgttagaggggaaatctatcctccttatttcaatccttagatttgagcacatcttatcttactgaacttttcccccaaatgaattaacccttagaggtggagtcattggttctacgaggatgttatgtgcttctacccatgatgtagtaacaaaagaatgtgtggcactagtatcaaaatgtacatttgctggatgggatttgactgaaaacatacctactgccacatatgttgcatcctggattgcttctgcctacaagtggttcacctttccacggttgtaggtcta

SEQ ID NO: 22622 - DNA, 358 bp, Zea Mays
catacaagacaagcaagcatgcagttctaatgtcctaaacatgatcaagcatatatcaaacatatgcagatacacaaactgaagtgaagaatttgactccggtcagatagtacagtcgggaagaaaccaaaatagattgcacattaacatgtacacatggaaaggcagaattaaagagcaacaagtccaaacgaagacaaaccgcaagagggtgcacaaagaagatggcattggtttatctgtgcctagattattgtacccattagatcgatggttcttttaacattggtcataagtcacaggaaacaaaccaaaccagaatcaacttacaaggctaccaatcgactctaactctaat

SEQ ID NO: 22623 - DNA, 569 bp, Zea Mays
aattagcaatggtatgtgttttccactactacaaccctgaattcgcatggacaaaaacctgttagactcataggacaggaaatccaaccacaaaaataacagtaaacagctacacacaatgcaaacgatggggaggagagcgcatgatcgacaaatggcgagtctcaagggctatgcaaatatggctagcaatggggaggagatggtgagctggatacgatggcgagtttgatggggaggagatggcgagccggatacgatggcgagtttgaaggcgagactgttgcaagctaatatctggaggttttccatttctttaccgagcacagtctgtttagccagtctgttggtgatgctcttatatgggtactcattcatctattctttgccttcgcaataaggatttccattgagctgcgcttctatatttcacaattgttgacatgaatattttgcttatctctaggtacgtaccaaccgctttctcttttatcaacaccatttatgattatgtagtatttctttgcatgaactattaatattagtattacgattttgacttatttttt

SEQ ID NO: 22624 - DNA, 625 bp, Zea Mays
gagattgcccctcgcggccgccggcggtggaacccttacctcgcccacgccgcgtccctggtttgcttcctgagtgcatcgctgagacattgggaagacgctcgtgtccccgggaaagagaagatggtcgtggggtgtgggaaattgctcaccagagtccgagggttaccgccgagccgcctgaacgtgtgggcagggccgtcaccgcttcataccgaggtaatgcgcccaccaactgattcgccttgacctcctctacgcgtagctcgatccaatttaggtttggcgctcgggaacgggcgattggcagcctcgccggcgtgctccgttgggggaaagacgaaatcatcgccgtccgatcctctatggacggtaccgattagatcaagcataccccttcactcgatcgaactgagacagtagatgcgagatccaatggcgcggagttgattcgcaactcattaaatccgggccgttcaccggtgatccaacgacttagcgcgcgttggatttcataaagacttagattcaatctgagacatccacgtctgatccaacggcccatcgtggccgataccgcttcgcagtgctcttttgcatatgaaccctcggggttctgaagaat

SEQ ID NO: 22625 - DNA, 724 bp, Zea Mays
cggagaacgaaattgggggaaatgagcaattctccggctatgggggctaatcggaggcgggagtgggggctatagcttcggtatgacctagcgcagctggccgagggctcaatttataggcggagcgagcggtggtcgcgaattttggacgagacacacggtggtcggaagtgaggaagaacggtggtgcagtgaacacgtgttcaccgccgtggcagtaactccgatggtcgacggggagtttagagggtgtcacggcgatgcgatggcgcggttaggacacgcggtggccaatggcgatggcacgacgacggtgagcactttacccgcaggcggtgagccaggggagatgaactacggctagccggagtggcttccaggtcactagcggcgacgatcttttgaccccgcgacgttatcaacttacccgagcgtgaatcatgacgccgatgacgcgaatcacggcaaggggggtcaccggcggtgggaaccattgcgctggcgatctgatcccctttgctactgtaccatggtgaactcccaacagagcacctgacagctagagttgagggtcgattttctccaaattttacttggcaactcacccaagcctctgcatcaaagttttagtgctacttaccagctacaaatcgactatagggattacacttatttgagcacgggatcaaggtcaaactggctctcaaacttgggtccaagtcac

SEQ ID NO: 22626 - DNA, 434 bp, Zea Mays
cgagtgatgacgaagccacgtcagcgtcgaaatgactgatgactacgtcggcgctcttagaggtaacagccgagtgacttatgacgacgtcggcgttttagaggtaactgccgagtgacttgaagacgacgtcagagttttagagataactatcgagtgaatgatggtaacgtcggtgttttagaaataacagccgagttagaacgggctgcgtcggccactttgaggataatagccgagtgatgatgtggcataccggtgccttagaagtagccgccgggtgatgacatggcacgccagcgttttagaagtaattgccgggtgatgactgggtgctttttggaaacggtatctgacccgggaatatcccatatgtattgcgctttcagacgcctctgctttccatgccctagttcttgctttcttgcctccag

SEQ ID NO: 22627 - DNA, 1026 bp, Zea Mays
ttccttttttgatgttttagtcttgaacactgcctatagtgcgtttgtttctcatccagtcagttctgtgcatatttaaaatgcatatttaaaatcttcctggcacgtaacattaccatacacacacacaccatatatatcagtttaacatatgcaagggttgtcttgctatacctagcacatactcatacaatgtgcctagaaataatgatctggttggaagaccgatcaaggcaacaataacccttatgattagtggagtaatcggggaaaacatacagggaggagcggtggcggaaatgttgggatagcatcgtcggtcgaaaacatagtgatgagtatatatgagggtggggatccgaagatagcacgatgggatgtgaagttaagtgtcttagtcggtagaatattgaggagcgtaacagtgctaagcgcctcgacccaatatgcgagaaggacactatcctgaatcaacaaggagtgaacgacattattgatggtgagaagcatgtgttcggctttactgttttgaggcaaagtttaggggcaagacatacgaagttgaatgttgtgggagtggaagatagtgtgggtgatgtgtttgtcgaatctgtgaccattattgcacttgatgccctaaatggaaacgtcgaactgtgtggcagcagaggcaagggtggaaaatgtgtgagatttcagtcacaggtggaatgtccaaagttaatgcaaaaaatcaaggatggccagatagtacttaatagctagagacgttgacacttggtgacgtccatagctcacaatatataagctgaaaaatgcgagttgtatgtgacaaggatgcataaaagggaacacatgtatggcgacccaactgacaagtgtgacacaaaatgtgatcaacacgcttattacaaggaatagcagacaattgtgttagtttggacacaatgtcgtggctaggatgaccaagacaccggtgctaaagggaagtgttggtggatgcaaggagagcggacgccgaaaggt

SEQ ID NO: 22628 - DNA, 624 bp, Zea Mays
tggaccattcgacacgcgagcagaggagacccactcctgccgtagggtcgtggaccgtccagctcagcgttgtggaccgtccgcgccaccgcaggaagcaccaccaagtggtacgctccttctgtttgggccggaatcggagccacaacactttttggcgacaccaatggggaattaattaggtgtgacctaaatctgccacaaatggccagttcaaaggatcgcaccaatgtttctcctagcaacatgatgaagccgtttcttgagagtctatcgactgaggatcagcaaccgttcgaggattacgtgaggcaacaaagagaagagacgctatgaagagaggcacaagaaataaaggatgtggaggagtacttgaagcacttcaagatggactagcaccataagatcatcaagcaaggagagatcgagatgtcatccctcctaccttcgtgaaaccccaatataagtaaatcaaagtaccttcagtccctcaaacaatatgtagatctgcaagggaatagttgcaacaacgcatggggggtagaagacacgcttaagaaactcatacgtacgatagacaaatctgtcatgtctaattttccatcacacgaggtcgcgattgag

SEQ ID NO: 22629 - DNA, 427 bp, Zea Mays
ccagccccgctctcccctagccatcgtcgcgccgtgagccatctagtcaccgggaacagagaagcgtgtgtcgccgcctgcgttgaaatggaaacgcaatggagtttgaaccttggatgatggcataagatgaaatctagggcatgtggagtcttgtcgtggcaccatcgggctgagtgggccctccgcaccgcctcaatttgtcgccggaagtcggggcgccgccacggatcgcgctcctctgtgggcggggtcgacgcaacgcgattaaccggtgagctcccttctatattgtttgtgctggtctgggcatcgtatggtggcggccggtggttggaatcgggctcgggacagttgggggctagagctacctcgagcatggatcgccgccaagagcatggggccccgtttggtgccttgggaagct

SEQ ID NO: 22630 - DNA, 649 bp, Zea Mays
ggagactgccctggcctcaatccactttgtgaaatattcgatggcaacgaaggtgaacttgaggttcccttgagctataggcagtggtccaacaatgtccagtccccaatgttgaagtggccatgtgtgggcgatgagcttggtgaattgcgaagggttgcctgagtgaggagagaacttctggcatgcttcacatgatctggtgactcggttggaggtgcaaattatcgcgggccagtaaaatccctggcgaatcaccttggctgcgagggccctaggtcctgagtgtgagccgtaggttccactgtggacttcgcggaggatttctatgcctttagtttcggttatgcatttcagcataggctggctgatgccctttttgtacagctgatccttgactattgcgaactccctgctcctgtgcttcagtcgtttggcctcattgcgatcggttggatggtagtggccttgcaggtatagtgttattggggtccgccagtcttcgaccatgatgaggttgataattcagtggccctcagtgtcctgagttgttttgcaaaccttcgggttgcggacggctggcgtgccgatgacgtggtagaacacatcggagggcagggcctcacccttggccgctgctttggccaac

SEQ ID NO: 22631 - DNA, 524 bp, Zea Mays
tgtatgttatgcattaggatttgtatgtcctataatatctatgatctatccatttacttatgcattttttgttcgcttacttatatgtctatgaagtcacctcgcctcgtgccttaggcgcttaaaaggtaaaaaggtcctagattattgtaggttgccttaccgccgtaacaaccatgctcaagtattctacaacctaagtcgtgcgtcagtatgctaagtcaaaaacgcatggtcatccatcgtgcatttaatgaatcgtacccaaaacttatccattaagctatcgctgagggataatcttcagtgccttagatgtggggttccataatatgaggtcagactattcccggcgggcccgtcactccttctgcctcgagataggtaaagacttagctagcctagctcattgactcctccgagggacccccaggccctagaagacatcgattcctgtcagcgtcaaagtaaggtcaataacccaagggcatttaagtgtagcatatgatcggggggcggtctgc

SEQ ID NO: 22632 - DNA, 493 bp, Zea Mays
ctggctgacttaatgggatcaaattggggctagattgagcatcaggaacagttggcacgtcatcgatagcacgatcaaagtcttcagggggacggtctactacaaccggacgcaccacaaccaccatgagttgcaaatgggtcttcatagccgaagtaacataattatcccaatccagttgacaatcaattgggatgactcatcttatgacatttggtggatgaccaatgttaagcactccgtcaaccgcaatgtcatcatcttcatggtaacctagcttttgtttagcctttgtaaacacatcactcaaggagggtctaccaacgaatagtaccgacacgtgtcgcatgtcaatgaacttagcatttccatacggatcttgttccacattgtctccatgatataagctcaaaaaattgtccatctatttgaaacacgaattaaacattcaatatccactatggatggttattgcctaaccacaacccactaa

SEQ ID NO: 22633 - DNA, 653 bp, Zea Mays
ggccgggctgctaagcatctacagcacacatggatgttgaaacgagagcggggaagacatgaacggacctgtagagagctagccacggtgagctcactcacgtcggagttttgactgaattgggggaactttgaaattggagcgctctggtggacgatctgaggcacgggctggtgcgttgggtgcttgactacctagcggagctgatggcacgctcaatttatagggcccgagggcggtggctcatgaatttggaatggcgcgctggcggccggagagaggggagagcactggcgcggtgattcgtggcttctaccggggcaaggtcaccggtgacaaatggacacgcttaagacgagttactgcgacatggtagagcacctaggcacgtggagcacggtcgataggcggccaactccggcgaggaccactttgcccgaccgcagcccaagtgggtacggcgagctcaccgtcgaccgggtctgagcttatccggtgccaagatttttaccctgccatgataatctcctcgctagagagcacgaatgatggcgacggcgcggatcacggcgcgagggtcaccggcggcgaggggagctgaatctgtgatctttgtcaagtactgtaccattggggtcctattcagagcgctt

SEQ ID NO: 22634 - DNA, 633 bp, Zea Mays
accgtggccatgtgcagggacgtctttttcaattcaggtctccagatgtaggggccatagccatgatgacttaaaaaacaaggcgtggatatggccccacctacggttcgccaccttacccgaggtgggtccgggggccactatcggtacctcaagattggggtatccactgctgctgggtcaaggcgaacccccaggactacccggtaagcccactagattcgggtgaagaccaacacctgtaaattagcactctagaaccgcagcagagggggccgagttagccacacgtcttgaagatgagggcacttggcacctacgcccgagggccagacctccaggagcgatcctgactctcacggcgagccaccccgacttctagcctaagagggtctggtgcttccacgtgctggtcaacaacggaggagacatgacctccccgggcaccatccggaccccctagccaagggcagtccggagctatcacgaggaaggatggtcttagtcacttctctccacacaaggcaacacccggtgctgccacgtgttccgcagcgcgtgacataagccatcggggaagcctggcgtcagcctctaagtgtgaagcgcctctgcattaattgtggactaaac

SEQ ID NO: 22635 - DNA, 768 bp, Zea Mays
ccaaactccagtttagttttacccacgccaccatctggtggaccttctatcctcggagttatcccccgcgcgacgctgcccaagctcagtgttcccttcacccgtctccatggaggacgcgtactgcgcccactcaccggattcatctccccgcgatgaaagtgagccaccccttccttgcctccccacgatatcttctggagtacattcaccacgatctcctgtggaaagagtggatctaccggccccgagctcggatttgtcggatcctcaagtttttctgtttggggatgaatattgaatggaggtttgattcaatttcaaatatccagcagtttattgtctgatgtacctacgccgagtacttcatagctgtcttatcctttggtttcaggttttagaaattgattggggggcaatacagattgatgatagatgcgagacgttggaatggagcacttcgtagacgactacttttctgttgaaaaacttaaaaaggcttacgcacgaaggattgaaagtgtgggcgacaaatccttttggccacaagtggccatagccgaggaagtgaatgcacctattggtaagaggagtgttgggcgacaaaggaagaataggatgaaaagctgcctagaaggtggtgctgcaaagaagaaacggtccatacctgaggaggaaaaggagaagaagctactcagaggaaaaattaaatgcccgaactgtggccaactcggtcataggaaggccagcccaaaatgccctcttaat

SEQ ID NO: 22636 - DNA, 407 bp, Zea Mays
tcctctaaggtcattccgggggttggtgtgaacattcaaatcaccttgtctgaactccccccaaattggtcgtcttcccgtcccggccactataggtccatagttgtgttcaccccccccccctcacacaaggccgccgatatgagcttcggctcggtgcggatccacatgggtggtgtggctgccttccttctcgtgtcgaaggcgctacctcgccggtccatccacggatcgtcatctgaatccagtcatgggttgcttccggatccacaccgagccgcgagcagctccaacacccgattcgaagataaacaccgagcacctccaagtgaagcaaggtaaatgaaatacctttcgattcgtacactaccgagaacagttcaacctaaaatattctacatttcttg

SEQ ID NO: 22637 - DNA, 441 bp, Zea Mays
aaagggttgatcagtaatggattgataaaaagaagggaactaataggatacagatgatgagatgaatcttatatgatgctggcacatatgtgacgtaggaggcaaatctaatttactatggattctcgtctatcagatctccttatagtagtgggcgttgtcacacctccctctatatctctctctctataatcccttcattcccccaaatccaccctgcccccaaatccttgtgcacggcgcaccttcgtcgacgccccgccatcatcgccaccaaatcctcgcggtgatcccctagcgcaatccaaggaaagtctccgtcgacgtcccaccatcatcgccccatacgccgtgctcatgtccccgccatcctcgccatgcttcccgccatcgccttccatcggtgtccgaggggatccacccggttctccgtcgatctgg

SEQ ID NO: 22638 - DNA, 814 bp, Zea Mays
gtgcaccacgtggtgtaggctggtggctgcacgcttctgctgcgctcggaccgggcacaattgtacatccctgccaccctcacctcgtcgaacaaagggtggtagggacggtggttcaacctccgcaaagacgacgggtgactaccggtgtacacgcaacacattgtttttgcgatggcggaacattggcggtggggcgctccacgggagcactaggctcagctatagccgctactagatgcccagtggaggctttgggatcatggacttatcgaggccagagtcgtcgccaccttccaccggaggaaggtgctgccgttgattgagcgttagcttcgcttggacgagatgacatccgaggcttccatggaaagctctcgaattgctttgaccgccctctccacggacgtgctcctcccataggtgaagggggcggtggggaaggtacactacaccgcccccgtcccaatgcgccctgaccaaggctatgtgtctctagtaagtcttcggattctccttctgttctcgcatccctttcttcttcatctcatccttctcctcccttttgcaggggctgcggggctactgaaccacccaacctctagtcccaaaggacgtagccggctggacagcgtgccggttggtcgccgagaagaagaagaaagatgcggacatgaaacgagcccacgacgcattggagaagcaccacaaggcgcaggcgagagtggacttgccgttggaaccctctcccatcacatagacgacgatggtgacgacgaggggatggaggtccggctaggcttcagccccgagg

SEQ ID NO: 22639 - DNA, 430 bp, Zea Mays
gtgagatatttcttttttcgaagtactcccaatttgaattggttattttgctactagggtatagtggtcaccctaaatcatgtgagtgtgagcatgtcgcatcgacttaaggcgtttccgacttaagtcgtttgttctgttagtagggtaagtgatcaccctaagtcaagtaagcgtgtgcatgttgcaccgacttaaggcgtttccgacttaagcagatttctccgttagtagggcatagtgatcaccctaagtcaagtaagcgtgagcatgtcgcaccgacttaaggcgtttccgacttaagccgattgctccgttagtagggcatagtgatcaccctaagtcaagtaagcgtgagcatgtcgcaccgacttaaggcgttttcgacttaagtcgattgctccgttagtagggcatagtgatcacccta

SEQ ID NO: 22640 - DNA, 559 bp, Zea Mays
gacagagtagaggtatacgtcgatgacatcatggtcaagactaagagagggtcgaccctagtggaagacttaaccctggtcttcgacaagctacaacacgcacaaagctgaacccggacaagtgcgtctttggtgtctctgcaagaaagttgttggggttcctggtttcgcaccggggcattgaagcaaacccggagaagatcaaagcgattgaggcgatgaggcctccagcccgtatcaaggacgtccagaagcttacagggtcattagccgcccttagctgcttcatttcgaggctggttgagagggcgctgcccttcttcaagctgttgcggaagttcggcccattctcttggaccgaagaggcgaaacaagcttttcaagagttgaagcagcacctggtgtccctaccaatactggtagctccagaacctggggagtcgatgtatttatacatcgcggcggcttcagaagtggtgagcatggtgctggttatcgaaaggacggctcaggaccggctacagaggtccggactgttcagaggccggtctactacatc

SEQ ID NO: 22641 - DNA, 899 bp, Zea Mays
tttgcttctatttttgtctcctgaaaaatgattgtggctggccattcactcattcttcttgtagaattcaagtttctgttttcaaatctgaattgaatctaaatgaaagtgacacgagaaccatgcttcatgcttacttttgtcttatttgtgacgtttctcgcttaaagatatatgctcattcctgaaattgactctgctattgtgtttatattccttgaaaggtgatgcagttttcaaccaaaattggatgtgaacaaagtttgttaccaatttcatgtgcatgctcttggaagtttggattgaagaatgctggactgctgcttcaattcatgatcagggcatgaacaaccatggaattgggtgcattgatcgtttgttttctttcacaaaaaaatcacgaccatgtgattaaagcagtcgtaagctcagttgtatcttatttggtgggggagagaaagcgcatatagctcagtttaaaggaaaatttaggtctggagtccttacacaccttagcatgcaaggaggacgaagctgtcgtggctgtgtctggagcgagcaaatgtggtggaactttaatagaagagatttattcccgtggaagttggaactgaaaacaaatgttgaaatcatgattcagtttatgtactcaagcctgctcatgatgtgaattaattggacaaaaatgttggacagatccgatggcccttgcattgatgtcacattaattcaagaggttatgttctttttcctgaaaatgaactgtggtcaaggtctgagaattaaccatgtggttaggttccatactgacctgaaaatctgaaataggtactttgcaattggtccttgaaattcgatcaaacgtgctgagaggctatctctagcagattatctcactc

SEQ ID NO: 22642 - DNA, 614 bp, Zea Mays
accatttaaagcctttggtaattcctctccttgcaaggttttcaacgtatatgcatcattgggaattgccttaataacactataagaccttctccagcagattacccatacccatttggggtgggatgggtaacccatgtagtcaggaacgcatacccatattctgagtcccgtctagcagtgtacccatacccatatcgtctctaagctcgttcccgtggttggcgtgaacattcaagtcgccttatccgaacctcgccccatttgttcgtctagctcggtcccgaccctacctcgtcgcaccatagtcactgcattcgtcaccccattcacacaaggccaccgaaaggagcttcatcgactacgggagctagcgggatggtgtggctagccttccttgtcgggctgaaggcgctaccctgccggcgatcagctaccggtgtgtacggactaggcggctactcccttctccagcgccgtagagtgtgcgccacagtgagcttccgaatccagccacatactgtcatctgaatcctgctgcacctagcttccggattcgcaacgagtcgcgaccagctccaacacccgattcaaagataaacatcgagcaccac

SEQ ID NO: 22643 - DNA, 650 bp, Zea Mays
atagtcttcgcggaagacttcgaattttcgcacttgttgtgctagtccggctgcacccttaggcgacttttgcgcggagttgtcgcacgcgagggtggctagcgctggacctcgcggtgactttgtattggtcgaatgtcgaagaccgtcggcgcggtcttttttcgacgtaggtttttgcgggggatttttcacttgtatattacatgactccgcctcgttaaaaacctcaccccccgggaggaaaagagtgcaggccagaataaaattgttcttgcgaattacaagggcgaaccggccctgatgagtcaaacaacaaatttgcggagattatcgatgttcgaggagtgctccaggtcttcgtcgtttggcgttgcgagtttgtatgcgctgggtgaggccttcgtcttgacaatgaaagggccctcccacttgggctccagcttgcccctggcctctgtccgagctgttcagacgagtacgaggtccccttcgctgaattccctcgggatgactgcgtggtcgcgccatgctttggtctgggcttggtatttatttagagcctgtagagcgaagacttggtctccatcaatgagatccttcgaagtgggttcgtccatgtcggggatagctgatgaaactgttcgcgg

SEQ ID NO: 22644 - DNA, 665 bp, Zea Mays
tttagattgggtcaggggcgctggaatgcctattgggcactgcttcggcaatgtcgcgccgcgattcgatgggcggcaccgccggtggcggtcgggggagaccggcttgtcctgagccgttgatggcatgatctgaggtgtagattagagggtgtgtactgggttaggtaagagtagtgtggagcgtttgattccgatcggacgggcggggaatgaatcgggattcattaaatccgtgcgcttgattctagatcgaccggatcggtgcatgaacgagatcaacaccgtcggattcggatcagatggtgcttagcgcgtatcgattcgatgtattgtagatctaatcaaggacgtagaattccaatcggacgaccagtgtctgcccgtacccctttgcgggtatgttttataaaagagaccctgccttttacatatatcaacccgccgtccacgccagagactctctgagtcttaggaatttttgcaccatagcccccgcacttctcagaaatcgaggcctggtccagaggattagaatatcagagaaattaattgagaaatagatttttagtacatatttaattacaaaaacttgtgtaatttgtagaaaattcatatgaaccccaaattgatccattcaagttcctaaatttttgtaatattat

SEQ ID NO: 22645 - DNA, 1461 bp, Zea Mays
cttgtgcaacagatttgaaacaagagctgctaaaatttgtcagtacagttgagaaatgacttataagcattatttcagataccaaaatcacaagctaaatcagtcaatgaactgcacttcctgaagtcctcagaagctacaggctctgaggctgcccccttagcattacacatgtatagtttgcttctgtttgcattaatccagcttgttccaggttctttctttacctttcttgatttcatcagcttccttacctttacagcgtcttcccaatgcccaatcgtcctatacacattttcaagaagaacatagctcaggtggtattgaggctccaattccatcatcttctttgcaacccttactgctacatctgggttagtatgtgtggcacaggcaccaagtattgctgcccacagtgatgaatcatctctaaattgtgacttgtttacaagatcttcagcctcttctagaagctccactctactgaggaggtcaacaatgcaattgtaatgttcaataccagggggaataccatagtccttgctcattgagttgaagtagttccttccctcttcaaccatcccagtatggctacaagcaaaaagaacaccaatgaaactgatgtagtctggcttgacccctcctctaaccatctcattgaacaggctgatggctcgctcaccatggccattctgagcacaaccacaaatcatggcattccaagtaatcatgttgcggacactgctcattttgaatactctgtaggcatagtctactgcaccacattttgcgtacaggtccacgagtgcggattcaacaatgacatctccgcatcctctcatcctcatagaacggcagtggatttcttttcctagcttcactgcagacagaccagcacaagatcgcagaagagtccctaagctataccagtcatcgtcctgctcctgcatatgcatctgtcgaaacaacgagagaaccttctcatgcttcccagtttgacaataccccccaagcagggcacaccatgaaactgcattcggagccttcatcctgtcgaataccttgcgtgcatccaccatcataccacacttggcatacatgtcaagtgtgctgctctccacgatgacgttcccacacaggccacgtgtcacaacctgcgcgtgtgcctccctaccctgcctcgctctcttcatgttcccaagcgccgacatcatagagccaaatgtgcagccgtccggccaaaccccatctgtcctgagcatagcctgaaaccaccgcagggcctcgtcgaaccagtcgttccgcacgaatgctgatatcaacgacgtgtagcatatcccatccggtgcgcgcatttcctcgaacgccttccgcgcgtcgcccggcgcacccgagtggccgtacatgtccacgagcgcgctcagcacgacgccatcgtcgccgtaccctcgcacaacggtg

SEQ ID NO: 22646 - DNA, 308 bp, Zea Mays
tccgcaacttcaggaatatgatttctcatggtctgaaatcttttgaggtatgaccgaagagtctcatctcctcggcgcctgatggatatgaggtaccatggctgagctggtttgtcagagagagattggaagttggcgataaaatgccgactgaagtagctccaatcgtcgatgcagtgtcggggtaggtgtcgtagccattgcagtgcatcttgcccgaggacgatgggcaagtacgcagtcatcacatcttcagttgccccagcggcccgggcagctgtggtatatactgccagccagcctcccgg

SEQ ID NO: 22647 - DNA, 885 bp, Zea Mays
caaccagggcccattggtcagcatgaggggaaggaaatgtctgccctggaagtattcgcccccgaacgaacctcgaggcaccgagcccggggtcaggcgtggtggagccagacatgggggccgggcaaaccgaagggaaaccactcgagtggatccctcacttggcccgagactaacaagccataagtgaccaaccacgttaactatgcctggcgctgagctgcggtagaggcgccagtctacctcccactcatgacctacgaagcccctcgggctgcagcacactcatgacctacgaaccccttggaccgcgatgcatttatggcctgtgtgccctcggcctacggtgcactcatgccctatcaaggctaggcctgagtgcgcaagccgcatgcagggcacaataagataagttgggcgagacccaggctacgaaggcaaggggtcggtgtagctcgaataatggcgcccaggccccacgctgcccgctccgttcgtcgtaaagattgtgacacaaccagtcgatcgagacgctcgcatacgagtacgacttcaccatggtaagatgctcagtgttaccatcgcccggtgactccttctcaaggaagccaccaatgaccgaccctcccccttgtcctataaaaggtggaggtcaaccaccaaatagaggggcaaccaaataaaggatggaggacgcatcaatgaggacccaaagaccagagctcccctcccccgccatggcaagatttagttaggactccagttgtgtaacccttagattcaccttatccgcacaagacttggaagcttctcatctctctcgctcgcttgtaacccttactacgagtattgatcaacaaagctaccggtggcgcgagccgccga

SEQ ID NO: 22648 - DNA, 380 bp, Zea Mays
tgaggggaaactctcgttaggacttgaattcggtctctgccaaagtaggacgccggtcatcgagtaaatcgtctggtgtaggctcgctggagctcggccccgcgctgtgcaccgtcgtggacttcgggatgtgaagaaatagaacatgggggaggtttttgtaaactgtcagtgactcgaggaatagtactgcgaccccgcttcaggttattcaaaacgatgggggcctattcgcaaagtcagtactgcgggcgcgggtgcgcgtgcttccgcctgtagttgggccgacttgggccagtttcggtccaaaactgttcattgtttttccttttctttttctgtgagagttaaagaatttctagaaaattgtagaaaaatgc

SEQ ID NO: 22649 - DNA, 413 bp, Zea Mays
aacacacaagtaaatctttagcgtccttttagtttgttttataggcaatgggattaatcttggatttttttttcggacaacgcaggagagcttcatgtcatttcattaagaagagggattaatctcagattgtactcaatatttgaagaactaaaatgctattgtatttttcaaaacactagaagaattcctgaatcctaattttctgagcctgctgagccaatcacctgcgactgtgttagattctggttcccacacctgtgtcctggtaacactattcctgcctatgttggactcctatatggctatatccacgtgagtgagcttgaagatactcacaaacatggcaacttgtatatgcttcccactgatgtttcacccagtataactgcaattactttataatagtcaag

SEQ ID NO: 22650 - DNA, 577 bp, Zea Mays
cgtagtgtgttgccagtgctaaacatcaacaatttgcacgctaggtaggggaggcggcatcgacactggttagctccatggacatcatcttcaccaacaccgtaaacttttctctaggtaaaacatttcactttggatctattacttgtattgttgacaatagcaaaactctgcaccacgtcgttgatgtagggaatgaagtaaataagcgtacaaccactaccattgtttggggagattactcgctcgagcctataatggctctggcaatgaccacgacgacactgcagctatacgtcacgtcgccatggactatgctaactcatctctaggttctggcacctccacttcctcgaccaagatctggacccagatcagtcagaggggggagtactggcctatgacgtcaaagccagctcttcacttccccaacatcttcttcatttatggtgtggtggatgaacacttcatctctgacgatgaaccagctgaggcgggggaagacccgcaactatgggaggcacgtgatctctagaaccaacgatggaacatccgatgccaccatgttgttggtgaa

SEQ ID NO: 22651 - DNA, 462 bp, Zea Mays
gcgagggcgaagaggcgctagggaggagagctctagcgaggggctcgaaggcaaaaaacggtggctcggtggcataaagcagagcagcagacacgagcaatggcacatgcggagaggagcgacagagcagaggaaggaggaggtgagcgcatccgactttaatagccgagggagggaagggagaggtcaatagagggaagatgaaaaggaagcaccggtagacaccattaatggtggtgggagaacaatgggaatgggaggagaaagtttggcgcggtgtcgatgcctccatccggggaggcgagatggctatgcaggatgcgcgaggggcgagcgcgacaaagcaaagggcaacagagcttgaagatggaccccatgacggatatggccctacaagcagtgagaaagaggtggaggtgtggggcgcgtgggttggctacgttggggtggattcagccgatg

SEQ ID NO: 22652 - DNA, 813 bp, Zea Mays
gaaggaagccgccgctggctccagccagagtggcttggtttatcttaagtataccttttggtttagaagccaatttgatgagccaaatgatgattggcttgacgctataatggcaacaagtgatgaactacttggagcgtactcgcgggtagaagacgaagctatgacagctgccttcagcgctcgcgggaaaaagaggctgaatagggtgttcgatgttattgggttcgtttacccagattactgctttcccatccaaaggcaagggaaaaaggaaagtcgttgcttcgacatcttctggtgcaccgaaggcaaagaaaattatggtcttgacacgtagactgaggctcattgagatggccgatgtgccgaagttaattgaaagggcagaaactgcccccagccacagagacggctcctgcgatgccgattgaagctattgcaaaccccaccaaagagccgaaatcagagaaggtagcagagcagccaaagatgctggtgacagcgttgccgaagctatcaaccactacaacagcaactccgaggaagaggaggatggctagtgttttggatgctgttttggaatatgtgaaaacgccacctcctacttctgtcaaagcttctggcaggaaaattgaagatgccagagagatggtcactgcaagcacttcttctggtcatgctgaagcgggaccctcagaagttgtgccagaaaaacttgtggaagagagccttctagaaaaacccacaacatctgccctcgaagcacctccccagagtgatttgaattttgttgttcgacatgcttcggga

SEQ ID NO: 22653 - DNA, 709 bp, Zea Mays
tatgaaaactgtgtcgacagtgaacactatgtaaatctgatggagactaaacttaactgaagctaacagatacctctaccccatgagaggcatgatcttgaggactgtgtcggtgatgcaacaaaatgtttcctatttgcatttttctttaaaattgagtatatgcacactaatcattatcagttagatttttttgtttgtacgaaccatgaaggcctgtaataaagctgtgttggagcgcgacaacgcagaacttacctcttcctaggcgtggttgtcagttcctttgttatagcgggagtagcacctggaaccacagcgctgctgccaataccaatagtctgcatataaggggtcagtcacagctcgtactgtttgctacataaatctcaaagtctatgggatgcacaccttatcttgcacactggttgcggaactttgtggtgtgagcggggtcaaaggcatgaccaagttagaggctttgctaggagtgtcttcaatgccactgggtgcgccttgcaatagcacaagttgtgacttttttggccccgatgaagatgcctggatggagtcctttgtagtacctatctctgccacgactgtgttgacctggaaacaaatatttccagtattgattgtgtggtcagagaaactcacattccatatatacgtcttctcgagcagatctgtgattggatcaggaataaag

SEQ ID NO: 22654 - DNA, 275 bp, Zea Mays
ctatactatgtatgtttgtattgatacgggttcaacaggtttcatcgattttgtctaggcaaggcagagggagcggatcggagcaggtttcatcgattttgtcgttcagtcagtgtatcgcataaaaatcattaaaataaggagcgcgtggtcggcgaggttgtccaaaacagtactactagtctactactacacggaatgagtaagcggagacagcaagggacatgatcttagtactactatattgctatgggtccacggcggtcccatactcc

SEQ ID NO: 22655 - DNA, 947 bp, Zea Mays
agcaaatcgcgctgcaaaatgctctgtcagaacaactgaagcaacctctgatggtacagtagcgaaaatattccagggttcagtccccctcgccgttggtgatccgcgcgcccagattcacgccggtcgccgtgattcgtgcttggcacgaagtggatattcacgaggaggtaaaaagatcgcgcgggggcgtggatttggtcgcagcagaggcttatcaccgcgcctgtagccattgcgacgtggccggaccgctggtgttgccatggaaactccggtgacctcagttgtgccacgccgtggcttgttactgtgtggtagtgaccgtggcacacttaagagtacaatcgtggagacattgcgccggtgaacgccacgagttctttgcgccagtgctcttcctcctctccggtcgccgcacgtctcctccaaattagccgccaccgctcatgaatcctataaattgagtgtgccatcagctccgctaggtattcaagcatccagcgcacccactcgtctctcggattgttcaccagagagctccaatttgggatttcccccaaatcggccaagaacatcgtgtgagtgagctcgctgtggccaacgctccacaggtccgttcatgccctctgttcactcattttagtactctgatgtgctcttgatactccctcacccgaccgattaagctaggacccataggatcaccgggaacgcgtcgaattgtccgtagatcacacggccaccgtgggcagagagattaggggctataatcttgcaattgatcgagggaaaatggttattaggggtcaaattaggtgtcaaccacttctaagcaccggtcattgtgtatcttggctggtacaagctcgtcggagctactgctccgccgttcagcgtcgtggacctagcgttgtgaaggaatagaagtgcgagggtctcgatgc

SEQ ID NO: 22656 - DNA, 674 bp, Zea Mays
ctacccctgggggtgaaaagatcttgggggagggtgaatccaggcactggacaacctcatacgccgtacaccctagccggtactatggcgaagctgtcgccgcgggggtggtttccactcatcctcatcgtaccaagcagcaactccttcaccacgtctctacggtcatggaaagcagtaatttattgtctctgagctattgcacttctatgcgccacggagagtaagttctagtgaactatctggtcacgccgacaggttcggtgtcatccaaattcgtggcaagagtggccgatgcctttaaattgagtgttctccctgctccgcccctatgttaaacacccagtccatcgccagccaccttccttcgtccaccataccccgtaaactctcggattcccaaaattggtcaccaacgccaccgtgatgagcttgacattggccaacatcatccgaggtagctgcagctaaattgttgggtattctaagttcccttatacgccttgatgctcactggcccggccgtttgaactctaccgcagtgtagtactgggaagtgggaacatcatgtcgacatcggtgaacgccaccaaggacagccttcacctcgaccggttgatttgtgcctgctccgaccaaactggcatgggcatcgtaactctggtgagtcgctg

SEQ ID NO: 22657 - DNA, 419 bp, Zea Mays
taatcaaaatttcccccttagaaaatgccgccgcgcacaaggagaatagcacgcaaacatactggaccgattggtgtgtcgagtcaccagctggccccaaggcatgataatagtagtagcggaagcaatgatcctataggggatctcgaagctgaagtaagtcggctccaagcggaactccgccgcaggacggctatctgggtcgtagatggcgaccgcataaatgagttgagaagagatatccgccatctgcgagatcagctcgcggaccaggatttggcactcgactgggatgttcaatcccgttcgcttgcatgggacaaggagcaaaaagctcaagctcgagtagccgagctcaacttggccgttgatgaactgcagacatattgcaataccttacatgaagaggttcatgtatt

SEQ ID NO: 22658 - DNA, 504 bp, Zea Mays
ttcaccacatctgccttattctgaatctccatcatcaccaccacattccccctccaagagtatatgctactcaaggtctgccatatctgtgaagcagtgcgcatagcttccaccctcttgctaacagtgggagacatagatgccaataaccatgccactatcatagagtttgttgtatgccaagttctccattcagtgccaagcttatcaaccggctcaacacaggtctcctccaagtagtgctccactaccttgcctcctaagaggacgcacactctcctcgaccagctcaagtaatttttgatgccctctagcttcacatcgttcggcacaagttctaactttaactcagatgggtttgtattggccttggcaccaatcaaccccaaccccataagctcctggatcataatcctcatctcactcatcatctcactctttgtaatcccacctgaaccaccaccaattgttaccttcgttgcagcctcttcttcccttctcttg

SEQ ID NO: 22659 - DNA, 870 bp, Zea Mays
ggtctgaacagggcagcgacgtgagcagtggctggagcaactccaccgtgagggtgacagagaggatctgacgtgccatagcacaagttgtggagcctcgtcgacgactcaggaaacccaaatagctctcggatctaggtagcatgcaaggtcacatcctctcgctcaaacctaaacctcagccactaatgatcttgatctatccatactatggcataaactaatctgacccactcctcaatgtatctaccactgaaggtcagaagagaaagtaaacctggcatataggagagatgaccctctgactcagcaacggttgctgacagaaaggcaggaagatccaaaagctggtgcgccctcaaggcaacctaggcagacaactgcaccctgaagaacgactcctgagtcttggtgccgaagagtggcgcagctgctgggtccctctaagctggcaaccaagaatccacaggtacatgtctgaatcgacgtacccgggcagctgtgactcactgaagataaagcagacgaggattagcagcaagcggtcgcaccttggtctcatcacgctccctgaagcgaggtggaggaataggtggagcagaagtgggagctgtggaagctggagtggtggacgtgctggacacattgggtgtggtggacggctcgagagcgatagaagctagtgaagtgggaggtggagtggagactgggtcaaaaggagtggagtgagtagtggaggagcgaggccgagatgcgaggcgacgaacgtggtaggcgatctgatctgaggagatcctcaactgccctccctgctcatcctgatctgctgctgctaccgctgcaagtgctgcacgagcggctctgtccata

SEQ ID NO: 22660 - DNA, 1004 bp, Zea Mays
gagagggatttgtgggttcgtcggtgaaattgagccgagtgctcgatcgcggaggtgcgggatgtgataaagaagtgcaacccgggcgcaatttataggccaacgaccggaattggatgaggaccgcggaccttagattgtgcaggcgagctcaccgcgcggcggaacccggtgatggcacggtggccgccgtttaaccggagcctgccacctcagtgatttgctgccacgttgccgaggatatttaccgcggccgccggcccatcccgaccgccatggtgttcttatcaccggcgagggctgacccttatccacgacgcgatatttctgaagacctgtgaacagtgcgcctgaatcagtgaagagcttatctgacagatcaaattggagcttgattttctcccagattcctgtggcaacatgatcaacacattgtagcaaaattgtagagaaatataccatctacaacattgctatgtggtgttaccacaaaaagccaatggatcatgcttgaatttgggcttgaagttgatgtcagtccactgtcagtctgaaaattcagaccttaacagcctgacagcctgattttgagcatgattatctcaagatttttcacaagaacatggcttgcactcttaagcaaaattgttctcctttgtttgctctacaactttgatgtggtgccctagggcaaaaaccctataatttgaaagttgcaaagctccaaagttgagctcacaattctgaaattcagacttagagtgaaatctcaattggggttctttttgcaaatgaatccaaaacttagggtttggcttgtaaatcttcccaaatgtgaaccatgtgactttatattcttaaacataatacttttgacactttagtccaaatgtgcactatttttgcacataggcccctagggtttggatttagggttttctagggttccaatggggtttttggtatctcaggggtataaatgtgattcaagtttattcttggga

SEQ ID NO: 22661 - DNA, 621 bp, Zea Mays
cacgggatgggcagataagggcgcacggtaaaagatcttcgccgacggtgagctggcgatcactccagtgacctccgtggccctctctccccctttgcggctgaacagattaactcgccggtgaccgccgcttcctggctgtgtgccgcgtgtccaagcctatccaccgcgtcgccatgactccctgtacccgtcccatcgtcgacggggaggttgccacggcggtggacacgaattcaccgcgcaagcttcttccccatccccggccgccgcgcgtcctcctcaaaattcacggccaccgttttactctccctataaattgagtccatgactagctccgtaaggtcctaagcttaccagccaccgttaatcagccacaatcatccactcgtgtgctcgaattcggagtttcccccaaatccgatttccgccaccgtgaaaccaagctcaccgtcgccagccatactctggtcagtttccgtcttctgctcccttgtttaagcattcacatacatcggtgatacttgccaacccatcgaattgaactaagagccctctggtcgccgggaacacgaccgtatagtcgccatactcacggccatcgtggccagagctccatag

SEQ ID NO: 22662 - DNA, 960 bp, Zea Mays
cccgaaaccttacgtcaggccgtgctctccggctttcgtcacgggccatagacacgtggcagcatcgggtttccgcccaggcggggagagtaggcgtgcctgacaaaatctcgacaagtgtctgtgccggacccctatacgcccccgacttaagccacgatattccccgtcccgagatctcgttgtggacggtccggacctcacctagaggggtccgggttccgtcttaggtgaacactaagatcccaattaggtgtgttggggtccggtgttcccttacgagggtccggatcctggtggcctcaaagattgcccccgtggaggggtgaggcgtggtttactgcgcctccttactatagtaaggggtacccctattccagggtaccgacagtggcccccgggccctcctcaagggaggctacgaccctgtaggtggggccaaagcctggctgacgtgccatttcctggcacttgctgacgcaatggttgccaatctatcttcagtcgtgctgtctgccccgtttgttcccatagcaggcaggtaagtggcccccgcctccgccaatttcgtcgggctgcgcgcggggcgtcttattgccgccgcctcaaaaatatctttttgcggcccctaggtgacgtgcggtcgtgcgtgacggtttgcttccggggagggatggcccgtcttccgcgccctcggaggctggttgcctggttctccaggtacgtgacatgtggacctaggcccctatgtcggggaccgagtcactgtgagtactaggtgcgcgttggatggagtcggggggcgcgcggaggacccctttttgagataaggggacttattccgcggccagcagttttgctttcgcacttttcttcaattgttgcgttcttcctcctctaagtcctctgcgcctctgtcgtactcacacttcattgcctttcgccgccatagcagccatg

SEQ ID NO: 22663 - DNA, 361 bp, Zea Mays
tttctagagacatcgaaccgaacaacttctttagtaggtgataccctgagaaggacttggtcacccactgcaaattccaaatcccgcctcctcacatcagcataactcttctgacggctctgagctgccaaaatattctgacgaatttcccgaaccttttcagaagtctgctgaacccaattaggaccaaccagggatctctctcccaaagtctcccagcacagaggggagatacaccgcctaccttacaaagcctcaaatggtgccatcttgatgctagcctggtagctgttgttataagcaaactctgccaatgcaagatgatcctcccagctacccttccatgacagaacacaagcac

SEQ ID NO: 22664 - DNA, 459 bp, Zea Mays
attagatctgtgcaccgattcagcttgggcttttctcgaccgttgatcagccatcatgcgctcaggatttaatcaccagataacgtttaggttggtggggatcctcaccgttggatctgttgccgacgcgtaagattagatcgtgggatacctctttgcgacattaaatctggggcgttgattcggtaatgagtggtttagatcggatcgtggtgtggccgtcccacgtccaacggatcgcgatccaatggtctgaaacgcgtgccggttcgcgagggcggagatttaatccggaccgtggatcagatcggacggctgtggtcgctcgataccccttcggccagccttattccaaaagagaacctaagaaattaaataattgacccgcggtccatcctcggggttttctgagtcacgggaatttttgtagattaacccctgttgtctctggaatttgag

SEQ ID NO: 22665 - DNA, 503 bp, Zea Mays
aaacggtgccccttgacaaagcctaaccttgagggactaatgtttggaggagggttggactggacctcgatcgctctcaatgctcaccaactactaaccacaagtcagaacatgtctgcgagcacattgatccgagggcgcccttaggcctaggaaaccttgaaggtgacacctagagatggtgcgaatgtcggataacagagggtgctacgatgacaaaagcacgaagacattgccgatgatcgagatatatctaacccgagcagacccccgggagggctcgaagactaacaagcccccttcctagctacgaccggatgcgtcctagacctctccacaaggcctcctcacagtcagagcagaggcccaacaatgaagactcctagagtgaaggcgtacaagacaggccaaagaggactaagtgtaggaggttgaaccgagctggggctaccccagccgcaccatttgggcccgcctgccagcctcttgagcgggtacaacgc

SEQ ID NO: 22666 - DNA, 690 bp, Zea Mays
aggaatctttagctaacatatccagcatggcacttatctctgcatcactggggttcaaaggcacctcaaaatgaacctgtctctcgtcgtcaggaatttcttccagtgaggcaaccaaagcattaacttcttcgggagagggtcgcactctaaggcccaaaccactatcaccgggagcaggattcgacacaaaactggtaaaaggcttggaaggaggcatattgcaggctgagtacgcacaggagcgctgatgttcgacaccttgcctctgagaatcatttcaagccggctcaccaagtccacagcaaaaattcttctgttggttacccgggttgaatcagacaggcctcggtacagataggacggatacgctctgtctttcagtggctgaatgttcttgaaaacaaagtcagcgaccacagcttctgcagtcagacccctttctttcaacaatccaacttcagctagcagagcccttgcctcagccacctcctggtctgtgggggattcggtccagctcggagtgcgaacatctggttgtctccctgaccgtgggggagggaattcccatgattctccacgatgaaccattccaagcgccatcccttgatgctgtccttgagtgggatgtcgaggtagtcagtcttcctcccacggcgcatctccaagctcgcgccccccaccaactag

SEQ ID NO: 22667 - DNA, 571 bp, Zea Mays
ttccagcatttcggaaaaggtggcctgggtcctggatggaggagtggttctatgttaagaataatctgattgaaaaggaggacatcaaggggatcatccaacaccctatctggtctcgcttcggccttcaaaggccgaccgtggcgattgataatgatgccgaagcatgtcaaaaggctttcagcagtgcctgtgctttcattggcacaagaggcctgatccaagagcacatagcctatagggtatggccacttgtagataactaggagatgccgaaggagactgttgccaggtccagtgaaagtggattaattcgtttgaaatataccttcagatgtagagaccggtttgatgaacctaatgatgactggttaaaatgtattgaggctactagtgacgaattacttgggtcatataccagagccaaagatgatgctttatcctcagccttcgggggccggggcaagaaaagattgaacagggtttttgatgcaattggcttcatataccctaattattactaccccttgcgagggcagggaaaaaagaggaaaacttctgcttcagccat

SEQ ID NO: 22668 - DNA, 386 bp, Zea Mays
gtacactggcagtggtgccgcctccagaggttgttgcgaccttggatgtctcgaaacctgccaatgttcgcccgaggcgtcctagccgaaccagtcagcccgagccttttgctgatgatcagaaaaggaaaagaagacgcctccggcgagtgtctagctttgatgaggacgccagcaccttagctcctactgctgaagaaaagactgcaactggtctagctgacgttgatcccaatgggtgtgctccgcctgttgctgaccctaatgaggatgctgtctgcgctgctgctgtggaagatgaggaagaagagaatgaaactccattaattcggaaaaacagtcggcagctcgtcgctagcggtggtagtagtggggttccttctcct

SEQ ID NO: 22669 - DNA, 497 bp, Zea Mays
aaatgttagtgtgcaatgcagaagataacaaaggaatcgggcggccaggtgatgcagtcatgatgcaacgcgactctcctccaccctcttgttcaacctcctcgtccgtgatggattcaggcgctgacgtgacaatggtggggatcttcgatgccggctatagcgagtgggtggcggcgtgcccctgttgcggtggaacatgtagtgacatggctcgcctcctccgccctcctgtttagcctccttgatcatgatggattcgggtgccaacacggtggtggcagggatctccgacgttggttacaacgattaggtggtggtgtgccccccgctgcggcgaaacctgcaactgctagcagccgctccgctcggtgaggtgagcaaagccttatttatgcagaagaggtcacgttgctcgcgcgttgtgctattgctgttggttgtttatttgttgatcgtgtgctcttggtgcggtggaacctgcagcgacgtggctc

SEQ ID NO: 22670 - DNA, 605 bp, Zea Mays
aagccggctccagctcgtcgcacggcgcaatccacttcgaccgcggcccgtaggagtaggggtggagcagctcagcgtccaccaacgcatgcaggtcgtcgttgatgacgggggagatcggccacgggtcgcggggagtgagcacattcactttctcggccattggggatagggaagaagatgagaggagagtgcaggagcctttttgtggctaaggaagaaggcggccagggcaggaagacgagagcagaaggtaaagaaccgaagagcccatctcaagcaaatttataggggcaggcggagtcaccgagtcttggaccaagccaccctaagacaaaacccaaagcgggctaggacacttcaaattcctcgcgcacgcgtgcagcaacagtcggccagtaggccagcacatctcatctaatttaattctcacccttcctgccgactgacgttagacagcaagcgtcgcttcgcattacgcatcaaaaggtgtgcctctctctctctcccttactttccatttccttgcagataacgggaagaatgcgcctcccacctcgggcatccttcctcgagaaggaaaggaaaaagcaatgtattgttca

SEQ ID NO: 22671 - DNA, 408 bp, Zea Mays
tggttgacacagtactaagtatgggaaagagcccctaagtagtgcgctagctctctagtatctaatgacgttggatgcctttccattgcggatatcgaggtcagagccgggctcgggcgaggcagaagtctgcccatggtcacgaccgagcccgtttcgagattcgaagacgtgcgcaccatagttgtaggagtgcctcctgtgggattcgcggggagcaggtagccgaggccaggcttgagcgaggcgaagtttgtctcgagaacggattctacttcgggtgaggcagagttttgcacgcgagggctagcctataccctttcgtattgtatgtcccatcaggagttgggcgacgacgtgcgagaatagtggtcgtatgcgtaatcatagttggtgaagcttgacagg

SEQ ID NO: 22672 - DNA, 445 bp, Zea Mays
gtacttgcaagaaatgcgctgttttggtcaacctatccacaatgacccaaatagaatcgtggtgccgggaggtattgggcaatcccacaatgaaatccatgcaaatatcctcccatttccaagattgtatgggtagggactgtaaggtgcctgctaccttaaaatgattggccttgactctctggcaagtgtcgcattcagatatatacttagcaatttcccttttcattctggtccaccagtacaaggatctgagatcatggtacatcttgttactgtcggggtgcatggaaaatttggaaaggtgagcctcatccattattttctttctgagctcggggttcttgggaacaaccaatcggtctccaaaccatagaatccctttgctatcctgatggaaacatttgtatttatccaccttctattcgatcatttccttaatgac

SEQ ID NO: 22673 - DNA, 387 bp, Zea Mays
cccgacgcttgggctccctcgatggccgctccaaggcccagcgctggcgtgatgacgcttctcctggcgaatcccccagaccccaacgatcctttaaacaggcggtcctctccaacctcgctggtcaagcctcgttcccttctccctcatcgcggtgcggattgtctccctcccctgcgatatctatatccagcagccctctgaaggtgacgagtagttctgggggacgacctgtggacgatgacggctggcaagtagtcgtgcgcaagaagaggtctcgcggaggacccctgccccgtcgccggccccaagtggaacttcgtggaaagtgcttcaactgccttgcgcccagccaccgtgttgctgcttgccgccggccaactcgct

SEQ ID NO: 22674 - DNA, 783 bp, Zea Mays
gaaagcgatgaagtggtagtcttcaagagttttatgaaggcttgacttcgtttcccgcttcataagatgctagtcgatgttttgaaaacatttgagatataccttaattagattacccccaaagctcttgttaatgtggagggttttatctgggccatgaggagccaagcactggaaccagatgcaagatgcttttgcaatgttcatgagttgtcttatgagacgaaggcgattggaaaggaacagtatcgcaacaattttggtttttacagcttcgtgcctcgatctgaggcgagttaccctgtggcgacatttcggaagaggtggtcaggctcctggaagcaggaatggttttacgtaaagaatgacctaagtaagagggggaatgtgagagggattattcaacgccctatatggtcttgcttcggcattaggaggccagccactgcacttgggaatgatgtgcaagcatgccagacggctttcaacacagtgtgcacctatattggcacaagagacttagttcaagagcatattgcatacaaagtatggcctcttgcaagcgagtgggaaatgccaaaggaggtcgccgctggctccagccagggtggcctggtttatctgaagtacacttttcggttcaggaaccaatatgacgagccaaatgattattggttggatgccatagaagcaacaagtgatgagatacttggagcgtattcgaaggtagaagatgaagctatgacaactggcttcggcgctcgtggcaagaagcggttaaac

SEQ ID NO: 22675 - DNA, 663 bp, Zea Mays
ggcgggtcggcccatgctatgcctgcgagtctgcctccgtcggtccgtccactcactgtggagaaggagagggggaggcaaggtgcagagctagctaggggccagtgcgtggatgccaccaaaccgcattgaaggatcttcaattctctgggcctccctgccactgtctgcctcagcctcctccccccgtcgacagagacagagagagaaggaaatgcccacacccagtgaccagcaggccactttgtacagagcgaaaaggtgcggaggggatggaaagtttggtgagcaggggaagggggccaaccaacgaatagagcgagtgaagagtgcttgcttccactgatctctctctctctctctctctctcttcgcccacaagaccggtgaccggacgaggttcatttggtttgcgaaggcggccaccacgttcaacaaaccacgatgagcaaacagcagccaaaaatgcggcaaatctagttccatttggtcggcaagagaggatcggctcggctcgagtgaccaactgacaactagcttcgagagtgcctgcccagcccacccccactctttcaggcagatgacgcgcacaatgccaccgccatgcaggcagcatcatggctcataaatggagacaaggagggagggagacagggggtcgac

SEQ ID NO: 22676 - DNA, 582 bp, Zea Mays
cggggacgctaccctctaaagcgacctcctggtccaaggttggagctaccaccatatagccggaatgagaaggcgaccccgcatgaacgtccatggaagtacaggagggagaccccactcgagcaccgtcgggggctgggtcatagtctgcactacccacttgagccggatcatccccggcagcaccctcgggggctgggcagtggcttacacttcccacccgaaccaagtcatccccggcaacatcctcgggggctgggcatgtgtcaacaccaccctgggggtccaggttctctgcggtagccacctctaaggctgatgggccctcagttacttccatgggactagaacgatccaattcagtctcccgaccctcgagatcgcgctccaacgtcgacgaggcacgggaggacctcaacccagcatcttgcacatcagcacaaacttccatcacaccatcatccactggctccgataacaaatcctctggaaccatatcctcaagagcctgatcaaaattggccagggacagttcttgcaggccaatgagagcagacaaagcaggagagggaactccactac

SEQ ID NO: 22677 - DNA, 544 bp, Zea Mays
ttcccagtgatcctacgggttctaactcaattggatgggttgaggagcatcaagggtacatcagagtactgaaacaagggaacagagggtgggaatggacctgtaatgcgttggccacgttgagagtctttcacggcggcggaaaaccgatttgggggaagaatgaaattcttcggctatagtggctaatcgagggcaggagtgggtgctctggcttggtgataacatggcgcagcagactgggccatcaatttataggggcgttgagcggtagcacctgatttgaaggaatcgtgttggcggccgagaagggtgggggatgagtcactgcggcgatctaccgtggcgatcgcagagcaatgagctatagtgctcactgggcagtcaccacggctcgcgacgacacgataaaggtcctaaggcatggcgccaccacggtgaatggcgtacatgccagtgacggccactcggccacgtcgccggcgcgagtggatgagtgacagagcgcatagtgcctccaagttcatccgcagcaagatctttt

SEQ ID NO: 22678 - DNA, 671 bp, Zea Mays
acagtggagtaggtagccgaggccgagctccagcgaggtggagaaatcatccaaggctgaactcagcgtcgggcaagacagagattgcgcccgaggccaaactcattatcgagcgaggcggaagtttgtgctcgaggtctagactcagcgttgggcgaggcagagatttgcgtccgagggccgatctacttctcttgtcgcattagatgtcccatcggggggatggcaagcggcgtgcgcgtactgtagcggggtgtaatcatgttgttgcgcccggatatgactgttgtcttgttagccactgtgctcctgctgtcgcagcgttgggtaggtatgtgcattaaatgtgagtgttccccacctatttttgggcgcctttgtcttatcttcctgggatcagttcgggtgagacggacgaaacggtggtgacttcgggcaaggtggagttctgcctgaggtgggagactctcggggagaggcctcgggttaggaggtacctcggctgcttcctctcaagggttatgtatttacttctcttgagtgcatttttcagagggataatctgggtacccttaattataaccctcgacagtagcccctgagccttccaagaaagtactttggtacttgtttggaggctctgctgcttgctcgtgggtgtgccacatttt

SEQ ID NO: 22679 - DNA, 920 bp, Zea Mays
ccttcgtaagtcgtcgtgctttcccgcgtctacgaaacacactcccgcacactacgtgtataaaccgtctccgcacgccacacgccttcctccgcccgttatcgcaaccttagagcacgtcgtaaggataagtccccgtaaactccgcgccgagcgatgcaaggataggacctgtgaactccgcgtcgagtgacccgccacgtcgtaacctccgatagcgtgcctgccacagcgtcggtcgctataaatttctggcctctcgctctccgcgtcagcgcaacgaaaatggttaccactaccagcagcagggctcggatctttctaggtggcgggctcttcagagactcatgtcgtcagtctggtgctggcgtccgactgtttgccatgacatgtcgaggtcggacgaggacacagagacatgctggtcggtggctgcgaccacgggctccctcgttgtggcgccgacgaggaggaggctgtagtcgagcggcatggcgagggtgttgttccgcgtagggaggcgctttccgctctacatcacgccccatcattccatggtagttaaggtacccgtaccaccaactctttgactctaacgatcaatcgatctgcttaggctggaaaggtctcaattggtagctataggtggagtgctggcggtactaatgcgaaacagagcttgggagtcagattggtgcatatggggtgagcgatcgggtgcttgcttgctcatttctaaattgatggagcagggaattgagttatccgtgtttatagcggcgacgacggttacaaggatgcatgtcatgcatttgtggaattgcagcagccttcgttgagtcttggagagctacttctacggtcatgatctgaagaagtttctcaaagcgtgaacatctcttagcttgtaagatgattct

SEQ ID NO: 22680 - DNA, 643 bp, Zea Mays
cgagagtagcagtgggattgccaattcaacagcagcggcggcggcggcgttctctatctctcagcggcgccaggcgatggtggaagtgcgcggcgagaagatgggagcgcgagcggcgagatcgtggatcccgatacttgtaggcgaggcagggtaatggcggttgaacaaggctccgtagctcgtggctgaagacgcgacatgcacgaaggtgggcgcgaggaagggggaaaccccgacgggtgggttccacccgtaagtgacttcagaaggagtgcagcgcaacggtgtagactgacgcaagggccccatatgtcggcgcaatggtgaggtcggctgcgcgggagtgggctagatgggccgcgcggttgaaggagtttgggccaaaatgaagttgagctggcccaagcggtgttttaaccttttcctttttcttttctttcctttcctttttgttttctttctattttgttttctttctccccaaattcaatttccaatttcccctttaaatccaaagcttgtggcaatttcatctacacattatatgttgggttgaacatagtatggaaataatgtatttattcctaaatttattttattttgtatagtatttctcccattcttcattatttccaatttt

SEQ ID NO: 22681 - DNA, 342 bp, Zea Mays
aggatattatccttctcgatctgctcgctctcaaacaagcccttgacggttggttctagttttctaggtgagtgtccggtggtccatatgctcaacgcacgtcgtcaaaccaaaatttaattagtcagacacacgcaaattcgtctcagattagttttagcgtcctccaatcctcaattggtgcacttgagctcacgtataaaccgagcgtcaggctacaagctgcttccgagcaaaatggtcgcgcggtacacacaagcacaacacagcacaagatcgtgatcactagactgaaaacgctgccctcatgcggtgcgtgcgtgcacggcgtgctgttccctc

SEQ ID NO: 22682 - DNA, 331 bp, Zea Mays
cccgactcagcccaacctaaaccgccgccagcccacatagccaacctaaacctaaagcacgtccctcctcctgctcgctcctcctgcccgatccgccgccttcccccagcctgcccaccgacactccttcttccgtgctgctgctcctccaccagatctggcaatggcagcccccgacacaccttcttcgcgcgcgcccaagatcggcaggcaggcggcatcgatctcccgtgttgcctgctccgcccgcgcgccccggatctggcgagcggcatgacggcgggtccctcaacagcgacgacgccatggctgcggcgtcctcaacggcagc

SEQ ID NO: 22683 - DNA, 586 bp, Zea Mays
tattaatatctcatatctatatttatgataaaaaattagtcatgtcgggtcatccatatccactgatgtgtataaatttacctcatactcatacccatacatgtgggtaaggccggtgccccgctttgtttcatctagtatatctatggttttgcatgtgttgtctgagaggtagaagcaagaacatacttgcctcgcctcgtccggtggagtaaaggacatgtgcgtatggacatgtgcgtgaatggttcgccgaatttgaggtccaagccctgcatgattgctcgattgcttcttcttcgtcttcaatctcgtcgccccggctcgtgtgcctactcatcgtgtaggtcttttacgttgtcgtcaagaacgagctggtgctgaatgtcgctgtcatcttctctgccctatcgttagcaagaatgaatgtacagccatcttcctctcatcatgtttttcataatgctctgtctactctgttgagacatggttttactagttcaaattctattcttaattagcatgatgtgctatttagatatgttcactttctgtacatgtttgccgtttaccgttatggtcatgt

SEQ ID NO: 22684 - DNA, 794 bp, Zea Mays
cgcggagtgtctttgacgaagactttgattatcgcacttgttgtgctgttccggttgcacccttaggcgacttttgcgcggagtgtcgcacgcgagggtggttagcgctgcccctcgcggtgacttcggtgtggtcgaatgccgaagaccgttgatgcggtctttttcgacatattgtgtcttagtttttgcgggggatttttgtgggtgtattacatgtctccgcctcattaaaaacctcaccccctaggaggaaaagagtgcgggccaaaatgatactgtttggtgaattacaagggtgtgttagccctgaggattcaaacaaaaaatttgcggagattatcgatatttcaggaatgctctaggtcctcgccggatggcgttgttagcctgtacgcgctgggggacgccttcgtcttgacgatgaaaggaccctctcactttggctccagcttgccctgtgactctgtccgagttgttcggacgaggacaaggtcccctttgtcgaattctcttgggatgactgcatggtcgcgccaggccttcgtttgagcttggtatttgttgagagcctgcagggcgaagacacggtctccgtcaatgaggtctttggaggttggttcgtctacatcggggacggctgaagcgcttgtccgtggtgacccatgtttgatttccagcggggtcatggcctccgatccgtatagcatgcgaaagggagtgaatccagtcgcccggcattcggtcgtgttcagcgcccagactgcttcaggtagcaagtcggcccatttacc

SEQ ID NO: 22685 - DNA, 555 bp, Zea Mays
gccaactcgcaataggcacaacataattacatagcgcaatcacaaataaacaacaagcgaaggccttaatggcaccatcacacaatagtgcacatcacactatttaccctcgtagctctattgcgaagagggggagggcagcgttttcactcaatatcgcaacagagcagcgagggcaacaaaaatgtcacataggctcctccttcggaataagacccgcctcccaaaaattgaacaacatcatcctcaactcttccccctcaaacaggtcctgcaagtccccctctccaatgcacgtcccagacgtcgatgaaagtagctcacgctgagcaccccgatccaatcgcagaccaccccgaagacgagacctttccatacccattcggcgacgtcttctcccactttgtgacgactcactgatgctctgtttcgacacatccattcttcgcctccgtgagtcttcagctctcacatcagccgaggttgccagcaccttgcgagggacagatcgcggtggagactccgacgcagccaaatccaacacagcaaaataat

SEQ ID NO: 22686 - DNA, 928 bp, Zea Mays
cgccgacttaagctgattgtcccgctggtagggtataatggtcaccctaagccaagttagcgcgagcatgttgcaccgacttaagtcatcgccgtcttaaaacgattgctctattagtagggtatagtgatcaccctaagccgagtaagcttgagcatgttgcaccgtcttaagtcgtcgccgacttaagccgattgctccgtcagtagggtatagtggtcaccctaagtcgagtaagcgtgagcatgttgcactgtcttaagtcatcgccgacttaagacgattgctccgttagtagggtgatcaccctaagccgagtaagcgtgagcatgttgcaccgtcttatgtcgtcgccgacttaagccgattgctccgtcaggtgggtatagtggtcaccctaagtcgagtaagcccgagcatgttgcaccatcttaagtcgtcgtcgacttaagccgattgctccgttagtagggtatagtggtcaccctaagtcgagtaagtgtgttggtttcaagtcccaccgaatcgaagtcacctgatagtcaagagtttgaatgcctttgaaaacgaaaacttaattgatgatgggttctccaattacagagtacaatgttgcttcgatagcttttgaggcctttgctaagggtaaaactttatgagatgctctatattccatgagttccctacttccgtgcaatccatttgagtaagctggtatgatcccggccgagtgacctctgatacaatgaatggcccttcccatagtggcgacaacttgtgccgtccttcccccgttagaatttggcgaaggaccaagtctcccactgcaaaggatcggtgtcgtacggctttatcatgatagcgcctcaaggtctgctggtatctggctgactgaattactgtgttcaatcgctattcctccagtaca

SEQ ID NO: 22687 - DNA, 406 bp, Zea Mays
gagattcaacaatcagaggcaagatttgatgccggagctgtcgtgtcctgtctcctgacagtccatgcagcagcggatagcagaaggaatagttgtatgtatgcatgatgcactgggcacatcagacatgtctcgcattattgcatctcatcatttgcgtcttcattttgcagattatcatcagtgctgttactggtcccttgccaacccatgcagtgcggcccggcgccggcgatccagtggcgactgtttgcctcttggcagcctgcatttctgcatgttccacaccagtggatctgtttagaaagaagaggcctacggacacctacagctagatggagctctcatctgttaaacaaacaattttacaggcaaaatggcaggtgctctaagaccttgttgccgt

SEQ ID NO: 22688 - DNA, 598 bp, Zea Mays
gtagtagcaggaagaagggcaaaatcggcagcgccaacccgcaagagatgtaggaggtgaaaacaacacaaactccccggcggcgagatcgccaaggggggcagcgccggcacggattcttccggcgagccctagcgcgctccacccaagcaggccacacaccagaacgagcgcttcctaagcctgaaagcgatcaggatgaccgatcgaagccatggcgtgtgcggcggcgcgggcatggaacataggagcacgaaggcaaaggggcgcagccgattgggagagaatgcgaaaaggtaactactgcacgtggggtgaatcctttttcaaggaaaccaaaatcccttctcagggaaactttccaacgtgcccctgaaacacagcaagaaatcccgttcgacgagcacctaggacccaagcagcctagtgtctgacacgggcgcccgggtccacaagtcatacagttcgtctgccggattttgggtgcggaaagagcgggatgcgaaccgccgcacgtgataacatgcctccttggggccactgcagaagacaaaagttattttaaaccagtgcagcggcaacgaggcgccctgcgcgt

SEQ ID NO: 22689 - DNA, 347 bp, Zea Mays
caactgcgcacatatatatatttattattctctattgtttcaacgtgtatttacactgtatatatacgtatgtagcatagtatacaacagtcgttaactaacttgtgatggcgactgatgagagatcgattctctagatcgccggagtacggatgttgagcaacgaaaccctattccgaacaatgctcctgaacaccacctcgctgccgctctcgcactcgtcgatgcatcgctcaagctcctcgtgcttctcctgcgcgacatcggccgtcgtcggcgtctccggcttcttggcgaaggcagcagccacgaaggccccgagggccttcttgttcgagcacaacgac

SEQ ID NO: 22690 - DNA, 520 bp, Zea Mays
cactagggccattggatgagagatctaccgcacagatttaaaatatccaaactgttttccatccgccagatcgggatcgaacgaccacggttgcatcatcgccaaccggtacccgaatcagatcttgaccgttaatccctatcaacggtcgcactccttcccccaaccctcctacctacgacgcacatgcggcgacggccgcagagcccactgcagaggagttcgccgtcgaactccgtccgacgaattggggccccaaattccaaatcaataggtgttgtacgtagagaaggatgaggcgaagctatgggttagcagactacctgcgagaaaggcgcccacaaggctggccacggcatggtgtgatcgtcggtgatttcccaagtctggtgagaaattgggttggaaacgggggtcgtcgtcgtccgtcaatgccacgatgagccagcacacacccaggcggccatccctgaccacagtgcggacttcaatcggcgatgcaggccaaggactgcgacgg

SEQ ID NO: 22691 - DNA, 361 bp, Zea Mays
cataagagtctcaagtatattttcactcagaaggagctgaatttgaggcagcgtcggtggctcgaattgataaaggattatgatctatccattcattatcacccggggaaggcaaatgtggtggctgatgcccttagcaggtccggggttccaaaagtggccttgcctttgatcgtagatctggaccgtatgggggtcgctttgtgctatgtcggcaccgctagagaggagactcggatgctcattcaatcccccttctggagaggatgcgcgtggctcagcagcaggatcgtttgttgcaggaagctcgaaagagggtcggcgatggtaaaccccgtgagtttaccattgatgagaatga

SEQ ID NO: 22692 - DNA, 678 bp, Zea Mays
ccgggcagagcatgatttgatgttgttcataacctagtgaagataataaacttgtggctctgcctatgtcatataaggttgtccgttgttagcccttgataaagcttgaacgtaccaatcacatgccatcctaaaatgggctctggtaaagctgagtacctctttaccccaagggttgaatcgtgacctgccagctggaaggcggtagcaaggctagtgtgtgtttcccactagggttaggtggggacggttcagacttggggtgtaactaggggaaagggtggcatatgtgcgaaatcctagggaaagtaagcctatgccgtgtgcttgggtcttccctgcagggtgtaaaattggttcaaatcactgagcttaccaggtgttaagctgcttgatctcgcactaacaatcgtcgtatgaaccaacgttaacatgctttagtctcgtgctttcaataccacatgtttgcttggtacatattacccaaggaagtagctggcaagggtaggtgctggaatagtggaaagttgatggtggagtcgtgctactttcttgggcgagtttggtttgattaagtagttgacagacacaaagtcagatcgaggatctggttttggaaattagatggtaggtacaactcagatctgatatctgggttttaaagtagttgataggtgc

SEQ ID NO: 22693 - DNA, 423 bp, Zea Mays
gcggattgcagcgtaaaacgtaacctaaaacagcgtaaatgagtacgaaatttagcgtaaatcttatatctgttttgtaacaacaaatggggcctaaaattacggcgtaaaaatcgcatgcagccgatcgtgcgcgggttctggctcgggcggattccagcgtaaaacgtgagctaaaacagcgtaaatgagtacgaaatttagcgtaattcctatatctgttttgtaacagcaaatagatcctaaaattacggcgtaaaaatcgtgtgcacccgatcgtgcgcgggttctgggtcgggtggattttagcgtaaaacgtgaaccaaaacagcgtaaatgagtacaaattttatcgtaaatcatcgatctgtttcgtaacgacaaatgggtctcgaattacggcatgaaaatcgccacaggcgc

SEQ ID NO: 22694 - DNA, 907 bp, Zea Mays
gccgccgtccgatgcgggcaagggcccctcagtgacccccacgccgactggagctggcgaagaccccgcgctagcccctgcgccgacgggtgaggacgcctcgaaggcggtggtcgaaccagctgccgaagaccccgcggcggcggccgggccttcgcaggtggcataataggggttagggattgtaagtgtaaacttttgtctgtgtgatgctgaacctcggttgttgtgtaggttccgacgtttgggcctgcgcaagcaaccactactgacaatactgattttgcggcgtagacttcaaccgtagtgcctgccgatgatagtttgtttggttctgtgtctaaatgttttgagtctgatggtgaatctgggagctcgtttccttggacacaggagtcctcggatgaaagcttggattgttttgttgcatttgatgtggctgcgacggagacttggtcgtgtgtggaggttgctggggatcttcctggtgcgagtactgggtgtatgctgcgaagggtggtggaaaaacataatgtgggtgaattttcgcgaagtggcaggcgtcgtcgtatgggaatggagcgtggccgtttccgagtagaccgggttggtaaacgagaattgttgtcctcgccgattggggcgagcataggcgaggggatcttctgaagctttttgagggtgaggaattgaggataatgctgtttgattacagggagatgggtatcatcccgaaggttgagccgatgtaatatgtgatgccctcgccgtgtgtatgtaattgtaatttgtatggtgatgtggcctattggtcgtattcgtacgcctgtgttggtccagttgcgcccgtgggcgactctgtgcggagtgtctttttaatgagagacttcgattaacgctattccgg

SEQ ID NO: 22695 - DNA, 1604 bp, Zea Mays
gggggggaaagcgggcgtgggcgcggtttgggccagatacggcccggccgagggggggaagggtttttccttttcctttttctgttttctatttcacatttccattttctatttttgtttctttttatttccttttcttttgaatcaacaatttgctaaataatcttaagtgttgaaaataatctatgtgaggtgctcctaacaatcaaggtgtatgcatatgatgagatgacctaaagggtgtagggaaaaatagaaataagggggggtttaggagattagggttccaaaccttgggttgagattttgggatgttacaaacctaccccacttaaaggaatctcgccctcaagatatagactagatttgagaaaagataagggtattccttcctcaaagagtcctcactctcccatgtagcttcctcttctccttctctgctccactgaactttacagagtttcatttctgagtttgcgggtcttcaggactgctgagtcaagaatctttacttgcttctcacggtactaaagatatttctgaatttgtattgcctcttcttcgatgtgactttctggtgcttgtaggcatttgcggagctgggacacgtgaaacacatcgtggatatcagacatggattctggtaattcaagacggtatgttgtgggtcccactctgccaatgatgggataggggccgacgaatcgcggtgctagctttcctttcacttggaaccttctgccaccacgcatcggggagaccctgaggtagacgaagtctccttcctcaaatctgagttctctccgcctgttgtccgcataactcttctgctgactctgagcttgaagtaatcttctgcggatcagggcaactttctcctcaacctcttagacaaagacaggtccttccagtgccttttcccctaagttggaccacatgagaggggtctggcattttcgtccatacaatgcttcaaacagtgacatcttgatgctggcctgatggctgttattatacgagaactctgcataaggcaaactggattcccaacttctatcgaatgttaacacacaggctcttaatagatcttcgaggaccttgttgaccctttctgtctgcccatctgtctgagggtgataggcggtgctgaagtctagcttggtgcccatagctttctgaaggcttgtccagaatttggaggtgaactgggttcctctgtctgacactatctttcttggaatgccatggagtctgactatctctttgagataaattcgggcaagggtggctcctccaaaggtagtttttactgggataaaatgggccaccttggtaagacagtctattatcacccagatagagtcattccctttttgcgtctggggtagtccggttacaaaatccatgcctatttcttcccacttccattcaggcactgggaggggttgcaataggcctgcaggcttctggtgctcagccttcattcgttggcaggtgtcacaccaggccacatactgtgctatctctttcttcatccctctccaccagtatctggttttgaggtgtaggtacatcttggcagtccctgggtggatggagtaggc

SEQ ID NO: 22696 - DNA, 593 bp, Zea Mays
ttattttagttttctgttggaagccccaaaaatgcattatgtttctgttgtggtaggttatgcttctcgccaccgccctaacattttgcgccatatcattgacgaacgactttaacaatcaaccgatcgagcggtgcaatcgataagggccttatccgacattccgtcgaacaaggcatgatcgtcgtcggtgtcgaactgtgcgttggcggttatgcggcgccctagcttgatggtggctagctcagcctggcatagaggccacggggacaccccgcaattgagcatgtcgtgcgacacctttctcgttgctgattcgtgtcgtcgcaccaccttactctcagctgactcaatcgccatcaccgttcgctggcctaaaaatctgagtgatcgagtattcaagggttggtgtcggatgagttagaccttgcggtggcgggttgccatggagctcggacgcattactggctgtagtggcctcataagaagcagggtgtgtacgcgaagttgttcaggaaaaagggaaagtgagaacaaatgtccctacgacaatgatttttcgctaaatttggtcgtcaaatgatatatggttg

SEQ ID NO: 22697 - DNA, 452 bp, Zea Mays
ggaagatgacaccgaaaacgcgagacgagacgatcgataggtcaaacggtgtgaaaacgacgtttgaatgataaatagtgccataggaggtgtgaaattcgaattgaggcacgaaacgacatggaattgagccgatacttcacgaataggtttatataggtgaatatgagtgaagtgtgtgcttggtttgaatttaggcgaagaaaaagagatttgggcactcggctcggaaatgatcgctcgaaacggggaatttggtgaaatttaagcctggaatctcggattggcgtgaaatttggcaaatatgttactggaagtgttgtgaaggtgcctgaaaaatttgggttcaattagagcatttttggctggtttgggcatttcaccgaacacttggcgtgcggtgaattaggttttgggagattgagtcgatttaggttgtgaaaccctccctt

SEQ ID NO: 22698 - DNA, 457 bp, Zea Mays
cctcgacgacaagaagggcaaatgggccgacctgctacctgaagcagtctgggctctgaacacgactgagtgtcgggcgaccagattcactccattctgcctgctatacggatcagaggccatgaccccgcaggaaatcaaacatgggtccccgcggataagcgcttcagtagtacccgacgtcgacgagccaacttccaaagacctcattgacggagaccgtgtcttcgccctgcaggccctcgacaaatatcaagcccaaacgaaggcctggtgcgaccacgcagtcgtcccaagagaattcaacgaaggagacctcgtacttgtccacacaacccggacagagtcacggggtaagctggaaccgaagtgggaagaaccatttatcgtcaagacaaagtcgtctcccagcgcgtacagattaacaacacaatctggcaaagacctggaacattcc

SEQ ID NO: 22699 - DNA, 496 bp, Zea Mays
ctgatgcgaacactacctttgtgccaatagagttgcaaaattccctgaaattttaattgtcaaattgctttccattgttgactgttaattatgaggggactctgaactgacagacaatattctatcagaagattttttgcgctatctttgatgttattgtcgacacagctctggctttgatccacttggtaaaatattcaatggcgatgagggtgaattttgaattgccttgcactgttggcagcggtccaacgatgtctagtccccaacgctgtagtggccaagtgtgtgcaatgagctttgtgagttgcgaagaggcacctgttcgaggtgagaattttttggcatgcttcgctcgaacgggtcacccggttggccgcgcacacaatggctggccaatagaaaccttggtgtatgaccttggcagtgagggctctcgatcctgaatgtggatccgtatacaccctgtggacttctcagagaagctccgttcctt

SEQ ID NO: 22700 - DNA, 710 bp, Zea Mays
atatagaactatctgtacaacaattccgaagaccaaaaagtaagatgaaattcacggaaccaattattgtcccgcgcgaagactgaaactgcagaaatctcagctgtaggtaaatacattctgaaataggttcgaaactgggatttggtcattttcatgccagattccgttcaaataagattttgaggtgcacgaattaagttataaaataaggtttactggtaccaaacgcattgataaattgtaaccaggaagacaatgttgaacttgtaaagcaaacaacacaatagtaacgagcagcaaaatgtgccaaagcaatcaaaatgcgtaccaaattacaagaggttctaggtgaaataacacctaacacgtttgtttaaaaaggcaacattaaaacatacccagcctcagaaggttacatgaattatttgctttactccacggtatattctattctactcacatgtcacaatttataattcgtttgactttttgaaccgagattgaccggttcatcttattcaatttttttgcaagaaaatggaaaattcaaagccatatttaaaatatattatatactaaacgatatcacagtaaaaattaataataattacgattttttttgaaaagccagtcaaacaaattataaaatggaacgaaggtagtagaattcttaggatccgttgtattttatttcacgagtaaataaa

SEQ ID NO: 22701 - DNA, 774 bp, Zea Mays
tcgggaatgctctgagcaaggccagagtgatttcgaagaaatcgtactcttggtctgatgctcgaagttcaggccccaggcgctccccgtgtttttcggtccacagcagtactccacgatcggtgcctgctcattccggcaatggaggcacagatgtcgcatgttcaaatttcaaaaataaggatgcaagatctggtgttgtcccggtccggacgttttcaattaaaccaggcccacatgtgtctttcaggcctaccaagggcctggtttctctgtttgcacgcacgagaactaaaacagggggacctagggcatcgataaccagacctagtgccgcaccatttggatacaccatatcctacgctgaagccctcgtcggcaacatggatggtggaggactgcggagtggggaggacgaaactgggcgtggttcggctgcgggcaatcgtggtggccgcaccaacgggcaaggcagtttgatgaaccacaatggctttagaagaccgaactttgaggctcgtcgcgggggttacaaccgtttcgggagaggtcaccgcaataagcacagagaaggcatggggaggtatgatcgccctagttcttcatatgggtttcaaggtggcacaggctctaggaatgcagctaacttacctgtcattccatctctgaattctgctggagttctgggggcgtcatccgtagacacgcttgctcaggcagtggcacttttgagtcaggcgttgggacatccatcagagaatttggcagtacctg

SEQ ID NO: 22702 - DNA, 584 bp, Zea Mays
aggtaacttgcacgagttaccgtggcattcaccggagcaatgactcagccgatagacagaccatctatagcgacctattgcgacgtggtaacaaggtaggagcgtggcatgctcgggttaacggcaatcatcaccgcgacgaccgcgcggccatgttgtggcacaagttggtatggcaacatggcggccacagtgccccgaccttagccacgacgaagatcttttcaccccagtcattattcgcgcgttcaccgggcacgaatcctagcgccggcgaggatcgtagcgtgggggtcatcgacagtgagttcagtgaacctacgatcctttgcaggtattttaccatggcgatctccatcagagcatctgacagagcgatttgaggaatgattttctccaatttttatgtaacaacttgatcatttgcctgtagaaaacttgttttcctataatccatctttaattttggtatagcacccacaatcgaacagtcaatggatcctactcaaaactaatctcaaagttcatctgacttcattgtcagtcagaattcagccttagggctgactgacagcccaacttcc

SEQ ID NO: 22703 - DNA, 575 bp, Zea Mays
cacacgcgggacaggcgtcgaggcagcagcggacgcctggccgttgcccaaggcgagagcacacccaggtaaaaaaatatcgttgcatggatataactactcctgacctttacgaatctcgacggagggggaggtacctgcgcgattcggtggcggccaggcccaggctttcccgaaatgatggtgtcgatgttgctacccacggtacaagcagcgtttgcggagtagacgaactccgacgagatcctccatggcacaggttcgatctccagagccggcgcccgggaccctggtgacggtgggtccgattcctttggtggctgccttcagttctctctcggcgagggtacaagcggtagatggtgatggctgtatgcctcgagtatttatgcacgagagggggagatcggctggtacctggctagcatccggtgcggcgtgcagcgatttggtcgcaaggttgttacgaggatagagatgctacagcagggccccacatgtcatgcagaccagggcacgagccggtgcccgcgagcgtccttccgcccgacatgcatggccctgctacaatttat

SEQ ID NO: 22704 - DNA, 770 bp, Zea Mays
cgctcctcctacatgacacgaaagcaggtagtgccccaaccagagatcagggttcgattccccagtgtacatcgtgatggcggggggctatagcatcgtggtacgggcgcctgtaggatgtgacagccgaaagctcgaggcctcgatggatgggggctcaggctatgatcctcatcggggttaaatcgacccccgcggcgctggctatactgatggtcgtcatctggctccatcgatacttcctcgctgctccctggtccaggcatgttcaacgctccctcgcctatttccaggttccagtgagatggggtctgttccggtcccgccttaggctggagcaatcgcctcgacgaggcgtcgttagttgttggtgaagacgtggtgctctggctagcccccagctctcgatgtcgtggtacaagacctttggcttgctgtcgcatggtgagactgagtaggcttcgggtttcttggtgggtcccccgttcactcggaatttttgccctagggagtctgttcgggagtgttgcagcaagcgcgatgttctgatgtgcccgagggacttgtggtggtccaaccttgtcgtagatcagaggatgtggggtgcgagttgctttgatgcgcatttgcagaacgcctcatcgtagattctctatttgccatcgaggcaacactcgctccccaacgggaggaccccggctgccccaagcaggaccctgccctggtggcgattctcggcactacgggtcgagttgatatgggtctgatgt

SEQ ID NO: 22705 - DNA, 704 bp, Zea Mays
cgctgtacagttattaggggcgcaagctcataacattggtggtcggtcgttaatttcaacttgcaccttttctgttgctgctgctgcgggatcgatggccaattaatctggttgttagcgtgacacaatgcaaggaaacaagcaagagaaaataaggtcgtacgtgtacgtacgtcgtgtagctgtagttacagaaccatcgctatgtatgcttacaaagcaagcacaggtacgtacgtactaataattcggtgcagaggtggctgagttttacgcccatcgtctcatcatcggcctagattgatcacacagataaacctgaccagcgcagacgtgccttgcattgtttcagcgccatatgcagaaccgttgatgcatccaagtctaccgatccgaataaacaaaccggtcgcaaaacgaactggctcaactaacccgcacaaaggcagcacgtcgtggtgccgccctgcgccaagacaggggcgcgcgacatgtttaaggcaagttggcgcagtcccacgagaaatgatcagatgaattttactaatgtgccaaactagcgagagggggaaatctcgcgtctcggatcgccgtgcctccctcatgcctgcgcagctcgatggcagattggcagtggccctagctgcgctctccgcttgcaggtagcagctagcgcatcccagccagagagagagagagagtac

SEQ ID NO: 22706 - DNA, 469 bp, Zea Mays
ttgtttttttcccttttttctggtttcgctgacggctgggtcccactctccagagggcttcttcctcaactgaacaccgatgcttccgggcggattccaggcttgagctccatccactgccgccctcaatcccaacagacttccatatatatcgctcaaggctcggggtgttggaggcaggcaccgagatttccatcctctataaacctaggcacctcacccatcacaccagatacccgacgagcaccatcctgctcctgcgatggccactgcctccctattcgttttcccctacaccgatctaggcccgcaaggacttaaggcctcatctgcataactgcctttttgcggtccgcccaagccgcggccggtgatgggcaagctcatccgccaggaccggaatacctcatcgattcgacgtcggtgttgattcctactccacgccatcgccagacaccgattggacggc

SEQ ID NO: 22707 - DNA, 569 bp, Zea Mays
accgtcatcaaatactcattgatatgtgttgaaattaatgttgtcgttctgagttgtacttacataataatattaccaagttcctatctaactcaccccaacatggagtagctcgagtatcgaaatggacttcagagttaactccccaagaggtagaagccattgttgcagccagtaagtgtatgcagaatgatgaagggccatcctttattatgattcgtcgttctgctcaagaccttgaataagtagctactgacatgtctgaagggggagccctcggcatgaagacaccaattcaactaacggagccctcgagcaactaggcaatgctgggggaaagatatcagctcaatcaaccataaaataaacatactctagtgtggccattgtgaaggacaaggcatcaaagaagaggaagactgctatacaagcatttggcaagaggtctgccaccaccttagccgagtcaacatatgttggttaccgtctgaacaagaaatctaaggtcaagaaagcaaccaaagatgatatttttagctcatcttctctagttgattgggaccatctga

SEQ ID NO: 22708 - DNA, 294 bp, Zea Mays
cctgagctcaatacctgcacttccacaagaaaggccactcaacacaaccgcaagaaccccccaagctgcaggaattccccaatgaagctctcaaagctacagatccccaagccaactcaagaacccggcggacagacaccaagaaactggacaattcggagaggctaggtatccccgcacagccctcaaggatcaggaaaaccctgagctctagcacaaaagcatataatcgagaggagaccagccaatcattagggtcataacagcacccatgggaacgaaaaaggatcggtt

SEQ ID NO: 22709 - DNA, 1137 bp, Zea Mays
cgctggctctggctgtactatcctcaagcacttacgtgtcagaaatataatcacctgaacttttgcatcttcccatagcatagttgggtcacttgcatcccaactggaattaagatacatgaataccggtccatggacctttttccagtactctccattcgtgaactttggtgagaggtcatctcctgcataatgtgcactaagaaacatctgcaaccatatgaagaggccacattcagaagaatatataaatgtcatatcattgaatcatctctgagcgctggttcagattgcattccagaacatgataacgattgaacttacagccagcatagtagggccaacatgagaagtcaagttttgcttcagaggtcctcctgtcctgaactcatcacttggagtgatctgccagaagccaattggaggatcgaatgacatccaaccatggacattgttgtactggtcttcgcaagagtactggtacttgtcgtcaaccttgacaaacattataagcaacgttcagaatcagaatgcactcagacacttacaatggataacagacatgtattatatttatctctgtcagggaagcttacctcccctctaagttcagggttgattgggtccacaaggagcacagcctcagggtatgctaatggctgtcctcgaggaggcaaccggtcatcgggcattggcataattctctgcctgtcgtcagccaatgccatgtaatgaaacctgcgattacagcagcatttagagagtttcagacattcaatgaacaagaagaaaaacagtaactatggcttacatgtctttccgcagcttgaaagccaccctcgtctctcccaagccgaaatcaggccatccttccttatgctcatagataccataggtgtagaacccggatgagccacggagaacgatgaacctgcacagaatcgcttgctctgttgaacacgcttgaaatgaactgacgaaatagctgaattgagaaacttgtgcgtcagtcacctcttatcgatgttcaaggggacagcttttccttcaagggaaggatcccaatttctggtgaaggatacctcagcctggttctcatcttggtaaacgatgcggaattcggtgcctttgatcctg

SEQ ID NO: 22710 - DNA, 406 bp, Zea Mays
ccgtgaccagctctgtagggtcatcagctaaccagccaccgccaattagccacaatcgttcgccggagctcgggaatttcgcgttcgccccaaatcgggtttccgccaccatagaatcaagctcaccgcggccagccctttctaggtcagttcatccctccctttccttcgtttaagctttctcatgcgcctgcgatgcttactgacccgtccaattgggctatgggtctactgaccgtcgggaacgcatgggtcttgagttcatccgtgcgctctccgtggccagaccaaattagttcaccattcgtgcaattgggttggggaaaatactcgaggtagatccaatttggtgtctgatgctcggagaatccagccgtggccccagtcggccggttcaggtgctcgc

SEQ ID NO: 22711 - DNA, 352 bp, Zea Mays
ctctcggcagtttcattcagtagcttgtcaacaacttcgtctacgattgtattggcgaccttcatcacatccaaagcctcgtttataacagggtcagcctcaggattgaatggctccggaggtggcgaaaggccgactatagcgaagtatatgataatcagggttcgaagccataaacaaataataaagcaaaagggcattaaatggaagtacctataattaatgcacgttcgacagcttcttcagcttcatttgcttctactcgggcatcatgggattctttttcattttctttattgcttcgtccgctatctcgcggccgcccttcatccaaacatcagaataaaatttc

SEQ ID NO: 22712 - DNA, 711 bp, Zea Mays
ttgagaccactagatcaaagatcaacgggccggggtttatgaacttagatcgaagcgtatgcgtttgatccgaaacgaacgcttcagatcatcctagcgactcggtattctgcgatctgatcacagttgccccgcggtcatccaacggttcggtgtcattgtctacacacgtttccccctaatggcaacggtgttcccctaatccacggcgatgcatcgccgccgagcacaattgccgcgagccggtgccccgaagtcccacccgagaagagctacgcgcaaagaaaattaggacaaagcttttggggatgtgctcaccgggatttggcgctcgggtgtgggttggccgcggtgccaagcgggttcgcggtggactggtggctctgacgagcaattaactcgtctccattggttctcccgatccaattcctccgtggcgccaatcatcggacccagctaactcgacagacgccacgtaggacaccagaatgaccctgaggtgtggattccacggcagcagcgcaacttcaccttcccaacgacaaccctcaatttctggtgtgatggttggcaatgggttgagcggaggtggtccgagggttggtcgcatcatataagggtgtgactaacgaggtcgcacaacagctccgagatccccgccgctcgctccgccatggccgggttccgttgaaggggagcagtcagtcccac

SEQ ID NO: 22713 - DNA, 350 bp, Zea Mays
catgatactttaagtacacgctagtgaattaaacactgagtagcgagacatcacaaataaccacacacactagcgttagctaactacatatcgtcgaacgcacaacattaacaccactaaaaagacgaaaaacattttggacatttacgcaacacaaatacgaccccataagtacgagcatctacttaacctgctacgacttttcattattcttctatttatcacacaaaagcatcccaagcaccagttcaatagaggaggaattcctatccacaattaactactcaagcaaacacatcaatcatggaacacatgttatcctaagtttagacattacaagtctatgtctg

SEQ ID NO: 22714 - DNA, 404 bp, Zea Mays
gggcgatggaggtcggcggcgcccagctagaagcttcgagggagcgcgggagagaacagaagactgacagagcgcgtggcgaacagtttatagcgcacggtcacccagactccaaattaagcggacgaggaacacgcgctatattttagcggaggttttagcggttgctgttggagccataccggacgtccagatcctctatatttagagtacagggtgctttacagtctcttgttggagacagccttatagttgcggaagacaatatcccgagcggaggacaatggatcggtgagtttgttgcgatttcctaggagtttgttatgattcgggtccaggtgctacgaactcagctatggtggtttttcggagagggagaagctgacgaattggccccaccaatc

SEQ ID NO: 22715 - DNA, 412 bp, Zea Mays
gttggtgaggctgcccggtgcagaggtggtcgccgccgctggcgagccgctcggagctagctacccacgcgaccctactggtgtggaggtagttcatacctgtagagtagagatggagctaggactccgcttgaaggcagatgtaatacttttgctttttgtaaggtacttttgagtactatttatcaagcagtattagcacttatctgtgtaccacttgtccctgttgtgtgtggtgtaaccgattcctccttggtacctggcccccctaggatgtaggctcgatttgtcgaggctgcagaccagcataccgaagaaagagttggcaatggcccctaggaggtagcctcgactgggatctgggcctgcacacagcttcggctagggagcattagtagtacacccgcaggac

SEQ ID NO: 22716 - DNA, 578 bp, Zea Mays
gtttcaggccaggggctgagcaggtatggagctaggatagtagtaatgtgcagtgctccagcgctttccgaaagttgtacatgtcatcgatctgttagcgtgcgcgcacacacacgtacgtccgtagaaatgcatgacaagctagccaacagtcttggcaactccattggccaccacgaggttttcagttgttgtgcctaggcagtacatagagttctctctactctcacaatcaaccttacaaatattttagaaaatcaggaaaaagtaggcaatgtgctcaaaccttgaatcagcaattaatgtattttagtttgaatgcacccgcttttaacttggatctgctgctgttgtttcggccaggataaggaccaacaaaagtgattaattccctattgctaggcccacacactaatccccgttggtatttattcttatgggtatttgaagaggccaatgagagttatttaatcccagtcggctagctgacttcttggccggacgatggaaattaacttaagtcggcttcgccactaaaaaaatagcactgacggttgataacggaatccgtctgtaaa

SEQ ID NO: 22717 - DNA, 349 bp, Zea Mays
ccgccgcccgttccacgactatcgttgagccctcgcctcgcccgttgcctcagtaagctccaccacatcacctgtagctcgggacacccctcgattcatcctttccccctctggttcgcctgatccacgctcactggttcactgtcgtagctcagccgccgtcgacccgtgccctcaccgtgccccggccaccgttcgtgcgttcctgagacttccctcaaggtaaccgtcctagccccgcccttattttcccctgtctcgcatttacttgcttgcgattgctcaccggagtattccccagtccgccaagactcccctccgccgttcggtcgcctcagtcccattcaca

SEQ ID NO: 22718 - DNA, 391 bp, Zea Mays
tacatcgaaatattataaaagaacataaaatagtaacgttttctagctatttggatcacaatttcctttgtaccggcctccttcccttatctgtcgcgcggcccatcaggcccatccgattttagcttggattgctctctgtcccctcctctctggcttacgtctgaagcctagccctaatcccaacagaaagacggcggcaacgcgaccacaaggatcggggaagggagcggctgcacgtggcctacgacaacctgcagctagcgctggacgacgtcgcgacctgcaactagccagctagtgccacgacccacggcgagtcgacaacatgcaagttgtagccaacgtcttaacaacaaccatggatccataccaagattgttgatccccg

SEQ ID NO: 22719 - DNA, 430 bp, Zea Mays
gtttgccttccaaaaccgggtgtgacagtgctgatgggtgatcgagtagtgtcaccagcatgcgtggattgtagtcggggtcggttcaaagctcgggagaccttgggctcgcagcgtcagagaacttcgtctgccgcgggcgatgttcacttggggactcatctgctgtggccgtaagcctctgctcgatttgtgcccaagtttgggattatcatgttcgggatcgtcggggctatgtttaggtggcattaggattaggatccgagcattgaatcggcaatttgtgtgcaccggcgtgttctctgggcgaagctccgtgcggtcgtcgggtctcagcggcagaagcttgaagatgtgcctgggccgttgatctccccgtgttcggctcagattggatggctgatgttccttcgtcccgatccgatctgaa

SEQ ID NO: 22720 - DNA, 478 bp, Zea Mays
atctgttgtattatcatctaaatctgatgatctatttcttttctgaaaataacgttccatgagatgccctagattattcaaagtttacatggaaaaaataagagtatcaaactcagaccaatttcaaacttaaagccctaatctagaatgagtctacgagagctgattagtagataaggtgatttaaacaattaaacagagggatcacacctgattttaggaaatcagaagcagctaggtggtactggcaagtggcaacagtcggcggcggaaggaagaaaataagcggcgtccgacgatgaaccagaaccaagaagttgaagcgacgaaaactggagaggagcgagactgcgagagggtgcggtcacctccggctgaaatactgaatttacttgggctgcataactagtggcctattaacctattaaattatatgaatgcacgtcggagtggccgagtgggcttagcttttgcagcc

SEQ ID NO: 22721 - DNA, 545 bp, Zea Mays
cttttgtttttgtaaaaaagataaaaaaatgaatcacactagtggaagtggcgtggtgcggtgcagctaatacaacgaccggcactaattgattgctcgcgtgtacgacgtggcgcaagtaaaagatccggcagggctggatccattaacgttaaccaccgcacacagtgagtatacgtcgctgctagtactccggcctaactagttataccagctacgacttgggctgctggttgcaccacgcagagaacctcgcgtccttccttccgttgggccagctgcagctagctagcccgtgttcttcttcttcctcctcgtcgtcgtcctgaccgacgagaggggtgaggggcgcgtctcaagtgtaaaagcggaggagtgggtcgccacttccgtcgtctcagcctgcctgcctggccaccaacacgagcgttcaaaacccaggagctatccagcacatcctagctttccccccttctatggctctatctcatcctgataacaaagcagaaacagtagctgtaggcctcatcagttaccttcccgca

SEQ ID NO: 22722 - DNA, 463 bp, Zea Mays
cttttctcttgttcccctgtccccgcagcgggtagcggtagtcggggtagacgaagccgatggcgtcaaaaactctgttcattctcttttttcaccgacctccgaaggctgtagatagcgcattatcttctgccttggaataagctccaagcaactcatcacttgtaacttcgatgcattttagccagtcatcgtttggttcatcgaacttatccccatacctgaatgtatacttcagccggaccagttcacctttgatagacttggtgatggtctccttcggcatttcccagctctctacaagtggccatactctgaatgctatatgctcttgaattaaatctcttgtaccaatgaagaagcagacagtaccaaacgccttctgacacgcttcgacggcgtcatcaatttcaaccttcggcttttggagacaaaagcgggaccatatggggcgcatgataac

SEQ ID NO: 22723 - DNA, 310 bp, Zea Mays
cttcgatggctcgctgaagctgcagggagcaggtgcagggatcctcttcattgctcctggaggtgaacaactcaagtatgcactccagctattatttccagcatcaaatattgcagtagaatatgaagcactgatccacgggttgaacatcgccatgtcactgggcgttaagaagttgatggtatacggagattcactagtggtcataagccagataaataaagattgggattgctcgactgattctatgggcaagtactgtgcagccatccgaaaattagaaaacaaatttgaagggttggaattccac

SEQ ID NO: 22724 - DNA, 793 bp, Zea Mays
ctcgaaacagaatcagagtgaagctgatactagtagagctggtagctcgacgaggacgggaataaattcgcggagccggtctaaatgcctgttggttagacgtcatttcttcacaggctgcgtgtttttttaacatggggggaagaaaggctttatgtttactatacctgaaacgtgtttgaatgtttactactgtactttgctagacggagagtgggaaggactcggctttgatcggatgctgctgggggccataaatctcgccataaaggaggggcattcaaggtgctaaaactatgtgcagctgctgctggctgctgccattgttgccaacaacagtattggctgctgcctgttcgccggccacgccacgctacgacgccaggacaggattccgcggcgagcagcctcgctggtggatttccgtcgatcgatgccatgattattacgacgtgcgtggaagccggcctctgggttaattgccttgccttgcttgcgaatgtcggccggccggccggcggtgcttgtgcttctgttccgttccgttccgacgaaagtcgccaccccaccccggcccagcgcgtatttcagtcgcgcgcgccacgcgtctctcggacggacaaatgcaagcaaggtcgataagcggcgacgcgcgggcgttcttaattaatttatggacaggcaaatgcaaggttggttgggtgggtggcgcacggtgtgactaccactacctacgtgcttcggcggtgtcgatcggcgtcatcgatcggtctacgtttctttgggagcagtg

SEQ ID NO: 22725 - DNA, 494 bp, Zea Mays
aaacaactcacctggttacgccacgtcatctgaaatgatttcgtccgttcgatcttcactcaacatccataaactttgtcgcgccaacgcctgtaacattgttcgcctcaacgtctccttaaagcttcacgtctccactcaacgacattcgtaaactttgctacaccaacgccgacaactgcattcgcctcggcttctcctcgaagattcacgtcatcagcatttaaacaaaaaagacaagatcaaaagtcactggagtgaactcctcgtttgacattaaccgtgacagtatatgctctactagaatagcataagagacgcgatatctatcaaaatgtcaaaatggaaacaaaatagaggctcaaacttgtagaatggaaactattaaccatcacgcatggaacatcggtcattagaagttgagcgcgtccacacggatggcgagctgaaaacatcgtcaatcctccactccatctagatctccactatctctc

SEQ ID NO: 22726 - DNA, 668 bp, Zea Mays
atcaagggccagattagacagtgaactggtattctatcctggccatcagatccaggatctatggttctgaatccattcctgcgtgattggatcgtctccatctgatccgattacaacggctcaattctacctactgaaacactgcccattattctaatcctagacgcccaaaaccaatcggacgaccaggggggttccttccccgtccgacggcgcgttcagcccacggcggatccccatctgcgcacggccacccaccggaccacccgagctccaaaaccaaattgaaccggtgcaacgcggacctaggcgcatggcgaaacagaaaacttagcattaccgagggttgggtggcggagcgaagctgtcctcgacatcaggcgggttcgcggcggcgcttaagctacggcgagcgattctgacgtcgttggcccacaatcgcacccggaaagaccacggacggtttccagacgcgcaggcgacttcactcgatcccttcctggtccgagattggcggtaggggaggacaacgtcggcggtggcctcccactctctctatctcccgctttctccatgagccaatggcggcacgatgcagtcacatgttggatggcaccgagggggaagacccggcttggttttaaatccccagaccacgcaatactcgc

SEQ ID NO: 22727 - DNA, 544 bp, Zea Mays
cgacggtgcctagcgacggcgagacgatgttcctggaatttcaccacggtagcattcaaacgcccgattccgtaagcgactaggggtcagagaggtatgaggatgcaagccaggtggacatacactaacctgaggagcattggccacagcgaggtgcaccatagcggcactggtgaccgatctttggggaaatcagatgaactcaagctacggtgaacggtgggtggtggttaagggtgggctagacgcgtaatagaaaggcagagcgaggggaacactcagtttaaagatttcggtcaagcctattacaaattttggctgggatcgagctcgacggtgactaggatatttcaagggcttgtttcaccatgacgcatgatggattattggctcaagagcagtaactggttactcgcaacgactcacaatgatgtggtaacaccttcgagtacgtaatgcagccgcgaggaacgacaagcttcggcgttgacagctctgtcgattgtgcggggaagtgggtacaatggttaagccgaccagcgac

SEQ ID NO: 22728 - DNA, 438 bp, Zea Mays
gtctagggtagcactatccaggtcggtgttaagacctgccaccacaccagctaaggtgttgaggcgatcttcatttgctccacctggaacaatgctggcctggttctttgtacgaatatgtagaggaagatgcatgtactttgtattgtgcagctgctgccggtaggtgtggctgagggaccatagagttcgcctagcagcgtcgctgaccgaagcagcgtaggtggatagcggcgtcagagactcatgtgctgacagagtcctgaaccctctatcacctgcatccattaccctgacatgaatgcgagtgatgtagtagcaagcccgaggaggctcgtacacttgccttgtctcatacaggggtcggacgtaggttcccaacgcgtgtagaacatcctgcagcaggttaggaaagtgccatatctcgaacattgaagt

SEQ ID NO: 22729 - DNA, 561 bp, Zea Mays
gaaaagggaaattgctaagtatatatctgaatgcgacacttgccagagagtcaaggccagtcatttgaaggtagcaggcaccttacagccccttcccataccatcttgaaaatgggtatttgcatggattttatcgtgggattgcccaatacctcccgacaccatgattctatttgggtcatcgtggataggttgaccaagataactcatttcttgccagtgcataccacccacaagacagagaagtatgcagaaatctatattgatcaaatagtgtgtttgcatggaattccgaagactattgtatctgacagaggagcattgtttgtggcacgcttttgggagcagctccaaaagtcacttgggacccatgtaataagaagctcagcataccatcctcaaacagatggtcagtcagaaagagtgaatcaaattctcgaagacatgttgcgagcctgtgtgctacactatggtaaaaattgggacaagtgcctttccttggcggagttttcatataacaacagctaccagtccagtctaaagatggcacctttcgaggcc

SEQ ID NO: 22730 - DNA, 697 bp, Zea Mays
ggactaacggggcgggcccgcctgtcggcgtgcatgatccccgactgggccgcgcggcgggaaaaattagatgggccgaatatggggactcaaggccatccagattttcttttctttttcttttattcttcctattttccaaattcaaggattcaaactaaattttaaattcctattttgaacttcagatttccaaatcttaaacaaaatcctaatgtgaatatagctcctaccgttggcatttttattatttatctttcttcctattatttaaatataaaaagggtaattgactttactaaaattatctttctagattttaattttcctttccttaactcttttgctcccatattttcctaatgtgaattgggggaaaacacacatgattcatcggctataggttgtcacgactagtcacaacccctttataagatgccgatagacatgtatcctgggcaaccacaacctcctgcgcacatcgacgataaattcgccgatctgcacatgtctagcccgtccgcacgtgagcacggaccgtccgcatgtgagcgcggaccgtctgggctagcggtggctggtcctatttttaaaaatgaattaccgagacatactcccgatccgccacatactgcgcaaaccctaaactacccagtcggaccgtccgcatacaaaaacgaacggtctgcatacaaca

SEQ ID NO: 22731 - DNA, 893 bp, Zea Mays
caaattgaggtggaaaagagtaggatttaaaggggtaggttcaaaataagtaccaaggtaaagatatagatattttacaagggttaaaggcgataacaggcaagggtgtaagagataagaggtgaaggtgcacaagaaacaagggtatgagtacaataaagaatagagctaaggtaagactggcacgtgacaaagatgagattacgaccaagggtgggataagtagaacaccactctcgaattgagaggggagaagggaggttttaagtggcagacatatgacaagcatcaaggtaggatcacaagggtaaaggcgatagcaaacaaaacacattaaacaatgaagttgaaagtttgcaagcagcaaagaataggatacatcaagaaaaatgggtaagatacaactttcaaattgagacagacgagagaagattttatagagggaaggtataagcaacagggtgagatgtagaggtgacaaaggtgaagatgatatcaatgaaagcatgacaaagaatagaattagggtaagactcgcggaatggcgaattagaagaaacaatctagggtaagataggtagggtttcaacagaagagttgaagaaaaattcattactgagagaagttataaaggaacaacgagatcaccaaggatttgcaacctaaaatgatcgctcatggaccgttaagacataagggtggtcaaggacatgttaactgaaatgtcttgaacaaacactggggtatgaagataagcgtacataaaaatatgagagtatgcaagactctaaggacacgagcatactaagaccaagggaatagaaattgttgaaagataatgacttaacaacggaataggaagggatctcaaaagacatgaagatcatggatat

SEQ ID NO: 22732 - DNA, 403 bp, Zea Mays
tgacttgggggttgtaacatgttgcttaatggcgtggtcatatcatcctcctccccttgaaaaggagtcgtcctcgactctgaaatgtcttcgcttgtatatggtaagaggtcagcaacattgaacgtgttgctcacgccatagcttggtggaagatctatcttgtatgcattatcattgatcttggcaagaacacgaaatggaccatcccctcatggcatcaatttggatttgcaatgatcaggaaaacgctccttgcgcaagtgaatccaaaccaagtcccccggctcaaataacactttcttcctatgcttgttcattcttgcagccttgcgcactgctttgagctcaattgcttccttggtcttctcatgtatcttttttatatatgcagcacgcttgg

SEQ ID NO: 22733 - DNA, 541 bp, Zea Mays
gaaccattgagagaacagagacaacggaactaaacaagactaacacaaattagacgagaacttactgtaggacttttggacagatgagtagcaagcacagattacgtttcactgttgcttgtggatgcttcacggttgcctgtgcatgaggttggagtgggcgggtggcggccttgcctgtggaatttccacgggtgttacacaaggaggatttcttaaatagatggtgggcttgctgtaatctgtgcttgttgtagacctaaggtagatggcaagctctaatgcctcgaaggggatccaagcgtgaagatggtggatggaagggaggcgcgtaggtgttcttgtggaagggaggcggagatggctggccaatggaatgggatcgctgccgttggacggagggcaccaaggatggaagggccaatggcgtcaaggatggaaggggatccaagcgcgattcaaggcgggagcgatgatcgtggagattgcttccctctccccacggcaggcgtggattccatcatgtttccttgcatcggga

SEQ ID NO: 22734 - DNA, 619 bp, Zea Mays
gtgaatcttattcagactaacaattcaccccctaatcttgttggactcagaccactcccagttttgttctcagctccacgaacttgattatgcccaacgacttggtcagtatatcggcaagttgatcatcaatccccacatgatctacacttaccataccttgttcgatgcaatctcgaatgtaatggtaacgagtatcaatgtgcttgcttctatcgtgaaacaccggattcttgctcagttctattgctgattgattgtcaataaataaactgaacttctgcatattttcctttaatatatctgctagtagcatactcagccacactccttgacatacacccagagcagcagctacatattctgcctcgcaagacgatagagcaactactctttgcttctgcgacgaccaggttattggattcagacccagaaagaacaagatacctgaggtactctttctatgcacaagatcacctgaacaatcactgtcggtgtaccccagcagtgacagaccaactccaccacctctcttatatttgactccaacattgactgttccaacaacatacctgataatccttttcactgcaccctagtgatctttgtttggagcttc

SEQ ID NO: 22735 - DNA, 659 bp, Zea Mays
agtttagttctcatatagctgatttgcgcaaagcctttgataaaatgtgtcggtatggtttgaaaatgaacccacgtaaatgtgcttttagggtgtcggctggtaagtttttaggatttatcatccatgaacatggcatagagatagaccccgaccgaattaagtctattcggaattaagtctatttgtaaggtcgaagtgcagaagtttctcggcaaggtgaattatttacgaaggtttatttctaacctagccgggaagattgatgccttcacccctatccttcggcttaagcatgatgtcgaattcgcttggggggcagagcagcaggaagcatttgatctcattaaaaaatacttgtcttcggctcccgtattaaaagcaccacgagcaggagtaccattccgattatacattgcagctgaagataaggtcattggggctgttttgacacaaaaaactgaaggaaaggagcatgtggttacatatctaagtcggaggttgttggatgcttaaacgaggtacacttttattgagaagttatgcttatgcttgttttatgcatgcaccaagtgcagatgttatttactgtctagtcattgcactgtttctggtcaagccgatgtaattaaatacatgttgcataacccaattatgag

SEQ ID NO: 22736 - DNA, 330 bp, Zea Mays
aaattttcagcacttcgactacaaacctgctcaatggaaatcgaagcccagctttgaagaaactttggtaaatcacaacttcgtcttcctcaggggcagggacgttgttgtctccaccaactcgcacaatagacatatcccgaaagtaccttcctctcatattgtcaagatgactctgtttaattgttgatttcccaaaaattgtatgactcggcctccacggctgatcctcagaatcctctcccccgctttcagcatcataatcatcactgtcaccggtatcttcagacaggccttccagtatttccttagtaatcttctctgtatttg

SEQ ID NO: 22737 - DNA, 787 bp, Zea Mays
aaggatcaggacctcaccggcgataagaatgccacggcggtcgggatgggtcggcggcggccacggtaaaggttctcggcgacgtggcagtgaatcactgaggtggcgttacccggttaatcggtggccaccgtactttcgccgtggctcgccagcgtagcctggaatccgcaatcctcatccaattccgaacgacggcctataaattgcgcccggattctgcttcttcaccacatcccgcacctcagtgcttgagcaatcggctcaatttcaccggagcactcacgcagcccccaaattccctcctcctctgttcttagctccgccgtgaagaactccaccgtggtcagcgttttgcgggttagtaatttcccaattgctccctgttttaactcgtttgtagcctcctattgctctcagtaccaaccaatttaagttcggccgaagcctttcaccggaacacacaattgctttgtagaacgtcgctgtgacaccctctctgtcgccctatgtttctgttcgtgcccactccaaattttagtatgtgcgtcatctctggtaaacctgtgaagctttcccaagcttcaatttggtcagtcacgtcgtcggttggtcggaacgtgttcatcccttcgatcatccgccctgtcaccgtggactagttgattcaatgccccattgatgaaattgtatgaggggaaatactcgggaggggtccaattcagtgtctgctgcacgagagtcccagccatttcccggtctagccagcctgagctcatcggagatc

SEQ ID NO: 22738 - DNA, 279 bp, Zea Mays
cacaaacttcgattgaattcactgtaatgtgtgcaatacctctagtcccaagacaattgctctttgatcacaaaactgtcagcagccttcagttgtatccaagcagcccccactaaatccacaatcccgttgagcaccagtacaactaataccacattgttatacccatatcgagctgtacagggaaaataacccccaattttccacagtcgaggatgatcctggatagcaaacaagtattgctgctcttctttctcttgctcagtaactgaccactgc

SEQ ID NO: 22739 - DNA, 527 bp, Zea Mays
ggcagaggcaatgcgaattttggattgcggtcaactcactgggtggaggtgtgcataccccgccgtggttcatagcgctatttatagccacagcggtccggctagcgttctccgaccatggataacttcgttagcgcatgcttaccacgtagggaagagacacagtgagggagatcgaggcatgggtgacaccgcggcgaaagttatttgagtcacggtggccgccggtgattaactccggccacgctcggctcagcacgcggaatggtgccacgtcccgagttactcccttgcgatcaaatccccaccgattcatccgagctcatgcaatccaacagtgctgcagatcttttcttggtgttcttcagatttttcagtgtattggatcttcagaacttgtctgaactgaccatcttccaccccccgatctctggatttttgttaagaatagagcaacttcccttaataaaatttgtttactaaacatcagtctacaaacttactataggattcttgggtcaaaactg

SEQ ID NO: 22740 - DNA, 748 bp, Zea Mays
tagggacttggcataagcatctgcaccaaatttgctctcaacagctcgcacgaactcctgccaattcctcataccttggcgtagtttctgaatttgccaccaacgagcagcattcttctccatgtgtatagaagtagcagatacccaaagtggttgtggcacttgatacatgtagaaatactccaaacacttatctgcccacaccaccggatcctcttcagcaaatttgggaaacgacattttcaataatacctgatttgttgcttgcatgttcatcctctcctcatgttgtcttcccatcatcggaacctggtgattcctcctctgattctctcgctccatctgctcaccctgggcgaaggtgttccgcaggggaggccttcctccagctcgattctccagatcctcctaagtgtttcacagatctcttcccatctgctccaggcgcatctgagcaatctcccttccagtctcttccatcctcaggtacaactcgttcctctcctcggcagcgcgctccgccacacatgccgccaaatcggcctgagccatgagttggagttgtaccttctgcatgtccttcacttgtctcgtcaacacctccaacgtctccaaaacttggctcaatcgctcctgtgtagtgcgatccttctccgccattgcttcgagcaccaaacgtgtttgagccgagggcttcacttgaggagctgtgttgcccaccgccggagatcgacggctctgatatcaa

SEQ ID NO: 22741 - DNA, 862 bp, Zea Mays
cgacggtaagcccgtagggatgccactttgctatccatggaggatgttggtgtggtaatatgattcttctggttggccgtcagggatttgtcaggacgatgaggaggcttcagtgttgatcgttcatcgaatggcaccacactttggacagcctcgtggtgacgcgaagagtatgcctcctcctgcaataaggccaacgcacaggcaatatccaaatctctcggccgttgtacaagtataactgatttaatgtcatgacgcaaaccatcaatgaatctcatggtaaagtaaagagggcctgtggtgtgttcataagtaacaagcaaatcaactaattcacaaaaatgatccacataatcttggacagtgaatgtttgtttaacgtgaaaaagtttgcggataacaatctcatgctgttctcgaccaaatcggtcgtgtatggctcgacagaattggtgccaagatagttgtggaagttgtggttcaatggattgtagccaacgacccgctacaccagcaaaatgcatggtagcgaccttcacccacattcgctcttcagtagcgtacatgtcaaaataatcttcgcaacgcttttgccacagtttggggctagagccatcaaatgtggggaagttcaactttggcaaccctcccaggtttcggggtgtataatctctatggacgaaatcaccaggatgaggaaacgcaaactgcggggaagagtggtggtgccacatacccgtgaccgggtagtggaattaggcactggagtgaccgaaaccactttcccggtgaaaattgttgttgtggtggccaatttgggggccgtcggtgaccagggtcggggaaggtgggcgcccca

SEQ ID NO: 22742 - DNA, 498 bp, Zea Mays
gagtgcaggttcagtatgtgatgaccggcatgcttatatatctagtcatggcagttgacatacccataggctcgctcaaagctattaacaagatcagaaaaggatttctctggcgtggaaggaaagaggtcagaggaggacattgtttagtggcttggggaagagtctgtagacctcttgaaattggtggacttgggatttctagtcttaaagaactaggatgggccttaagaatgagatggctgtggctgcgcaaaacagatccggataggccttgggcctcattgcccatgcagatatccaacaaaataaaggcctttttctacactgccctgctcaatgacattgtgaatgggtcttctaccttattttggcaagatcgttgggtcaacggaaagaatattgaagacattgctcctcgactgcttgcagcggtgccaaaaaggattaggaacaacagaactgtgcttgaggccttgacaaacagaaaatggttaa

SEQ ID NO: 22743 - DNA, 543 bp, Zea Mays
ctaagactaactagactaagacactaaagtaagcattattacagactccgactccatcgatctatggatctaaatctatgtgggtcctgtagtctagggcaccatagtcgaagcgaccatggggcagtgatcggtaagggtgctgaatcctaacaggggcgggagaaccaccatccagatagtggcgtgctgcgcactcagcacgcaattccacaaccttcgcccgaaccttgcccaactcgtcaagggcgtggtccaactctgtgttgagcacggcagccaagttgaccatgctatttagcttgggattgccctcaccaactggtgaggcaatcacacctctagcactaccggtcgaacgacgagggtagtacttcaggtcgaggccatcagctaccccgctgaacaacaagcaatactgagaaagtgtccgtcgtgctgcatcttgcatggctgcctctgcagtatccttctcagtaatagaatagtgctctgagaaggcttctacaccctggagatcatcgtctggacgacgcaccaaac

SEQ ID NO: 22744 - DNA, 429 bp, Zea Mays
gttggtgctctggctttgtaataagttggtgaagcgggctagggcataaatttatagaggcttgaagcggtgactccgaatttgggagaggaaagctggcggccgaagagagggggtgagtcaccgccgcgaactatcatggctttcaccggggcaatgtctcaggtgatggacagactacctaaggcggtttactgccatgtagtaacgcttctcagtctgtggcatccgggcggcaagcggtagactccggcgaggtcatctggaccggccgcaaggcaagtgggtacgatggccagctcacggcctcatccgcggtcaagatcttttcaccaccggccaatatccgcacccagagcgcacgaatcgcaacaccggcgaggatcgcggcgcacgcccaccggcggcgataggttcactgaatctgat

SEQ ID NO: 22745 - DNA, 292 bp, Zea Mays
ctgtcagacaacctgtaagccatcccagcctgagcaaggaaccgtatgcattgtgcataaattccccccttcaattgcagaacgaacaacgctaaaaaacatttgcagtacaaaaaataaaagtaagccatcccagcctgagcaaggaaccgtctgcatcgtgcataaattcccgtacaaaaataaaaagagcctgtcggacaacctgtaagccatcccagcctgagcaaggaagcaacgaccagacttaagtgcttgcctccaaggatgcattgatacgatcctataaaac

SEQ ID NO: 22746 - DNA, 593 bp, Zea Mays
caaaattcccgttttgagcgatcgtttccgagccgagtgccctaattcctttttcttcgcctaaattcaaaccaagcacacacttcactcatatttacctatataaacctattcgtgaagtatcggctcaattccatatcatttcgtgccccatttcaaattccaaacctcctatgtcactatttatctatcaaatgtcgttttcacgtcttttgacctcttgaacgtcccgtctcgtgccatatctctctgcgtatgtatttattcacatttcatatgcttatgactatgtgactaatacgtgctcacctcttctgtcatttcagtgaccgtgtgtgatcgtgtgccgtctcccgtcctgcctggatcgtcacctctcgtgtgagctttccaggtagacatctcactctttgctaattctatcggtcacttttgctctgtgcttagtctctctatctcatttgcagactttagttcaggatgccgcgcacgaagaatgcgtcggcatcagggggtggcgacgatgaggaccctcgtcgccccttcaggcaggtgaagggcaagactgtctttttggagcagcaggaaggccg

SEQ ID NO: 22747 - DNA, 529 bp, Zea Mays
tattattatcactatctaaggcacaacatacatcacaacatttttataaacatacatattcacatgtatattcatacatcgaccaaatcatacgaaccgtaaaccactaatctctaactcgaaaccatcatgcgcttacttcccaaatcatgaacacataacacgtattgacccgactcaagatatagaagaagcgatgactactttggcatgtcaccacatctctaattaagccaaaacaatttctacttatattgaccgaacattcgtgtcgagcacaccttatattaccttgtctcgcatacaaccatgttgtggcgtgcactcgagacactaccgattaacttaacgcaattaccactacaatgcacttcaatatacacgtttgacatcacagtgcttcgacagaccccacacttccaatctacttgtcacatccaaacacaccacatgcccactgcattctcatgaccaattttagcacaattatttacgaaaacatttatcgactagacaatgaaacactaac

SEQ ID NO: 22748 - DNA, 809 bp, Zea Mays
gggaaatcctaggctgacaacctggccgccgtgctcaacacagagctggaccacgcccttgacgagttgggcaaggttcgggcggaggttgcggaattgcgtggtaagtgcgcagcacgccactatctggatggtggttctcctgcccttgtcgagattcaacaaccttaccattcaccgccccgtggtcgcttggagtatggtacccctaactgcaggacccagatagatttggatccatagatcgatagagtcgaagtctgtaataatgattaattcagtaccttagtcttagtcagtcttagttagagttagtttgcttgtcatatgtcaggatgtctgttatgattaacacgtaatgaagttggatctttgtaatgattgtcatcaaggtgtgggtatcccctgcaacttggtgtaggtattaataaagtcagatatttagttgggtaatccttttatttccactttcctctttatctgagaagttgtcctttatctaagaagctgtcagtgaggatgatcaattgttcagtgttatgaagattttctatacatcttttcttatgctgaaagactacagagtcagatctgatttgtgtgtgatttctacatatgtctgagaacaggcgcagaggtgcaaggcgtgcttagccagaacagcaggcaccctaggaagatgcagctcagcagcagcagttgccaccgccacccccgattaccattgagcagatgttcctgatgcagacccaagcagtccaagcaattggtcagaccttagcagcaatgcagcaggtgcaacaataacc

SEQ ID NO: 22749 - DNA, 304 bp, Zea Mays
gggcattaaagttgggcaccggccccacaaccaccggatcctcaggaatctgcccattctgaatctgcccattctgcagcaaggcaccatgaatgtgaccagaagaactatctgaggacaggtccgaatgggggttgctgacttactgctcttcaggtggctggtccagatggggctgttgaggttgctgaacaggaggaacattaacaatccattggtcccagtcaccttgaatgttgtctgcaggctgagcttgaacgttgtcttctggtgggaaattaagatcccaacccaccgccggcac

SEQ ID NO: 22750 - DNA, 623 bp, Zea Mays
gtcacgggcgatagtccacgtggcagcatcgggcctccgcctaagtggggagtggaagcgcactggataaagcctgggcacgtgtcagcaccggaccttcgcctgcccttgacctaggccagggcattccttgtcccgggaccttgttgtgggcggcctggacctcactcagaggggtccggacctcatccaaggggttcggcttgctcactcgggagtcccagaccgtacttggaggttcgggctatgtgtacagggatccaacgcttttttgaggaggtccggacctactgatggtatcctggagtgtatcacctcctctgtccacatggcgcccttgggactacccacgtgttggggtcaggtgctgttcaccgtgcggctagagatagtcgtacgagcaccgtgtcttcataatatagtaaggggtacccctgattcagggtaccgacagatgtccaacacagagtgttttagttgatatgtgctaaagtgttaaagagatgcaaatcaagaatcaaggtatttatttagccttagtgaattatttttggtagtaacatatttctctaagtgctaggaatgttgtgatgaggacatggatgtgttttcctctgagatac

SEQ ID NO: 22751 - DNA, 290 bp, Zea Mays
ggaaaatcaaaggaacaacgtgttcctggcgatttatggaggtctagttcaatccgaggggtcgaggagttttaggagagcctaaggatgctagaacaaacgacggagaagcttgaactgacctgggtacggcgggcttagccgcggcccgactcaatctgatccagacgccaagatctttacccgcccacatttatccacaatccacaacacacgaatctcgacgatcgacgtgaatcatagcgcgacggtcatcggcggtgaggttcactgaacctgatccgatcagc

SEQ ID NO: 22752 - DNA, 349 bp, Zea Mays
gcctagtcggtggcggtggcaggtgatccatcgtccgccgcgctgtgtactgtacgcgcgggtgccggccggtgcggcttgacaccctgttggctcggtggttcacgtcggcgggcccgctctcctttgttccgagccttcgccacccggtcgccgtctggccacaaccctcgcgcaatcaagcgacgagacgaccgaccccaagccaaaggaccaaagcaaggctaggcaagcagcgtcactgaagcggaaaacgcgtcgccttcaccagtctccactccaggtgcgtcgtctgctccgcaggtttctcccctcgccctctctcccccaccctcactcagactcagcc

SEQ ID NO: 22753 - DNA, 810 bp, Zea Mays
ttctaggcctcgtagcctctatggtgtcgtctgctgggtcatgcgtcgttgtacccttgtggccttgtatggtgtcgcgtctcatccgctcgccaatgggttcatgtagctattctgatatagacgtagcgtgcttggtgggtcctttcgagtcagctcgaggtgaggtttaaggatgtcttcggtacaacttcatctttcgccaccccttattgccacctttcatcatgcgtaggtgtatacctggtacggcgtattgccccatctcttctggtgtatgggtcacagtagagatcgtgatgctgaggccactacggttgcggttgtccgatcccactggtcagcggggatacgtatctatatcatgtttgatagagacccttcggtactgcttccaccgtctggacacggcttggtgatagtctgtcccatcgtgctgtcgtggcgtgatagtactaggtcggcacttcactccagtagaggtgttcgcctgagagttggttgtcgtcttgttgggttactcggcaggtaggttgatcgacaaccccacctcgctgggttgttcggcaggcgggttgattggcaaccccgcctcgctaggtttcctgacagtatttgctcgacgcgcgggttggtcggcagtctcgccctgtcgagttgctcgacggtcgggtttgatcgacttggcggaccatcttcgagaggccttttggaccattacacatgagtcgtttgacaggtgggccagtcggttagtggactgtctttaggaggccttttagacctttgggtacctgtacccgatagtag

SEQ ID NO: 22754 - DNA, 410 bp, Zea Mays
ggcggctgctatgacgaggaacaaaatccggaggcagctgcgcagaccttctcttctgtgggggcggatggggaagaatgcaagagattggttttgtaacactagcaacaaacgattgcaccggtgtgataccttgctgaaccaaagcttgagagttgttgctgtaatctgatctaggatcaaattcatcttgcacctgatgctggctcctgatccgccttctagaataatacttcagtgggggagcctgaccatggaccagctccagcgaccctgcagcctgatgaggcccttcatgcggacttgtagcatccctctgctccagtggtccaacacataagtagggatgaaacctgaacaggcccctcacgcggacatgatgcatctctctgcagaggcgggcccagccg

SEQ ID NO: 22755 - DNA, 378 bp, Zea Mays
cacggtagcactgtcaatcccggatttcacttatagataagtccttaaggagaggaatactagaacaaaagtctagcccccttgaatccaaattgttaaacatcatcttgggatcatcatttcatgtagccatcattcaatgtaactagtatttcatattcaaatcatattactttaattcaaacacttgcaataactacccatatgcaatttaacccaataggtatcaaggcacaagataaacaatatctaggatgtccttaaggtaacaaattagacacatgcaatatgaattatgatggttaaaagtgaataggtaacaaggatagtcccatgttatacttgcctttgacttgagatccttcttctatagatgac

SEQ ID NO: 22756 - DNA, 587 bp, Zea Mays
tccacttgaggttatcaaggttgtgtccgagttcccagacgtgtttccaaaggacctaccaggtatgccacctgagcgaaaagttgagtttgccatagagcttcttcctggcaccaccccatctttaagagagcttacagaatatccggacccgagttggttgaactcaagaagcaaatcgatgagctgtcagagaaaggatacatccggccaagcacctcgccttgggccgcccctgtcttattcgtggagaagaaagatggcaccaaaaggatgtgtatcgattatcaagctctgaatgaggtcaccatcaagaacaagtaccccttgcccagaatagaagatttgttcgaccagttaagaggagccagcgtgttttcaaagatagatctgaggtcaggttatcaccagctcaggatccgaccttcagacattccgaagacgacattcattaccaagtatgggttgtatgagttcactgtgatgtctttcagtctaacaaatgcaccggccttcttcatgaacttgatgaacagtgtattcatggattatcttgataagtttgtggtggtattttgtcacacccg

SEQ ID NO: 22757 - DNA, 417 bp, Zea Mays
caaggaacgagtctcgtctcgtctcgtctcgtctccccccatcgaaatttcgcccacgatctcccccaacgtacctggtactgtacgtactgtagtgccgaatatgcagagctcctttacttactcgatcgacatgaatgaatccacggaaacggtctctggcagcagcaattaatgtggtcgagaaatacgaggggtgactggggagtggggacggacgacggagtagtaggagaaagggagaaaaagaaaaaggagtggtggaagggaacatgtgacagtgccatagtgggcgcaggccgcagggagcgcgtcgctgtcgactggaccccccacagcaacgccctcgggctcggcctcgcggtgcttcgcgtgcgtttcctttcctctaccgcccgcctgccgatcgattcccgg

SEQ ID NO: 22758 - DNA, 520 bp, Zea Mays
aactgcttgcttctatcagagcagaagctgatcatgtttgcagaaggctcggcaaacaatgtttcggcgctgttcagcatacaagacggacactcggcggaaaggaggaacattgttattattacttcaacagttgcaggtatttcagttgcatcagttttgggtttcgctgtcttatggaagaagtggagggaagaggaggagccgctgtttgacggcataccggggacaccgagccgtttcaccttccacgagctgaaggctgccacgggcaacttctccaccaagcttggagcgggcggcttcgggtcggtcttcagaggcaccataggcaagcaaaccgtcgctgtgaagcgcctagagggcgtcaatcagggaatggaggagttcttggcagaggtgaagacgatcggcaggatccatcagctgaacctggtcaggctggtaggattctgcgccgagaaatcgcacaggctcctcgtctacgagtacctgtccaacggctcgctggacacatgga

SEQ ID NO: 22759 - DNA, 315 bp, Zea Mays
aaaaatttgcacactgagcatagctaaaataaagtacaacgctaatttgataacagtgtgttactggttccaacagatattctgctgagaaatgtatgtgttatgcattacctcccgcaaagcacacacagcagcagtcaagcaactccaaggtatatgaagagatgaccaaggtggaaccttctccttttgtttcctacctaatcttgttcaaacagaagtttatctctgacatatactaacaggatccacgaactccatttgttgctccttcacaaacatctggcaggcaccaacgatagtgttggatgcgtc

SEQ ID NO: 22760 - DNA, 349 bp, Zea Mays
atcgttgtcatctttagaggacgattcgtgcaaataccggcgggaaagcaatggccaatcactcattgcgtctgaaaaatataattacagtgaagataaaaaacattgaattagcacatgaatactaattgaggctaacatctcacatgagagaccggctgcaggattgatgccttcctattgattgatgccaccccgctcgatctagaaggaaccaagcctcacatgagagagagaacggtggcaagctcatttggattagcaccagtggctcaggattaatagattggatcggtctctagattgaatcggtctctagtcaaaaacagaatatatgtggacctactaa

SEQ ID NO: 22761 - DNA, 364 bp, Zea Mays
tcccactatccatccccgtacaacagccccactcctccagccgctcacacaacctcattctcatctacctcatcgcgtgcatgctccattaggcgtgcctttccctctcctttccctggccacaccatgccacaaggaccgacaccaagcaacagcgcagccagcgagcaccccatgccccgaaccaccccacaccatatctgcagtacaggtacaacagtcccagccgccggggacgttaggcccaccctgctcgcgcgcgcagtctgatggctaattcgccacatcgtcggtcctgctccggtgagttgtcgacgctgtctcctgaccggcgaagccagtgacgcacccgccgtgcccttgc

SEQ ID NO: 22762 - DNA, 1052 bp, Zea Mays
taaaacagcagggacctcggggcaagaaacccgagacacagaattcccagcagtggatcgcgggttcatttcctataaactagaggttctaactgtaaaggcgcatggcgaaggggtatcgcggacttctgaccgtccgatccaaaatctagcgcccagattagatctagtctaccacgaaccgatacgcgatgctgcccaccagatcacgatcctacgaccctaatctaatatgatgccgcacccatcctgaccgctggattccaatctgatgccctaggttcctcactcgaagcggtacatgtctgatttaatcacgaccgcaggcgcctgatccaacggccagaaccgccttctttccccaacccagctgagcagcggcgcgttcgtcgggaatacggcggcggccatggccgggttcacgaaatccatgctctaacctcctaaactccaatctagtgggcgctacgcaatcgcgggtggctagtggacatggcttagggtttatttactggagatgaacgtcgaacggcgctacccgcggcgcgcggtggaggcacaagtgcggcgacaaattctagcccacggtttgggtgattacgagtctgtcccgacggaacatgatcaagggaagaggagggcacggaggacatgaatctcaccggtggcagacgagcggacaccctagcttcgacgcacgacggatccgcagagcttcccccgaatcggtggtgacccagagcgtgacgacgctgatccaccacccaacgagaccacacctgaacgcgggacgcagagcggcgactacggtgcaattagctaagaggcgaggcttccttctccaatatgtcaactcagtggcgacgttgaggaaaactgagcagcgagcacccccaacaggcctaaataacccgctcccccacaagcggaaggtgtggtttcgttcgcagccgtcgggcgcaaggcaagttcgctcgtgggtggttgaagatccgcgatattggcgtgagctctgcgcaaatcgtggcggcaaagtccgcccacgccgcgcg

SEQ ID NO: 22763 - DNA, 863 bp, Zea Mays
ggagagtaccgggagcggtgctcatcgtcacaaaatccttggtgtgattacaattggtatcagagcccacattgtcgctgctgcctgggagagctttgggcctcttagggggtgggatgtgagagaccggtatgcacgacctgggttagtacaacatcgccaagccaagggggtcatgatgcccttataagggcgggcctccctcctctctcagcctaggttttgagagcgaggtgcccgtttgaataggctatcacgagcgcatgaacgcccgacgctggcgatggtgggctttgggcggactagcccaggggtgcgttacacttggtatcgaagcgttaccaccctaactccacctccggtcaaaggtacttccaaaatctcaccaccggatgcttttcatactcttattgttcatacgatggatccttattgggcatcatatcaatcttgcttagctgctacattacctcaactaaattttccctaatttgatgaacatcatcctaaaatgtggaaatctaagagtgagtcttattttgacgtgttcaccataccctgagagctttgggctaaaattgccacgatgcattttgtcgagtcagccgtgttttggttgcaatcatctgatctgctgttacgtttagcaccgtggtctaaattctgtgcagcagtatgtgctcgctttgagcgtgatcaacacaactctcttattagacaattcttccacattagacaaaatgatacagttgttgagtacgtcgaacatttcgacactccgatgcaccaaattcttgcacatgatccctagtttagtgtatctactatcgtcaatagatttgtagatggtcttgcacctaaaa

SEQ ID NO: 22764 - DNA, 1234 bp, Zea Mays
ttggcccaatcaaacgtagatcccaaacagggccacataaaccaaggctaagtattctctcaagcctaaggagaaaaggttaatatgtctcatgggcaaattctcgataagaagaaatgagaaataagttatatatacataaaataggcactgatgtatatttaaaatagtttgctagtatctcacagaatttcatactatggttttagtcacctgaaattagcagaactccacaaatgaatagtgccatctgctgaacctgtagttatatatggagtgtccggaagggaaatgacagaaacaactggcgacatgaaaacatccattgtctggacgcattccttttccttcaaggcccatgcctcatttgacaaaaatatagcatggatcagtagcaattgttatgcgcggaactataatgtgtctatacacacagacaacatcgataccttggcagtacagtcttgagatccactaatcaaatattgctgaccatcatgtgtgacgaaatccaagcaattcactttgtccgaatggccgtgcagagtacactctgatgtgggagatttcaggcaccaaagctgatgtacatcaaagcatagcttattaatcacactatcgcacagtcattgtttcaaaggaaattaattacacttatcttggtatattttctttatcgaacttgcaggagaactgtgcatcttataaagagtaaaaaggcttacaaagcagcgaaacctgctaaatagaagcataaacagagggggggggggggactacattttggcaccaaccataacccaacacactaattcatccaagaagcttctctgcagccttgctaaggaaggaggttccccattaaaaaccaccttgttacgatgaaaaccatcttggtatattttgaatgttgtgttaattcaatataagaatcaaaacaagggagagaggctcaaacctttattgtgtgatcacttgaaacactggcaaaactgtcatttgggctaaatgccacttgaagtatggaatcagtgtgttccctaccaaatttttgtatgcacttccaatcatcgtcccagtcccaaagcttcatttcttcacaggtagagagcaaatatggctgggttggatgaacgataagcgctctggacgagcaaataccccagtctatgatcccagatgagtatgctgtataaatgagaaaatggtccattatgtaatactttttactatc

SEQ ID NO: 22765 - DNA, 868 bp, Zea Mays
cagacctggtactcatcgcttcgaccaagaactgttacttcgtggaaggagtcgaaggaaatgctcctcaccaacttccaaggcttctagtcaaagccagtcactgcacaagctctgtttcagtgtacccaggatctagatgaatacctttagttgttcgtccaaagatttcttcaccttcgagcctaggaaccagtagtctaggacaacattgtcatcaaatccatggtcaaggggcttagaccagggccggcagcccaatactttgcaagaaaacctccacactctcttgagaaattgctgcaaaatatggatgaatacataagggctgacaatgatttccgccataaaagggaggagttacacagatacaccaaagcggccaagagctttgagggaaggttccatcctacgcatattcaaagcattcacaacccgatgcagggtgaggaaaagatggaccagtcttaggtcagtcgggccagcagcaagcaaactcccaccagtaagcaagctcttagcagcaacctttgaataacatatttcatcgacctactccgagaggtggaaggggaggccaaaatttcggtggcagactcaatgcacctccaaggaagccattctgcttgctttgtggtgaggacaaaggccacaccacaagaacatgccatcatactatgaacaagcagaaggaacttgcttcttctgctactcaatcctcccagtcaaaagaggtgttcagtacatcatcgtactattcaccttatatctcatagtttgttcagcctcagttataggagcaaaggctaaatttaccttcggcctcaaacgtttcaagcaatctaatgatgagtgcatggtcaccatc

SEQ ID NO: 22766 - DNA, 1437 bp, Zea Mays
ccgggatcttgcgcatacccttttcatacatctctagccttgtgttctcagaggagcgccaccttgctgattcagatagtaggtttgaagtcagcacgtacgtggacgggtcttgtggttccaatgccagcagatgcttcatggcccgcctccgcacagccatgttggagtgcttgctgcagctgtctagcaaagaccgccaaactaatgcaccaggctgcaatggcataccacctataagctgctctgcctcgtcaaaacggccccagcagccaaggacataaacaaaggctgcatagtgctccatggctggttcaatgccatatgtgcttggcatagaaagaaagagttttctgcatttgtctgtggagtctgagcttgtgtgactgcaagcagatatgaccagaagaaaggtaatggaatcaggcctgaccattgatctctccatctcagaccatatcttcaatatatcatccccctgatgaagaagaagatgggcagtgatcattgcattccatgacaccaagtctcgacaactcatccgctcaaacaaactgattgcatctttcaactccccacacttgccgtacatactgataattgcgttaccaactccacgagcgctcagaagcccggattttgcagcaaaagtatgcatttgttttccaagttcagcaaaacctagactgccacatactccaaggacagaagtcaacatgaactcatcaatgaattctgcaccactgcttctaaacatctgaaggaaggtcgaaagtgctttctcatactcaccacctctgacacttgccagcagtagagaattccaggcaatgtgaaagctctcctcatgctgccattgctcaaataacagatgcgcgtctccagatcggccacatttgatgcacatgtcaatcaacgcagcatcactccatggactagacacacatccacacttgatcacaaacgcatgaacctgctcgctcaccttcctatccgcagcaatagcacaagcattcagcacgcctgtcaccgtgacatctgagatctccagcccatcctccaccatttgcctaaacaaacccagccctcggagccccgccttcttggcaaaagtggcgcgcacgccttccttgttccgacaaaacccagtgagaaccgcattgtatgtaacgaagttcctctgcggcatccgctcaaacacatccagtgccatgtcaacgagaccaaactccatgtacccattcagcaaaccagtccacgaaatcacgtccttcacgggcatcctctggaaaacgctcaccacgtcctcaacagaggcaccatgctccgcgtagaacccgatgagcgcgttgcccacactcaggtccgtctccagccccgacttgaacgacagagcatgcaccgcctccccttggagctgcccaaccccctcgcctg

SEQ ID NO: 22767 - DNA, 369 bp, Zea Mays
agagggaggcgaggagcgcaccacagtggcatggttttgggtcgaggaggagtggcgacatgcaacagaagacgtccacgctgacggatggttggccaacatgataggaggttaggacacgaaaagtggtagtgtggggtcgtgggaggtgcggcgaggaggagcacaatgggagcagcgcggtggagcgtcgaggatcggggggtagcagagcgcagccaggagggcgttgagagcgtcagtcgtgcggtgggtcattgaatgtcacctagagggaagtgaataggtgaaacatttaaattataagctttgaacacaaacttcacccgaggttagcatcggaatgagtagtaatgaaaccaagtgcgg

SEQ ID NO: 22768 - DNA, 554 bp, Zea Mays
agggcgtgaaaagtgctaaacaaaatttaatgtaatgaagaatgggttgaagattctgaaaagagaaataaaaaatatgtgctcatatataaatggtcggaggactattctgtattatagtacacaaaattaaaggttctggaggaaaaaatatccccgagtagtagtaaagtggcaaaaatcaatgaacgttgcagcagcatgtgttgcaacagcattcaaccgtctgtacctcggtccttgatgaaattagagagcgtgttgcagtcgtagcagtcgtagcagagggcgaagccggagaagcctagttcttcgcacgacacaggtcttcgcaggtcggtctgtaacgacctcggatagaatgttgcagtcggagttgaaagtgaggccgacgaaccctaggtccacgcattccctcgtcctatgccagtcgccgcccgcaacatagggccgagaaatataactatggaaaatatatatgtacacacatttgcaccgaaacaaaaaaatgcacagtttcatatctatgcttttgtggaacattaggaaattaa

SEQ ID NO: 22769 - DNA, 385 bp, Zea Mays
cgaggacaagctgagggtggtgctcgcggaagcgcccaaggtggcgtcgtcggcaacaagaagccggcacgagatgacggctgtcacaactgtggcaagcttggccactgggctagggaatgtcgacagccacgatgtggccaggccaacgtcgcacaggcggaggaggaagctctgctcctagcacacgcaagcatcaagctacctccagcggcaccggccgcagcggcactcctccaccttgatgagtcgaaagcacacgctttcctcggcgatggctctagcaatgacatgatcgaaggatggtgcctcgacaccagcgccactcatcacatgaccgaccaacgggagttcttcacggagctcgactctagcgtccgagggt

SEQ ID NO: 22770 - DNA, 739 bp, Zea Mays
ttggtatgtcctgggagcgaggtggcaaaggcacaccagaagaagacgactgacgacgcaagatatcatcagtctcccgctggttccaagccaaatcatgcacatctactgaaatgtcacaaaacatcaaaaagatgaagctaggccatgagcaatgcgtgagccaagacccctaactcatgctctccctcaaacactgtgatccataggatgtgaggcggcagcagcacgagaggaatatagatgacgagggggcgcaggagcaggttcatcacaagaataatcttgtctagcagctcccgcagacgtgttaggtggaggccgaacaaaccctcaaccaaccagttgaagaccatgtttctatcctaatggcctttgcagatccacgagcgaagaagccatcagcgtaggcatccttcgatctgactaaacgtcatggagggactatgtcgtacggaggccttagggtggccaagaagccgagtgccgagctctgcctcgaccatagagagaagaccatacttgttttagccatatgcaggatcacaagcgatggggtcttcgaccggacgagcaacaacaagtcgttgacaaccgtggccttcgtttgcacattgactaaaggacacacccaagccagccacgaccaaggggagtggtgatgcgacgactctcgtgacgaaggctacaagtcaaccctgaactcccctggtgcaccagaagacatcgccaagggctg

SEQ ID NO: 22771 - DNA, 375 bp, Zea Mays
gtagcgaggcaaggagtaaggccagaggcatgcatcccaactggatccattaaacgataggtgagtggatcgaggtcaagcatgatcattattgatgtcgattctgaggtcgtcttccatgtcgtcgatgcccactatctggccccactatagtcggtctagtgccctcggcatggaatccttacgagatctcgctttagcatttgtggtggttatgagtagctgaggcaaggagcaaagccagaagcgtgcatccccactagatccatcaacgacgggcgagtgaggccaagcgcgataattattgatgttgactctgaggttgtcttccacctcgtcgtcaaccaccgtatggtcccatcagatccaatctag

SEQ ID NO: 22772 - DNA, 453 bp, Zea Mays
tgtttttatccacattgtggctgccgccgccaccgagttttgcctttgtcgatctacagtagtcgccgctccgaacttcaacaaatcagtttgtcgcgccgctgtgatccatgtccggatctgcgtcgtcactggattcttccccaggctcatcagtggttgcgctagttcatcgtcgacacacatgatgtctctgtcggtgaggaatcatgttgaatcacctgctcatttgcattcgtgtgcaagcgacgtgtactggttttgtgtgttaggtgcttgatcgatctgcaacagctctcaacgagggagtcacacccacgtgcacctgctgtggtggattcttggtggattctctcaccgaagaacaaggacgttatcatttctcttgtttccaagcaccttggcattagtccatcacaagttctcaagtaagtgtgcacacgtgaattaagc

SEQ ID NO: 22773 - DNA, 729 bp, Zea Mays
tggaaagcttatctctttacctttctaatgatatctagaaaatccaaaacgaagtctatatgtggctcgagcgtccattttcctaagaaccactcttgtagtatgaactagactcacgaataaattggacttcaactcctcttgagctagcaactatattattgattgggacttaaccacatatttggtgtgcatgtcggtttccaatgatatcttgatcgtccaaaatggagttcatatgtggcccgaggatctgttttcgtgaggcccattattgcagtccaaaatagactcacgaatagattggacttcaattccccttaagcttaggactctattattttggtccttgaccatatagttggtgtgcgtgtcctcatcactataggaggatatctccatggtatcagcggcgacatctacgacgacatctgtggcggcagccagaacttacccgacttagcaggtccctaaggcatcacttggcctcctatcgaaactgaaacaggaatttgttcttgataaccagttctgtaaccctgtaacaagagaatcagttgcttgttcacgaattagaactctaacttgaatggaatacatgagtttatctgtgatgcatcaacttgtgatggcaaggggttcactggctggctagactacgtcagttatcgaacgttggacaatgctggtggaatcggaggcatgccaaactaaggtccagcactatcg

SEQ ID NO: 22774 - DNA, 443 bp, Zea Mays
ccactcaccctaacaaattccattctcctgtcattcccccacatggtagaacgagttagctagtattaagcgctggactcacatctttgcctcgccgggttgctcgacagtgagttggtcattagagagttggtcagctggtccgtctcgcagagttggtcggtggagttggtcggacgagagttggtcagtcggtctgcctttcagagttggtcagtggagttggtcggcggagttgggcaccttccggagcatcgcccgagatgccctcgggcgagtcggaaatgcgttgcttgtccggggttggcctcaggggagtcgcgactgcatctcccatccgaggttagtcttggatgagttgtgactgtgtctcccgcctgaggttggccttggatgagtcatgactgcgtctcccgtgcgacgttgacctcgggtgagtcgtg

SEQ ID NO: 22775 - DNA, 739 bp, Zea Mays
agtttatcttaaagaccagataggaagagtgcaatgtatagaaggttgaatcgactaaggttgattctgtacttacacatgcatcatgctaagaattatactaataaagttttcccccttagaaagatgccgccacgcacaaggctaacggcgcgcaagtcaactggaccaatgggtgtgccccggcatcaactggctcctcgacatgagaacagtagcagcgggagcaatgacccaataggagatcttgaagcccgagtgagtcgacttcaagcggagctacaacccaggaccaatgcttgggtcgcggacggagatagaatgaactaagaagggacatccgtcacctgcgggatcagcttgttgatcgggacttggcgctcgactgggcagtatagtcccgtttgctggcatgtgctaaggaagcaagggctcaggcccgaatcaaggaacttagctcaactgtcaacgacctgcaggtctattgcaatacgttgcatgaggaagtccatgtactgtattcgcaattacaccctagtgcacctgcacaccctgctgaggcggaagccggaccctcccacgttgcgggacgcgcgctgggtggggagttagacctttttgagccccctccttccatgaggttggttgacgtctggactcccacacctgacgatgaggccgccaagagtaatgggaagcaggactaatggtgtaatagaagtagaggtagtgtagtgta

SEQ ID NO: 22776 - DNA, 329 bp, Zea Mays
gctggggagcagggggactgtgcggaccatcgtcacgcggcaaccaggaagcccgggaatagctggactcgcatcgcggcgaggttcaccatcgcgcgccaagcgggtgtacggtgcgcgcgaggaacggccgtggtcggctcctcaccgggccggaactccactgccgaacagtgtcgacgctagaaactctggtgagaaccactcctagccacttctactttacttatccatgccggtggtacttcttaggcttagatgttggggttctggcaacctgggggtcaaacgccggtgcaagtcgtgccctggggcgagtgcagcggcgc

SEQ ID NO: 22777 - DNA, 340 bp, Zea Mays
ccaccaatgaatccccatataccatcagtctcttgatgcccagtgatatggcaatgttcagtccatgaatcaaagcttcatattctgctgcattattggacgctgagaataataactgaagagcatatttaagttgttcacctctaggtgcaatgaagaggatccctatgcctgccccctgcagcttcaacgagccatcgaaatacatctgccatacttctgcagtctccaggttatctggcacttgttgctcgatccattctgatatgaagtcaactagtgcttgagtcttgattgcagtacgaggctgaaactcaatgtcgtgagctcccagctcgca

SEQ ID NO: 22778 - DNA, 629 bp, Zea Mays
gcagcattggtgcactgaggatgaagaatgagtgctccatgctgaaggcccactgcaacggcaggaatctggaagggtaccgtgtacacctgacgactcttcctatttccctctcattctttgcttgcattgagcggcggtgcatctcattccatggctcgctcagatgccgccggtcgctccagaagatgaagcgggagcatgccactctgaagcagaagctggagacgtattttcaggtaaacacaaacactctttaagaatggttgcggtgtttctgtacatagataacgatcgagcaactgatcttagctgctgttttgctgcgtgctgatgagacagttgctgaggcaagtcggtcctccagaacgcgcggtgaactcatggaagtaacaagagtagctaagcatgggaggcagttccaagggaaacaagagggtgggctactacctctgctccattggaagagtatcgtatactcctcgaagttttgctcagttacttactgctggtgtgccggcccttttctttgctgctcatatgggggatgtgtctgtctctggtgtggtttctgtaccgtctactctgaaatgtgcaatggtatcatcaatatatttggtcgaattttg

SEQ ID NO: 22779 - DNA, 589 bp, Zea Mays
tcggcatccgacatacactgttgtcgtccggtgcccgtgcccataccggcatgtgaggattgttcaccggattccaaaatccgataaatccgcgctttgccgtgcctctagccgtgctccgtgtctgtcgcctcacgagtgctttctcaacagcgccgacccactgtttattcgtccttcttcgaacatcgtcggtctactgtggtcctgtccttccaccgcagcgcccatgccactgctttctcccaatccccctatatgaagtccctctgctgttgtcttccttttttcccctaaatggcagtcgctcctttcttctcgtcgactccgtcgccgtcgtctgtttcttttctgcggatccctattgcttttgtttcgattcctttccgtctctgcaccggattcttgtgcatttgattcatctgctatttcatctgttgtagatctgccacgttggagacctggccaacacgcgcaggtcctgaaatcgttcagttcgtcccttcttcagcgatttgaggtaatccttggttccaccgttcctcgcttttttatgttgctttggttttttggttcattgcagtttctt

SEQ ID NO: 22780 - DNA, 822 bp, Zea Mays
tttgcttaagagagtaagcatggttgttgtgaagaatttggagaaaagtgcactcaaagttgaactttcaggctgtctgaagtatgaaattcagaataatagtggtactgagccaactttgagtatgaattcaaccttgatctagtgctcaaatgagttcaagccctatagtcgaattattgctggtttatagctctacaattttgctgcagagcctgggaagagttgtcattggaaattgagagaaaaccaagctccaaaatggtctctcagagtgcctgaacatcattgccatggtacagtgctatcggggggaattcagagcacttcaccgccgtcgatcacccctccgccgcgatttgtgtcgccggccttaagattcgcgtgtggggtggattgataacgtcgcggggtaaggatcttcgtcgacggtgagctggaggtcactccggtgactcaccgtggctttctcctctactttgcggcggagcagataagctcgccggtgaaccgccgtgtctcggccttgtgccgcgtgtcctaaccgcgccaccgcatcgccgtgactccctctaaactccccgtcgaccaccggagttactgccacgatggtgaacacgtgttcactgcaccagcgttcttcctcacttccgaccgccgcacatcaacgcccaaattcacggtcaccgccgaagagccctataaattgaagcccccgctaactccgcaaggtcatcctccactcagccaccgctaatcgctagcagtccttcgccagagctcgcgaattttgaattcgccccaaatctctctctaccgccg

SEQ ID NO: 22781 - DNA, 348 bp, Zea Mays
gggtttcgatggttggtgctgaccgtcgatcatggggtgaacggttgggatggctctgcgcgtacccctttcgcataggttaaccgggaccgtaggatcggaagcgttcgggtgcgattggatctaggttaattaaatctgagccgttggcgcgcgatcaagcggtatctgggagcgtcagtcctgaaccagggaagatctaatccgggccatccgcgcctgatcggacggccgttaacacttcgtaccccttcgtttgcgcagttgcggaaagaaccttatgattttagagaatcaacccacggtccacaggaactattctctgtgtcttaggaaacttaccccgag

SEQ ID NO: 22782 - DNA, 444 bp, Zea Mays
tccccttttctatttcttcacaaggtgaagtccacgatcgtggacggcggagcaggaactccggtgagctaagaccggccggataactcaactaccggtgctccggtgcggttgacaccaaatttgacccctaataaccatttcccctctatcaattgcagatttctaactctaaatcgctctgtccacggtgacggcgcaaaccgaggacaatccgtggtgttcccggtgacctagcctaatctagcttaattggctgggttgctaagcatctacaacacacagagacgctgaaacgagagcaaagaagccatgaacggacctgtaacgagctagccacagtgagctcacaccgcacgttgttcttgattgatttgggggaaatcccaaattggagctctctggtggatgatttgagacacgagtgttggcgttggatgcttg

SEQ ID NO: 22783 - DNA, 584 bp, Zea Mays
atttggcattagggtaaggtactcctccagtcgtagctagatggttgcccctgggtcggtgcactcccgttaccttggagggtccttcccagctgggggagagttgtggagcacctcttggtgtggcacttgccgccgacccagggttcctatccgcatttgacatgggaacccttgtctctggctgtgatcacttctgcatgtacctgtctgcagctcggacccgtgggaggtccggaagggcctccggaggaaggcgtgcttcagcttcgtagacctaggggcacggagttcccccgaggtccgtctagttgtcttcaccggagtaggagcctccggcaaagatatccttgaggtccccctcgggcgactgatacccgaggtctcgtttagccatggccacctcactgtcgtccaccttttccttgccgggccagcggcgaggcggggagccgtctttggaggactgctcacgccgctcgctgacgcgttttgcgaggtcgatgatctcgcgacactacgcggcgctgtggtgaccatgcgggtgcacatggcatgaaccactgttacccttctgcggtcgc

SEQ ID NO: 22784 - DNA, 453 bp, Zea Mays
cgacaatttgtgccgtcccttccccgttagaattcggcggaggacaagatctcccactgcgaaggatcgatgccgtatggccttgtcatgatagcgcctcagagtctgttggtatcttgctgactgaatcactgtattcaactgttcttcttctagtatatcaacatcctctagtctagtagcttcagcttcagctatgtttttgaagatcaatcttggtgccccaaacttgagatcagcaggtagcactgcctccgaatcataaaccatgaagaagggagtgtttccatgcaaagcttggctgggttgagttcttaggctccaaaccacgtacgacaactctctaattcactttcctgcgaacttttcattcttgtcgaagactttctttctgagtgcttccaatatcatttcgttggctctttctacctgcccgttggctcttgggtgtgc

SEQ ID NO: 22785 - DNA, 848 bp, Zea Mays
gtgaactacaggatcaggatcggctcaccggccctattcagcatagctatccagttcaccgtgctagcatgctcaaaaatcctgcacgcccccatatagtattttttttaaaaaaaaatggagccttgtggactatggaatgagcacagccatgtggaaggaaggaggaccagccagagccagcatgcgggggttaaggttaagcaagctgactgttgacaggcaaactggaccagatttccaccgtggcaactcacctttcaataaattttagtgtagcaaactgtgcttatcagaataagaagcttctctcccttccaacacttcgcagtggcacgcacggtagctagtcaataaacatatggataaagttacgctgctggtcacaggccgtcactgtctgtatgtaacagaaaatagtttctgaagagaaaccaagcagtagtatgattgtatgaatctctctctcacacacacacacactcaaattattttggaatcccaaagtacaaactgacaaaaagtaggaatatatcttgaagggggtttttagatccagatactggaggaacgtatcttgaagttcatgcagcagataaaagtaaaactactagttgagaagagtcccatacccccgttgaaaatttgaatccgaaaaaatgaacttgggtgtgtatttatcagtcgttctgtttgcctggggaggctcaagctggtaaacgaagcactgttgcttattagtttaaggattgttttgactgccgtattacgtactcgggtattctaaagtgtgaaccgaaagggacggagacagtgtaattcctcctagattgtccttattgagtcgc

SEQ ID NO: 22786 - DNA, 674 bp, Zea Mays
gaagagggtagtgtcaggcgtcgtgatgatgagaagtagggtgagggtgtcgcgagggtttggggtctcgctaagttcttgctggccgaaatgatgccgtacgtatctgtcgaatgtctatccttgaacgactggggcaccgagaagagggcagtgtcgggcgtcatgatgatgagaagtagggtgagggtgtcgcgagggtttggggtctcgctaagttcttgctggccgaaatgatgccgtacgtatctgtcgaatgtctatccttgaatgactggggcaccgagaagagggcagtgtcgggcgtcatgatgatgagaagtagggtgagggtgtcgcgagggtttggggtcccgctaagttcttgctggtcgaaatgatgtcgtacgtatctgtcgaatgtctatccttgaacgactggggcacggagaagagggccgtgtcaggcgtcgtgatgatgagaagtagggtgagggtgtcgcgagggtttggggtcggacgacgtcgcgtgtcggaaaggaggtagtggtgggcgatatcaggacggactggctcgaatgtcgtcaaataaaatggggccaaatagatagatacggagactaaacaaaggaggagaacgaagtcaggaggattatactgatctggacaagaagattagaacatgtatgatgtag

SEQ ID NO: 22787 - DNA, 669 bp, Zea Mays
gtggatccactccccggttggaaggcacacttattaaacttggcaggaaggactgccatggttcgatttgtgttgtcagctatcccggtttatcttcttattgcattgaacgtgcctaaatgggtgatcaagaagattgataaaatcagaagagctttcttgtggacaggaagaaaagagacaaacagggttacaggggcatttgtttggtagcttggggaggtgaccagacctatcaatctgggcgggcttggtactccaaaccttcaggttgctggatgggctctccaaatacgatggctttggctgaaaaaaaatagatgggtgcaaccttgggccggaattgagatccctgtccatcctaattcacgtgcattgttctccatctctttgatcagccaagtgggctatagcttgaatacattcttttggacagatcgctgggtgcatggatgcgctttagctgatctcatgcctgcagttgttgcttgtgtacctaaaaggttacagagtagacggacagtggctgaggctatggtcgacaggagttgggtgagagatattattagggccctatctatggatggcctgttgcagtatttacagatctgggatgtggtagaaagcagtatcctatctcaagaacctgaccatcacctctgaaagctt

SEQ ID NO: 22788 - DNA, 303 bp, Zea Mays
gggcagccatcgtgtcgtagttgttcacgaatcggcggtagtatcctgcgaggcctaggaagccccgcacggcctggacggagcgaggcggtggccagtcgtaaatggccgctaccttggccaggtccatggccacgcctgccgctgagatgatgtggccgaggtaggtgacggaggatgcgccaaaagagcacttagagcgcttgacgaagagctggtggcggcgcagctcgttgaggaccgcccggaggtggcgaagatgatcttcccatgtcttgctgtaaattagaatatcatcaaaaa

SEQ ID NO: 22789 - DNA, 390 bp, Zea Mays
agagaatgccacagcgaactcaatggcggggaaaaggccacgaatccgagggcagagaggggagaacgacggggagaaggcctcggacggaccggaggtactccggtgagggattccggcgacgaggagggggcttaaggcgtgctaaggcttgggaaagcttcagcaaaggtagggtgacacaggaacctacaccggggaaccaaaccgtgctaaattggccggccaccgcgcgagcacggcggaccaccacgaccgagcaccgtcgatccaaaattggctgagcacagagcgaaactagggaaattaagcgtgggcaaaggtgtctcacctcggggcggagctcagggaggcttggcgcggtctccggcgagctagatggccgggaac

SEQ ID NO: 22790 - DNA, 622 bp, Zea Mays
cctagttccaatctttaactcaaatattttggacaaactttttatgaaattccaaagttaggattttgggatgttacaaatcctacccccttaaaagaaatcttgtcctcgagatttgtaagagaagggatacagaaggattggtttgtaattcaacttttagtctatggttgtttcaaaagtccagagtctcaattttttatagtcaatagtgggtgattaggagagcgtaggtatccagctacctattatgtaggatataagtgatgggtaggttagggcaagaatagtcagggtaagaaagcttatggtaaggaagaactccgtgttgggtgataatgcatctgaatattgagtttgatttctctccttccttgacgaggttgatcttttcttctctggtcttggtctcattgattcgaggttaatatatatcagcagggttggggagtatggttaagatagacatggatgagatagagtacatgatgtaggtcagaagtttgtttgatgttaggtagggatagactgattatgcaatccatcatgactctattggttgggttagctcttggttcttattctagagtgggataaatatgctaattagggcaagatgaat

SEQ ID NO: 22791 - DNA, 409 bp, Zea Mays
cggcctgtcactcagaagtgcgaggcggtcgctagcctcggtactagcgatcacccattcggcccgccagttttcccacctcgcaccgctgagggaggagatataggcgccggccgaatccgcccttgtctggaagtaatacgcaccgagatggtccttggccttcccggacttcaccagcacgaaaaagtggcggaagagagaggtgcatggtgccacccgcacgaacatctcgcacaggtgagcaaagatggccgcctggaggatggagtggggtgtgaggtgctgcagctggagaccgaattcctccaacagtaacatgaagaagggggagatcggcaacgccagcccgcacgagatgtaggagacaaagagcacaaattccccagcggcgagatcgccaaggggg

SEQ ID NO: 22792 - DNA, 384 bp, Zea Mays
ggtactaaagctcaaaatccttgatctaaaacttccattttacccttgtttcacttcacttttctcaaaatctgcgcaacagtttcaaaaattggttccaccgaattttggcccggctcaaccgaatttgcaaaacggatcaaccgaattttggctcggctcaaccgaatttgaaaaacggagcaaccgaattttggcctgactcaaccgaatttggaaaacggaccaaccgaattttggcccggctcaaccgaatttgcaaaatggagcaaccgaatttcggcctgactcaaccgaatttgcaaaccggttcaaccgaatttgcaaaccggttcaaccggtttctgcactgttcccctctgtcactgccagtctaccagtcag

SEQ ID NO: 22793 - DNA, 343 bp, Zea Mays
ccgaaaggtgtgatgaatgcagtcttctcctagtcatcctcagctagactgatctagtgataaccagagtaacagtctaggaaggagaaaagacaacatcctgcattagagttgaccaccgggtctattctagagagctcgaagggattctttaggtagtgtttttcgagaacagaatagtcgacgcacctgcaccaatccactttattctttttgagtataagaactagattcacaagccactcgggatatgttacttctctaatgaaacatactgctactagacgagttaactctgctcagatggcttctctcttgtctagagtgaaaaggtgcaacttct

SEQ ID NO: 22794 - DNA, 528 bp, Zea Mays
ggaaggaaaaacatctagaccaaaaggaggaggccgtcacagcactccatgataagctgaaagcttataatgcagtgcaggagaaacagcgggacaagcaagctgcggctgaggcgaagctatagaagctgcagcaggaactctccgacaaggccagtgatattgctcgcgttgagggaaacctcaaggcgagggaagcttccctggcgaaacgaacaactgacctcacttggcaggaggaggacctcgtctttagggaggagatgtgggcaaggcggaacaagctgctggatgagcttgagctcgaggcagaggagaaagtgaagcgtctagaagggaaagtgcggacgctggaggggcaggtccgtcagttccaggcagcgcaggcgacacagtcggccccgggcccccaggcagtggaggtgttgaggaagacacttgacgacctccaggcagagcaacgcgccaaagctcagcgcatcaccgcttgggctggcgaggcaagcacgacgctagtaccattgggga

SEQ ID NO: 22795 - DNA, 757 bp, Zea Mays
ggataatcctatctcgtcacactatgctgtggtccaagttctagaaatcacagacagtggttgtcaagattgggagatagactttccagttgaggggatcataactttgcaggaggcaatgaacgagttggtcctttggcatcgacgcgacatcaagttgggtgatgagccgatcttaagccaatcaacaccaatgcaacagaaagatagttcgatcattccataccccatggtgcaggaaaatatgacaccgacctccacaaaaatcgttgaaactttcatatcacctcttgcgaaggaactcgacgagggggacgtggacaaaattgttcctcagaatgtcgacgcaaacatcaaaaaggaaggaaaggttgacaccaatgttgaagggccaactatttcaaagaaaattcatcagcgaatcgccactggcgatgtcaagaaaccgtcagaatcagtggcacgctacctgcataaattgcggagagttatgacaaatcaatcaaaagcggaatcagcatctcatggagtacgcacacggtcccaaatagacaatttcgaagtatgggaagaagatggaatgatttatactcgagaatcattacgtcttaaaaccaatatctcgatatacaagaaggaggatgttcctcctaaatttgtgaatgggaggccgttcttgacgacggtgcaactttctaagttgtcgactccgaagattagaatgcatgagtggtacatggtggctagcaacaaatac

SEQ ID NO: 22796 - DNA, 408 bp, Zea Mays
gaatgaccccacgaaagggttgatcggccaagtcttcttgtttgggtgctggtgggggtggtggtggatttgggtgatgtggtggtggtggtgggagggcttggatctcttgttgttgctcatacatatggttttgctggtggggatggtattgttcattgtggaattggcgctggtgatattgttgggggtggtaggtgtgggaaacaactcgttggttgtcagccggttgatttctggccatcatatctttggtggccttggtttcagggcaacccctggtgggatgtgtggagtcctcgctgtgaattagacagtaaaaccttcgttattgtgggactcggcctttccctctgcctctagggttgctgccagaaccctgttgcgtagggtactcgtggcgacgag

SEQ ID NO: 22797 - DNA, 659 bp, Zea Mays
gtttatagagcaacaactttggtgcagatggatcggtagctctccacatgaaaaatggagaatggagtttctcaatctgctctgttaggcgcaatgaagggaattcacatggtacaataacctgacgaagatcgctaggttcagtgcaccgccgccggtgatcccgcgccgtgatcctcgccagcgttgtgattcgtgcccgatggcgcacggatatctacgttaagtgaaagatctcgcgcaggggatgaagttggggcactgttactgcccagttcctgtacccacttgcgcagcaacgtggccggacggtcatcgccgtggagatcgccgttcaccgcgattgcgccacgccgtagtcctttcaccacatacccgaagccgtggcaagctaagagttaccgcccttgagtcatagtgtcgttgaacgccacgacgagctcaccagtgcaacatcctgtcaccaccgtgatccaaatctccttcaaattcgggacaaccgtggctagctgctataaattgagtgcactgccagctccgttagcttatcacgaactcagagcacccactcccgcctccgattagccactgtagcgccctaatttagttcttcccccaaatcggtcgtccgcgccatggtgtgacgtcgtgtcgtggcc

SEQ ID NO: 22798 - DNA, 2038 bp, Zea Mays
gcaggtttcgacttcacggctgggaagcgcatcgagcagaaattggtggattacaacaaggaggccgagcggttcggaggtaacaaccaaagttttaccacaattccagtttgtttcgagggattgccctctgtgttgctatttgccccagtccagatgccctgcaatattgttatttgttaccaacttgtgaattatgttctcaattctatgatcttgccatctgacactttgatagcgcaatattttgcacatatctaatgtatgcctgcgagtatctgtaagtttacagtctgattttcatgtcatgagaggattatgcaaaatatatgattcctgcaaaaactttgtccaatttttgcatgtattacatgcatgcacgtccattgtactgtggatatgctgtgcgccccatactacatttttgaaggtagatatacattgttgtctcactatttcaccgattattaagttatatacaatacaatcattgatatgtaggatactcatatgaggagctgtctgaagtatctccagatcacaggttcattgcatacacaatgtatgacaaagataaggactccttcactttaatggttagggacctagtaacaggcacacttcatgataaaccctgtgctgaccgggtgtcaaatatttcatgggctatggatgggaaagcattggtttatattgttacaaatgaggaaagaagaccatataggtcagtgatttttctttataaatctgcttatctatgtttttttcaccgcataataactgtatcttttttcttatgttttggttaggttgttttgtagcatgattggatccaacaaggatgccattctcatgttggaagaacctgatgagaatatttttctaaatatcagacatacgaaggattttcgatatataacgttaaatgtcttttcagatactcactcaaaggtactgtttcttgtataccttatctatgctcttattatttgatcttttgtttgctgctcatgcttattggttcttttccaggtgtatttaataaatgcttctaatcccctttcccaaatgacgcttgtatgggaaggggaatcccaagttcattgcattgttgaacatcatcgtggtcacctttatttgtttacagatgctgcaagagaaggtgtccctgttgattcacattatataatgcagtctgttgtggaatcttctgggccaaacagttggaaggttcaaattattcatctcctatgctatgttgatttttttctgaacccctgttttctacatatacaagtgcagtccctttgtgactactatacagaagcacttctcccaaaaatcatatacttttagcgaatacatacatgacatatgtaattaaggtagttaacacttgttatgattgctgtatgaattcattctgctaagaactatttcagataactgacttcatatattctgtttgacacaacttgatgtttgaaccagaatgttttagttgaggaacctggtgtcattcttgaagatgttgatttttgtgatactcatatggtgctaactctgagacaaggcagaaaactcagactttgttcagttaaattgcctctaactgaagatatcaaagtaagtgaattttttatcgttatctatgggtgaactaagttgcgacattttacaatttcattcttgatggtctcccacagccttttcttttctgcacaattataatattttaaatatctcttgcttatttatttactcactccataatttttccatctattggaaatctggaaaccggatatctcgaaaacaattcctgtaaaggtttacgaatgtaacgtatatactgtaaacatgattcttatccatttcacttctcaggtacctactcatctatcagatttgcgtccaattgacctgcctctccccagtgatgtgtgtcagattgtatctgggccgaattatgattattattcctcaacaatgcgtttcacgatttcatcacctgtggtattcctctgctctttctttt

SEQ ID NO: 22799 - DNA, 1241 bp, Zea Mays
caatatataatttttttcttgaacacgcatgatagctgcagatttttatatattagagggaaagagacaaaaggtcttacaaaacaggagacaaaaccttctatgcatgaatctcctaaaaagcacacactacccttagaactattacatgtttgtatcataactttcaccgaccacactaagggcttcagctaagcctaagctttcgagatttttggctctagctagcacccaacacaccaactcatctaaaaaacccctatgcacctttctgatggagggagaatcaccctaaaaaatcatccggttacgctgcagccataagcaccaagcacctaggataatggcactattaaggcctttcttcttgtctttatgcattctattacatactcttctccaccaatcagcaaaattgacctcatctacaccaggggacagatgactaagcccgaaaggagataagagggcgtgtcaaagttgccgagcaaagacacacgtagtcaagaggtgatgaacaatttcttgctcttgaccacagagagggcatgcttccggatgtgggaggcctctttttgccaaggcattagctgtccaacattattcctcatggccagccataggaaggtcttacatttaggaggggcccaacttttccatagcctcttccagggctcaaaggggatggatcctgtgaacaggacactgtagcaagatttagaggagaaccgaccaaaagcctcgtgcctccacacatgttgatcatcatcttgggtcaacactacctctctcaaagtatcccaaagcagaaggtattgttgcaaccccactaaagaaagggaggaaataatgtccctcacccacaatctgttgccaatagcttgtgccaccgttctagtggaaatgaccctttttcaactttagcagccatctcaggagcaatgtcccgaatactacagtcattcagccacctatccgaccagcaaaacgtgttgcatccattgcccacaaaggagatgactaagttagcaaatagttgcctagcctacgactatatggggagttctagaccactccaaggcctattcgggtctattttctacacccataaccatttcgtttgcaaagcccaactaatattagaattcccatgcctccaagattaagcggcctagtaactttatcccatgtcactaaacaactaccctcatttacttctttccttcctttccgaataaaac

SEQ ID NO: 22800 - DNA, 562 bp, Zea Mays
cgacctgggcgattagtcgtccggtcgaaagcttcctggtcgttttttgtcgtcgcaattttggtactgggcttcactctagtttttggcccatctacagtagccccctccagcagtaaatcagccgccagaaaccctcccagccgccagaaaccctcctcctctcctttgtcctctctggtttctgccgacgtctctgctccaagtgctctagccgtccagtgtctgccaccgacgtccagtactccagtgctccggcgtctgtcacctagtcaagaattgaagatgagctcgtcatctgaaggtagcacctgctctcccttctctgattatctcccagtctcccttccctctattaccacgggtagcactagcacctgaaggtgcacctgcagacctctgtctgagcagtcaccctgagttcagattacctctgtttgagcagtcaccctgcagtacctatattactttcagtttggactttggatggattcagttttacacttttactgaattactgctagtctgctactaattatgcctatattattgcagaaatgca

SEQ ID NO: 22801 - DNA, 607 bp, Zea Mays
cagtgggtcttccgccttggtgaacagcggcggttgagtgctgaagaactcttgataggtagctgcagccagtgggccttgttgttgcccgacaccaaactgtttagggtagggctgtcgttgcaccagctttcgcaggatttcattctattgagccattaactcttgcatcgttggagctaggggcggtggtggggggacttgctcgttttgcccacgatggggtctagccgccatctgaaaaataggaattttgccgctgttacttcaacccaagatttcaagtagtgacttcatagcatgaggagaataattacacaaaattatattgaaccaaacgaagataatcattcattcatcttgcattgttcatataggtttttccgagttacaacatattaggagatccaccctacatcctagttcaatagttggtgccaaaagctaagctcatgtggtattcccatcatcctaacatgtttgattctaacccatctaaccctaagtagcagggcaacactggccgcaggtgtagggggcactccagagtaggatgtgtccaaactggaagctagctcaacctccttgggatcctcctcctcctcgc

SEQ ID NO: 22802 - DNA, 398 bp, Zea Mays
gaagccgccgaagccgaaggtgccaaagccgaaaccgccgaagattctgatctagaaaccacacttggtgatattgataacatgcttctaaaaatggctgaggaagaagttgttgtggccgcggtggacacaacaattgagaaaggaaaagagcaaattaaagatactttggaagaggaaaacttcaattttcaagatatactagggcaagagttatcagaaactgaaaaagaagaactgaagaaatatgatgtatcctgtgggtacaaaccaggggctttgctgtttggcggagtcaatgaagggaaattgagatgccttcggaatcgaaccgaggcaaaggtcgttaggactttctcgaagaatgttggcttgccgaatattgaggcggacctctg

SEQ ID NO: 22803 - DNA, 715 bp, Zea Mays
ccttctaaaaccgggtgtgacagtcggtcggatgccgtgccgagcaggctgtttggcaagggaccattgccactgcccttgcctccacgaccagcgcagcaagtgacggtgactgaagacaacaaacgtgccgaggttcctcgtcagcgtgggatggatgacaagttggctgcattacgtgcttacaggcgagcaaagggattgtgtcagcgttgtgcggagaaatggtcgcgagatcatcagtgtccgccgactgtgcagcttcaagcattgcaggaagtctgggatttatattagtgtgaagatgatgacagtttcaccccaccggaaacggctcattctggggaggagcagttatttctcgcagtttcagtagctgcagttcagggcagagagtcttctcatactatgaaattcagtggcataattcaaggaaaagaggtattgattttaattgattccggtagctctcattcgtttgtctcaaatacattggcagttcagcttactggtgtgttacccatgacgcgtccagtttctgttcaagtagcagacggtgggcgtatccattgctcacaacaattgttggcaactcagtggtctgtgcaacagtgtgtgtttacaacggattttcgtgtgctggatatctctacatatgatttaattgtgggtatggattggttatcagcacatagtcccatgaaagtacattggt

SEQ ID NO: 22804 - DNA, 535 bp, Zea Mays
gacggcgactggcttccgccatggatccgctcatcggcgcgagcaagagcttctacggcttcagggccggtaactcgaccacccctgatctcgccatagccttcgcgttgtgtagatgttgtccaactggagaatagtcgacgtgggtgcgagcgcgccgatcaccggcgtggtgcgctgcctgcgggcggcgtcgccctggtccggtgggtttgagcatcggggcgtcgtcggggaagtggatgccgatgattttcacagcaacggtctagatcagatcggtggaggcgctctgccttgggtgaaccggaggcgtagatcgataaacgagcgatcaggatgggatcctgattcattaaatcctgttcgtggattctagatctagcggttgacatggcgcaccatttcgatcaaaccaatgtctaatccgagccgtggaatcgaatcggacggctcatgctggcctgtacccgttcgcgcgcatagttttgtaaaagagccctcggggttcgaggaaatcaacccacagtccgag

SEQ ID NO: 22805 - DNA, 570 bp, Zea Mays
cttggtcctcatagcgaatggccggaaggagaagtttgcatctggtttgttgaaacccttcctggctcacctgaaggccgcccaggatcagattgcgaagggagggtactcgatcacacttgaaccaatctcagagttcgacgtgtcattgttcacgagaggcgccgtggagaggtccgcttctagatttcgatactactctagtacagttatttctggcattgcctatttgcctcttgggtcaattcttgtgtcagttctttgcaggtttgtgcgtttcgtgagtactacggaggtccttgagcgagtcacaacactggagtctgagatcctgcagctcgaggatgccattgctatccagaggaacgatagtcttagattaaaatgtgtaagcgcggaagatttctctaccttatggctaggttgctttgtgtttttgtagagagatcacatattcttgctttgccatttaaaaggtcggagaccatggaagaaagttgactgaaagcaatgaaagtagtatgacgctgcaccaacctgattgctttctgagagcatgttgtatagaat

SEQ ID NO: 22806 - DNA, 449 bp, Zea Mays
ctaaattccattgcagagttgcattttttgatagaagtctaatctttgaacaagttcaactgaaaagttacaaccttgaacagttgcagtacaagagaacaggtacatgtaggccaccgtccagccaaagcggacgccaaatgcctgctattccgtcgtcgaatactgctggattggtacctggtagagtggtggcggctagggcaaggctactccgtcgtcgaatactggattggtgacgtctggtggcggctggttggagtggtgtcgcatgggcggcatggcctcttcacggctgggctaggctgacatgaagcaggtgggcctcggtaggagtaggattaggtgccgtaataggttctttttcccctaaattcagcacattattaccattgctaattacataagtatttgtttaaattaggacaaatagttagagatatatattg

SEQ ID NO: 22807 - DNA, 328 bp, Zea Mays
gaaactaactaaggatcaccgactaacacggagaaaacacgacccacaacgctgttttaagccagcaactcttcgacttggaggaaagacagggccttggctccagtcaaggaccagagcaccgcctcttcccgagccaccctaagggctgtgaccaagctaggattacatccatcatggacacatctattcctatgcttccatatggtccaagcacctaggattactaaagaattgaaaccctttctcataagatcagatgcccgagagctgctagacttccaccacgactcaaaggaatcctcgtgagctggacacagctcctgca

SEQ ID NO: 22808 - DNA, 486 bp, Zea Mays
gcagggtcgtggtcctgaagcacgggaggaagagcacaacatcacggttagtgagatccccatatcacaaatgatttcagtttgcacttattaaaggtccagtgtagaggggttctaaaaaattggtgtaaactccagagcaccagatgcttggtcgatataatatatgataaattgggattgagagcaaccttgttttctccttattttctaggctccaaaacccagccagtacagaactaaagatagctttgccagacgccagctcttagacaatcattatcgaatgatcgctatagtcctcaaatcttcctaggtagactgatatatggttcacaaacatttctcgcctgccccttgcccgtgctgcctcgcatctcctggctgactgttgtcctttcctgtacgaaggcaaagcagtctgtgacgagatcagcttgtatgtccttggatcactcgctaattttcctgtacgaaggcaaagca

SEQ ID NO: 22809 - DNA, 926 bp, Zea Mays
gacgaagcttctgatagtacagtactaaaaatatcctaggatcagataacttcgtcgccggtgaaccgtgcgcccggattcacgccggtcgccatgattcgtgccgccggaaagtagattgcgctcgcccgtggaaagatcaagtcgcggatgagttcaggctactgtggcctcgctgttcctcgaccacttgcaccggcgacgtggccttgcggccgtcaccggagtttgcgcccttcaccgggattgtgccacgcctcaggccattaaccacgtcgccgtgagttgtgatcgttacccactgaccgtcgtggcttcttatcccacaattgccacgaatcactgcgctagtaacctctcccctctccgaccgccaccgcgtgagttcaaattcaccggccaccgctcaagagccctataaattgagcacaccctcggctctgttaggtattccagcatccaatccacccgctcgtgcctccgattactcaccatagcccacgaattgctcagttcccccaaatctgttttccgccaccgtgaaagagtcctcgccgtggctagcttgttctaggtctgttcatgctctctgctctcccatttcagtgtccttaggttctcctaatgctcctcgacccattcaattgagctaaaccgcgccaggtcatcgagaacacccgtgttcatccgttgttcgcgctatcttcgtggaccgggcgatttagagctccgctagtgcaattgatcaaggggaaacacatcttcggtgttgaattacgagtaaaccaatttagagcactggtcgtggtgtattccggccagagcgagctcgccagagcaactgctccgccgctccacgttgtggacctgacgttgtgaagaattagaattagaggggtgtttttgtaactgtcagtgaaacgtag

SEQ ID NO: 22810 - DNA, 571 bp, Zea Mays
ggcttcgtcttctgcctttgaataagctaccaatagctcgtcgatggtggcatcaacaaactcaatccaatcatcaatcggctcgtcaaattgacttctacagcgataggtgtatcttaagtaaatcagaccaccttcgttggagccgacagcagtttccttcggcatctcccaatcattcaccagtggccacactttgtaagcaatatgctcttgtaccaaatccttggtaccaatataggtgcacacagtgttaaaagccatcaaacacgcttgcatttcgttcccagttgcaatggacgaccttctgatgccgaagtgtgactgtatggggcgttggataatgccctccacatcttccctcccactcagatcattcttcacatagaaccattgtttcatccaatagcccgaccacttctttcggaatgtcggcacggggtacctcacattagaatggggcacaaagttgtagcacctgaagttattgtgatacagttccttcccagttgcttttgtctggtaggataattcatgaatgttgcagaaacatttagcatctggcttcaac

SEQ ID NO: 22811 - DNA, 589 bp, Zea Mays
gcaaaggaccccgcacttatgcaatacctcgcggctatccgcagtctcgagaggcagttcaaaggtttcaccttgcagcatgtggaccgagccaaaaatgaggaggccgacgcattggccaaggcagccgctagaggcgaggccctgccctccgacgtattctaccatgtcatcggcacgccagccgttcgcagcccagagggcctccaaataaccaatgacagcgagggccatcgcatagtcaacctcatcatgaccgaagactggcgggcaccaataaacctgttcctgcaggggtactatcatccaaccaatatcaatgaggccaagcgcctcaaacatcgaagccgagacttcgcgctaatcgaaggtcagctttacaaaaagggggtcagtcaacccatgcttaaatgtgtcaccgagaccgaaggcgtccaaatcctgcacgaagtccacagcgggacttgcggctctcacgcagggcctagggccctagccgcaaaggtgatccgtcaaggtttctactggcccgccatgatctgcgccgcaaatcgggtcacaaggtcctgcgaagcctgccagaagtttt

SEQ ID NO: 22812 - DNA, 651 bp, Zea Mays
ttgagattagatgttatgctcttatgctttgcttagtgtatactgaaggatacactcacgcaaggccctctgtttattcagagcactctgcagtgaattctccatttaattcacattaagtttgctccatgtttttttttggttccatttccccagggaaacctcaacatggctgccattgttagcatagcattctgctttctacacagaattgtttctggacggatgcagtcgatgatgaatttgttcccttggatgtcaaacggcattgcaagcttgccatttgcttgcatatctgatcctaccagaaaacccatgcctcttaagctagatttgactcttccaccactgcctgatttcggatggaatttttcgcgactgtactatcggttcaattctcagcttgatcggaacattgccttgtaagtgtgcttctgccatgtttctaactttgtactatctgtatgttatcgtttcatgcttcttttgtcaatgagctgtcacttctttgcacattacaaaaaagtttcaactcatttgttacacctaataactgagctttatgaaaatttattaaattcacattttatcctgattatatttacaggtctatcattaccttgctcatcacttgcttttcatttgtcattg

SEQ ID NO: 22813 - DNA, 413 bp, Zea Mays
gtctgctcagtattgggttcaagctatggaatctcgggttagggaaatgaactgggagtcattatgtgctgctttaaacactaggtttggtagggatcaacacaataccctgattagacaattttatcatacacgccaaaccaattcagttgttgattatgtagagcagtttgatcagttgatgcatcagttgttagcacatgaaaaccagctgacctcagctatgattaccactagatttatagatgggctaagggatgatgtcaaaagtgctgtaattatccaacgtccacccgatctggatactgcttgtgctctcgccattttgcaggaggagatgttgatgcacatggggcgtcgagacatgagaagaactgatttcagtaactttactcggtcgtcagtcaagccag

SEQ ID NO: 22814 - DNA, 660 bp, Zea Mays
gccgataaggctatccgaatcatgcagaaatctgctaagcgtctcatccgtatatgcaaggagaagctacctttggacaagccactaaattcttttgatgttagggtactccgagaagcgcttgaatttactgctaaagtattggaccaggattctctattcttgcaaatagagttggatgatgccaaaaaggttgatgtcgaggacgatttcaattctatctctggtttcacttggcaggaatctccatgtgtaccacaccctgaagacttcatgtttggagaacactatgaaaagttttggggtgtctcagactagatgcctagttactccgactaggttgaagaagatctgacatgttatggtttaggagctatggctcttttgtatcctagatcatgctgtaatggtgttcgatcatgtgaactgtcgtaagcaatgttggatgaaccgtgtcttttgtatcctagatcatgtaaggctttgtcgagaccatgtgatctattgtgtttcagaacgattgtgatgaatatttattatgttgtgatgaagtatctattcagttgtgaagtatctattttgttgtgaactatgaacctgctatgttgtgaactgtttcagaaccatgtcagtttatccatatatattgtgatgaagtat

SEQ ID NO: 22815 - DNA, 1042 bp, Zea Mays
taacaaaaaacacattgcaccgaaagactagaaaaataaatgggcgggaggaaacggacattcgccccatggcctggcccaccacgaaacgaacagcaagaaaacaaagcacaagtgaccgacattcccctgggaacccgtgcagccaatttgcacgcagcggcggctagctaaacaaacaatctgatccgcacaacacgcatctatccctgctgcagtaaacaaatgtcacgcgttagcagctaggcctctcaccaccatgcatgtgtctgctgcgtacctggcctgcagtattttggctgtcgagcagttgcgcgctgctttctagtatattgctttgcttctcacagcgcataagaatatttatatatatgtgcacacttcccaagctctaatctaatctttctctctctatatatatatatacccctgccatgccaggccagggagctagagatgggattgttttcatatgtatcgatcgagttggattattggaacattaatcgagagagagagagagtgatcagactataaacaaagatagtttgatgatagaatgttggtttgatgatagaatgttttctaggatttgtgtgcaggccgggtggttgcgaggaagatccatctgttcttcatctacatgcacgccattatatcccatgcatgtccgccgtggatgaatacgagagatccagagagaggcggtcctattaattgtataaaatcatatcctagctatacctgctgtacgttcgacattccttgattgggtcccacagtgacagctccctctcgtgggctacggtatgggtcggccatgcatgcgtcggtggaatatagcaagcacctggtccttcaacagcatggtgcatggagtaatgtctccttctgtacgtttccggtaccacgtggcggcaatgcaagtggtcactcgtctctgcgctcgtaattttttcatttttataatacaacacattgatagatactctagaaattattctatcatattgcaacgaacttaatacgaagtactttgtat

SEQ ID NO: 22816 - DNA, 1502 bp, Zea Mays
gtgcgctccgtccgtcccgtccaacgggtcgcgccccgcggatctgaaggacctcatcgctggcctctacggatatcagccgccccacaccgccgacgcggtcccgcaggtgaaggcggaggaggatgaccaagggtttggagacgatgattgggaattcacggcggcgacggggcaacctgctgctgatcaggatggaggcggaccagggcatgcggatggatttggtaagatcgaggtgagcctgccgcacaagttgtcgtgagacgtttggacctgggagatctcgttgccaaattgtcgtgagatgtttagacttggagtgtaatggcatcgactctatccaatccagtatgcgatccaagctctcaggactgttggggggagatattttgacatttgacacccaattcacatgtctttcaagatttgacaccccctatcacaatgacatacggggtcactgagtgatttacatgtgggccaggatgtcaaatctcgaaaagcatgcgaattaggtggccagcgcaatgcattggtggtgataaaatgtgacacttaatgcaaacttgaataagggtggtgtaaaatggagggtgggctactgggctgagatgaacaaactggttcctgggtaggagctggacgaaggattgttgattccttacatgcttgcaaactttaggctaggcagacaaatctgtcctgctttagaaaatccctgagcaagacttgttgctattggaacattaggatgtctcccgtatacggaaattagatcacattattggagtagaactactttgtgaagtctttgttttgcctatttgtacaaatggcaaaggtgaatatttgagcgacatattcatatttttcaggatatatcgaagtcattgagcaccgaccaggaagactggtcatcgtttaccagtgccgatggcaaattgaaccatgttcgtctaacaaccgatggtcttgggaatcatgagtccactggagaatttgtgagggcctccacttattcaccagctaatagttcggccatactcaacctgtacaaaggaagcaaacgggttgatgatgttgtcattgcccaaggctctgcagaaagtgtccagagttcatctgatctgttttctaataatgaaatggtgagcattcatcatatctaagttttccactgacacaacctatttcatattcttttgatgtacactaacgatcagtgatcagaactcttcacttgaaacagatgacaaccattccagtagatcaacaagtgattgcattttgattgaattctaccaaagactgagagaagagtccttgacagcaatatcccggcacgtgaaggatcttagggtcagttattacattgcatttgtaaaaggacactttttgtatggtttgttgcttcataattttgttactaaggatatgcattcagggagcacagaagggatctacaatctctgatgaaaacaacaaagcgactgcaatgg

SEQ ID NO: 22817 - DNA, 453 bp, Zea Mays
agctttctggtactgacgggccaccggttgatgatccgactcactatcggggtcttgctggcgcactgcaatatatcactttcactcggcctgacatttcctatgctgttcagcaagtttgtttacatatgcatgatcctcgggaaccacattatacgttgatcaaacgtattcttcgctatctgcatgggacattggatcatggcttacatcttcgccccacagatgtttctgctttggttgcctactctgatgctgattgagccggttatcctgacacccgtcgttcgacctctgggtatgtgtttttcttggtgataacctcatcccttggtcatccaagcgtcagcctactgtttcccgttcaagtgctgaagcagagtatcgtgcagtggccaatgccattgctgaggctacctggctccgtcagctccttcaggaaatgcattctcc

SEQ ID NO: 22818 - DNA, 1181 bp, Zea Mays
gggcaccacatcaatgttgcaaagcaaacaaaggagaacaattttgctgaagagggcaagccatgttcttgtgagaaatttgaagataatcatgctcaaagtctggctgtcagactgataaaggactgaaatcaggctaacagtgaactaccatcaacttcaagcccaatttcaagtatgattcaatggcttttagtggcaacaccatatggcaacattgtagatggtacattactctacaattttgctatagagcttgacatggattatcattaggaattgagagaaaattgggctccaaacttgactgtcaggctgtctgaatgtaactctccatggtacaatgctattaggaggatcagatcgccagcacagctgtcctcaccgccggtgacctgccaccgggattcgtgccgtcgtcgccacgattggtgctcagatggagtggatagcgctcggggtcctagaaatatcaccgctgtggataactccggtcactaaacaagtccgaccaccgtaccaagttgccacagccgctacggatgaattcgccggtaaaccgccgtcgctcggccttgcgccgcgtgtctaggcgctttaccacgtcacggatagtcacgctaaggtcgtccggtgatcgccggtgagaccgccacggtagaagccacctagcgcttgcgccagtgcctatttctttcccggccgccgcgcgtaatcgctcgattcaccgaccaccgcccccggagtctataaattgagtgcaccaccgtcttcgttatgtattcgagtagctacagcacccacctacaccccaaacccccaccagagaactcgaatttgagattttccccaaatcaagtctccgccaccgtgaaacccacctcaccgtggccagccctttcccggtcagttcatccctcgctctccctcgtttgagcactcttgacgctctgtgatgcttgccgaaccaccaatttgtgcagagtagctttagatcaccaggaacacgtaccaattgtcctcatcgtccgcggttcacatggacagagcttgatagcttaccaattgtgaaattgatttaggggaatcattcggggagggttcaatccggtgtatgtcgctcgagagcaccggtcgtagcgtaaatccgccagtacaatctcaccggagtttgttccctc

SEQ ID NO: 22819 - DNA, 551 bp, Zea Mays
caacaattgatttacaccactccccttgcaacgaatttgaagttggtgagactccaagattatgttgaaactccaagagtagcaaggatgaaagccctttggtgagatattcgcaaaccaggatgaagtaggaatatgcaggacacaaacttaaccaagaggcactcgttataggcgaagtggagattggtctcaacatactttgtgcactgatgtttactaaattggtcaagaggtacatggcactcgcattttcatagtatacaacagtggctcaacggagcgtacaatgtagctcaaagagcaaatgatgaagccaacacgcctcagttataccagttgcaatagtatggtatcgtgtctaactactggagcgagatacagtgtgttgttcggaggaccaggagactaggttatcacttaaaaacactatatcctaaagtagactttcaagttttaggataccctagctaattagcattatagtagaccacaatcccattaggggtcatatgatgaagtcagtggcagacgcaggacaagaattcagg

SEQ ID NO: 22820 - DNA, 880 bp, Zea Mays
gtttagagttcaaaaaatcataaatgtgtgtccaattacttaattttaaaataaaaaagttgaggtggatttagactgacgagaaatagagtcgagaactaacttgagggaggggttggacgtggagaagatggtgcactgtaaaataaaaaaagttgatgtggatttagactgacgagaaatagagtcgagaactaacttagggaggggttgggcgtgaggaagatggtgcactgtaaccagcgagtggatcctccatttggattggtgcacccaaacgagaggagaagattggtgtggtcacggccgacaactgacaagcaggcagctaccccatgctgcgccagcgccacccctcgtcgctgactgacgatggtcgatgacgagccacgagcgacaaggcctggcttggcctcatattcacggccagagtggcagacacgtcagaagctagctcgcttgtgtcctatctcctggactgtttctccaagtacaaacgcgcgcggctgctgcaatcatcatcattcgcccgctcttttgcctttctttcctcgccaatctcatcttcccgccgaccgaacccgaacttgcccatagtcggctgctacggtaatctctcctggtcgcgtcgcatcaccacaggaatggcggatctcgccgctcaaccaccgtaacaagaaatcgttgccgacgacgatttcagaattcgaataaattcctacgccgtacgtacagtatactattctactactcgatccgccacgcccggcagcagcgctcacatcacatgggaattcaaggctgaccgtgccgccgtcactcctcccgttcaggtccagcagcgttcgtttcgttgctccactcatcagatccatccacg

SEQ ID NO: 22821 - DNA, 2632 bp, Zea Mays
ctgaacttgcatcatatataccttttaggaatgtatgcgctcatgtgctactaaaaaatgatataacattgatgcatattgttattctttgccaaggcgtccaagattatcttctcattttcattttcagtttgttttcccggtgcaaatcaagtttaaggcatggatttagcacttggcggcttaacctcagttaagttaaatgaatgcaggcgccaaatatcaccgttttcctgcaatagagtaataaaccatgcagcgctcgcatgtgtagctggaggggccaatgatgatgtgatagtgcgtttatgaacctttgaggtcatcaacatctatgttcatgagaacattgaaccttgggacccaaggggtagtacagggctacaggcatagtaaaaccgaccacagatgtagcagcttttagttagatctggattatttgtgactcatgaatatgaaaaaattagccctttcattatccatccacttggaatagtatccaccctttctgcgttttaatatttgtaacttgttttttgaaggagcacctgaccacctctcgctagaagaatctatatagaaagaagcatgttacggttaattggtaatttttttcactctcgaatatgcaggagagctgtgtatcatcgcattaagaagaatttaaatatttacaataatctcacatcccacacaccagacaaacttcaggttacatactcggtggagacaaaagataaacccaaccaatgctagcttaacgtccttttagtggcagcaacctcaagttgcattaaacccctagctcctgctaaataccaatggtgtcttcctcagttatctaaggattggctgcatgcttatttgctcacaaattttcaaatgaattgtagcagaaaactgtggattactattacagatttgaatttattgagatctgccatgtgggcacattccttctaaggagccttgttcgggcacgtcataggcctacctagtggctaacagccacagtcaattagaggaaaatctgttcagccttgccttagttggttgattgggttaatttggaaggttggaggaatgatagaaaagaagagaggaattaacttgtatgaggattagacacaagcaggaattagacggaaacacttcctctcttgctcggccatgggcaagtccctcggccggctccggctccctctttctctctcccaaccctagctgccaccataacatctggtattagagatgttaggttccgatgaggatgacaagcaaccaaagaaggtgctgccgctgccaccggatcccattgccaaggtattggccaacctcacccaacagatggcatctctctgggcgtgtctagaggccctgaaatcctgaccgaggcaagaaggaattagaagcaaacaccttctctcatgttcaactgtggacaaagcccggccggtccccctctctcccaaccccatccgccaccataacatctgttatcatagacatcagctttcgatgaaggcgacaagcaaccaaaggtgctatcgccatcgtcgccggattccattgccaaagcattggacaacctcacctagtagatggcatctctctgggcacgcctagaggccatggatatctgaccgtcggtgaccaccaccaccatgccgctagtgttcccttgtggcttgctgggctatgggacgcgggacggcagtcgtctccatgccagattcaaagatgaaggattgtgtcaatgtagctgagtaagaagagtgcccactagttgtcggtgatggtgtggctgtaggctgctgcatggcctcctagcatgtcggtaggtgcaggagatgtgcgatctgcacctgatttagccccacaccccttcgcagcttctccaagttgcgcatcactgcgccgcattgggagggcatgcggttccacatgtgggaggcaggcaggttctttcccccgtggatggcgaacttggagtttgcggcagtggcggttggggagggtcacccctccctcatcgctgttctctatcggaagccctcctcttttctcaatccatttcaggttgagaataataaaatgagccgagatgtaaaaagcttgcttttaggtgttagatcgttggttaggttgcagctcgaggatgagctacttgtccaggaggggtgtagtgttagattgctggttagttgattgggttagtttggaaggttggaggaatgataggaaagaaaaggggaattatagggaatggtttagccagggaggcttgttatctgcaacctgtatggggattagaaaggaaacaccttctctcttgctcggccatgggcaaggccccggctctcccaaccccagccgccaccgtagcaggccttggctataaattggaggaaaaaggagagacgttcaagttactgtttgtaacctcagcctgcagttatgcttctgataggatcaccacactgccgacatgcataatcatgtccagatggaggcctccaactgcatccgcatatagacattggatggaaaaagaaacaaatttaaaatcatatgtttattttttggcatcactgtgtttgtttatattattactaaacagaacggtgttgtg

SEQ ID NO: 22822 - DNA, 690 bp, Zea Mays
gccgccatggccgtcgccggagatctcggggtcttcccttccccgccaacgaacatccctctgcgcggactcactctcctctataaaaggatggccgcgtaaacccaaaatatcatgccatagactccgggtgagagagagatcagggcattgccggtgcctttcggatgcctcgctggtcgggccaaattgggaggacagggagcttcaccgacacccacctcgtgtttgcgtgacctttcggggtggggaatggcgggactcgtcgggatttcgtcgccgaacctggtggcgccaccgcagagccacctgtaccgtgggcggggtacgtaggcgtcctatatccaggtaaaagtcccctggcactttcgattcgtactccatgcgatgttgcaacattcggatttgagcttggggccctggcgtgcaatgtggacaacaccggccatggcgccgtcgtccctgctcgagggccaccatgcgtggccgggttacgtggggaaggaacccccggcaccgttggatgctcgttgggcggacccgattaaatcgctccataacccttcgtgcgttgagggtgaaccgtccgatctgaattctgtgacccagattcgatctcggatgttttaaatcaatgtcgtggatcggcgatctggcggctgaaattagaaccaacttaccccttcgctg

SEQ ID NO: 22823 - DNA, 1087 bp, Zea Mays
aggacaagaaacgtcgccaggtggagttccaagtcggcgattgggtgtggcttcgcctacaacagttcacagcagtcaggttgacttctgctgctccctccaaacttgggccaaagtactacggtcgataccaggtcctccttcgggtagggctggtctcatacaagctgcagttaccacctcgtgctcgaatacacgatgtcttccatgtttccttgctgaggaagtttgaaggggaggcgccaacacaagtggtaccattacctgtgatcttgcatggtcgtgtcctaccaacactatccaaggtggtacgtgccaggctcaatagaggtgtttaggaattgttgattcagtggtttggtcgtgctgagacagatgcttccagggaaccacttgaagaattcaagcagaggtatccagagttcgagctcacggacgagttctttgtcggtgtggagggaaatgttgtggactagtttgtgggccgccagtatcacaggcgcccaaggctggcagcaggcgcaggaaaggggcagcatgcataggaaaggaaggagtcaacacaggaaaggaagaagaggtcagtaggaaggttttgattgaataaatcaaatcctccaatcaagggctgagttgttaggaagtttagatttgatatttctgtttccaaatatctaggttaagtaataggaaaggtttggtggctcatcatctataaagccagccgatagtttgtactagggatctatcgaagaagttattccttagtggacagctcttcggtcaccctggctcatccagccagccgcgacatcagctgcccactacccccatatccactgcgttccaaccctcaagctcgcctccttctctactcacctctgaagtgtacccggcgccatatcataatctaacaaatattaatcttcccatggtttagttttgagaagctaaagtaaagcacttatgaaatgggttcaggaacaagcattgttgattcctactttggcaccaaatatgaacttagatattgggtattaaactgatgtttaacttcggctcagaaagactggtacaactctggcag

SEQ ID NO: 22824 - DNA, 656 bp, Zea Mays
tggttccaagcatcattgtgacggaccgcggtgaaagtagcatccagatattgctgggggcccagcagaaccaaattatcccgctccaaaacactacgaaactgcactatcacctgccccaagtgcgagcgctgaatggcacgaacaccgacccgatgatgctcaacaagatactccctgaccacatctctgaccacagggaacaaaaccccgtgctcaggtaaaggatgaatattgataatcgcccagtcctcatgcattggcggcaaacgctgcgagactgacctgaccatgatcccacggtgctggaccaccgcggcgctgaagcctggtggtaggaacggctccgggtccactcgtcggtacgccattgccagaatctcagaaggtcaccggagagccaagagcaaaggagcggtttggggttttggtgaagtgacacccagcgagagctccaaggacgtttcgggcgcctgttcgtatatttttagtaagaccgccctggcgaattcaccgaagcaggcaaaggcaggaggagtcccacccgtcagggacccgggtgaagggcggaactaggacccgaagtccaacaggcgagacgacccctccaaaaggcaattactttcgaaggaagggaacaaggagagggggaatcc

SEQ ID NO: 22825 - DNA, 376 bp, Zea Mays
ttcgtgtggacggggctggcaagtgggaattgttgtcctcgccggctggggcgagtgtgggtgagggggagctgcgaagtctgtttgcgggtgaggaattgaggataatgttgttcaactataaggaaatgggtatcatcccgaaggttgagccaatgtaatgtgcgatgccctcgctgtatgtgtgtaaccatactcttgtgtgatgaagctgcgcgttttcgttgatcacgccgctcccgtaggcttctgtacgaagttctttagaaaaattcgatttttccgtactagtattctggctgcacccataggcgacttttgcgcggagggtctttttgaaaaagactttgatttttcgcacttattgtgctagtcc

SEQ ID NO: 22826 - DNA, 351 bp, Zea Mays
atttattgtctctcaccaaattccagttttccgtttcagctatagtttctagatctctcttattttttaaatactaacattaatggggtatttgtttgtggaatagatgtgtgcacatggggaatgtgggttgagaattgagatcaccagttacttgtgcctttggggtattagattatggtgggtgttatgtcttggtcatttttatcatcttaattgcagttagattggtaaattttgctcacgtcttaacatttgaccttctattttggagttaacatcagtggtctgagcttgccttgtagaagttattgacaggtcatcaagttacgttagttcaggcttagaaga

SEQ ID NO: 22827 - DNA, 309 bp, Zea Mays
cttggtcaaggcatactctatcaatttcatcacaaagagataccaattgaatagttgacttaatacaacaatgcatgcctcaaggagtataacattttacaagcaacctaggcatgcttcatacatgataatcattgcaccacatataccaattgaaaacgacaagatcatgcatataaagcgcaatgtctaagtacaccatgattaagaaggttccttaggtacaccaaaagaaacaacattttaaagtaaggagcacctaagccaagttactaccaatttagaggcaagaacatagcttatgttatc

SEQ ID NO: 22828 - DNA, 577 bp, Zea Mays
cgcaatggtacagtagaccaaaggggatcagaccgccagcgcagcagcttcaccgccgacgaccgatttccgccgcgattcatgtctccgccggtccaatttgtgctcggggtgagtggataacacccggtgtatgtctccggggataaacttcgacggataaacaattctggccaccgtactgggcacgccgcggtggaagtcgataggcacgccagtgaacgccgcctttcgaccttgtgccacgtgcctgagtacctccaccgcatcgtcgtaagccttagtgactctccgttgatcgccggaatgaccgcacggtagaggccacgaatccactgcgccagtgaaacttcccttcctccggccgccgtgcgtctcatccaaattcacggccaccgcccactaagcctataaattaagcccgccgcgagctccgtaagacagtgcagtatccagctaccacgaattagcctcgattgttcgccagagctcacgaattttggagtctccccaattcaggtttccgccaccgtgaaaccagtctcaccgcggctagcgtaatccaggtcagcccccg

SEQ ID NO: 22829 - DNA, 584 bp, Zea Mays
caatgcaccggcaaccttccaggcgctcatgaacgacgtgctccggccattccttcgtcggttcgttcttgtcttttttgatgacattttgatttatagcaagacctgggcagatcacttgcgccacatccgtgccgtcctcgacgaacttctccgccatgtcctcttcgtcaagcgatccaagtgcatttttgggtccccatcggtggcgtacctaggccacgtcatctccacccatggtgtggccatggacccggccaaggtgcaggccattcacgactggccgacacctcggtcgacgtgtgcggtgcgtgggtttttgggcctcactgggtactaccgcaagttcatccacgactacggcaagattgcagcacccctcaccgcgctgatgaagaaggagggcttctcctggagcaacgaggcccaggcagccttccaggacctcaagatggccgtgacctcggctccggttttggcggtgccggatttcaccaatgccttcatcgtcgagtgtgacgcatccacacatggcttcagggcggtcttactgcaagaacatcatccgatcgcctacttcagca

SEQ ID NO: 22830 - DNA, 768 bp, Zea Mays
catcgaaggctctagaaacgctcttggtagtcgtcgaccgtggtgcggaattgtaggcgggtgagctcgcccaacgggttatggcggaggggcgggccgaagcgttgctgacacaacatcttgaagcgttcccatgacaggatgtcgtcgtcacacgccaacaacacgttccactgttgtgccaatccggtgaggcggtaggaggtgagccacaccttgtcaacctccaaggcgcgctgaccatagaagaagtgctgacatcgtgtgcgccagacgagaggatcgtccttgccattcgggaactcaagcctgtggaagcgggaccggattgttatggttgttatgatggtggctagtgttgagggagcgtaaggaggccggccaggtatcttgcccacggcggagcaagaggaaagggtttttcttcttaattctttcttgctcaattggattgataatctcttctccttatatagagaggtttacttgacccctaagcaaccgatccttatcctaaccaaatcaatctaatttatatcttttctaataaaccaaactaatctaatatgtctgacactctactcgccataacctggagccaacaatgtggatttttcatgtggtggcagcaagttaggagtactcacaggttagcaaccagaggagcctagatgcttggtgagggcttaatagttaatactctggttgttttgggtgcctggacactatggaagacaagaaatgatgtgatattcaatggcgttgcag

SEQ ID NO: 22831 - DNA, 1042 bp, Zea Mays
cgcccatggcgtggagttgtagagtggcaacgacgtcggagcgaggaggggcccccttagtgagctcctcaaggatgaggacgttgcataccttgtggaaagacaggaacatgacaaagtgagtgatgcaagtccgaaggtgatggtagcgctcgttgaggccacagagaagattgaggacgagtgtgcgatgggagacactccctggggtcaacagaggggggccaccatgcctttcatctggcgataatactcggtgacaaagaggtctccctaaacgaaggtccaaaaggcagcgtcgaggtggagagcgtgagcctcacggttgccaagaaattgttcctcgacagcaacctagtcctgacgaacaatgccaccacattcgcggacatcctgcaactcaccgatgacggtccccgggatcccggagaggaccacactatccatccaccaccaagatgggatagtgagaaaagccatgtcaatgaggacgaggtcgcgtcgcgggcgtaggtggaagaaggcagatcggggatgagaaccagagaacgaatgttctggacacccaccgcctacgcgtggaggtggcgatgatgacaacctcatactccaaggagggggcgtacggagaggctcgaggcagaaagagccaagtaggtggcgctcaacctcagcgagctgcctggcaagggtatcagcagcaacgtgtccgcactcccagacgagagaaacgacacgtttgcgctcccatggagcaaccacaatggccttggcagttgtgagggccacaatgaaggtggattgggcagccacaacatccgagggtgggaggacggtcgacagaggtgcgaagcatagacctgcgaagcaaagacctagggcggaggttgaagcgccaaagccaagacgcccagtggcacaccgatagcgcgggagccaacggcagcgaggcccaggctagccaagcacaggccgacaagggccaggttgtggccagcaacgtccaggctactggtgctaggccatgtcgggcgaccccacc

SEQ ID NO: 22832 - DNA, 449 bp, Zea Mays
acggaataatgagttgagtaacttagaaaataaggatcttgatgtcttgaccccaagaacaacaactgctaatgatctaaatagcaagaagaacaccgagaagattccaattgcaatgtacacagaagtcaacttaagagtactaacatcaggattctcgacattagtagccatccatgaattctgtgatatttggccacatacgaaaattatatgggaaataatacccagagaagcatagaagaagcctttattctgacgcaggtagagaatataaggcttgagaccagtatcacccatttctctttcttctgtcttaatcagttgatctgttggtgatggtttcaaagactctttgtatctgcttccatgaacatcaattgtcttcttgatcaatatttcattttctctatggggaggcaccctgttaagatctgaaacaccaatag

SEQ ID NO: 22833 - DNA, 476 bp, Zea Mays
gtagaacctcctttcaaactgcctgatgaagacatcccaagacaggactcctgatgaggaggagtgcgctgcctgcacgcatctccaccaaatttgagcctctcccttcagtagttgtgtgccaaagcgaacgcgatcaccatacacaatctcaaagacattcatcttatcctccacgtaagttagccaatccgctgcctcgaccggagtaccactgccatcataagtatccagcttcatgcccatccacttcatcagagaaagaccactgactcgaagaggcacctcggcctcgccacctggagtagcactcgcagggacagcgtccccgggcacccctccaccaccagcaccctgagcagcacccgtaggggcaacaagaatagcctgtctcagaatggccaactcctactgcatggcctgcatcgcggctaacattgccaccggactcatcgggtccccactaggaacttgcg

SEQ ID NO: 22834 - DNA, 446 bp, Zea Mays
aacaccaggcgataaccttgaacacctcacgctgtcgctcacaatctgggtgaagatcagcaatccagcaccactcattgaggagagcttgcacagattccaactcccaagcatgggcagggatgccagacacttcaatctccacatgaaaaggcagagacgccgtcacagatgagttgaggaatctgctccatcgcataacatggattttagttgtgggagataaattcacaattctgcccccatcataggcacggtccgccatttctaaacttggaaggataagcagaaaacttgcaggacccagtcgacacaaagacagagagtcatgtacaagctccagcctccgcgcaaagttggccaaaatagcttcctcaactgcttcattaatggccacagttacattgaggacaatggcacgatcaagctcttcagccctctggttg

SEQ ID NO: 22835 - DNA, 887 bp, Zea Mays
cacgtccgacctgtcgggctataaagccgcgcgcatggcgctcctctcctcccctcccatagagccctaacctccgccgccatagcttagaaaccatcacggcagccgccgagagaaagagaggagagagaacaaacgcctcggcgctcccatcgcgtggaggaccttcagaccatgagcgccagtcccgtcttcaccccctccgcgtcggtatgtttcgtgccccttctctgtagcgtgataggaagcgcgagacgtcttagcctaggcactggcgtggatgcggtggggcaatgctccaggcgctgtcgaggggatggcttgccactggatggcgcgtagtctcgagcagtctgtagatgaaggcttggtgccgagctagacggggagtgggaggcgaagaacgttccgcgccgtataacggggactcgaatggtggactcgggtcgtcgctgccagatccttggcgctcggccgcggcgagttgactggagaaagaaaagagagaagggagagaaccggtgaggtagaagacgccaggcatcacttgatcatgcgttggacggtgtggattaaaggatagggatgaagaaaccaggaccgtaggatggtgagtggagggggtagattaaatctcgcgtaccccttcgcaatatggaatccgggcggttagattgtgatcgtgtggtctagatctgggcaggttttcataaagcgcggatctaatcttgaccatagatcttgaagcggacagccaggatgggtccatacccctttggctagcgcaattcgcaaaagagtccctctgtttatctaaaaacaacctgtcgtcctcattaacagtagactgagtcttggaattattgcaccagagccgctgaccttcc

SEQ ID NO: 22836 - DNA, 566 bp, Zea Mays
gaggagctaggttgaatgatgcccattttaatcatttcagaaacttgtttctcaatctcatctttgagggctggtggataccgataaggtctaatgttgacaggatgtgcaccaggaattaaaggaattcggtgatcacagctacgctctggaggtaatgctgtcggcttggtaaaaactagagcaaactgtttcaagagttgagcaatctcaggctgaacctcatcttgtacagattcaaccaaatgttcttgaacgagagccagttgaatgacaatgtcctcgataggatccacttgatccccatgcaacaacacctgagacccctgatagggaatgagcaaccatctctgcttccagtgaacttccatgggactgaaagtctctaaccaatcaatgcccagaataagatcaaaggattgaagaggcaaaactttcaaatcaaagacaaactccaccccttgcaccgtccagtgggcttgcgacagaatttgagagcactgcataatagaaccattagcaactctgactcgggcagtagcaggaagcagtgtagtacgtttcag

SEQ ID NO: 22837 - DNA, 1148 bp, Zea Mays
aattagggggttaggagtttagggtttctaacctcggaatcagaatttgggatgttacaatccccaggaaggcctcacagagatggacgaagatagcaatttggagtacagagttgggatttagacgagtcaggttgagagaatagaaatcaagaaggctgcggaagaaaggagaaatcggcagacctaattctcggatcaagaagggaacgaagactaccgactgatgggtatcctctatggcgacggtaatcccctgctagatccgccaagagcatagttcctttggcgacaggaccccaatttcaacgaggtggagaagatcggactcaaaaacaacagaagcatagttgccgcaaaatagaagttagatgttagtgtcgattgggggaatgacaggggcggcggttccctacttcttcttcctgggcgccatcagaccatgcgggcaagcagggttgagcgcattcacaaagatgagcagggatttcacgacggaaaaagcaaagttagggttcactgccacgaaactgccagcgaggatgtatgggcgcacactaagtcgggtgcatcgagatggacgaagtaactcggaccagaccctcaacaaagcaaagtcatttgggctcgtcagacataggcgctaaccgatgattttagtcggtcctatcacggaactagtcagttgggattatcagaatgggctcacgaaaccaaagtcgtaaggcaaccataagtcaagaataagagtgaacacatcaaaagaaagcagcaaacaaagttttttcattcattggaggtggttcattacaaaggaagagggccggccctttatgaactgaccctatcatcctacacatactacttaactaccactacctacagataccacctactacatactagtacactatactactattatgccagtggcgccccaccatcgacattgctgccaccactgtcgccccaccgctctcgtcgtcgtcgtcgttgtacgtgatgccgtcgctgccaaccacgccacctctagcgctgcctccatcgccgctaccgcctccctcaccatcactgccttcaccaccacctccctcctcctcagagtacgcctccgaggagtcctccccttccgagtcatccgactgtca

SEQ ID NO: 22838 - DNA, 510 bp, Zea Mays
gggatggtctatagttctagagggctgccaggatgaagtaccgccattccaggagtggacagggtgttacatcaccagaggaggtgagcaccgtgtcgtggaaggtggaccttccaagcaaccacataattattggatccaccatgtgcttcttgtctagtatcttcagttcagcatcgtcatcatgcctacgaaatcggggagacatccgagataaacccgaaagaaacaaattataaggtggataggtgggtagtgagggtagggtttacttgagttgggacgccctaccgggacgtcgaggcgccacgactaggccattgcacgtcgtcgctactctgctgggaagtcgcgatgccgtgatcggacctacccatgcctttgcacgtcgtcgcgaggttgctccaccatgttgggccgcctcgctaggacaccgcacccagacctatctccaccaccgactctagatccataagcctgcttccagttacccaaaaccctaaccctacc

SEQ ID NO: 22839 - DNA, 706 bp, Zea Mays
tagtttggatcgggacgttggtccttcggttcctgctgctgaggaagtatctgtgcctgaatttactgacgctgaccccaatgggtgtgatccatctgtcgctgatcccaatgggtgtgctccatctgatgctgatcccaatgggggtgttgtctgtgttgctgatgaaaacgacggggaggaagaagatgaggtccctttgacttggaagaacaatcggcaatatgttgccagtggggaaagtagtggagttccttctcctgctctgtctgccctcattggtctacaagaattgtccctggcgaactttgatcagactcttgaagatatggttccagaggatctgttatcagagccagcggatgatggtgcgacggatgtttgtgctgatgtgctcgacgctgggttggggtcatcccgggcagcgtcccgcgcctcatcgaccttggagcgcggtcttgagggttaggaaactgacttggatcgtcttgttcccatggaagtaactgagggcccttcagccttagaggcggctactgcagagaacttggtcctcaaggatggtgttgacacttacccagcccccgagggtgttgccggggatgattcggctcgggtgggaagcgcaagccatggcccagcccccaagggtattgccggagatgatctggctcaagtgggtagcgcaaactatggtccagccccc

SEQ ID NO: 22840 - DNA, 499 bp, Zea Mays
ccggagcgtaataccctactccattgtgtgttgtattgaatctatgagcttgagagcttgagtgtatgagattctgagagtgtgtcttgtaacgttgtgtgccttcccttttatagctcaagggaggcacatacaaggatactgagccccgacatgtgggcccaggggcaaaatggaaggaagtaactaatgcctataacgccagggtgatctatgagcgccataatgtccatagtccatatagtattgatatgtcgcgctgcttcctcggtaacgcgcgagtcatgatgagcgtagtacatgcggcggtatggatgtgccgcctgccaatggaatggataggcacaccgcctgcgagatggtctagtcaccgtcagccagtggaatggatagaacttattaaatgctgaggcggcacatcgcctaccagtggaatggacagggctcattaaatgccgaggcggcacatcgcctgccagtggaatggacaggcagcgcg

SEQ ID NO: 22841 - DNA, 555 bp, Zea Mays
attgtctctttcaagcacactactaaactgaaccaagacctgccccaggtgcgaccgctgaatgtcccgcaacccaagccgacgatgctccaccaaatattccctgaccacgtccctcaccgtcgggaaagtgacctcatgatcaggcaaaggttgaatattgatgatggcccaatcctcatgtaatggcgaaaggcgccgagtcactgacctggccataacctcacgatgcaggaccaccgaagcgctgaagcccggcggaaggaagggctcgggatcaacacgcctatacgccatcaagacgggaagcgaagatcgccaaccagcggccggagagggagcagtttggggttttggtgaagtgacacccaaagaaagcgtcgggtactggagaggtgacgattcggattttttaatacctcccgggcgaactcctcgaagcaactgaaacagggcggtccaccggacagggacaccatgggagagcgaaaccaagtagagtgatccggagaatttcgatttcccaccaaaatggcctggctcccaaaggcagga

SEQ ID NO: 22842 - DNA, 382 bp, Zea Mays
atcacaacgcgacaatggctgtcgcttgctaccaccgccttttgccttgtcgtggccatctatcgtcgcatcgtcgcctgcactcgctatcccacgcctattgtcgcctcaccgtcgtcattttgtggtggagtcgctgactctccacaccgacatgctgatgcgcccgctttgccctaacgtccagtccgcgccggttcatccctttgttctctccaactctcctttagggtagccaaaataaagatccggtatttatgttattttagaacactactcatattatcacttaatctccatgttattatcatggaattatttttatcaaatggtatagtatattgatttgtctcctacgttatcgccccacctgaaattttgt

SEQ ID NO: 22843 - DNA, 401 bp, Zea Mays
agagggtgtatagatgtccaagcatggcgagcagaggatgaagatgttgttccttgtgcggtcgaagactcagagcaccaaagatggtagcgacgatcggtgggggacggtggatccgggagagggagaatagatgtccaaccacggtgcgtggtgggtggagaagttgatccttgcgcggtcggagacttagagcactggagacgtctgtgggggaccatggatccgggagagcggagagaaatgaggcgagggtgaggcaggggccgcatggcgggtggccgctatatctagatatcgggccgccgcagtgctacccgctagaatgggtcgtgccaagcactgtgggatgaaaattgtggcccagtccgacacggtgatcgggccatgctacctcgggc

SEQ ID NO: 22844 - DNA, 1216 bp, Zea Mays
cgggagttggagggggagttggttgtgtacgaggcatttttcgcggctagccttcgcttgccggcgcatcgatttgtagtggaagtgcaacaaaatttcaaaattcaaattcatcagttgatgccgagcgctatggtggcattggcgaagtatgtttgggcggtttcgtcgtatggcggagagctgtttgttgaggtcttccttaagcattattgcttgcatggcaaaagaaaaatataagtggattgattgcgcaatttgggtcctgcatgttcgcgccgaggaccaagaagactttggctttagtgattgagattgttccttgtgcaaagaataagtggggcaactggtgggacttttggttttatgtggcaccgggggtgtcgaagggttgcctaccttgcctccggccattttgtgctcgcattgttatgtggccttcccgcaatttaaagtgaagaaggggatcagaacgaggaggccctacgcaacgcaacccagttgagtagcgcccgagatctagtggaagaattcgttgcctgtggagtatggctgctggagcacgggtgggatctgggtgaggtcaggcctcgcccgatgtcatctttaggggatcagatggtgcggaggccagccttcgctattgatttgcggggacgggatgcggctgccttcgtgcgagaggtggagtcggaggtagttaagattgttggaaaatatgtgctgaggactgagatgttgaggagccgagatatccgcggttccaacgtcaggttgaaccgtgtttttgaactaaatatcttgccctacggtccttacccagaggggactctgctgacgtcggggacgatcgaggaaaacaagtgaaaacccgatctgaagagggcacctcaaagggaaaggctatggttgcaggtactcaaaaaggaaaatagatgtgcaaggtacagaggggaaaagatgggaccgaaggcctctaggttttttgctgaggagttgacggagacgtgcgctgggaccgaggaggttatgacttcgctcgagctctaggaaacatcttcgcgcatgctgaaggttaccgggggtcgatggcataagaaggattctttaccttgggccgtcggcgatgactattttacgtcccgtttggctcgtgagctgaaaatctttccttataggagaaatattggtgctgttgtgtcaataatgatggaga

SEQ ID NO: 22845 - DNA, 1442 bp, Zea Mays
atcaatatatgtgagtacatataggcaggggtggagtgagagccaagcagccgtacctgatacatgccataaatcaaggcctactataattacacattctataattacaataggctaacactcccccacagtctaatcgggagcatcgctaacatttaggctggatcgaactcctgaaatagtgaggtaggaagacccttggtgaagacgtcgacgtactgcgatgtcgtaggaatatgtagaacacgaacgtgaccgagggcgaccttctctcgaacaaaatggaggtcaatctcaacatgtttcgtccgctgatgttgcactgggtttccggagagatacacagcactgatattatcacagtagaccaaggtggcatggcgaggggggtggtgaagctcaagaagcagctgacgcagccaagtagcttcagcaacaccatttgccacagcaagatattcagcttcagcgcttgacctggagaccgtatgctgacgcttagaagaccaggacaccaagttatccccgagaaatactgcgtagccagaggtcgaccgacgagtatcaggacaaccagcccaatcggcatccgtgtaaacaacaagctctgtaggtgaagatcgacgcatggtcagcccaagtgctagtgtgccctgcaagtaacgcatgattcgcttgagagtagcgaggtgtggttcccgtggaccatgcatgtagaggcatatctgctgaactgcaaaagcgatgtctggtcgggtgaaggtcagatactgcagggcgccagctaggctgcgatactgtgtagcgtcagcaacaggtggtccatcagcagatagtttggagtgtagatcaacaggcgtgctgcacggcttgcacgcactcatcccggcgcgctccaaaatatcctgactgtactgccgctgagaaaggaacaggccatctgcagagtgtgtcacagaaattcccagaaagtgatgtagctgacccatgtccatcatggcaaattcacgttggagagcttcaatgatgtacttgagaaatccagcagaggaggcagtgagtacaatgtcatccacatagagcagtaagtaggccgtgtctggaccatggcgacatataaaaagcgaagtgtctgcctttgcttcgacaaatccaagtgacacgaggtgagaggcaaacctgtgatgccaagcacgaggagcctgcttcaaaccatataaggacttgttgagtcggcagacaaagtctgagcgagacgaatccacaaaaccagagggctgcatgcagtacactgtctctgtgagagtgccatggagaaatgcattcttcacgtcaagttgatgaatgggccagttctgagataaagcccaggagagaacaactcgaactgtcgcaggcttgacaacaggactgaaagtctcatcataatcaatatcgggccg

SEQ ID NO: 22846 - DNA, 894 bp, Zea Mays
cacacgcgggacaggcgtcgaggcagcagcggacgcctggccgttgcccaaggcgagagcacacccaggtaaaaaaatatcgttgcatggatataactactcctgacctttacgaatctcgacggagggggaggtacctgcgcgattcggtggcggccaggcccaggctttcccgaaataatggtgtcgatgttgctacccacggtacaagcagtgtttgcggagtagacgaactccgacgagatcctccatggcacaggttcggtctccagagccggcgcccgggaccctggtgacggtgggtccgattcctttggtggctgccttcagttctctctcggcgagggtacaagcggtagatggtgatggctgtatgcctcgagtatttatgcacgagagggggagatcggctggtacctggctagcatccggtgcggcgtgcagcgatttggtcgcaaggttgttatgaggatagagatgctacagcagggccccacatgtcatgcagaccagggcacgagccggtgcccgcgagcgtccttccgcccgacatgcatggccctgtacgtgtcgatcgcaaacggatgcatgcaagagaattcaacgaccaatttgctagcgaactggagatgcaacgagatgacctcatacctgatgtcatgctaacacatactccggccaacatgaattaagaaaacaatatacagactaaactgggaaacccatcacgcaagagaataaagaattagagagaagaataaaaataaataaaaaacgtgcatgcatgtatatgggacttggaccgatttctttttttggcagaatacgtgagttttctattctcctttctcttttttcctatttatactttcattttctttctttagagtttaa

SEQ ID NO: 22847 - DNA, 325 bp, Zea Mays
tttggcgcgggctcacttagagcaactgaagcatcacctttcccagaagttgcactttttctcttttgccctttcagcgggtagcggtaatcagggtacataaacccaatatcatcaaaactctattcagcctcttcttcttccggcctccaaaggccgcagataacgcgttatcttctgcctttgaatatggcccaagtagttcgtcgcttgtagcttcgatgcacttcaaccaatcatcatcaggctcaataaacttaccttcatatctgaaggtgtatttcaacctaaccagcccaccttcttcagacttgctgatagtttc

SEQ ID NO: 22848 - DNA, 389 bp, Zea Mays
cacgccccacgcaagcatcgtgccgtggtaggccaccgtcacgccttcgcgcccttgccttcacctatttaaggggcaaccatagcagctctgcttctccatgcctttcacactcgcgcccgctttccaccattgctgttgctgctcatcggagcgctctccgccgcccgccattgccaccaagcccacacaaccactcccccactagcctgagcccactcacagcttcctcacacgttgctggagctcgtaaacccactcatctgatctctatcgcattagagaagctcgccaccgcacaccgttcgacatccacctgctagagcacgaagaccggccaccccgagccaccattgtccaatcaaaacacgtggacagcttcaccaagg

SEQ ID NO: 22849 - DNA, 556 bp, Zea Mays
agtccccccaaagcccaccatcgccagcataggacgttcatgtgctcgtggtggcctattcagatgagcacctcactctcaaaacctaggctgaaagaggagggaggccctcccttataagggcaccatgacccccttgactaggcgaggtggtactaacccagggcgtgcataccggtctctcacatcccaccccctaaaaggcctaaagctctcccaggcagcagcgacaatgtgagctccgataccaattgtaacgcaccctctaggccagtccgcccaaagcccaccatcgccaccgtcggacgttcatgcgctcgcggcagcctattcagacaggcacctcgctctcaaaacctagactgagagaggagggaggccccccttataagggcaccacgtcccccttggctaggcgaggtggtactaacctagggcgtgcataccggtctctcacatcccgccccctaagaggcccaaaactctcctagacagtagcggcaatgtgggctccgataccaattataacgcaccccttgggccagtccgcccaaag

SEQ ID NO: 22850 - DNA, 945 bp, Zea Mays
ccaatgattgcgaggtcagttatcaggcattgaagaacaagttggtgaatgctcctatcttagccttgcttgagagtggtaagcgtttcacagtttatacagatgcttctcgtattggccttggttgtgtgttgatgcaggaagacagagtgattgcttatggctcgaggcagttgaagaagcatgaggggaattatcctactcatgaccttgaattggccgcggttgtctttgccctaaaatcatggaggcattatatctatggcaaatcttgcgacatttacgccgatcatgagtctcaagtatattttcactcaaaaagagctgaatttgaggtaatgtcggtggcttgagttgataaaggactatgatctatccattcaatatgacccggggaaggcaaatgtggtggttgatgcccttagcaggaccgatgttccaaaagtggccatgcctttgattgcagatctggaacgtatgggggttgcattgtgctatgtcagcaccactagagaggagactcggatgctcattcaatcctcccttctggagagagtgcgcgtggctcagccgcaggatcgtttgttgcaggaagcttgaaagagggtcggcgatggtaaaccccgtgagttcaccattgatgagaatgatttggttcgtttcaggggccgcctttgtgtgccacagaaatcagaggtgaagatggatatcttgagagaagctcataaaatgccttacaccgtccaccctggcgaaaccaaaatgtacaaggatttgaagcaaaacttctggtggaagagaatgaaggttgacgtttctaagtatgtggaaacctgtgaggtgtgtcagcgcgtgaaggccgaacataagagacatgtaggtttattgaagccgttggaaattcgagagtggaagtgggagcatatcaccatggatttcgtggtt

SEQ ID NO: 22851 - DNA, 421 bp, Zea Mays
gctcgcccggacgacggggggagagacccctaaacttcctataccaagatgcctgctaaggtgcctaaggtgcaaccatctggggcagacggcatccccatcaagaccatccggctcagcgtgtattcctcccataccactcgcattgcgggtgatctggaggagaaataggaactcgcgctcatcgccttcctctaggcaaatgccgacgtatttgtatcggaaccgtcgcagatgcctgagatccccatggaggtgatcgagcaccatctgatgatccaccctgacgccaaaccggtgagtcagaagccttggagacagtctgttgagcgacaggacttcatccataaggaggtccgaaagctgttggacgctggcttcatcgaagaggcccatcacctagtatggctggccaatccag

SEQ ID NO: 22852 - DNA, 288 bp, Zea Mays
gctgggtcgtgtctagccaaggtttgctgaagtagtcggatgagttcaaccgatagagtcctggttgactaaggtttgaccagccaacttgttgatattatttggtttggagttttccagaaaacccagacttggtacccaatggatgtgtatgtcgtcttgtccgcagagcagtttcttaagctgataggacgcaatgatacgtgtgagcagttcaattattgacctctgatgccgtgttacgatatgttttgcaagaagtgtgagtcggttagggtttaccacgca

SEQ ID NO: 22853 - DNA, 638 bp, Zea Mays
ggctcataggatggagccgtaccacagcccgctgtccaccttcacgaggctggtgatcgtccttccctccgaattttggaggaagaagcggggaggagcgtcgcctccacggacatcccatggaggtaggcgacgatggtcgcctgaaggttgaagcaggacacctcgggtagaggctgggggccaagcccctccaacagctgcgcgaagagagatgggatcggtagagccaacccgctggggagtttggaaacaagcaacacgaactcttcggcggaaaggtcatcgagaagagagaccccagcacaaatccttccgccaagcaccggcgcattccatctaagagggcggtgtaccatttcgagcagtcactcagtttgggtgtgctcgacatgaagttacaaggtcatggtaaactatggcgacacaaagcggaaaccttgaaggcaaaggggcacagagagctcagaggcgaaaggacaccgcaagtgggaaagaagcaagacatggctgctactcgaagggtagacccctttttaaaggcagatttccctgctcgcgccccgaagcatcacgagcaaggtctcccccaatgcgcaccagggttcccatcctatgacatgggggccaggcctcac

SEQ ID NO: 22854 - DNA, 359 bp, Zea Mays
taggtgcgtactaaaagctatgaatctagaaaacccaaaatgtcctataattcggaacaggagtagaattcatctaatggtttgtgtttagacatgatgaaaatagcacatccatattgtgaggacacatcaacaatatctgtttgaagtttgggaaaggcataacatcacagaaagtgccactcattgtatacaagtgcaaaactttcctctactcttgttaagaatcacttaatcagtcggttgtgatgtgatagccaagcacagtcagagcaacttagtatgattcttgatacattgctccttgcagcattatagtaactcaaataccctaggaattattatgataacaaaacaag

SEQ ID NO: 22855 - DNA, 486 bp, Zea Mays
gaaggccgactcatgatgagtcggcttttgagtttgtgtaaccccctccaatattaatgaagaactttagttgctccaagtgattgctatcttttgttgcttgttctgtttacacgcttgatggttcgcccatatgcctgatactaccggcgttttagaggtaactgccgagtgatgcctaaaactttgctttcctgagtagtgacttggaactttagaaatagtgtccgacctagaaaaccccatttatactcgtgtcgacgtgcttttttgctttctgagccctaacttcactttttcccttcgaaccactcctctacttccctgagatttcgatcctgctcgctccgccggaaagatcacgatggcgccaaagcggaagaggcagaacaccgttgctgcaatcatcccgcccatcgaccccaatagccagtttccattcgctggtaaccatatgtctatcatttctgaatccgacctccttca

SEQ ID NO: 22856 - DNA, 978 bp, Zea Mays
agagtagctccttccttgggaagctaccggtattcgacccccaccttggcctataaaaaggaggaggtcaccaaaacatagaggacgaaggggacacacatacatacatgcacacggacgacgagaccagaagacccagaggctgaagccaagggagcctaggcctgagagcactagtcgcctacaggaccctcaacacgatgggccgcatcgagacctaggctacgttggccaggggtcggcacgacatagagacgtcaatgatggcgccgatgctcttcggcacccacgtcgcccgccataaagagtgaccagggaagcgtagatgatcgaggcacatacggacaaaaacaactttaccaaggtcgaacaccctagtgtaccacaacagagtagctccttcattgggaagctaccggtatttgacccccaccttggcctataaaaggaggaggtcgccaaaacatagaggacgaaggggacacgaatacatacatgcacacggacgacgagatcagaagacccagaggccgaagccaaggtagcctaggcctgagagcactagtcgcctacaggaccctcaacacgatgggccgcaccgagacctaggctacgacggccaggggtcggcgcgacatagagacgtcaatgatggcgccgatgctcttcggcacccacgtcgcccgccataaagagcaaccagggaagcctagacgactgaggcacatacggacaaacataactttaccaagttcgaacaccccagtgtaccacaacagagtagctccttccttgggaagctaccggtattcgactcccaccttggcctagaaacaggaggaggtcgccaaaacatagaagacgaaggggacacacatacatacatgcacaaggatgacgagaccagaagacccagaggccgaagccaaggagcgagccaccatgacgtctaaggcttggcatagagcaccattcccg

SEQ ID NO: 22857 - DNA, 703 bp, Zea Mays
cgaggcctatgggtaggagatgctgtttcgactctctcgaggccaacctcgaacgggaggtgcaattctggctcacccaaggccatcctcgggcgggagacgcagtcacgcctcgccctcggggcatatggtcttgtcggacgggcttggtcccgtggcaccgagctgctcagttcctttggcacagtaggagagggtaccccatttcaaggcactgacatgcacgatatgctagacatagtctagatcctcttgttgggtgtgttggtcttaccatctccctgagggcttgttttgttatcccctcaatccacctctaaacgaacccctaaccggctaaccgaacaagctagccctttggatgagtggacatcataatcagagttattaaaacctgaagccctttggagctctccccgcatttcgccgtcgtggttttgcaaaaaggtcctctgtcttttcgtgatttaacccgtggtcctcgctcgaacaccaatcatgttcggttgggcgccccaacgcggtccctcgagcaccggtcttgccttgcccccaaccctagcttgtcactgcctcctcctcctattccgtcgtcgcccccctgggcgaacccaccgtcgctcggcccggccctacaactccctgctcctgctttgaatttcttgactcgcttcaccgccgcgacgggcccctccaccggtaa

SEQ ID NO: 22858 - DNA, 301 bp, Zea Mays
tcaatgctgaggaaaatgttgttgccaatgctgatgatggctgggacccttggcctattgagcaggctcaaccccctgtgccatatgttgtaccaaataatgttaacgctgcgaacaatgaagaagagcagttcagctaccagttttcaggtcttgaggatctcccttctgacgattcggtgggctattttaacgacatcattatccctcagggagtccagctccagcaggaggaagccccggcgccggctgaagcggttctcgccttgcctgctttccctcctgacaacataaatttgga

SEQ ID NO: 22859 - DNA, 690 bp, Zea Mays
gtttgggataagattagatctagtgcttagaggtcaagtaaccctctctatataaggagagggattgtatcaattgaaggtaagaaagagattagaaggaaatcccttctctcttgccggccgtgggcaaagccctgcgaccggcctcccaaagcgccggggtcctggccctagaccccaaacctacaactcgtattaaatcctatcaacccactagatctttgatccataacaatctggtatcggtgatgtcaggccctccacccaccaccacctcgcctccatcgtcctctacgccaccaccagtcgcctcaacccctgccctcgcgtcaccggccagggctgaccctcaccctataagtcgtagcccaggcggttgccgatctcggtcgttccgtggcggccatcaccgccttcctctccaccaattttccaccgccagggtacacgtcccaaaccacccttccgtcgccgcaacatgcattgccgacgccaccggcatcggtcccgtccccccttccaggctcgattcgcccacccaacgctgctgcggcaccatgcctgcctattcatctgttgcccatgccgccatagccttcccctattccatcatacgccatggctatggggggaccccagtacacgatgccttcgccgcaaacacagattgtgacatcaggcgcagtcatc

SEQ ID NO: 22860 - DNA, 553 bp, Zea Mays
atagaggtagagagaatcgcataagaatgaagacaagtgacacatcgattttatcccatcaccttgcttgtaaccccctgatttttccctggtcttaacccgaggtacttgagttcggtagcagtcgccgatgactaaagaaagggtgacatggcttatcgacggtggtagggttcttagagagtggtagacaaggtcgaggacatcgtgagggtcacgtcgatggtcgggtcacgactagaggtggtcgggttgagctgtccactcgcaccagcggcgaagatcgacgacggcatgaaattcggtcggccaacgatagtagagcttcggttgagggattgcgaaacttcactagagggtggtggtgttgtgggctagacaaattggacgacagtggactctaggcgtgggtccacgttcactggcaggtcgggtgctccggcgagcggtggcgcgctgttgtggtgcgattgcgagctcaggaacaggtgggtgagcttcattaaggcacagggaacacatcaatggccttggctgaggcagggaggcgatg

SEQ ID NO: 22861 - DNA, 1547 bp, Zea Mays
ggataaccagggtccgactagagtgacgacggtgtattaatgatgctcatacgggatagaactattgtactatctagtcatggctataggggttttcccatctaaagcaggtagaattgcaagaccagatatggtcataaggttgtctccaacaaccttcttatcccaccttctatctcactcactatttcaagctccactttgtaaacagtacagtctacagtgcaaaacaatattttgcacgcccatatgcacgctctgctggagacgacctaaatgtaagggtatgcttacacctacgtctatcatggtggaggcatgcctgtaacaaaatgtatcacatttaatgtaatatacgagccccgatacagttatcccttcccaaagtcattgtcatataacctacagggatatatacaataacctaagtctatggataccgaggctcaggccaactggcatgggacgattgcctgccgataaagccccttgtactttattactttctgtagtacaccatgtgtgtgcacgcatggttacaggaccaacgcacacaccatgtagtgtcctcaaatgccttgcagcataagtcgtgtgcccgtacgctaagtcggaccagtaatgtcacccatcgcacatttaaagtgttgtactcgatacttatccattaagctatcactaaggaatagtctttgagaccttagatgtggggtccatgtcccaggatcatactgtctttggatggcccgccacatccttttgcctcaagataggattaggcttagccagcatgagcccttgactcctccgagggaccctcgagccccaaagggtatgggccagagacgtctgagtacgatgacgaaaacttaaaggcccagagcaactaagtgtagcatgtgctcgggtcggtctgcactggggcacaaggggttgggggcctataccatcaggcgccttcaggcgtgaggggccccagaagcatatgtaccctagggcacaaggggtccctggggcttataccgttacgtgcctcaggtaacaaggagcctcgggggcttatactatcaagtgctctagtgtgtgaggggccccgctggcttagaccttaaggtgccctgggcgcgaggggctcaggtagcttacaccgtcaggtgccccgaggcgtgaggggccttagggattatgccctaagagtagtggtccctctacaataggccacgaagtcaatctcttcagtcagggccctagagcgcatcgtggcggttgccgggtatggcctttgctacgcgctgacgtcatattctaacaactatcactttccaacttgctatcatacaccataatttccaatatgcatagacgtttggtgctagagagaataaactgcaagcaatcatatcaaacaagattaaacctactctaggagagccactaacggttcactgactagcagatataactccaggagaagtaatacagaatacaaatttattaatctctcagaaatttcacatgccaagcactgagatttaccttaaggaaga

SEQ ID NO: 22862 - DNA, 363 bp, Zea Mays
tacgtacgcgtatcctatgttgattataatcatcatgcatatatactagcattaacttgtaggtagccaagctaagctagcatttgcggcggtcgatcgagacacgtagtacagttacctacctactagctctcccgagggtagctagttgtctcgtctcgtctccctctcgctagctaccatgcaagcatgcatcatctcgtctcgtcattgtatcgtacgccacatcgttatcgtttgttctccgttcattcatccattcattcggcggtgcagggtacttggtacgtagctacgcctagcctcgctcgtagtagcgtcaccgggaactgggagtgcagcgcaatgcgtgcagcagcaggt

SEQ ID NO: 22863 - DNA, 829 bp, Zea Mays
gaaaaaattggtaataaatgttgaatagtatgagaaatgatatttttaagattgtagtggggtataggggatagtatagagggaaccgttgtagaggataaagatatagggagagagagaggttgctggcgtggcacgataataagatatagagggagaaaaatagagtaaactgttgaaccacgcctcgacaacgtcaactttccaccgctcgtgctcgctgccccgtccatggctcaacccggcgaccctgctgtccgcccggagcattcctgtgctgtcgcctcctccaccagcaacatggagcgggagcttgagcggctgagttcccatgcggtggtcgtgtggctcgggcgtgaccgccccaacatcagcccggagcgggtgatgcgggccttctgctcccgcttcggggtgaggacagaggacatcaaggtggctcgaagccctccgggcgacttcctcgtcaccttcacacaccgccaccaccgggaggcggccgtcgctgcaagagacttcctacatagcaaccttgacttccgcatcaggccatggcagctggtcgccctcggggagcgccatgatctctacttccatgtcaggctgtgcttggagggcatccctccccacgtctggaacgaaaacatcgccaagcgctcggtggctcgtgcctgcgtccttgactacgtcgaagaagattgtctctcctccaacaaggcggacgcgcgctgcctcaacctgtgggcatggacgggaaatccgtctgacatccccaagatcgtctggctcaccatcacgggtcgttcaatggtgatccatgacaacgccc

SEQ ID NO: 22864 - DNA, 437 bp, Zea Mays
ggggagcacgtgcacgtcgcctccttcgcctaggctcctccaggcgggttcgcctcgactccttcgtccaactattccagtggaggaagcaaggtgtcagatttactcttttaatggatgtccggatgcttccagcagggagcggaccccggacgcaacatcgctacggaaggagtcggttgatgaagagcgctagcagggagcggacgtaacatcgctacggaaggagtcggttgatgaagagcgctgattcacgatccgatggcaggaattaattaaagtgacgtggctaaatggtgtgcatgctttcctcccgcgtttaatatatagaaattagggtcctactctaaatttcattttcagcaaaatttattatcatataccacaatcatcgtaattatatatttactcttgtcggggaccatatttaggggtac

SEQ ID NO: 22865 - DNA, 558 bp, Zea Mays
tggagggtaattattccggccgccacgcggccattgatccttccggtcgtgcctggtcaccggcgccgctcctctctgtccatccacgccatcaccgatttgaccgctttaccgtcgtggcggaacatggcaaactcttagaaaagggcagcgcccgacgtcgttgttagtcgccagctaagtatggtgatggttatcaccatggccatcgcggtggctcactgggcctataaattcaccgcgctctcacccccttcatccaaattaaccaagcacagctcttcgtcccttagttacgaagccaacgaatcactagccaccctgttctgtccaccaccctcaaagatcatcaaaattccctagaatcggtctcttccgccgccgtgaaggacccatccgtggccagcactcctcgggtcagtacataccaaattgcttcctattctagcttgactttggccttctattgctctcggagccggctaattgaactttaccgaagcccacactccggaacacccagtcctcccgttgaacgccgccacagacaccctctct

SEQ ID NO: 22866 - DNA, 501 bp, Zea Mays
gcccttctggctgttggttatggatcaagtttggcgctagtggtggtggtggtggcaaatgagcccaggaggcttgggagtgacttgccaaagcaacagacatcgtaggttgttgattgcccagatactcagggatatacaaagaataacatgaagcagtatgcaagacctgcttcggcgggttctgtcgtgcttcggcttcagcgatttccctctatttttggatcgtgacatggcacatccttgtcgtgtgtcccttatcttccctacagaataggcagaacagtctcctaggctggttaccataccttcctccaaagcttctcccccctctgcctcttggagctagtggtctaaaggagctttgttgtgtccctgatgattgggagttgtgttgatgcccttgagtatgatttcccctgtcgtcgcttgagctaggattatggatcgtcctgacatgcctagggtggagtctttatccaaagcccctagtcatcttag

SEQ ID NO: 22867 - DNA, 409 bp, Zea Mays
caaactcatacattctgtgtgctaatttgatggctgatacaccatttatttcaatttttcatacattttctcagaggctcaatgtgagatgcaacccccaggatgttattataaccatcaagatattgaatgagaggcaacgacaagccgttgcaagaaaagggttttccaatatcctcgacatgacccttgatgcactgggcagccgatctcatctttggtggttgatggataagttggaccacaaggacatgacaattcgccccggtcaaggaaatgaactaaagattacaaaagaaactgtccacctaatccttggcctaccgaatgccggcggtggtaagccactaggcatcgatgaagcagtggcgggcaataacctgagggctgaacttggtttgtctaaaga

SEQ ID NO: 22868 - DNA, 538 bp, Zea Mays
gtcgcattttaagtccgcctgcatattcgtagagaaaaatggctgatttactgtcagtatcttcagaggtaatagccgaatggttttttgcgacgccgacgttttagaggtaacagtcgtgttcttttgagccacatcggcattttagaaataacggccgagtgattactagtgacttcggtgttttagaagtaacaaccgagttatatcgagccatgtcggcgttttagaaataacggccgagtgaagtctggtgatgtcagcgttttagaaataacagctgagttacatcgagccacgtcggtgtttttagaagtaacagccgagtgatgactgggctcttttagaattggtgcctgacctaggaaaaccccatttgtaccgcgtcgtcgcacgcctctgcattctgagccctagccttactttctgcttccagacctactctgtttccctttgatctcgcttccgctcagttcgccgacgagattgagatggcgcccaagcgaaagagtcagaattctgccgctgcgattattcc

SEQ ID NO: 22869 - DNA, 457 bp, Zea Mays
gccgaacagccacgtcattgatgatctcggtgacgcggtagggtcccacgtagcgaggcttgagcttcccagtgatggttcacggcagggacgccgccacacgttggcgaaggcaaaggaatgcccagtccccaacctcatatgtgacctcctggtggtgcttatcatactgcagcttttggaccgcctgagcctgctcgagatggaagcggacgtcagccagaaaggcttcccgcgcttccatttcatgtgccaccgccgccacccttgtgtcgtcgggctcgtaggagcggatggagggcagatcacggtcgtagaccacgtggaacggggtgtcgtggagggactactggtaggccgtgttgtagacgtactccgcccgagggagccagcaaagccactggcgagggcgatcgcccatgaggcagcgtaggtacatgacgatgacgcggttggc

SEQ ID NO: 22870 - DNA, 418 bp, Zea Mays
catgccatgccgaaaaaaaaaacaatttcagacagagacgtggatgagattatgccagatcagagtaggaccacgcgcagggacagggtacagtaggcattttactggtccgcttggccaacgcttgttggctacagaaatcttatcactttctcgaagccgacagcgtcatatccgaaaggttgactactgcccatccacgcgcgtgctcccttttatttggaaatcggaggctctgtttaagaccgctttttttagtggtggcggtatatctcatccaagcaaataatcccaccacaccgtctggattgcccacgacagcatttggcgttcttccactccagctcaaacaccacaatgtgccgtcggattacatgctcccaaacagggcctaaaatcgtttccgacaaagattttg

SEQ ID NO: 22871 - DNA, 488 bp, Zea Mays
ggatcgtgctggaagcgctcggccaccagctccacggcgtcttgtacactctcccaggcggcgtcttctatggcggctaccggaccagcgatcactagcgccaaggatatggtggggtcgtgactccggaagcatgttaggacttattcaaccactgcccgacagagcttgctgccctctgcctctaggcgggccccgaggatctgatccaggcgacggaggcgatcggcggtagagtccagcaccgggagcgcatcagagatcgacgctggtagctccgacattgggatggggctcatccctagtggcactagtgccgtgcttgcctcgccggcccacgcgacaatacactggacctcgacgcggtgctccgcttggagatcttcaagggccttcctggtggcctccatcgcttggggacccggtgccgcctgcgctgcattgaactagcggatctgctcctccagcttcctctctttctcctctgc

SEQ ID NO: 22872 - DNA, 982 bp, Zea Mays
ggctactcaactactcgggcgtgatcctctcggccgtgggagtcatcctctggataaataggttgccttccctcctctttcttcccttttgccattagcgccgatggtgagaaaacagagtgaggaagagagctcacaccgtcgccgttgatacgccctcggtcagcctcccagtcgcggcatactgtcccgggcgcacctaatgattccaccgcacgaattgggtcaactcccgtgtgggatttgcaagcccgacgttggcaattcctcgtcgtcatccgcacttcgccaagaacccgcggtcgccctagacagctcacctgcgcatacgattcttggtatggactcctcgcctgtgcctgctttcatcaccgtaacatgtagagccggtcgaattaggttttggagcgactatgccatggattcatatcgccggcgacgggattcgccgtgaccgagcagcggtcggcgtggcaagctgtccgggggagggcgacgatgccatggtcgtccgatctctttcggatggctgggattagacgtcatgcacctcttcgccccaacgactttaaaccgtagatctgaagacgagtgcctaaggttagatgttgtcatatcgattcgggcaggacgatgtgaaccattgagatccgatcgggtggatctagaaggctctaggttatttaaatctacgccatagatttctaatcatgtggtcggctgtgtaccgcttcgctccgggggtagaatctaatcctagcggttgaattctgatcgggcgaaccacatcaggttggtcaacataaaatccaggtcgtgcatatcctatcctagggttcctattgagtaccggttcaggtgggatctaatttaatccgagccattcagccataatcgggtggccatgatttgtgcataccacttcactgcgacaaattagcataagagcccctcgggttttaggggaattaacccgcagtcc

SEQ ID NO: 22873 - DNA, 383 bp, Zea Mays
tggacatgaggtccacgctgccaaggtggctgcgacgcctctgacattatctgccgaggccatccccgacccgtctgcgaagaccgagggtggctgacgcggcatcagcggaggcgtcgctgactccttcagacatattgatctccctcgtcgactccctggcttctgactgaggcaagagggtggctgatgctgatgaggccggtccctcaaggcggcccgaggtcccggtcatgggacgcaccgcgcttttccccgacgatgaggtgagaagtggtgttgtccacgttgggagggatcccttcgaatgtggaggcccacacatttcttggttggagaaagacggcgagccaatgtacgtcctcaacaacaaggaagagcag

SEQ ID NO: 22874 - DNA, 481 bp, Zea Mays
gtttaatgaaggtgagtttcaatcacagccctcggttcagatcgcacggttcagaatggctaaccccgaaacgttttctacctctaatctgagccatcaatcatttgattaacgatccgcggttaactcccaacccaggctatcccgacagcggcggtgccctcggttcacggtggcgccatcaccggcgcacgcaatccacgccatcgttcaccaatactcccacctgagacgctctacgcgtagcggaggatggttcaaatacaaggaatggacttactgggggcagaatatgcacacgaggcctgaccacggtgtatggcggaccacaggttttggtcggagttcaatggcaaattcccagccacccacgcccttgtctgaccaatggtgatcacgcacacgagcggcgctctagaatgaacacaccgcccactggcctgatgcgtgacaccagcgcgctcgctaatctcaccacggc

SEQ ID NO: 22875 - DNA, 366 bp, Zea Mays
gtccggtccagatatgctggggtccggcactttcccatgggagtccggacccaccattgataccttggaggatattgtcttccctggccacgtgacggcccttgaaccgcccacgtggaggggtcatgtgttgttcgtcacgcgactaaggatagctgcatggacaccgcaccttcatactgtagtaacgggtaccccatttccagggtactgacagtggcccccgggcccgcctcaggggaggatacgagcctgcaggtggggccaaagctggacttgtcgattggtgcgctgcttctgtgcgcttgctggcgaaattactgccagcccgccttcgaacacgccaattgccacacctgtctccgc

SEQ ID NO: 22876 - DNA, 734 bp, Zea Mays
tttggctaaaaacaggacctatattaaaggttttatcactgccaccggactgtgggttgattacatagaaacataagggctcttttgcaaattatcgaggtcgaaagggtatgagctgtttctggccgcgtgatctgagatggagggcccagattacatcgggatgacattgaaccggtatgcacgccaagccgttggatttaagatccagggtccatgttttaaataaccgtgatcagatcaccaccatacatcagccatcccacggtcaatgatgcacctcgaatcagtacgcgccctgcactaatctcaaccgtccctaatagaatcaacggctccaatccatctccttcatcccgcaggcaggccatggcggcgcaccctgaccgcggcggcgcttccgccgaagatggccgagatggcaccctgacccataatatcggttgtccgtgtgcgtaatatgaagagtaggctgaggcaaaatggggaagtacacccttaccggtggttagggcgatggcgggggtactcctggggaggtgcgaatccaaggggaaggccttactccgatgagcaattcgtcgaacaccagcgtggcaccacacccgcgcagacctcgaacgcaatcccgaaggtgcagtggagctcccggactcgccgatgactcccaatcgacggcgcaggcacacgaccacgatgacgaccaaattttccccacgacgacgagatctcgg

SEQ ID NO: 22877 - DNA, 715 bp, Zea Mays
gtccaccagaggacacttctgcgaggccgacctgtcaatgtaatgtatgtgtgtattatttagtgtgtgtcgcctatagggatcacggtgctgtaattaccctattacatggaatattcctcggatgtagttggtgagcaagggtaggaccatactctggaccacctactcccgaacggccctataaataccactcccttgtagttggatgggacacacataacgatatgctatagttccctaccaaacgtcttgtgcacctgagcgcatccctttcgtctttgagtgttttggcccacctgaccacgtgttagtacccaacattttgtgcccaccatttatgcgatgaagacaaaacacacgatgccacccaagaagaacactcgagccccttcaccaatcgatggcgatgaagcagggactgtcttcacccaccacctgtaacatcccaatttctaacccaggtttgaaaccctaatctaacccccccttcttattatctttccccaaaactcccctagatttttcccatcatatgcatacactttgtttgaatatgaacacctcacttagattttattttccagcacctagattatctattaaattaattgttcaaaagaaaagaatataaaaatagatataagaattagaaaataaaaagaaaaagagaaactctctccccctaactgggctgaatccagcccatgccgcg

SEQ ID NO: 22878 - DNA, 512 bp, Zea Mays
cgagcccaggacctcatcggaggagcgaagcctgcaccagcggcaccatgacgcgatacgaaccagcaacccgacaaacgctgggagaagaggcctcgcgaagaagttcacgtcgccggaccacccgcctctcgcgcctggggaggacctcgtggaggcgaacgcacgctggatgacatcctcgacgcccagtgcccgtaccacaaggacatgcgccacacccttcggaactgcagagacttcaagcactccgtcgggcacgaccgacccttccaacctctacctcctcctccgccgcggggaggaccagaagaaccacgacaaccgcagcaacaggaggagggaggaggtggagccttcccgcgtgtcgacagagaggtcaacgtcatcttcagtggacacggatcgcaggagaacagaagacaacaaaagctcaacgatcgccaaatactagtggcgaccaccggtcctcccgctccgtaccgatggtcagagcacccgatcaccttcac

SEQ ID NO: 22879 - DNA, 330 bp, Zea Mays
cagtctcatcaatagcttcatgaaaatattgaccaagattttagcaaataggcttgcgccaagaatgaattagatcgtctccactgctcaaaacacgttcattaaaaacattcaattcacgataactttctctacgtccaaaaagttattcagaaacttcataagaacaatcagccagccctttttgtcaagcttgacatatcaaaagcttttgattccatcaactgggcatatctgttagaggttccgagagctctaggtttttcccagaaatggaggaattggatcgcaacaatattaggatcttcctcttcaaaaaacatcatcagc

SEQ ID NO: 22880 - DNA, 928 bp, Zea Mays
gccaaactagctcgtggtgggctggctcttcgatcgatccaccgtcactccaagctaattaggaggccggaacactccatggatagatatagatagcggtgtgtgtagtgcgttattgccaggcaggaggggctagctcgatctgtcaactactactagtagcgaagggatgaaccgtgacgcttaatccgtccgcattgttgcctgtgctctggttcattgaacctgcccgcggtttgggccggcaccgttgcgtaacgcgccgggatcggaaattaaagacgtcgtgcgtgtctacttcggtggcactggcactggcactggcacgtagcgtgtgtgctcactttggtgtctgggctctggagcaagtcaggtcatcagctgggagagaggatatgccaacggctttcaaaagcgtgctgctgcaatgccctgcattggccggccgatgcccggtgcgcgttgcttggaagaaagatcctacgtaccgtaccttcgggtcggcgaaccagccaggacgatgcatatcatgcatgcttaagactttgttaacgttcttgttgagaagcatgtgatgagttaatttgcacttgcacacacacgaccacacgatagatgaaacaaacagggtgccggcggaaagggtccttgtgatgttagatacacatttgtatttgcatgaacttgacatgatcgatcatttgattctttccttctagataattgctttcaacttgatttgaaaactatcaatgtgcccaagccacccatctttagatttgaaaattattggcttcagcttgatgattttcactctatctttcaagactcttagaatcagcctatctttcaaccagaccctgctaaaaggctcatggcaaagtttaaaagggcacgcaagcacatccatggctggtgtaagtctctc

SEQ ID NO: 22881 - DNA, 727 bp, Zea Mays
ggactggccatagaccacaaccctgacctaaaaatctatcctcaaaagaaaagacctcttaacctcttaaagaaccttctctcctttccccggtattaacaacccttcttctcttgctaccagatggaggcacttttgtccttaagacatcctatttctcggaggtggaaggattccctcaccttcttcggagttgtgcgcttcgcatggggatccgcaagaagccaaagtatgtctggaaggaataacgcgagaacgggattgagaagtgctctatggcagtctacctaggagaaagccgaagctacccaaataaccctccctttcagatcaccgctactggccaccacttcctagacacctgccagagtgctgcccaaaaagccctccgccaactgtgccaaaactacagcagggaagtctctaagacacccctccgctactttccacccagcaacaaaaatacccctacctagagaaaaagactccaggctttgtcagtaagagatcataatgaagatgaccctaccataatctacatggccgaatatctccacacccttgacaaccaatttgatgaccttttctctcactacacctacctaaactcccgggtggaaagcctagagcggcaaatcaaggaattgaaggaagaaaaggcggctcttcaagacaacatcaagatggcagaaggcgaggaagccaacactcatgaggcataccgaac

SEQ ID NO: 22882 - DNA, 392 bp, Zea Mays
ggggctgcctagttgtcgtgtatttattgtagtttttgacgcggtggtggcgatggtcccgggcgctatcattctggctatgtcgacccctggattgtgtagcctaggtctcggtgcagcccgtcgtgtagtgcactacgggaggtttgcgtacttaggcctagtctaataggccataagtgcatcacagaccgaggggtgcgcgaccattaatgcaccgcattccagaggctcgtaggttatgagtgctatgcggcccaaggggttcgtaggtcatgagtaagaagtagaccggcgccaggcttggttaatatgaccatttatttatggcgggccagtctgggtttgggtgtgggatccgatcgagttgttcgttttcgacacactcatcc

SEQ ID NO: 22883 - DNA, 653 bp, Zea Mays
tgggcttccttggctagattggtggctcggggctctggaatttcttgccggtgggggaacttcgccgtggatccgccctcctccggtggcagcgtccctggcgccattaacccaggtatgaagggcctcctccgcctcactttggtctcctatgtgcgccgcagcaaactaatttcgggattggggcgtgtgggaggcaatcgcatgggcgccggcaagcttccgccgtgggtgcaccatctccgccgctctggtggtcgtgaggtggaagacctcccatggtcgttaaattcggatagacggtcgagataagacatgggaatacctgttgggaggacagagcgtgagccgttcgatctagatcgggtgtgcgtcattagatctgggcatttacaattggaaccgtaggatttaatcgggcggctctagtgtgttggtggtgttaaatctaatctgggccgtcagttttcgatcgggtggctgtcgtggcccgataccccttcgccgcgcatactttctaatagagaccctggggttttatctattcaacccgccgtccagtgcggggggaatcctgagtcttatgatcttttgcgagatagcccctgtagtttctgatatttatgcaccctgtccagagagttagaaaatcc

SEQ ID NO: 22884 - DNA, 399 bp, Zea Mays
gcacaactacttagcggagcaagttggggcacaaatttattgtatccaagggcggtggctcctaatttgggcatggcgtgctggcggccagagaggaagaaggtcactggtggctcagtcgtggcgttcaccggtgcagcggttcagaaatggtatgcctaggcattccacggttaatactgcacagtaaagagccacgatgtggcataattgaggtcgccggagtttccacgacgacaccggtggtctggccacgtcgtagggctacaagcgcggttgataagcttctccttgtgaccaaatccgctccccttctgatcttttcaccctcccggtactatcctgcccgagtccagcacgaatcaccgcgatcaccgtgaatccttgcgcagaggtcac

SEQ ID NO: 22885 - DNA, 415 bp, Zea Mays
gcgaaggcacacagcctcatcatacaaattatagttacatacatacagcgagggcatcacaccttacattggttcaatctttgggatgatacccatctccctgtagttaaacaacattatcctcagctcctcaccctcaaaaagacttcgcaactccccctcacctacactcgccccaaccggcaaggacaacaattcccgcttgccagccctgtccacacgaagacaaccaccctccacctcactcactctacgcttcgccaccgccctttgccgcctacgcctagcactcggaccaggaagaacttcagcatccatcacacgaggagaagcctccaccgtagccacatccaatgccgcaaaaataatccaagtcctcatctgaagactcttccgtccacacaaccgaactccc

SEQ ID NO: 22886 - DNA, 587 bp, Zea Mays
agcaaaccacgtgcttcacacgcctctctgaacgtttcgtacacagtattttggaaggtccttatatcaacgaagctcgttgcatcagaaacaaacatcaagagcatgcgtagatagtatagccccccagctgttgggtgcacgtaatacatgagaccaatcttggcagacgacaacctccttctacgccaacacctaatagaaacgtcccacgaccactcttttgggaaatcacaataagtcaggcgatgtgcatcactatatttcaagtttgtttcaaaccattcagttaacattgtcttcttcactgcacggctcaaaagcagcgcttgtaggtctgcccaagctcgtatcgtacaatgtttttttgcaggtaagtgcaccgccagacgttccacagaaggtactctaaagtgaatgtcgaattcgaagattcgccatagagcctcacatgttgataggtatctggcatctacacggatctcatttggcggggctatttgaggacctggagatgcattagttgtgtttgcagtcaactcaaaatatatcttggctcgatcacttcccttggtaacatatttaaa

SEQ ID NO: 22887 - DNA, 759 bp, Zea Mays
gtcacagtgacatgtagcaaagactaccctcgcgtgcgacactctccgtgcaaaagtcgcctacgggtgcagccggactagcacaacaagtgcgtcacatgaagtcttttactaaaagacactccgtgcaaaagtcacataagggtgcagccggataagcacaacaagtgtgcgatacgaagccttttactaaaatacactccgtgcaaaagtcgactaagggtgcagccagataagcacaacaagtgcgcgatacgaagtcttttactaaaagacactccacgcaaaagccgcctacgggtgcagccggacaagcacagtaacgcgtaacgcgaagtctaccctacgagacaaccccgttcacggaatcgacaagggtgccgtcggacgcttacaacatcacaccgctaagcgaagagcaacatgccacatcacaatacaagttgcagattacatacactcagcgaagggtcaccgaacccacctcgcaaataaatacaattgcgacccctactaccataggacaacacgagggcaccacatactacatcgtctcaaccttcgggatgatgcccgcctccctataattaaacaacattattttcaattcctcaccctcaaaaagattccacagatccccctcaccaatgctcgccccaatcggcgaagacagtagctctcgtttaccaaaccgatctgctcgaaggcggtcccgctccatccccatccgatggtgcctaccacttcgcgaaatctcgc

SEQ ID NO: 22888 - DNA, 513 bp, Zea Mays
cgccgacaaggatggaagatggtcggtttagaagaacactgaagatcaaactctgacaaatatctgatgaacgcgataagatcgggggcactgttgaatcggatgggctcgcgcgatccagtgatgagaattgatctgggatggataactttgatcgtggtgcgattccgtgaacccagtcgagcgtgcccggagttagtcaccggcggccgccgtgactcagataattccgccgcggtgtcacccgtaccttgctcctccctcactgtgtctcttccctacgtggtaaccatgcgcaaacaaagttatccgtggccatagatagctagccggaccaccgtggctataaagggcaccatgaaccacagtggggtatgcacacctccacccagtgagttgatcgaaatccaaaattcgcgctgtctctgccccatcctcccaaattgaatgtgcacagtgaaactatagttccttacggccgtatagccccaatctccagccccaatttcaccc

SEQ ID NO: 22889 - DNA, 365 bp, Zea Mays
gaaaagagccaagttacctgaagattagaaaagaatgagggcaatcccaagtcatgagaagccgtgttgaagctcgacgaaggaagatcaactggaacaatctgaatagcatcatcgggggtcgattcagctccactagcagatatcagaattctggcatccggctcgccgacctctaaggcgactccctcgctcgaagctaaagaagtaagcatcgctatcactctgtcagatcatggtggagacgactcgacgtggacgtccatggaggtgtgggaaggagagcttgctcggacaccttcaggggctgggttacagctcgcgctacccatcagagccggatcactaccggcaacaccctcggg

SEQ ID NO: 22890 - DNA, 466 bp, Zea Mays
gatagacgatggccgtcagtttgttattggtggggtgggaagcaggcagagatgtctgttggacggtggaagcgattagctagctctattttatggcgacagcagagtgctcgccgttctgtagtcgccgagcacatggtgctggaggatttcattagttttctgctcatcgtgtctttgactccgggcagcggtgcagtcagtactcatcacatgcatgcgatggtgcgaagtgggaggtgacatggactactgctcgtgtcagagagcaggtgcgatgaacaaagccatgtggaatcacttgaaggcaaattatccatggatagatgagagaattccgaatgccaacactacagccttcaggttcagggcacgggagaattcaaataattactgatacgtacggttaaatacttgttaccggcgaattcttagtgcgtggaagctagctagccaccaatcctcg

SEQ ID NO: 22891 - DNA, 615 bp, Zea Mays
cgcgggtagtgccagcaagcgggaacgcacacgagtgagatctagcatcgaaagacaccggtggcgggtgaattgcccaacggaatcaaagaagaaggtcgtggacgcaggattcaccgtcggggtcgatctaccactccctctgcggtaaaacttctttccccaccatgttcatttggtccgtagtaccgatttgcgcccacatatgaccgtgttggggctatggagggttggattcgtgccgacgtaattgctccggtgtggtcggaccaagccattgcgaagaactagtgtgcatagggccacatccacggaattgagcttagggtcaggttcgccatgcgttaggcaacaggttgtgcccaagggagagtcgcgattggactttgtcaccagaattgggcagggggatcatcgcggtcggcggcgccgccgtggtcgcgctgggaggtaggcgatgtcctcctggccgttggatcggttaggggcgtccaggattagatcgggatggaggtagaatattgaccgcagatccgcgaagcaatgactgtgattagtcgcacataccatcgcgccttcgttaaatagtggacgtcgatttttgatccgacggtc

SEQ ID NO: 22892 - DNA, 636 bp, Zea Mays
gaaaggcagagtgattgcttatggctcaaggcagttgaggaagcatgaggggaattatccaactcatgatctcaaattggccacggtggtttttgctctaaagtcgtggaggcattatctttatggcgaggcttgtgacatttacaccgatcataaaagtctcaagtatattttcactcagaaggagctaaatttgaggcagcgtcggtggctcgaattgattaaatattatgatttgtctattcattatcacccggggaaggcaaatgtggtggctgatgcccttagcaggtccggggttccaaaagtggccttgcagttgattgctgatctggaccatttggggatcgctttatgctatgtcagcaccgctagtgaggagactcgtatgcttattcaatcttccctcatggagagaatgtgtgcggctcagtaacaggatcgtttattacaggaagctcgaaagagggttggcgatagtaaaccccgggagttctccatcaatgagaatgatttggttcgtttcaggggtcgcctttgtgtgcctcagaaattagaggtgaagatggatatattgagagaagctcataaaatgccttacaccgttcaccctggcgaaaccaagatgtaccgaga

SEQ ID NO: 22893 - DNA, 643 bp, Zea Mays
ctgtagactcaagcttcgtcgccaggatcaccgaccaccccatgcgcagtaagaatttcccccagcttgtttgaattgttcataggattgattcgcgctcgcgtgtgactgtggagagaccctgggaggtgggaatttgacgccggaattgcttagggaccttggggccgcgccatcatggtgatcaccgcgtttggggttccaatggtgaaattgagcttaccaatagattcgtagtggcctgcaccccgtgttggggtcgcacttcggcaccgaccttcagagtcaggcgaggtcaacgatggcgccgccatggctggtgacggctccggtggctggctggcgcgataagaggagaagggggggactttgccgccgtcgattcggcgatgaatggctctgattagataggagataccctttcgcgttgagttgatttggtccgttcgtttggatcggacgggtggaaacaaatctagtgtaataaaatcctccccgtcaattttgcatccaacggttcacattgtgtaccgcttcgagatcacgccgatctaatccagaccctagatctgagatcgggcggccgaaatcaaaacataccccttcagccgcaagttttgtaaaagaaaccctgggtttaaag

SEQ ID NO: 22894 - DNA, 294 bp, Zea Mays
gccgcatgggtgtttggaggaaggagatggatccagggccgctaatctggtgatggacggataagaatagaagtggcagtagccgtttcatctcgatcggtgattctggggccgtggccgctggatccgtaacagacgactgggatcgctcttggcataccggttcggtcggggtggctttgtggccatcgatcggtggatggaggggtgatattagagttcgcttcaatttaatctgcgccactgatcttctgattcgacggccggtagtgagtgcaggatctataagaagag

SEQ ID NO: 22895 - DNA, 469 bp, Zea Mays
gtgcaccaagatgatacagatgcatggaagacactagatgcctttgattctagctttactagcaaagcgagaaatgttcatatcagtttggcaacagatggtttcttgcctttcaatctaaatgcatcgtcatattcatgttggcccatgtttgctattccatacaaccttctgctggctctttgcatgaaatatgattttatattcttgtgtcttgtaatacatggtctggatcatccagtaacaaagatcaatgtgatgatgagaccctagttgaagacttgaaacttttgtgggaaggagtcgaagcgtacaactgttataagaaacagaagttcaacctaagagttgtgtatttatggtcgattcacaatttttttgcttatagtatcttttttggatggagttgccatggaactctgacatgtctgatatgtgataaaaacaccagttgtttccaccttaagtt

SEQ ID NO: 22896 - DNA, 1055 bp, Zea Mays
ggctgcttggttggtggcttggtgcgatgcggctcgccaaccgtcacacacggatgggacgtggtcaccaaccgcgccgagtcgccaaccaacgcacgcgcacatggctgctctcgcctgctcctcccaagtccgaacggctcgagccgagtgttttgccgaaactaccacaaggcaacgtccccagactaccagaacacgcacgcacgacgggaagtcttccagttccaggccctgtcgtaggaggagactacgtgcatttccggtaatggctgcgtgatacgccagggttgccactttaaacacttgctgctaacttgccggactagtactcgacgttcttctacctccttcgtggaagcagagtgggacaaaagtacagagcatgttctaagttgtcaacaaataaattactcgagtatactccgtttctttgccagtgataccgcatgcgcttgggattctgaatcattttgtcatggacagacaacctttttttttctttgtttattcaagagttggccaacgcggcgatcgattggaatgaaaggcggagtcaaatcccgggaccgagcttgtcagaaaagagatctgtctgtcagagtctaatagatcatactacagaacatagctaatccaaaactgtatctactagtactagtgctatgccatgtcatgccatggaacaaataaaacgtgacgaccattcgcagaatgcaccgagctccacatagtacctttttgccgcatacggcatacctcattatacacaaaaaaggagggggaaatgtgtaatatacattagtactaagtactgagactgcagagacaaggacaacaaaaaggaggcaatatgtacacaacagggcagccaagctcacaaaattaacattaacgagactaagggagattaccatcagagggacagggactagggaacagagtctgcattacgcagcggttagcaggcacgtacgcacacagcaacgcacatgctcaattctatcgccactacgtacttgcgtctgacaaggttaatgctatcaacatcacgg

SEQ ID NO: 22897 - DNA, 1329 bp, Zea Mays
agtaagcgtgagcatgttgcaccgtcttaagtcactgctgacttaagtcgattgctctattagtagggtatagtggtcaccctaagtcgagtaagcgtgagcatgttgcaccgtcttaagtcattgccatcttaagccgattgctctgttagtagggtatagtggtcaccctaagtcgagtaagcgtgagcatgttgcaccgtcttaagtcactgtcgtcttaagccgattgctccgttagtagggtatagtggtcaccctaaatcgagtaagcgtgagcatgttgcaccgtcttaagtcactgtcgtcttaagccgattgctccgttagtagggtatagtggtcaccctaagtcgagcaagcgtgctgattgataataaaaagtttgagtgcccttgagaatgaaatattttattgatgaggtatttaccaattatagaatacaatgctcccccgatagcttttgaaatcttgctaagggtaaaacttcctgagatgctctatattccatgaattccctatttccgtgttgtccatttgagtaagcctatatgatcctggccgagtgacctctgctactacaaatggcccttcccatagtggtgataatttgtgccgtccttcccccgttagaattcggcgaaggaccaagtctcccactacaaaggatcgatgtcgtatggccttgtcatgatagcgcctcaaggtttgctggtatctagctgactgaattactgtattcaatcgctcttcctccaatacatcaatgtcctctaatctggtagcctctgcttcagctatgctttcgaagaccaaccttggtgccccaaacctgagatcagcatgtagcactgcctccgaaccatagaccatgaagaaaggagtatttccatgcagagctcgactaggttgagttcttaagatccaaaccacatacgacaactctctgatccattttcccgcaaacttttcattcttgtcaaagactttcttccttagtgcttctagtatcattccattagccctttctacctgaccgttagcccttggatgtgctactgatgtatatttaatctggatgcttcattgttcgcagaaatcaaagaattcagagctagtgaaattggatcccaggtcggttatgatgctattcggtatcccaaacctgaatattatatcttgtatgaactctactgccttggctgaagtcagagaagcaatgggcttgtattctatccatttggtgaatttgtcaatggtgaccaacacgtgagtgtatcctccttgagctttcttgaagggtccaatcatgtccaatccccagcacgc

SEQ ID NO: 22898 - DNA, 514 bp, Zea Mays
gtctttattgcttgattggtgccagcgttgcagtacttggtgggtcccataaagtgggcttatgctaaggtttaggtcatgcccagtacaacttcatctttcgtcataccccttgcgtcactaccaagcgtgcgtaggtatacgcctagtatggggtatttgtcttgtcctttctggtgtatgggtcactgtagatactccggtgttgaggcctccatgactggagttgaccggccctgcaagttagtgagggtttatccgtgggcgcacgtgggggtgttccatcgtgtttgtctgatgccttttggtactgtaggtatgtcttggttgtggtttggtgacgtcgtgtcttgtcgcgaccatcgttggccgacaacgttggtccgggttccttcctcgaggattcattcggtgaggactttgtcgtttgcgccgcctcgcagacttgctcggcggggacttggtcgtttgccccgcctcgcatacttgctcggtcgatatttggtcattctcc

SEQ ID NO: 22899 - DNA, 1019 bp, Zea Mays
atcttctctaaactcctcaagaccgacaaaaataaaacctatattatacctttcccttcatctgatccacagccaatgcgtatgatacttcaacatttcctgttctatgtggtccaaccctgcattcttatttctccaagaatcgttagtccacaagcagttgtcattaattaccaaaacattaccaaaggggcctagatgattcacacctgccgagtaagaccgcgaggcgaagcagccgactaggtccccgtcgagcaagtctgtgaagcagaacgaccacccaggtcccaaccaagatagagaagcaaggtggaaaccaagtcaaacgtcgcaaagtccacgccaactaagacaagacatgacatcccgggtcatggcgagtcatcggaaaggtaggccgcgcgcacgcgcgagtgtccgctatcgtcatgacagcacctccccaagtacgttcctcaaacgcgctcccatagcctcaagggaccgaacaaccctatacataaagtacctcagcatcggagcttctacattgacccgaatatcgggtagtgcgcaatagatacaccataccgagtgtacgcctacacacgccaacgagtgacgcaggcttgtgacgactgacaaggctgcacagtgcatggctactctatacgactgacctacaggacccccacgcactaccacaagaatgtcattagaagatcgcacggacaggacaacacaccatgatgggagtacggctacgcacgaccccgcgaacaacatcagagaaaacacgctacccaaaggccatcgaccgagctccacagcaggatacatgtcctcactataaaatccagcccttgaactataaaagggaatgacccactctttttgaacacacaagcacaccggttgtaacacgtcccagagcaatactacgatcaacactacattgggctaaggcgtaagcctgaaccagtataacccaccgtctcaaatccattgcttgagtcctaacgactcatcattcggag

SEQ ID NO: 22900 - DNA, 434 bp, Zea Mays
caggcgggtcccacctggtcgtgactaatccgttgggcgcaccatctcctccatgggatcgcccacaatcgtgcgcgtgataatggcggacgccttgcggggggttgttgtggggacacagggaggataaagccggaccctgtgaatgccttcccctttgttccccaccgaacgaccttggtttagctcctgcgccacaattcgccgcacgacgccgtcgtgacgaaggaagcgttgtaggtgcgctatcgtcattcctctgtaccatcatagctcggaagccacgggtgaccttgacaaacttgcgcctgggggtaatcgtgagtggggagccgaggacctcacgtaattgtcgccggactccgactctcacggccgagccgccgcgcagcgagggcgagcttccttggagcctaatcgccggtaaaatcatc

SEQ ID NO: 22901 - DNA, 770 bp, Zea Mays
tagtagggtatagtggtcaccccgagttaagtaagcgtgagcatgtcgcaccgccttaagccattgccgacttaagccgattgctccgttagtagggtatagtggtcaccccgagttaagtaagtatgcagattgacagtgaacaatttgagtgcctttgaagtcttttcattgataatatatttcctagtttacagaatacattgtcgtctcaatagcttttgagatatagctaggggtaaaacttcctgagatgttctatgttccatgagttcccaatttctgtgccatccatttgagtgagacgatatgatccaggccgagtgacttctgctactatgaatggtccttcccatagtggtgacagtttatgccgcccttctcctgtaagaattcaccggaggacgaggtctcccactgcgaaggatcgatgtcgtatggccttgtcatgataacgcctcagagtttgctgataccgtgctgactgaatcactgtgttcaatcgttcttcttctagtatatcaatatcctctagtctggtagcctcagcttctgctatgttttcaaagatcaaccttggtgccccaaacttgagatcagcgggtagcactgcctccgaaccatagaccataaagaaaggtgtgttcccatgcagagctcgactaggttgagttctcaggctccaaacaacatatggcagctctctgatccactttcctgcgaacttttcattcttgtcgaagactttctttctgagcgcctccagtatc

SEQ ID NO: 22902 - DNA, 783 bp, Zea Mays
gccaggtggagctgatggagctcgatagggtggcggccgcaccggccaaggccactccgcgcacgctactacctcccccagctccgcgcccgacgctctaggctcccacacccccggctttaccggcaccacttctggcgctcctagctctgccggccaggggcgggggttagctggagaagtgcctctctctctagaggagcaggcagaacggcggcgcctcggcttgtgctacaattgcaatgagccctattcctgggggtcacattcgtgtgtgtcgctgtatcttctacataggcggcatggagatcatggacgaaggggacgtggtcggcgaggcgaatctagatgccctggtcttctccctatgggcgtcactggtatgccaatctgtgacatgatgtaggtccgcgtgtctgtgggtgctgcctccttcaccgctctccttgacatcggctctactcataacttcatcaccgaggacgccgcgcgtcacaccagcctggaggtccacctcaacccgcgcctaactgccatagtggtgaatggcgagcgcatctcgtgccctagtgtgctacgtcaggcacccatctccatcgctggggaggacttccacgtcgacctctacatcatgccactcgcttgatataatctggttctcggcacacagtggatggtcaccctcgggcccatagtctgggacttcacctcccggactttggtgttcacccgccaggacagggaggtccgctggtcagacgtcgccgcgtgccaggagccact

SEQ ID NO: 22903 - DNA, 597 bp, Zea Mays
agaactttgaaatataccttcattagctgacccccaacgctattgttagacttaacgtcttcatatgggctcttcgaagccaaggaatggatgctaacgccgaagctttttatcgagtgcacgagctacactactagacgaaggctagaacaaatggccttcataagaactttggctgttataactttgcatatcggaaggatacgaaggccccgtttattggctatcgcaccaagtggccaaccgggtggactaatgaatggttttatatgaaagttgatgagaagaagagggaaaaactcatgagtatggtaatgagtcccttgaagctgaacttcggcatgactcgacccttgtgcaacatgcagttaggggccccttgccaatttggccgaagtagaatttagagtggtggctgggcacatcaatactagggacttagtgcaagagtacctatcaaacagaacatatccaacttctagtggttggggaataccgaagagaaaagaagtgggaaagaagcatgaacttgtacggctcccctaccgctttaagtttgagaaacaattcaaaaaaccttgcaaagaatggctggag

SEQ ID NO: 22904 - DNA, 1359 bp, Zea Mays
cctctctctctcatctcatctggttgggtggagtggagataagctagagaggtgagctctgtgggatcggagcgagagcaataaatagaaattaaggtcggggccgcctccatggcggcgtttgcaggcgccctcgaattcctcccctgaacccattcgatccgccccctagctctctctcttcctcctccgccctctttatatagcggtagcctcccacctctcatctcctcatcaccccccaaaaagcagcttgcttgcttgcttgcgttctctaccacgacttatgctcgatcgtaaactaacctcagcaccgtcctccagcagatactacttgtgtagcgggcgagggtgaggtgaggtgaggaagaaagagagccctcgccgcgtgcttaggccccccccaagacgccgagagaggaaagggattaggcagcaagaggaggcgctccgctctcggattagaggcgagcttcctatttccagcaaaggcaaggtgagtagcactggtagcagtactgatgagtgagtgatggtgcggtggagcactgcagcggcaggtttatctttctcctctcttgctcactcgcacatgcatatcccactcacaccagcagcagcgagctgaggctaggctagccatcctcatcctcaactcctacgcgcttagcttgcttgcacaaacctctctctatgtctaagagcttctcgctgcagatctaccgccgatccatccgctaccgagctatgccaatctatatatgcagctcatgcatctaacctactgcatgtcacacagccccagccccatgcccgctgtaccgtgccgccgtgttgttgcttttgcttctctgcctgcgcgcaccttctgcttctgcgccagcttttttcttactcccaagatctctatttgtttttttttccgttgttgctgtaggagaggatcagctagctagctgctaggaggccggagggagagaaagatcggaggaggagctgcaaaggctagcttttctttggtgcggctggtgctggtggtgaactggtctcggtgctcggtggtgcgtggtgtggtgcacactgcacactctccctctcgcgttcgtcttgatggtgggtggtggtggcagctgcctcgcatggctgggttctctctgaggggcggcggaggcgggaggggcggtgaccggggcggcgatcacccgatcggcgccgacagcctgttcctgtacgcgcgaggggcggccgccgcggctgccgacacggcggccagcggcggcggtgggggcggcgggatagggttccagctctggcacccgcaccagcaggcgacggcggcggcggtgccgcacacgtcgc

SEQ ID NO: 22905 - DNA, 503 bp, Zea Mays
ttacggaaagggtgcacggatgataaagctacagtcaattcgagaaaaggaaacatatataaaacttagaaacacaaacctgaaattgacagatgaacagccacacgagtagttctctattttgtaatccaagtttgtttgtgtttcagagaggtgtggtgttcagatttgagcgcttagagaggtgtcttccatctcatactcgagcatcgcaagatcagggcggggctggtgcgtagaatgggaagaatgagatggtgggacggtcatgcacttgcgatgggatgcgggttgatggtggtcctatgcgctggatggtgaagaggggattgggttgcaattccttctgtggcagcaagccgtggattgcgtttggggcgcggaggatatgggcggggcatccgcggtgcatgggaagaacgattgggcgatgggtggtcctgcgcgtcgtcgacaataggattcctgcgtgctggattgctgcggtcgtggatagtggcgag

SEQ ID NO: 22906 - DNA, 985 bp, Zea Mays
tgatgctctacttcggtcgaaaccgaattcacgccccaaccattgattcccctaagttaattgcacaaatggtgaactaatgtggtctggccacggtgagcgcgcggatgaaccaaagatccatgcgttcccgacggttagtggacccctagtccaattggatgggtcagcaagcatcgtagacatgtgagaatgcttaaacgagggagagggagggttggactgaccggagtacggctggccgcggtgaggttgggcttcgggtggcggagaacagatttggggcgaacgtgaaattggagagctgtggggagtaatcggagctacgcgtgggttctctggacgtacaattacctagcggcactggccgaggctccaatttataggcagctttgacagtggccgggaattttaacggtgatgtatggcggtcggagataaggaagaggtctagtgtcgtggttacgtgtccccagccgtggcgagctcatcgacgatgatgggacgacagtagggaatcacggcggtgccgtggaaaggctcggacacgcggcgagcacagagatggcacgacgacggtgagcggccttatctacggcggtgagcaaaagggggaaagtattacggctgaccggggtggcttccagctcgacggtgacgacgatctttttaccacgcagcgttatccggttgccagcgaacgttaatcttaatgcggcggcgcgaatccttgcgcgggggagggtcaccggcggcaagcacgcgatgctggcatcctgatccactcgaactactataccatggcgatccccccattcagttgcctgacagcccatgtttaggtcacactttctctaaaatttgcatgtaaacttcatcaaacctctgtaccaaagttgcagagttacaaaccaactacaattcgactatagggcttgaacacatttgagtacaaaatcaaggttgaattcatactcaaagttgg

SEQ ID NO: 22907 - DNA, 414 bp, Zea Mays
ctcactagggtagcgtggactccgcccctataaatatcagaccagttgtaaccttggcctcaccattgggtgtgggttggaaccatttggagcttggtccgccgccaccaacgaatctcatgcataggaagctattcaggggccagggtggacattgggattgcgcttgggtgtgttgcgcgtgtgtgggataaccgaaccatagcatcaacccgggtgtgggaaattgctcgtcggcgcggtgtcaccgccgcggatctgatactcgtcgtggatcgactccttggttgcctccgaaccttggtatggccctttatcaaactcaccatcccctaggcatcgtgtaacagtctttaattgggttttcacgctctccatcaccaagtcaaacttcgccggcaaggttgccaccgt

SEQ ID NO: 22908 - DNA, 321 bp, Zea Mays
ccagcatgtcgctcccgcattctcatccgctccgtggcccgcccgatccgcgcgtgcagggtccccgctagcgtcttgtccaccccaaccgggtcgccttgggtgttgtcaacgattttgagttgctttgtttgtggacttagtgcggagtaccctggatccgtcgcgttatttttgtagactccctgatcttggtgacagactgacagtagtactccagttctctggtagttgacgaatgttgcttcgcaaccaaccagaagtagagattctgctggtattggcggggcattgcctgatagtttgttaactgtcagggtg

SEQ ID NO: 22909 - DNA, 485 bp, Zea Mays
ccatctcttgatgggtccatcaaggttagtcaacaaagatctaggaacccaagagtcctttgtgttagcactaggtaaactcattacctttctagcacaagttgcaattttgggttgcctagttacatgagaattaattgacaagctaggagtgggattgttaccaatgggacaatccttgcactgatgtcccttctttcggcatatgtagcataggcgatcctcaaatcttgaagatttcttctttccttgtttcttgcttgctacatggttagttaatgtttccttttctaaccttatgcctttttgtttcaaatagggacaagacttaactaagtgtcccttctttgaacatttaaaacaaagtttatcatccttgttactaatcaagtcatttttaatatagggacatgacctaatcgagtgtcccttttcaaagcaatcactacacttcttacttctcttagtatgaagtgtgacttgat

SEQ ID NO: 22910 - DNA, 480 bp, Zea Mays
ccccgctcgcccacttcccctgctcatttgcgccctcagccgagcagtctcgcccctctctcgccctgcacacgcaccagactactccaccgccgctcaccgaagtttgacgcccgttctgcgaccatcattgagccctcgtcgcgcccgttccctcggtaagctctgtcgcatcaccctcagctcgggacaccctttggttcgtcctttcgccctctggttcgtcctgtcctcgctcaccagagcacttcttgcgcagccggagagccaccgttgttgatctgcgtcctcgtctcaccccaacctccgttcgtgcgttccagggacttccctcaaggtaaccgtcctagccccacccttactttcccctgtctcgcatttacctgcccacgattgctcgccggagtattccccggtccgccgaggactccccttcgccgtctagtcgcctcagccccgttcacacaaaaccgaccccgc

SEQ ID NO: 22911 - DNA, 498 bp, Zea Mays
tgccacctcaaattgtggacacgccacataacaatgtgaacataggatggtaaggggcaaactcggcaacccttcgatatccccgggagctacataaaaccaaaagtcccaccaattgccccacttattcctagcatagggaacaatcttgacaacttcagccgaggtcttcccagtccttggcgtgaaagtgcatgatccaaattgggctaccttatcacctatttttaacaaagacttccacatatggctgcccgccgtatgaggagatggcctagacgtgcttcgcaagcgccatcactgcatttggtgtcaactgatgaacttgtacctcgaacttccacaaaacctctactacaaaccgatgcgtcgggaggcgaagaccagtagcgaaaaaggcttcaaaaacaatcaatttcccctctggctcagggacttcttctgcccctggagcctgtttgacaccgttcccaaaataacctagccgctacatctcta

SEQ ID NO: 22912 - DNA, 354 bp, Zea Mays
gagaaaatgggcaaaggaagatgcacaagcattaactgagggtaaatctattccatttcaagacatgccagatggtcgtcataaggattgggcaagggtgaggaatccttctggtgacgtgaacataacagagtcgcatccaatcataaagaaaattgtaatgttcctctccacacataacttgtccatttaattttcttaccctatttgattcacacataaaactgttttttcaggtagatgtaaatgaaaagtcagtagctagtacctttacaccattttataatatggacatacttgcaacagcaatagggagtaatcatccagggaggacaacaggggtgagtgcttatg

SEQ ID NO: 22913 - DNA, 313 bp, Zea Mays
cgggtgaccgcgtcttcgaccttgtcaaggtagaatgcgccatactgagcagtcggtcgacgtcgtctcgccattgcttcatggctcctggtgaagccgtggagcttggagggtgtcgcaacaactccctggctgctgacaacgcccccggagacgcccttgatggagtccgggacgtttgcgctaccgtgtgctgccgtgcggcgtgcacagcaggagtgactggtgctgggcgactaggaacctgcggtgtggaggaagcttctccctccaccgcaaagtcaaccgaggtctcggcgcggtgttcaatgat

SEQ ID NO: 22914 - DNA, 687 bp, Zea Mays
cgagtgtctccacacctgtgagtagctcgccgcttcgccaacctttcagtaactggcgtgcgtaggtctgcccgtgtcctgtggctcgctcaaagcccttttttccgtgctgctgtgtcgtgaaacgtggaaggtggtcacgcctttccttccgcgctccggatttgaaattttgcactgatttgtctggtttttgaggtgatgcgcgaaaggtggcatcttcattcctccaagcgtcgaggatttctcaaaaaaaatacgagggtaaaggtgtgcacttttagtgtgcgaaattcacgtaatctgtaaattcgtcgcggagtgggtacgctataattttccgggaatggaaggcttggttcacttttgcaatgttttcttgagggatttgaggcgatgggcgccgtcgattgcttgaggggtgggtgctgcgtgtgtacgccttgatccaatagaaaatcacatggaacctgttttttaccgggagtgttacggccggccctatgctatgttatgttatttatgtagtggtgtttggttcctacctcctaaactagtcatttttagtcactaaaatatcaaacggggtgactgaaataggtctttcaaatagaatttctaatgactaaagtttagtctataaaatttaggagggtggctaaagaaaccaaacatcccttattgtgt

SEQ ID NO: 22915 - DNA, 540 bp, Zea Mays
gacttggattactttgtggctttggatgtggctgtggcggaggcttctccgcgtgttacggatgctgaagttttgcctggtccgagtgctgggcgtaggcggcgaagagcggtggcgaagcgtagagtgagtgaagtggatggtggtcggcttcgtgtgggcagggctggcaagcgggaattgttgtcctcgccggctggggcgagcatgggtgagggggagttgcgaagtcttttttagggtgaggagctgaggataatgctgtttaactatagggagatgggaatcattctgaaggttgaaccaatgtaaggtgtgatgccctcgctgtacgtgtgtaactatagtttgtatgatgaggttgtgtgacttcgcgcactcggctatgttcataggggcgttgcgcacttggtctagcacgtttaatatgtcggtccagctgcgcctgtagtcggtctttgcgtggacagtttctcgatgtagacttttgcacggatgtaatgtgccttcgattttgcgcactcgttgtgctagtctggc

SEQ ID NO: 22916 - DNA, 334 bp, Zea Mays
ctcgcgcatccccttcgcaggtatgaggggaggtgagttgtaccatgctttccttgatgggatagcaatgatgctcgatgagttacaaacgggtcatccgagtgaggccctggctcctttagcaggatccagcatggggtccgctgggaccgtcctcatacacccaggcatcgagtcatatagtcatcgatctcgttcgatcgagaccgatgactcgctacctatcttcgtgataaaccatgagtcagactctactaggactcaaacatgagttggtgatgcccttaacgcttcacgcatcagggtactagccactagtgtgcctatctttagc

SEQ ID NO: 22917 - DNA, 573 bp, Zea Mays
gcggaggcttctccgcatgttacggatgctgaagttttgcctggtccgagtgctgggcgtaggcggcgaagggcggtggcgaagcgtagagtgagtgagatggatggtggtcggcttcgtgtgggcagggctggcaagcgggaattgttgtcctcgccggttggggcgagtgtaggtgagggggagttgtgaagtctttttgagggtgaggagctgaggataatgctgtttaactatagggagatgggtatcatcccgaaggttgaaccaatataaggtgtgatgccctcgctgtgcgtatataactataatttgtatgatgaggctgtgtgctttcgctgatccggccatgttcataggggcgttgtgcacttggtctagcacgtttattatgtcagtccggctacacatgtagtcggtctttgcgcggatagtttttcgacgaagacttttgcacggatgtaatgtgccttcgattttgcgcactcgttgtgctagtccggctgcacctttaggcgccttttgcacggatagtcttttgaggaagacttcgattttacgcacttgttgtgc

SEQ ID NO: 22918 - DNA, 510 bp, Zea Mays
ttaccatatgggccctatccagaggaggtctccaaggatgccgatgatgcagctggtggcaagaaaaggcgccgaggtaagagaaggttgctgccccaccatttaagaaaaagaagaagaggcgggttgaagttagcctagctggcagcacgggaggtgaagggagtggtgtggcacaggacgcaaaggcatcgactagctttgctgaaggtccgactgagacatgcgcggaaccagtggaggttatgactttgcctgctctttgggaagcctcaacgtggatgttgatgatgacaggggtgagtggcataggaacgttcccattactagggcctctggcaaagactactttacgtctaggatggtgcggttctttggattgtttacttatgggcgtaatattgatgttgttgtatcagctttgatggggaaggaccagagagagtcctcgaagaagaggaaggcccaaaagccccgttgcggctggtggatcatcatcgggccaatggg

SEQ ID NO: 22919 - DNA, 569 bp, Zea Mays
atgatgtcttatgtttccgtttacgaaacagtaatccacgtgtcggtccatgggccttcgtgtagatttcgcccagcagagtacgtgtatcgggcccacgaatccacccacgagcacgcagttattcagctcacctcatccgtaacgcacgcggcagccgaaccctagcattatcgtcgtctgctgcttcttctccaccgcggcggccgaaccctagagattctacccgacgtcgccttcagcgtctccaacgcacagatcgaccgtcgtcgccttcaccttctccaccgcatagaccgagacgtcgttgccttgttcttcttcaccagagagggacccggaatcgcagagatcgagccgtcgcccccttgttcttctccaccgcagagaccgagtcgcatttgatccaccgcggcggccgaaccctagagattctacccgccgtcgcgagcaccgtctccaacgcagagtccgacccgccgtcaacttcagcgtctcctacgcattgaccgagccgttgtcgccttggtcttctccactgcagagggacccgaaatcggccagtcttc

SEQ ID NO: 22920 - DNA, 787 bp, Zea Mays
aacacagttcacttcaaaattttggaagggcctccagcaagccatgggcaccaagctagatttcagcaccgcttaccacccccagtcagatggtcaaatagaaagagtcaacaagatcctcgaagatttgctaagagcctgtgtgctaacattcgacagggattgggagtccagtttgccgtacgctgaattctcgtacaacaacagccatcaggccaacatcaaaatgtcaccgttcgaagcactgtacagaagaaaatgccaaactctcctaatgtggtccaatgtaggggaaagaacactagaaggacccgactttgttaaagaagccgaagagaaagttgccttgatccgcaggaggttacttgaagctcagagtcgacagaagagttacacagacaatagacgaagggaactcagatttgagaaaggagattttgtttatctcaaggtctccccgatgcgtggggtcaaaaggttccaaatgaaaggaaagctagcaccacgtttcgttggtccctaccccgtcattgtccgaataggacccgcagcataccgtcttgagctaccagaatccatgtcagatattcacaacgtgttccatgtgtctcaactctgcaaatgcttaaaggtaccagaaaaccacatcgaggcagatgcaattcagattcaaaaggatctccggtaccgggaaaagctagtgaagattctcgattcagcagtcagaaggacccgcaactcagaagtgaaactctgtaaggttcagtggagcagagatggagaagag

SEQ ID NO: 22921 - DNA, 477 bp, Zea Mays
accccgccggagcacgtggaccgggtaaacctctgcaccatttctcaattcgttgcgcgcatggcctctacatcaccccgtggagctcctcgtgcgctttaattgaaccctaccgccgtggtttggccggagcaggagccgccaatgacctccgccgcctgcgctcgtggccagggcagctccgaccacctctgacgcctacccgcacaccgacgtgaccgccgtgacctccccgacatcactgaccaccccgccggagctctactgtcgccggcaagcctcgccgccgtaatctttgccacgggtactgtttaagccagctaggcaacacgggttagatttcggctaagtgcagggggtttcatgcaatgccagtgactcatgcaaatagtagaccgaggactgttttgagagagaaaaaggagagaaaatccagggggttcagcgcaaacctgtatttcttttccctttcgaatt

SEQ ID NO: 22922 - DNA, 495 bp, Zea Mays
ggcagactcggccatgagcacgacaccagcgcagaggcaccgtagggtaccagtctacggtggggcggcccaacggcggtgcagctcaactccggtgagcgattatgcgagcaacaaggtaggaaatgggaaattaagggcatgtggaggttagttacctcaggagacgactctggaatgcttgagcgacggtgagaacactgcgagggccctggtcgacggcggcggagacacaactgcacggtgagagtccggtgagcgtgagcagaggggaatagaggggatgggggtcaacgaaaaggtgtattgagttgttggcgaggaggcagatctcactggggcaacagacgcgataggagctcaacggcggccgcggaacggacctaagggcacggtaaacgacgatggtgctccacaggcgtgtgctgtgcgagagtggagtgtgagaggtctgcagaggggctctactaggcgcggggagtgagtgggtgggcg

SEQ ID NO: 22923 - DNA, 1020 bp, Zea Mays
gccagggagaggttcctgggttcaccagggatcctggacacgctttggtttgggtaatacgagactcgaagagcagggcggcggtgagggttggttacggcggtatttttctgagcaagcacgcgttctggtgaaaggcttcggccgcaattcgattggttgatactggggcaataagagatcacatactaactaaaacaaagagtaatttgatcattactgaccggaggggcgctggccacgatgaggttggatttcaggtgtgcttgaacagaattggggcgaatgcaaaattagagctcgtagggaattgactaggagcaatacttggtgtgggggtgcacaatgatattgcgaagctagccacgagctcaatttataggcagcttcgtcggtggcacatgaattgaagatggcgcggtggcggccggagaggaaaaaggctactggtgcaagtgaactcgtggcaaccgtcgtggcgacaattccggtgatcggcgagaagctaaaacgaagcgcggcgatgcggtggaggtactcagatacgtggcgcaaggccgtgcgacggtggttccccggcgagcttatctgctcagccgcaaaacaagagggagatggtgacggtgagtcaccggagtgacctccagcccaccgacgacaaatatctttcctctcgcgatgttatccacccacccgagcgcgaatcccaacgccggcgacacgtattgcggcggaggagtgatcgacggcggtgaagtgctctgaacccaagcaggttactgtaccatcgacaaaaccattcagttggcctgacagccaattttggagcccaattctctctcaatttctaatgacaacccatgtcaagctctgcagaaaaattgtagagcaatgtaccatataccatgttgcaatatggtgttgccactaaaagccattagatcatactcgaaattgggcttgaagttgctgttagctcactgttagcctgatttcagtcctttagcagtctgacagtcc

SEQ ID NO: 22924 - DNA, 333 bp, Zea Mays
gaggaagtcgccttagagaccggcgcacctgatgctagagttctgatgcctgctggtgatgttgagttgatcctgggtgatgctcttcagattgttctggttgatattccttcgtcgagccaccacctggcttctcatgatttggggtttccttcattcttctccaatcttcaggtactctggcttttcccgatctggctatactctaggcaaaatactgtttttgcactcatttgttttcaatatcaggctttggtcgacgagatggctggtcagctgagatcacaaggtgcctctgtcccagaaagagctctgtctctaacgcattggaat

SEQ ID NO: 22925 - DNA, 691 bp, Zea Mays
gttattcttgaagtgactggggtctccatagtgccaacagacatttgctggcggttggttgtttgcaaccgagggggcctgaaaaggaactctgactctgctggctgaaacgtgacggagtgggtccagctggtctattgaagcttggtcccttgggtggaagctcgaaggatcgagctctctggtgtcggtcttgctgctgagctcggagaacttggaatttcctcttgaggtgacttttttcttcttcttttgctctttccacttgtatggctttgttggagaggtgcgagaagctgaggaaatcttggctggcgaggatggtcttgagttctggtcttagccctttcaaaaaacaggccatcatcttggtttctgtgctgacatcgtcaggcgcgtaacgagccaactctgtgaatttgtgcacgtactcactgacagatcttccaccttgagtagttcccggaattcatcttccttgagctgaacgatcccctggggtacatggtgctcacggaaagcagtttcaaattctgcccaggtagcgtccctgacggccgtgctgaaggtatcccaccatgctagggccatcccagaaagttgatgagcagccaaatgaacatgttgattttcggggcatccgatggcttccaatttcctcttgatcgtgcgcagctagtcgtcggcatcg

SEQ ID NO: 22926 - DNA, 892 bp, Zea Mays
ttccgaaggttttttctcagcgggctctgaaggcccagcttcggtaccagcttggattactgcagcttcaatttcgaccggctttatttcagcttcggtttgcgcttttgaagcctcggcaatttttcttgaaggagtagagctcaaagtcttcactgtttctaacacatctaatacatttgctatccttctcttgggagatgcgacagaacttttttgtgccctcggcactgttacttctgatgaagggcttaagatttctagcgcttttgtttcttcaatatttggcttttcagctttatctttatcagtcttcaactcagctagctcggctgagggtaccttcagcattataaccggctcttcagtcttctgtgtgggaggaacaggttctcttggttcagcagctgaagaagcctccccgccaaactcaggcaccacggccggttcaatataacgtggccagtgggtaagtaccttcatctttttgcttgtagcctttggcacaggttcggccgaggcggccacaatagtagctttccttttcttcccttgcccccgcagcgggtaatggtagtcgagatagacgaagccaatagcgtcaaaaactctgttcaatctcttttttcctcgatttccgaaggctgtggacaatgcattgtcttctaccttggaatatgatccaagcagttcatcacttgtcactttgatgcattttaaccggtcatcgtttggttcatcgaatttatccccatatctaaaggtatacttcagccggaccagctcaccttcgctggattcggcgacagtttccttcggcatttcctagttctctacaagcggccatactctgaaggctatatgatcttggattaaatctcttgtaccaatg

SEQ ID NO: 22927 - DNA, 469 bp, Zea Mays
agaagaccctacgtgaacatccatggaagtgtgagagggagaaccaactcggacaccctcgggggctgggtcatagctcgcactacccatccgagccggatcatctccggcaacaccctcgggggctgggtaagcgttagcgccatatttgagggccgagccttccgtaacagccacctctaaggctgaaggaccttcaaccacttccatgggagcagagcaatccagaccagcttcctgatcatttagaccgcactccaaggtcgatgaggcacgggacgccgctcgggatgactccaacccggcatcaggcacatcagcgcaaacttccatcattccaccatctgccagctcggacaacagattttctgggaccatgtcttcaagagtctgatcaaagttcgctagagacaattcttgcaaaccaatgagggcagacaaagctggagaaggaacaccactactttcc

SEQ ID NO: 22928 - DNA, 887 bp, Zea Mays
acgcgcaggccgtggatatataagcatgcgaccgggggtatcgccatggttggtgtggtaagctcgtgaagatagcagcagtaagccagttgcctcgtgaaactcgctctgtgacggggagcatcgtgtgacctgtgcgctcgctggcggcagaccagggttgctggcggaggccgtttgatttcttgccggagccgtttgatcagggccgcatccgccattaccgtcgctgggggggggcttcgtcacggaaaactccggtaagacctcgcctctgtgcttcaccgctctccccaccgcgagtagatcttagcaggatagaatcttggggacctggtgccttggttgggcgcttcatcggtgtagcatcgccatggcggtgagcgagagaaaccgagagaatgctaccgtgggcagggcctcatcggtgtgggccattccaccgacagggcagctgcggagccatagaactcgtcgtcaaccgtggcgtgccagggaagcgaatgcagcatcatcggaattgtccccaccgtgggatgccggcggcgccgccctgattcggtcaacaggggtgtcgcgggttagggacgacgttgtgaccgtccgatttatgtcgtacggtggagattagatagggagataacttttcggtggattggatctggaccatccatccagatcggacgggtgaaaagcaatcgcatgactttaaaatcgggggcgtcgatttgtgatcggacgatctagagcgcttgctggtttgtaatggttaagatttaatctgggccatccgcgcctgatcgggcggccaggatcaaaccgtaccccttcgcgggtcacttttgttaaagagccctcggactttagtgaaatcaacccgccgtcct

SEQ ID NO: 22929 - DNA, 445 bp, Zea Mays
tataaaacttagaaacacaaacctgaaatcgctagatgaacaaccacacgagtagttctctattttgtaaaccaagtctgcttgtgtttcagagacgtgtggtgttcagatttgagcactcagggaggtgtttccatcttatactcgagcatcacaagatctaggcgggtctggcgtgtagaatgggaagtactcgagcatcacaagatatgggtggggctgacgcgtagaatgggaagaatgagatggcgggggtcatgcacttgcgatgggatgtgggccgatggtggtcttgtgcgctggatggcgacgagggaattgggttgattccttccatggcggcgaggcgtggattgcgtttggggcgtgggggatatgggcggggcatccgcggtgcatgggaagaacgattgggcggggtggtcctgcgcgtcgtcgcgatggg

SEQ ID NO: 22930 - DNA, 325 bp, Zea Mays
ctctaaagtaccgacgatgccttcagtcgctcggcagctatctctaaagcgctgatgatatcttcagtcgctcggcagctatctctaaagcaccgacgatatcttcagttgctcgacggctatctctaaagcgctgatgatatcctcaatcgctcggcggttatctctaaaaaacgctgacgttgttacaggtcactcggttgtcgcatctgagagcgaagacgtggtcaacagttattctgatgcgggcacggtttcatcatcactcggactctaattcaaacacgtaaatatcgacagtagtaagctcggccatcacccctga

SEQ ID NO: 22931 - DNA, 276 bp, Zea Mays
atctacacatcgtacttcagcaactgcacgatcatcgcctatatgctaagctgtccaaatgtgatttctggctgaaggaaataaaatttttggggcacaccatttctcaggagggggtatcagttgatcctgagaatgtacaagaagtgatggattggaaacctcctaccactgtacggcagattcggagttttctgggattggcagggtattatcggcgatttattctggatttctcaagtattgccaagccaatgactgaattgttgaagaaag

SEQ ID NO: 22932 - DNA, 293 bp, Zea Mays
gacaatgagttatgcgcttgcgtccttgtgcagctatggatttggtagatgggagctgagaaggcgccatggcgattcatatgggctaataggtaaaggtattatctaacactacactgatgtgaccagggtccgatcccatgagggcagcaagggcttgcttcaatctatacaagcacgaagagcagcaaaccctaatagccaaaaatatgagatttgagttaaacaaaatgcggtacaggaggatggctgcacctttagaaaattgagaggaaaggattgtcaccggggca

SEQ ID NO: 22933 - DNA, 458 bp, Zea Mays
ggggaatgaaaacaaaaggaaatatagacttgctaaatggaacattctgtgtcaacctcaggatcaagggggccttggtattttggatctgaatatgatgaatatggcccttcttagtaaatggctgtacaagctactcacctcagatggaatgtggcaacaattactacgtaataaatatgttggctcaaaacctttggctcatgtgcagtggaaaattggtgactcccatttctggtcaggcttaatgaaagtaaagctagccttcctccgttttggctcattcctcataaaggatggctctcaagtgaggttctgggaggatgcctggttggatgggtcctctttaaaagaccaatatccagccctgtataacattgcgaggaaaaaaattcatttcaatatcagaagccttgagcgtttcgcctccgaacttttcctggcggagacagttattt

SEQ ID NO: 22934 - DNA, 683 bp, Zea Mays
aagaaggaccacgactaccagaagccacagtccaccactctagtggtcgcagcagcgactggaggccagggcgaccgcaacaaacgcccgcgaccgcagaagggtagcaacggttcatgccctgtgcacctgcatggtcgccacagcgccacaaagtgtcgcgagatcatcgacctcgcaaaacgtgtcagcgagcagcgcgagcagtcctccaaagatggctccccgcctcgccgccggtccggcaaggaaaaggtcgatgacggcgaggtggccgtggctgaacgggacctcgggtatcagtcgcctgaggggggcctgaaggatatcttcgccggagctcctaatccggtgaatacaactagacggacctcgggggaactccgtgtcccccggtctatgaagctgaaagacgccttcctccggaggcccttctggacctcccacgggtccagctgcagtcaggtacatgcagaagtgatcacagctagagacaagggttcccgtgtaaaatgcagataggaaccctgggtcggggcttagccccgcggcaagtgccataccaagaggtgctcagcaactctcccccagctgggaaggaccctccaaggtaacgggagtgcaccgacccaggggcaaccatctagctacgactggaggagtaccttacctcgatgccaaat

SEQ ID NO: 22935 - DNA, 640 bp, Zea Mays
ggaaaatgtgtccatctccaccatgtcattggtaccagttgtgccatcatcgggtggagccaaccaccttagtgttttgcactcatcatcattgtggtcaatattgttgctagatgcatcggatgagttgcacgtggtagatcttactgtacattctttttagtttgccccgtcactgattgggattgagtcgtccactatacattcatatcacgtgtactacttcaatataagtaatattacactagtatcaagaggacgccttccctcatctcttcttggtcatctcatctacatgtctacgttatcgattcatcatcacaaacatatatcagagcgcctttccttagcacatgtgacatccattatcgagtaccaagcgcatcttctccgagtaatagagctattgtcgtgtttcctgctcctcattaagcctcaacactgcctccaagtgttcgctttctcattgcatctatatcatcattccctatgcattgatgattatgttgcataaactttattgtaccatccatctgcataatatcttggtcctactaatcaggtcttcatcgccactttagagcgctacctatgagcctgacgctgacaccgcccctatgtgtgaggtcaccactgctca

SEQ ID NO: 22936 - DNA, 476 bp, Zea Mays
aatgatggctctccactatcaactttgctctcaaaatttcagtcaacaactgattcaaggatatcgcatggccagtgcagtaaggcagaagctccaaaagactccagacgcttaccaatggatggggctgacaagaaccgggaattgtcatcatccaacaaaaattcattgtcagccttctcaggaaagacagtcccactcccacctagaatctgcatacatgaatgtgcaaatgtgactggggcatcacacgcacataatgcagaaaatgacaaggtggatatgaacagtgctgctgggcttttagaccagggtttattatcctgtgtcacctgtgggattttgagtttttcatgtgtggcagtgatcaaaccaagggagtgtgcagcaaaatggttgatggctgctgattctagtttgatcaacgatcggcttgctagttctggagaacatgatatagatgcattacaaggtgg

SEQ ID NO: 22937 - DNA, 458 bp, Zea Mays
gaaacttgagcacgacacgaaagacgagaacgaggggcaggcatcggtatgtttctcatctttcctgccctgcaccacatttgtcaaagaagcagacttacattggtgcatggttctgcaccaggagcgcgatgaggacgacttggctcttttgagttcaatatccaaatgcatggaggatcacaagctatctccctcagaattcactacctttgctgccaagattgcgctgctggaagagcgtgttgggaaggcaagacgacaagcctgtagtacaggagctaagcggaagagaccagaggagtgtgtcgagtagaatgctccctgaagcgaagttcagtttcactgtcacgtagaattttcctcacaaaatagttgtaactctccagattgtatgcagactaaccttcacatgttccagtcttacagacatgtactacctctctcgaatatttgtc

SEQ ID NO: 22938 - DNA, 520 bp, Zea Mays
gttcgcatagcaacaagaacattaatttcagtacgagcaacattcagcaatcaacatacaaacaccatgacagcaacataattgacctcttacacgttggtggatacacttaaatgaccagtacacgatgacgaatatgaaaaccatacaagattattcatggtgtatacacgttggatcagttcaccattttaggcgattcggagtacacagtaaaccctatttgtgcaagttggccatgaacaattaaatggatctatgtaaacaactgaagtacaagtaaaccctagggttaatcgaaatcaggttgatttgggacacggattgaatcggagatgtagaacatggagcaggggacacgtaccttggaccttgaagctcaaatgacgcagatcgggtgagcgtagatctctcggcgaatcgacgaactcccgttgacctcctcccagcagacgcagcaccggcggatagagacgaccggcggcggcgccttcgcacggatcggcggggtggccgctcc

SEQ ID NO: 22939 - DNA, 573 bp, Zea Mays
attatccagcgcccatcttgtctcacttcagccttcaaaggccgagggtggcgattgaaagtgatgccaaagcgtgtcaaaaggctttcaacaatgtctgtgctttcattgacacaagagacataatccaagagcacatagcctacagagtgtggccacatgtggatagctgggagatatcgaaggagactgttgctggatccagcaaagctggattagttcgattgaaatataccttcagatacagagagaagttcgacgaaccaaataatgactggttgaaatgcattgaggctactagtgacgagttgcttgggacatataccagggctgaagatgatgctttgtcctcagcctttgggggtcggggcaagaaaagattgaacagggtttttgatgcaattgtctttatataccctgattactgctaccccttgcgaaggcaaggaaaaaagagaaaaactgccgcttcggccaccactgttgtgccgaagggcaagaaaataaaggttttgacccaccggccacgatatattgaaacagccgtagtgcctgaatttggtgaagggacct

SEQ ID NO: 22940 - DNA, 380 bp, Zea Mays
gtctaccctccgtctaagtctacccctccatcaatctcacctcgcgtcgtctcgtcacgcaatgctcgtgcgtacaacctcctccccgccctcgccatattgcgcagacgcaaccgcctcacatgctcctctcgctgacacctgaggcccctgagtcaaatccgtttttcctagattgttatttgttttacacgcacgcatctattcagaatcaattgcggccacctcgttttgcctcgcctcgtcgtgcagcgcccagcgtgttgcgcgcgcagctgcctcgccacaccccacctctaattatatacgcaaacgttccttcttctattcccctatcgccaaaactccttccctctacacagatacgaacttctcctctg

SEQ ID NO: 22941 - DNA, 320 bp, Zea Mays
agttgatccaaatctcaaggaactatttcaagtttcaacccaaatgaaataaaaccaagcaaaatctccaatgaaccaagtaagatatctaaacatctcatcttcaactaagagctattcacaatactatttgttgtaccagatataaatagacatcctaagttcagttgagtctgaaatgagctataaacatatatatgcacatttccattcctccggttactgcaggaaacaaagcgacatcctttgcggatacggtagaaaacccaagtgattgtgttgtacattcaaactactagtactgtcttgcatattttttc

SEQ ID NO: 22942 - DNA, 728 bp, Zea Mays
cacggcatcggctagtttcactcgaacccacacagcatagtcgcccgctcctctgctctcacgaattcgaacccaccaaaccctcgctcactcagaccgcctgccctccgccgccgccatttgcgccgaccgccgtcatcagggcaaggatcgcggaagcgagggtgattccggggttttgcggagggtttaagcccggaccgctctgttcgcgcatcgaggggaggaaaggatgagctggaagaggcagaagcaggataaggacgagatgaccgaggaatgctgcttcatttgcaaggacagcggccacgacctccgcgtatgtgactctaggtaagtcttcatcgtcctgtatacgtgtgactccacgaccccgatagctgtgtgagtgtgggtgggtcggttctgtgtctatcggttggctctttgggcgcgaaaaagactagaattcatcgcgattgctctttaaccggttgcgtgatttcgtgctgctggcttgttccagcgcatttggatggctgtgcgcaatgcagctaggtagatgttggtgcagcgattctgcgtggcgaatccacctgcttatacctctactggcttgggaaacgtcgcctggttcatcttattttttagtccaattgttgccagcagctttgcagctaattttgcgtcctggtcctttccaggaactgccccaaggcttaccatccacgctgtttccaaaacaaaga

SEQ ID NO: 22943 - DNA, 707 bp, Zea Mays
catgtggtgaccctcttcgaattctggtggtcttctccggttatcagcgtagctcttctgctgagtctgtgctatcctcatgttctcccggatcatacgcacttgttcttctacctcttgaataatttcaggcccaaagaactgtctttcactagtctgatcccaatatagagggattctacactttctgccatataaagcttcaaatggagacatcttcagactggcctgataactattattgtaagagaactctacatatggtagattcttgtcccaactgcctccatgcttaagggcacaagctcttaacatatcctcaagtacctggttagttctcttagtctggccatcagttcgggggtgataggccaagctgaagttcaactttgtatccatgttctcatgaagactcttccaaaatcttgaggtaaactgatatcctcgatcagaaataatcttcttaggtactccatgtaagcacacaattctagccatatataatgggtaaagcgaggcaacctggcaatgaagtccatactaatttcttcccacttccactcgggcacttttaacgggtgtagcagtctagctggcctctgatgtttagatttgtaacactcaaaatcttaacttgagacttaagaaaatcctttagaaaaaaataataaataaagtcatcacaataagttcccttgataaatgat

SEQ ID NO: 22944 - DNA, 463 bp, Zea Mays
gccgcagacatatgcccccctgccagattggtcggccttggaggccgagtagtccggcaatcttgttgggtctgtgcctggtggccggattgagttgtgctcaatcggtcttgtactggtggcgctaacctatcaaaaatagatgtttggggtgccccacaggcggggtactgttgcatcccaaatggatatggtggcatgccccacatttgatttgggacatatggtggaggtaggtatgtgtatggatatggcatggacggataagggggtggaggtgtccatgtcggtatgttaggtctcaattgtacagtatgacctttcatttcttccgattggtggggtgatccaatcggcctgacctgacgttgctcatgaatgggtgagcggggtcgctttgctggccggtcactggggccggccttctttttcacgtatttagacaacaattgatcaaaagtcg

SEQ ID NO: 22945 - DNA, 288 bp, Zea Mays
tcagagactaatgcccttcaaatgacaatgaatggggttctgatggtacagtgccacagaaagatctcaggattcagtccccctcgccgcctgtaaccttgctcccagattcgcatcggtcgttgtgattcgtgcttggcacgtagtggatattcacggggaggtaaaaagatctcacggggacgcagattgggtcgcggcagaagcttatcaccgcacctgtagccgtgcgacatggccggaccaccggtgtcaccgtggaaactccggtgacctcggttatgccac

SEQ ID NO: 22946 - DNA, 379 bp, Zea Mays
tagggtgaccactatgccctactaacagagcaatcagcttaagtcggcaaagacttaagacggtgtgacatgctcacgcttacttaatccagggtgaccactatgccctactaacggagcaatcggcttaagtcggcaatgacttaagacggtgtgacatgctcacgcttacttaacccagggtgaccactatgccctactaacggagcaatcggcttaagtcggcaatgacttaagatggtgtgacatgctcacgcttacttaatccagggtgaccactataccctactaacggagcaattggcttaagtcggcaatgacttaagacggtgtgacatgctcacgcttacttaatccagggtgaccactataccctacc

SEQ ID NO: 22947 - DNA, 598 bp, Zea Mays
agcctcgaaacctgcacttgttgtacctacatgcccattgagagctcctatgaaaagttccttactaataggtataactccaaccatggcatctaagtcttctagaaaagtctaaaagcactcatcgtggcctacttgcagggaatgtgggatatttacattgaagggcagatcattcatgacaagcttgactaacataatcctatctccttgtcttctcatatacaccacatcgttcttgaggtccttatcaatcaaaactccttgttcgcttctatttgcagctgtcctcgtgtaccaaagcttgaaggtgacattgtctgcctcctagttgtcgcctcaactaattgccttaactgtaagcgaccctacattccaactacctaaacggatctaggttcgactagcttccttacccttcgcacaggtcgatgatgtgatgacccttgcacatttttcactaacccaggcttctcctttactttaggacatacatagataaatgcttttgctttgctaaagctttacccttgcttagatctgattatgcttgttttcaccatgtttcatctttcctggtaaacactaatattgcgcc

SEQ ID NO: 22948 - DNA, 283 bp, Zea Mays
catgcgcacaggactgccgacgcatgatccagatcgcacatgccctgctcttgcctctgctttcttcaacatctcgcccagctcatcagatcggacacgagatgatcccatcacaacctattgccgagattcgatccaaagaatcacggacacggattccgcgcgcgtctaggcccatcttttctcggactcgacttgcttgtcgtcaccgctcacgcgtgactccgtgggctcggcccagcgcaaaccgaaaccttcttccccccgggtcgttccccttgcc

SEQ ID NO: 22949 - DNA, 561 bp, Zea Mays
ccggactcggtcctgggtataagaaccatagcaccatcgtgtactcgccgagaggattggtagccaccgccaccatttttgagcgcaggagggagaaccgggggtcaccgcgtcggtgccgaacggggaagtgaggagggcccctagctgacaccgtaatcaatcccgtttactcctcgtcgtcgcgtcctcgggtcgtgccaggagtttcgtcgggtctcgtcgaggtgttccctggcctcactgggggaagtcgtcgtgggcaaggattaggtgccaccggtgtcactgctggggatcttcatctgcgcaggcgctcgggtcgcgacggtcgcctaggtgcttcaccattccgtgggggtgaatattcgtggtctccactggccgaatcggtgggcgaggggaagggaatttctcatcggcacgccactgttccgccgtatcgcgtcgacaacctcttcctcgtcaccaccgacggtgagaacgcctctgtatgactcaccttcatctctgctccgtctaccgccccttggatttggggattcacgctcggatcggcgg

SEQ ID NO: 22950 - DNA, 655 bp, Zea Mays
tggaagggggctttctttttggatggctgaggggctctaggagagggatcactagagatgtcgagaagggtgtcaagtgtgttcctgtgatggttaggtgttggaagccacacttgtttctgaggaggggctctcaatggctcctcaatcacaccgtctctcataggggtgatagacttaggtggagtgattctaataagcttgggagtgggtgaaggtttctctgaaggtgtcaaaccactgcactcaccaaccttcgcaaagcgagcaacactcccatccttagtagcaaagcctaaccctagtccgccagttccctcatgaactgactgaccatcatgcccaactagggctcactgcacgacacccaactcaagacagatcgaatgcatgtgttttcttcctcgattcttgtcttgtcgtgtctgcaggactcaacggtaggctacaaaccctcacaaagtgcacactgcacaggtgcagggacactcactaagctagccttctcaagcaaagctatcctagcgtctatctctattgcctcaatttgcaagccaggacaaatggtacatgcacccaacggactagacctagatctcaactcgtcgcgctcatctagcaaggtcacgtacttggtcagcaaagtggtgatgtt

SEQ ID NO: 22951 - DNA, 302 bp, Zea Mays
cgaccgccgcgaggatggccggagcagctcctgctccttcccgacctccaggacagggagtctctcttcctccccgacctcctttatgtttgtctatcattgctgctaccgacgggtcgtccatttccatggatgggaaccaaaactcaaatctaatcgatgacaatacttgtcaatcatttgtcgatcctctgactttgagttccactgatcgtgataatgctttggatgcaacgacaggaggaacagatgtgacgctgtcgacagccacaacaagtaccacaagcacggagacaacatgc

SEQ ID NO: 22952 - DNA, 1090 bp, Zea Mays
ttgcctccttccaaggcctttacccattttgtgtcgaatcctcctgttggtgatggtggtttgggccttagagtgcgaccctctgccgaggaagttagtgctttggttgcttcgcttgaagaaattcctgatgatgaacggcaggttcactttgaggtgcctttggatcccagtgatgtagagataagtgccatgctggatatgttggctgaggattcttctgatgcggcccctactgaaataccggtggcagcgcctctcccagaagctagcaaagcctcggatattcagaggcctgacagtgttcgcccgaagcgcccttgccaagccaatccgcccgcttctcctgctgagggacagaaaaagaagaagagacgtcttcgtcgaatgtctagcttggatcagactgctagtccttctgttcctgctactgatgaggtgccaatgcctgcctttgctgatgctgaccccaatgggtgtgatctgaccgttgttgaccccaattggtgtactgtccgtgttgctgatgaagatgaggaggaagaagaggatgaaatccctctgattcggaagaacagtcggcgctacatagccagtggggaaagtagtggtgttccttctcctgctttgtcttccctcattggtctacaagaattatctctggctaactttgatcaaactcttgaagacatggttccagaggatctgttatcagaaccggtagatggtggcgcgatggatgtttgtgctgatgtgcctgatgccgggttggggtcatcccgagcagcgtctcacgcctcgtcgactttagagcgcggtcttgagggtcaggaagctggtttggattgtcctgctcccatggaagtgactgagggaccttcatccttagaggtggctgctgcagagaactcggccctcaaggatggtgctggcgcttacccagccccagagggtgctgccggagatgatccggctcggatgggtagcgcaagctgtgacccagcccccgagggtgtccgagtgggttctccctcccgtacttccatggatgttcacgtagggtcttctcctccacactctatttgcatgg

SEQ ID NO: 22953 - DNA, 544 bp, Zea Mays
cgggagcagcgtgcatagcgtcctggtgacgcccagctgcggaggatgtgaggccaagcaaggatggcagtgcgttcgctgctggaggcaagaaagccggcaatgcgaagcaaaacaagacggcacacgggagaagctgctggggctgagcgtggtgccgcgaacggggctgcaagcgcggcgactccgtgcaacgcacgaaaaaaagggctgcgcttcaacacggtgagcaggatgaactctcagccaggaaacgcaagaagctcaacggcggtgttagacaaaggaaaaacagagaacgcactccatcgagcctatccggatgaagatatttcccaactcacgacacgtcacaagccatcgcaagaggcaagcagctgcgtggccatgcatgggcatacggcgaattcaggtggcgacggtcttattaggacagaacagacaggtgcatcacaggtgggccaccgcttaactctatccattttgcatcaacttttgcccacttctgttatctacaacgagtccttcccttaccatttggttc

SEQ ID NO: 22954 - DNA, 507 bp, Zea Mays
cgacggtgatgagggcgatggagacgacagtaacgccggtggcaaggcgccaccgacgtagatagtagtgtagtggtagttgtagtagtagccatagttgtagtattagttttgtagcagtagttgttgttgttgtagtagtagcagtagtagcagtagttgtagttgtagtagtggtagaggaacaatgatatcagggtcggctcataatgagtcggccctattttctttgtaatgttcttcctccgattgaatgaaatccgaccattgcacttctgcttttgttctactcctgctttgcctgataagttgattctgatggacccaatcgacgatttcagttttcgaaacactcaggtaggcccgtctggaaactctgtccgacccattttattctgttatgccaaaaacttgttcgagccacttgcccgccatgatgcacctgacttagcatgtgcgtatacatccttgtcaacggtttcccggtgcgtgaaccctaactctgtt

SEQ ID NO: 22955 - DNA, 444 bp, Zea Mays
gtggaggggtgggagtggtagcctttcttgatattggagttgtgggtgttgtggagctctttggttgtaattttgatgctgctagggatggtattggtggtcgtttttgtagtgagggtgatggcattggtgggggtgataagtgtgagctatggctcattggttgttagtggggatggccctggccatgtgctctttggtttctttagttttggggcaatccctggttggatgctctgagtcttcatcgtggaaggcgcactagaatttcctgggctgctagcgacctctccctcggcctctatctcgtagaacgttgtcgcgacggccttgctacgagtggtagcgttgagggggacatcgccctactgctactgattagctatgttgtggacctggggctgcgactgactgtgctcttggcgaggggcattcctactgtgg

SEQ ID NO: 22956 - DNA, 664 bp, Zea Mays
gtggttatcaacctctcgccgccacgggttcattcctcagccttataagatgcgttccggtaccccttccttccatcgagcgtgcaccgacttcgggtcatccatacctgaccgccacgggaggatgtgtgtggcggatgtctgccatgggagaagctctggctcgctgtcgtagatcccttgggcgggccgtgtggacgactgtggccaccgggatgtctgtcatggcctcgccttgtgggattgtggaccagaggctacacaatttctcactgtaggctcttcgatgccggcattccgccccacaccatgtccggcctcgttcccaccgtcgctcccggtgagaccctctcctctagagttgccatgttcctctcgacgcctagtatcgtgcctcgtatggaataaagccccggttagtcgtaggttcctcgctggagattagctccgcctcggtcccgccctgctgccaggacacctcctgtcaccaccgcagtccggtgagggagaaagcattgtggctgtcgatctggccttgggcggttcggataaggatgcagagtgtcgttcggatgtagcatctaggtcgtcaccttcatctcgaacggttgggatcacaacacaattattgagattctggaccgttggtatacatgtccaaaac

SEQ ID NO: 22957 - DNA, 449 bp, Zea Mays
gaggggactttgctcatctagaaagttgaggccttggaacgtgcttggcatttgagctagcctaaaatgttggccgacattctaatgtaagctgctctcaatggattttgacaagggggccctcatcttgctacttcgcaatttcttgttgcagtgcccttgatttttttctccttgtcctagatcaactatttgatttaggcatgcatgctggttttgtgccttttgactgcaagaacttccctctgcttctagaggtggatgtgcttcatgtagagactgtgcaacaataattggtcctctgcaatgatgcctaggtccttgccttcttgcaggatgtcgtcttcccctgtgaagttgggagatgttggtggtgttcaaagggtgtgaacccgagtgggacgttgggatctattggtggtgttcgaggggcatgaactcgagccaaa

SEQ ID NO: 22958 - DNA, 563 bp, Zea Mays
gcacctgttctggttgctggggcacctcccgcgccgccccctaggacaacttctcttttggccctcgaggcaactcttcagacccctggggcacctcgtgctccttgaggcacctccgtgtgccggcccccaaacatttgttctgccgctatggagcacctcttgtgtcgacccctagggcaactcttctagcccccggggcacttgtttcgcccctcgaggcacctcatgcctcggtccctgggacacctcctgtgttgccccctaggccatctcttcctacctatggggcaactctttagaccctcgaggcacgtattccgccccagggcacctgtgctttgggaacttcccattggggtctcttgtaggcgtgcactgcatagcgccaccgtcactgaccgtctccactggtcatcgttgcgaccactcttaggtctcgacacctgctaaactacaccatggtatctaggtggttgtgcacatgcaactccatcgtttggatggtgcccgtctaagatccacgtctccattggaacatcgacatctgcatccatggccac

SEQ ID NO: 22959 - DNA, 605 bp, Zea Mays
aatattttgtcctagtcatcaacattttaaaatacagtagccaaactcccgcatccataactactctatatctcaaccctatacaaaccaccacattttttatcaatatttttttcacttcgctacaccaaatttgctgcctcgcacgtgtggagcaggcgcgtgcactgtcgttgacggataggagagagatttggagtagaaaaagtacagactctgaaaatgccgtttccagtgctctctccaagtttacagttgccggtgaagtagcttgctgcagcaaatttttactgtataccgaactctatatcgatagagtaggggatacagctagtcactgcggacagcctaatgctgatgtgtgatgtgctcccacataattgaattcttctgtgtgagatcatctgggtgtgtttgggaacacaatatttccctagtcccaagacaatactgtgatatttgagcataccatggtattttagactaaaaagtgtttgggagtacatcaaaaactccgtactttaaatcatggttttactatagtatttttggggtctaaaaaactttggtctagaccaaagttttccgttggcgcttggctgcag

SEQ ID NO: 22960 - DNA, 879 bp, Zea Mays
tgaaaacggacggaaacggacggaaaaacccctctcccgtttccgtatccacattttatcatcggaaacgggaccgggtccggaatagtcgggaacggaaacgggagcgggataaacggaattgcgaaaacgaacggaaacggaaatactaacggaaactcataatttaatacaaatagaaatgttattgatgtttgactagtgattgattggcagaacaataacataaaacaaatagatatagagaggcaacattctactgttgtttggttgctaaatgtgtacatttagctacatctgatgttgtttaagactttacatcacttgtcatttgaaaagagccggtggttacaatggccaattgtgctataatttatcacctaaatacacgatgatttagtttatatactaatacatattaggctcgtcccatatttgtcaaatacggaataaatacgggttcaatccggaaaaaaacgggatcccgcaaaaacggacggaataagctctctcccgtttccgtcccgtttccatatttttccgtaaatacggaaacggtcgggtcaaatgtagaaaacggtacgggtcgggacgggattttttccgtccgttttcaaccctagtgtcaatctacctgcatgcattcgccgatagaggacagtagctaatccagcaccggagatgaatctacctccgaatcctccgcctgctgggactaacgctgtggttgccgcttcaaatgcaactattgtaacagatgtccaacaccatggcagagatgcaagcttagcaccgccaaaaccaacagcatccaccaccaccagcactacatagggataagcatcgcgagttcacgagccataagccatccaccttctc

SEQ ID NO: 22961 - DNA, 380 bp, Zea Mays
aattttatgaggagtatgtcccttcacatcatgagcgtgaaccatccatgttattatatcccaagtgcttatcacaacttttggaggtttgggatgaattacaagtggggggagaagtatcgctgcaagaatggtgtgactgttttcataacggaccaaggggactttcacactctgatgatatggaactttcgcttatttacaaagcagctttcatagcgatatggctttgcagctttgctattatcggagggggaccacaaattcgtcgcgggttattggtgatggcttcatggatagctttggggcgacgttttgctttggcacaaccagctttgtgttccttatattactccctgagattaatcagtacagacccg

SEQ ID NO: 22962 - DNA, 578 bp, Zea Mays
cgccacgcgatcgaagcgaggactcagaccacggaggaggttgagcacgatgctctaatcggtcatgggggccccgagggtgcagagagcgtccgccatcatcttcatctgacaacagtactcgtccacagagagatcgccctgaacaagctggcggaaggcggtctcaaggtacaaaatccgagtctggcagttgccgatgaactgagcctcaagggcaccccagatacggtgagcagtatcggccgacacacgaatgatgtcctgaagctcggtcgtgagggtgccatggatccaagagagcaccacttcgtccatcaggagccaatcctccgtcggtgcagcgaccgcgaggaggacgtggtcggcgagggcgtagcggcggagggtctgtaggacctggtcgcgccactgaggatactgagttgagttcagcgcgagaatgtcggtgacggttgcccggatgctggtgagggccgccgcctgggcgtgaagagaggcacgaagtgtcgaggctgggacgggcgtgggctcaaaagtgtcggcgctgtgacgagcggacatgggagaaccatcca

SEQ ID NO: 22963 - DNA, 466 bp, Zea Mays
aattacatgaacttagggcttaattgtaagcaagatccagtgactttttgtgagaacaagatatagcaaagttaaagctggtttgtagccctacaatgttgctgcagagcattggttgtgttgccatatgaatctgagagaaaaatcgatctcaagatggtctgtcagaccaactaaatgccatttgccatggtacagtaccaggctggggatcagatcgctagcgtagcagcttcaccgccgacgaccgatctccgccgcgattcgtgccgccgccgtttcaatttgtgctcggggtaagtggataacacccggagtacgtcgccagggataaactacagccagtaaacaactccggccgccgtaccaagttcaccgcggcggaatccgataagtatgtcgatggccgccgtcttatggccttgcgccgcatgtctaagcctcgccaccgcatcgccgtgacaca

SEQ ID NO: 22964 - DNA, 1003 bp, Zea Mays
gggaaagcatgatttcacttatagtgggggatgtagcaaagccatcagagaagtgagctccacttctctctctttgataaccctttgttgtcctgtatatgagttgattggcataccatacaacgactagatctgtggggatccgatttttgccgatgtgttgggtgcaactatttcgtcgcctagatcatacgaaggaaaagtaggcctatgattttttctagtgcacgtatcatcttatcgatagactcactataagttcaattcgatcatcaaaagaattcttaagatatcgaatctcatgggaaagcatgatttcacttgtagtgggggatgtagcgaagccatcagagaagtgagctccacttctctctccttgataaccctttgttgtcatgtatatgagttgattggcataccatacaacgactagatctgtggggatccgatttttgccgatgtgttgggtgcaactatttcgtcgcctagatcatacgaaggaaaagtaggcctatgattttttctagtgcacgtatcatcttatcgatagactcactataagttcaattcgatcatcaaaagaattcttaagatatcgaatctcatgggaaagcatgatttcacttgtagtgggggatgtagcgaagccatcagagaagtgagctccacttctctctccttgataaccctttgttgtcatgtatatgagttgattggcataccatacaacgactagatctgtggggatccgatttttgccgacgtgttgggtgcaactatttcgttgcctagatcatacaaaggaaagtaggcctatgatttttttctagtgcacgtatcatcttatcgatagactcactataagttcaattcgatcatcgaaagaattcttaagagattggatctcgtgggaaggcatgatttcacttgtattggggttgcagcgaagccatcagagaatcgagctccacttctctctccttgataaccctttggtgaggac

SEQ ID NO: 22965 - DNA, 518 bp, Zea Mays
tgcgactcatcatcgtcgcgtcctcagggttgggttcggagtgctttatggtggtcggctgacatttctgcgggaagttcgggtaccaggggagttcggcgctcaacgaattgctcgtcgacgcggttgcgccgtgggaccgccctttgccgtggtcgaaatcctttgctatgttaaacaccggtgagtggtccctaaccaattcacaagaagctctacgttgtattgcactggggggcataaggaatggttcaccgggcgctaggatggacggtcgccggtgctacgccactgcggtccgcgcgtgcccggcagatgggtagtccagggaaggagatgatgtctatgtcgttggattcgtatccaacggataagattagatggcagggtcacgaccgtagatctgggtatgggcggtggtgatctagtgctaagtcgatgggaaacatggtccgctgatcttgtgattgacgacccaaattagataggaaggtaacgcttcgtcgttttaaatccgg

SEQ ID NO: 22966 - DNA, 663 bp, Zea Mays
ccgaatctgaacattatctcttgaatgaatttcaccgcttttgctgaagtcaaagaggtgatgggtttgtactctatccattttgtgaacttatcaatggcaaccattatgtgagtatatcccccttgagctttcttgaatgacccaatcatgtctggcccccagcatgcaaacagacaagttacaggaatagtctgcaactgttgggcgggtaaatgctattgttttgataagaacttgcatgcttcacactgcatcattcttagttgttggccagtaaaacccgaacctaaaggctttccctactaatgtccttgatgctgcatgcacgccacattgccccacatgaatctcatctagcagctgccttctagtagccgagtgaaaacacttcatgaggactcctcctgcgcctcttctgtacagcagaccccctatgatggtatagtgggatgactgtctcgcaatgcgctctgctacggctttatcatctggttcttccttgttgcttatttatctgatgattggctctctccagtcattgagatctacttctgcctgacccagaacatgacactcctcaatctgctctatggtgacgcttggctggtgtatctcctggacgaacaccctaagtgtaacctgggcccaactagaccccag

SEQ ID NO: 22967 - DNA, 369 bp, Zea Mays
gagatttggagctttaattctgctaactcggtaggagccatgcggtatggtctctttgcgatgggcgccgtaccaggaatcagatctatgtagaattctacttatctttctggcggcattcctggcaactcttctaggaatacatccatgaattcttctaccactgatatgctttctgttgctagattaaacatcattggatcattggcgggtggctgagcctgacaagagactggctttccttggtggtctgtgagaaggattgtcttgtttgcacaacttatgatacctttgtgcttggtcaaccaatccattcctaagatcacatcaatcccttgggatggcaagacggttaagtctgccaagaac

SEQ ID NO: 22968 - DNA, 1421 bp, Zea Mays
tgataaggttgcattcattgcccgctgaaaggtagccggggcacctgttaacccaaatggcataactcgaaattcatattgccctgagtgagtttgaaacgctgtcttatgtgtgtcactggaatggagcctaatttgatgatatccagctgttaaatccaagcttgtaaaccaagaggcttgacccaactcatccaataattcttcaatgataggcactggaaatgacgttttgacagtgatagcattgagatgcctaaaatccacacaaaatcgccacgtgccgtccttcttcttgactaacaggaccgaagaagaaaaagaactggaactcgcttgaataataccagcgtcaagcatgatggcaatttggcgttcaatttcatccttaatcgctggaggatagcgataaggtcgaacgcgcactggagtcgcaccagcgatcaatggaatgacatgatcgcagtcacggattggtggcataccggtaggtggttcaaaaacatctgaaaaattggacagcaactgcaccataggtgtgggtaaattcatttcattgaacctgagcgactccttttcaaccgtagccacctgcaccaccgctccaggttgcaaaacagccgaaacaccatataaagtgactgatgactgctgataaggaatgcatacccacttgtgtaaccaatgaatgtgcatggggctgtaagaagataaccaatccatacccacaataatgtcatagacaggtaattccagcacacgtaaatcagtaataaacacacattcttgcagggaccaacaagcactcttgatttggtgagaacacttaagacgagtaccatcagccacctgaacaatcactggtgccagcagctttgtaacaacagatagctgggatgcaactcgagctgcaatgaaagagtgagaactgccagaatccagcaagatacacactggaatattctgaataagcccttgaaatttgattgtctgatttgcttcatttccctgcacagccgcgagtgacacggctaagcattgctgctccactggtgtatcctgaacacaagcagtaactgaaacagcatcatcctcttcagaaaacaattcccacacttcctgtaatgcatgaagctgcactgtcggaggacactggtgatccctcgaccacttctcagcacaccgttgacacaatcctcgagctcgacgataggcgcggagggcagccatcttgtcatctgaagcacgaattctgcttggttcagtgcgcttgacatcatcagcaatataaacattcttgtcactctttggtggtagcggtagaggcagaggttgccttcccaaacttgaattcaatactggcactgatggacgacggaattccatccgtttctcaggcacggccacctcttcctgcaaca

SEQ ID NO: 22969 - DNA, 994 bp, Zea Mays
cttattttagcccatcaagagacaccctccagcctagtgtccgtgcaggcacggtctcgtttcccagtcactgctctgtgggctcacacccggggggggtcttcttctttcccccgcatgactcgctcgctcgccagcaggccctccgcgcgtggtgacttcgtcccctgacgggtgggggccagcaccggagtcgaaccaggctcacccgtcagctgaatggtccgcttccactggagtgtcttccccggaaggttgttactgctgcgccgaactccccgaaatctgctctgcggaccgaccctgccttcggctcttcccctgctctataaatgcttgcgtcacgattttccctcgccatcatccgtgcgcaccgaactaccagcgaagcagtggaacgagagcgggagggtagttcggaacagggagccaccgtcgcggcttgaatgagggtgagggccgccgccatggatcctcaccaatgtggccgttcgaagcgcacttggggactccgggggttcgcgcgggatcactgatggatgtccgctgctcgttcgggcaggtcgggcggttggcgtggccaaattcctcacccgagggcggcgccgccgtgcggcccgcatctgccgtgaccgggtcagtcgtcgcggcaattcgcggtaagaaatccctcatacagttcaccaatgtctcctctacgtgtaccacatctcggatccatgtttagggctaggattcgtggcatggtgtggcctggccatggccaccgccgtgagcgctggacgccagtgtcccttgtgtctgggcgaggaagagcatatgcgcgccgtcggatttgagtgagcggtggagattagactcaggcttaccccttcggtgtttaaatcctgacccttgttgtcggatccaacggataggagagcgtgccagttagagttagatttaatctaatcctagccatgtgcatccgatcggacggctcagagcgttcgat

SEQ ID NO: 22970 - DNA, 545 bp, Zea Mays
cgcacactgaagaagtactgccacaacttccagtgaggatcgatccccaaggacacctcacatagtgtgataaagcatgctatgtgaagaataatgttgggatgcaggttgtggacctccacctggtagaagtggaggagcctgtgcacgaagggatgaagggcaggccaaacccgttgtgaattctctaggcccctaagtggtgttttggtaattaatgacaaccgattgcggactaatagttcctcgagtgataagattgcaagactgaatcacaaggtacaacaaagttcttgaggaatcataaccattgattgtggatcaagtgaaggcaaaggtaaaacataggtttttgcttttgccggtcagcaggtgtttagagaagaaactgactggattagtaggatagacagtcgtactattaagaggggtcaatgaacttgaatggtgtatgacttagtgcctcatagagtataaacaataatatgtgtatgagggggtaacagcgctacggatttcaaaattaagtttttcttgagatagcg

SEQ ID NO: 22971 - DNA, 421 bp, Zea Mays
agcttcagcagtctcctttgcaggagtaggagttgacacccttgtggactctaaaatagcatccagcacactagccatcctcctcctcttgggagttattgcaggagctctgggcaccttcggcaacttcggctcaggttgcaggcttaggattttttgcaatcctgccgattctcctagctctggcgcttcggccgcttttactgtggctttttctcctgccgattccattttctcttgcccttttgtttccgacatttcagccgattctttcttggagcaggcacgtgcaggctgtcctggctcagcggtggaaggtgtcccttcaacaagcttcggcaccttggccgtttcaatgtatctaggctggtgcgtcaagaccttgatctttgtgcccttcggcgcagcagagatggccgaa

SEQ ID NO: 22972 - DNA, 409 bp, Zea Mays
gtgctcacaagaaccagcgtcggaccaacagaattttggttggtcgacacaggcgccatctacgggttagcacgcgatgtcgagctctcattccaacaaaactatgccagtaatgaccaaacgaccaccacggtgaacttcaccaacgctcacggatgctcaaacaccaaatcaaaggcgtagaaccataccgggttcgcctggccacggggacgcggaaatgagtatgcactgtgcggtccgatgggaataggcagtcacgctagagctatatggccgtaaggtactacaagttcaccatgcactaccaatttgggacgagggcgtgagtacaccatgaattttggcatatactgaccacaccagaagatagtgaaggtctcacggtggttcatggctcaatttaaag

SEQ ID NO: 22973 - DNA, 572 bp, Zea Mays
ttgcctatcaagctaagtccactggcgccacatctgacgaagctttttcagaagaagaaggagccttcgatagcgaagaaggcagctgggtcgaaaaaatgaagaattattactgtgacagaagctatcgaagagacaccacgaccagcttcggcttcaaaagcaccagctattgagagcgctacagctatcgaagctgcaccggccgaagctgcaactgccgaagctgaaccggctgaagatgcaaatctagaaagcacactttctaacattgataagatacttctggacatggtcacagaagaagctgctgctgccgctgaagaaaccatggctacagtacatgagaaggagaaggaaatagccgaagatgcttcggaagaagaaaagtttaactttcaaaacttaattgggcaagaattgtcgaaggctgagaaagaagagttgagagaatacgccatatcctgcgggtatcaaccaggggcactactcttcggcggtgttgacgatgaaaggttaggctgcctccgagatcaaaccggagcaaaggttatcggtactctatcaaagag

SEQ ID NO: 22974 - DNA, 496 bp, Zea Mays
gttaaagtagcggtgaccatcggatcgtggttggagggacaggatgagagatgtgcatatgtgcacagccgtaggtatgtgcataagatacgctgccctcggccgaactggcctgcttgccaattcccctcctaggccatccaacgctcacttccacccattactctatatcatgtgggccccatttgtcatttgtttcctccacctacattgaaagtttgaatcgctctctcgccacggtcgttttagcctgtgccacgccgcagcgtccatccgtttccccaccgctataactgctggcagttttttcttcattaacggttgcagttctctcctccattaatctcttacagccgcctgttcctctcccatccttgttctctcctgtttgctctatgcacgtttgctctctgcatggggaaaacaccactgacccttcgcctcctcgcacctacgcagtcacctagcggagcatcgctgtgacgcctcatctctt

SEQ ID NO: 22975 - DNA, 876 bp, Zea Mays
tatctttgaatgcaaattctaagaagccttttacaccggctacatattgagccgagcctttagaacattgcaaaagaagcttcaccacctctaaatccattatgaaactataaaaaatactgatgttaattctactataaataatctaaaacttatttctcaattgtattagtatattgatttctagatgtctacaagtaacacaataatagctcaaaattctatttacccagctagtctatacataaacaaatatcatgttttagatatgttcagaaaattttccataccttactcttctgattgttagaaagtcgataaataatggtactagttcaacctttcatgcactccctaagaaactgagacccggatactggttcgaagcgcatccctagtgttcgtcgatcggaggcaacaagaagaggaaatcaagaaacgtaccggatgatgattggcttctccccctctgacttatgtcgttgtgctgctaggaactatgcagggaactatccagaatatccatgccaccaggaacttcgatgaagggaagaggagctatggcacacagagacgaagagaagatgagcgagggcgcacagagacaaagggaatagcgagggcacactgacctccctaagatctgcgacggcgcacaggacctttgcctgactctatgacaacggggaagaaaccacaagcggcgaggaatcaaatggggagacgagcagagggggaagaaggaagagctcaggtggaaccctagcgtacctccggtgtgggacctggatccgttttggaagaagaacgggaatggccggatggggctcctacgggccaggtcgggctccaccgcgttaagaagattgaataagt

SEQ ID NO: 22976 - DNA, 473 bp, Zea Mays
cgttaagtaataaacaaccagacctattcagtttctgtagtgcttatcctatggctggctatgccatatcctctctctttttttgctgtatgcagaatcctagtactggttgtgttatattagcagttagttgatactttcagttctactctatgtggtatgaaattctcagttgtgaatatcaatggccaatttatgtgagtgaaaaggtttttttataaacattatgattaataatttagttgtacactagaagagtctcaaatgtgattgattacatgccttaggcaaaagttattgaatgggtgtatgaagatgcccaaggtgattaataacttgtggtgtttagtttagtaatatacatgcaaaactatccattttattgagtgtttagcttatttttgtcattatatttcacttgtgcaccttgcgctgactgtgttgtggttgaggaattttccccgatgtaacct

SEQ ID NO: 22977 - DNA, 441 bp, Zea Mays
gcagaaaactcagcccccaagggtgatgctggcggttacccagccctcgagggtgtcgccggtaatgatctggctctggtgggtagggcaagctgcaacccagcccccgagggtgttgccggtagtgatccggctctgatgggtagtgctagctgcaacccagcccccgagggtgtccgagcgagctctccttcccacacctccatggacatccacgtcgtgtcgtctccaccatgatctgatggagtgatagcgatgcatacttctttagcttcgagtgagggagtcgccttggaggtcggtgagccggatgccagaattctgatatatgctagtggagctgaatcaacccccgatgatgctcttcagattgttccagttgatcttccttcgtcgagctacaacacagcttctcatgacttgggattgccctcattcttt

SEQ ID NO: 22978 - DNA, 310 bp, Zea Mays
caattttgctgcagagcatggagtatgttaccatataggtttgtgagaaaatcgagcctaaactatggctgtcaggttgactaaaggagttagcccatggtacagtagactgctcgggatcagaacacttcaccgccgacgatcacccctccgccgcgattcgtgtcgtcggtgttaggatttgcgctcgtggcagatggataacgtcaaggggtaatagaatcctcgccgccgatgagctggacgccactccggctagccgcaatccctctccccttgctcaccgcccttggataagggttctcaccgc

SEQ ID NO: 22979 - DNA, 417 bp, Zea Mays
attccaattcattccatacgccggccggatcctctttcactttcactgtcatcgtcatcatcatatatcatctctgtacaggtgtctctgtccctctctttccctgaatgtgtgtcacaagtcgtcgccctccatcatagcatacgtacgtacgtacagcagagtcaactacctctagctgtgctagctagttcgtactagcttcttttggatccatgcatgcatgtactccctccccccatatctcctacgtatcacatgtctctgttgcatgcatgctatcatcgctcactcgcttgctagttgctacgtacactgaacatttgttacacgtaaatgatatatgaacgatccaaatttcagagggcaggcaccacgatccgtccgtgacaacatgcctctctctatctctttccc

SEQ ID NO: 22980 - DNA, 808 bp, Zea Mays
gatattgcaggtatggggtctgccagtttcgattaggtgtgaccccactccgctcttcctcgacgcgcagtgcctcaccctcatgggccgagggtgcctcaggctgagccgagggtgcctcgggctgggccgaggccttctcgggctcgggcgtgtcgtcggtcttgactgagggttgatgtaggtcttaggagaaggcgtccgggggaatcgttgtatcgtccgcagtcggtcccgcctgccaacccctcccactcccgagcgctcgtgctcactcttcccaccgacagctcggtcccgcctgccaacccctcccactcccgttgctgccatcccgaccccgcctattcgctcctcctcccccgtgatgagctcataatggagaatagcaatgtcactggccaccgtccctcctcgtcgatgatcacgacagtaaagttaggcacctcccgtcctcccgttgtgcaccagaacccacatgccaccgccgtcgtggtgtcacctcgcgccgttgttcaccattgctatgcaccgcctctatgcgctactcgctgatggctagctagtcgctgagcccctcccagtggcctataaaaagagcgctctgagcccctctccattcgcacctctcacaacttttcctcccctcccccgagctcaatcaaagccggcaccatcgccccgttaactctgatgatctccccttcttcccttctcgggtgactagagccaaattggtatagctcttgagctttactacaatctcacaggcacaaagcacctcatcccaccccagataccccccaac

SEQ ID NO: 22981 - DNA, 583 bp, Zea Mays
cctacgacggcgccaccaccggcgccgacctcgtcctcgtcaactacggccgcgtcacctgcgggaacagcctcttcggccccggattcaccagggacgccgacgccttctcgcgggtgtggcaggcggacgtcgatttccggaacaacgacctcagctacgacgccatcactgcgggcgggaggaaggtctttggcagcaaccagccgcccaactacttccccaccaagctgtacgagtcggcggtcaccacgggcggtgacgccgccaatgagatcgagtacctcatgccggtcgacacgaggctgtcctacatggtctggctccatttcgccgagatcgatgctgggatcggctcacctggccagagggtgttcgacgtagtgctggctggggagaacgtcacgaggatcgacatcttcaagcaggtcggaggcttcacggcgttcaagtggacctacattgtcaagaatctgacaagctcgacgttgagcgtcaggcttgtgccagtggtgggacggccgattctgtgcggccttgagaattatgcgatggtgccacttgagatgaggacagtgccgag

SEQ ID NO: 22982 - DNA, 535 bp, Zea Mays
ttcagttattgggccttttttagcccatctatagtgactgcaagtctcctctcctctcctattctaccctagccgccaacactgactctctacacgtctcctctgtcctctcctctcttgcaccgcccctgcctctcattctcctgcactgcgccactgcccctgcagtcctggacaccggcgggcggcggctacaccagcgggcagcggaacagcaccctgcgtccctgccccttctcctggagtcctgcagcggctgtggctgcaaaccagtggcgagatgagcacatcatctggaggtctctcctgctccctccacttctctcccttatttgtactgcatgtagtggatggttgctgacttgctgttgtccctcctgctcccccaattcaaccaatgttgtgttgctggcctgctgccctatacagagtttgttgttggccgtgcacaagtggaagttattatgaataatgtagaatcatcggccgcatcaggtggtgctcctggtgctggttcagcagcttctgctactct

SEQ ID NO: 22983 - DNA, 700 bp, Zea Mays
gttgagcaaggctttggtagcacaggcaggtaaattgttatgaccgagtcctataatgattatgtgaaatatcaaatacgagaataagagacttaaaataatttggagaagttatcaaccaaatatgatatttgtcatataaaagcaaagcagtgatcatgctatgggtcttgccaatgacacatgcttccccatctttactttagaaagaacatttttgtaattattgatagctaaaattaaatgtggcttaacttaataattacaattaagagcgtgcgcacgccagtcgggctacaatgatgattcaccaagccacattgaaagttgttccaaattcataattaaagcaacataagttaaaaggcattgttttttatagtggcaaaaatctattactaccactatcaagcaccagttttaactgtcgacctgcgtcaacatttttacaaaaccccatacatttcttcagaatcaacctgcagtcctgcaactatatgcgacctcctcggcgtgctccccgtcgtgtctccctccccctaacacgaggtcataactcctagcgattctagcgcctccaaaaccttatccactcgtgtgtgatatgcgccatctccaccccgctcgtgctccttgcctccttggtgctccccatccaaggcatcacgcccattgttgtgcgccccatctcccacctcca

SEQ ID NO: 22984 - DNA, 451 bp, Zea Mays
tgaggcgaaggcaagcttggtgccaatggagaagcagaagtccctgaagtcttggctgtcgaattgtttgccattgtcaactgtgagctcggacgggactctgaatcggcagacaatgttttgccagaagaatttctgggcggtcttcgatgttatcgtggatactgctcttgcctcgatccacttggtgaaatactcgacggcgatgaaggtgaacttgaggttcccttgggccgtgggtagcggcccgacaatgtctaggccccaacgctgaagaggtcatgtgtgggcgattagctttgtgaactgcgaagggtttcccgagcgtggagaaaatttctggcaggcttcgcaggacctcgtcacccgattcacggcgcaaatcatagcgggccagtagaagccttgtcggatcaccttggcggctagggctctaggccctgcgtgagag

SEQ ID NO: 22985 - DNA, 316 bp, Zea Mays
gtttaggatggcagggcagagaagcggcggtgcagggaattgagaagaagaggatgagtcagttgttgtttgtctgtgacctccgactgaaggacgtctgccctttatagacgggtcgccataatccgttgattcgatctgctaaattctaggaaccggcccctggaatatctctacatgcaaccgtccggagatctcgcacgttgtccattactcctagttgatgtgacagtctaggtgtgatatttgataaccaaaataaacaaaagacaaaaattaaagtgtcgtttaggatggcagggcagagaagcggcgg

SEQ ID NO: 22986 - DNA, 373 bp, Zea Mays
ttctcgtttatgggatttctgtgatcctcaggatgaagcaaagttgctccattgtgatatgatgctgcttgacgaagaggtacaacatctgcacgcttatctatttggtaaagggaaggtggcattggtatgagattaattgctattatgttgttgtttcctccatcgctgctttgttcagggaaacggtatccatgctgcaatattcccaccagtcatacaaaagttcaagccacttataaaagaaggagtcgtctacaacatcacatacttccgggtcagagcctcgaacaatttgtacaagcctattttcaatgagaacatgattacctttacaaactggacaaaattggaggaggttgttgagattccg

SEQ ID NO: 22987 - DNA, 727 bp, Zea Mays
cagcagaggagggatgtggattatattactcgcaccaaaagtgctcacagtaggggttacaagcacgacgggagagggtaggaccctaagtccctgagagtgattgagtcaagtgccaataccgtatgagagagaatattgctaagtgttcgcctgtgtcaagtcgtggagtgtcctacttataggcccagggagagctgccttgcggacgggagctgacgatatgccgtgagggggtgtcttcatgtattgtagacagtatggcctagtactttgttgttgacttgtgcttgcttgtcgtctgttgagagctgtggctgagggcttggtcacgtatccgagcccctggcgtggggttgcccataccgtaatggttggcatagtgcctgttataggaaaaaggcttttgcgggaggtgtcagttccactgtttgtgatcacgttgggaagtcctctgtcacagatatcgagggaagaatcgagctcgggcgaggcggaggttcgtccgaggttacgaccgagcctgtcctgagacttgatgacgcgtgtcacagtcgacggagtggccggagcgggagagcaagtagcagaggcctggttcgggcgaggcggagcttacgcccgaggttgagtttagcttcgggcgaggcggaacttgcgcccgaggtcttggtccgtgtcctgtcgtattatgcgtcacgaccgccaggtggcgtgcgcacgctta

SEQ ID NO: 22988 - DNA, 858 bp, Zea Mays
gggcggggaaacgagtaccaggggcactcggctgattggtcggggcggggcagaagtgggacgaataaatacgggttgtctgaatggatatataggtgggctaggtgaagaacggtttggattgaaaggtcggattaccaaccttgttctcttttcaggtccctgagttgatctttcacccgcatatccttttgactttgcttgtctcgcattttttgcttcaactaacagtgttgtactgacagccctgatgtatgtgaggttcagacacattgccatcttaagctggagtctgtcatttagtccccttatgaagcaattcttctttttcaggcctgtatccacttgatcaatggcgtattcggagaggtgattgaatttattgagatactgcatcacagaatctcccccttgcttcagtcggatgaactcttccagtttcatttgtagtactccctctggaacataatgttccctaaatgctagcttgaactcttcccaagtgacttgatgtcccgcaggctggatggcagagaagtttgcccaccaggtgctggcggggcctcttaactgctgagcggcaaataggggcttctgtacctcggtgcattggattagcccgaatttctgttccattactcgcacccattgatcagcttccaagggttcctccgccttgacgaagagcggtgtgcaggtttcggagaactccagataggtagtgtcttgtggtccttgagggggaactcttcctccgtgttgttgaaattgcttgcccgccatttcgtgcagaaagcgcatgttgtcgacggtggcgttgaccaaggcagcgatagcctcggccagggtaggaggtac

SEQ ID NO: 22989 - DNA, 400 bp, Zea Mays
aacgctgcgaggcggaatggccgaccaactcctgatcgagcaacttggcgaggtggaggtcccaatctagtactgctgacccatgtcaactacaacaagaagcatcatccacaggtcacgtctgggcatacgtgtggcacatctaaggcacgtcgggaagtcactgtcgacacaaacgtacgcccccacgtacggtcccaaatatactcgcgctgccttgttgggccagtcaaacccgatcatgggggatctctgccctatagtttctacagtgactcgcataccgcgagggacgcgacaatacaccgcaccggttgtatgctacacatggcgaagggtgacacaaggatcatgacgataggcaaggctgtaccacgtccaccctcaccatgagactgcc

SEQ ID NO: 22990 - DNA, 762 bp, Zea Mays
cccgccgtagtccattcccccttgctcaccgatccctcggataaggatttcaccgccgttgagccatcaccggcgttcgccgcgtggctctacactttcaccgtgtcgccataacctcctctgaaccctccgtggctcaccggagttactgccacgtcgttggtcacgtacccgcgaagccagtgcttcttcctcctctccggccgtcgacgcatcgcgatcaaatttagtgccaccgctctcggagcctataaattgagggcagggctagttacgccatgaaattgtgaggctctagcacccgttcccacactcgatcgcccaccagctcgcctgaatttcgcgttgcccccaaatcggttttccgccgccgtgaatcgagctcaccgtgggcagccctccacaggtcagccccggtcctctgctatttcgtttgagcacccttccatctccgtaatgcttaccgaagcattgaatcgaactagaccgccatgggtcgccgggaacacctccacccatccgcaatgttctcggttcacgtggacagagcataataggtcgccattcgtgcaattaagttaggggaattactcggggtagcttggatttggtgtccgccgctcgggagcgccggtcactgccccaatcggccggcgtagttgctcgccggagtgcggccgtgcttgaacgccgtcggggactgcgagttgtgaattgacaagaacccggggaccttttcgtgaactgtcagtgacttaaaac

SEQ ID NO: 22991 - DNA, 405 bp, Zea Mays
caaagagttcctcgctatccaaggccacctcaagaaagcgaagaactacgcgctagcgccacaacgtcgacgatcaccatcaggggctcgtggtgtgtcgtcgacaccaaggaggacgacgtcgcgagccaaggcatcaacggaggctgcgtatcagactcggatcacggcaccagaagcgaactcgaagcaacagcagcacccatacccgatccctccggcagttcctgataacaagctgcgaccggtcgaggcttctacttcatcgtctcagaagcgtggccgcgacgtcgacgctgcgtggtcgtcggcactgcagctccggatggatgaggagcttccagtcctccaaggcctcctcaagaaagtgaagcccttgccccgttccacgttccttgccgccga

SEQ ID NO: 22992 - DNA, 798 bp, Zea Mays
aaaaaaaatagaacctatgatgagcaaggatcaaacacgtttgagtagagacgcataagatattgagcatgcacttcaaccgttcatatgagcggttcaactacaacgaacaatatcaaattgctaaactctaacaatgttgctgacaaatgaagataatctaagtgttgcaagcacttaaactaaaatgtacccaacgaatgatacattagataatcaagaacgcgtaggatcgagtaaaaagaaatgaaatagggcaatacctcgatccggagatttagtcaagaaatcccaaatagattgagggagatgatggagaacgccgggatgaacggatctccaacaaatcttccaaagatgagagggcacaagtgagtttttggagtagaaaggtgtgaaggagagagaggaggaagagtgggcggcggcggctggaaagtgaaactgagaagaagataagaggggagagggagagaaataagcggggagtcggccggtcagaccacagaaaaccggttcaaccggttctaaaactggttcaaccggtttctggtcaaactgcgcagtaaaagcgcgcagaaaaaggtgttgactgcgcgaaatttctggcagtctgacagcgcagactgtgaaactgacagtgcagactgcgagcagactgacggcgcggatgcggaggaggtcaaaaccggttcaaccggtttttataccggttcaaccggtttccaccaggggaaaaccggttgagtggcctactcagccggtttactcaaccagtttccagatattgcccagaag

SEQ ID NO: 22993 - DNA, 740 bp, Zea Mays
gccgccggtgagctggacgccactccggctagccgcggtacctctcccctttctcaccgcccctcggattagaatctcaccgccgttgtgccttcgccgttgtccgccacgtgtccaagccttgccatcgcaccaccacgattcactttagctccccgttgctcaccggaatagctgccacggcgttgaacacgtattcactgcgccggtattcttccttatctccggccgcctgcgttgctcggccaaattgcacgccaccgtcgaagctccctataaattgagctcgcggttagctgcgctacatcatcatgaaaccagagccccaatcccaccctcaatcgttcgccagagctcgtgaatttcgaattctccccaaactggtctccgccaccgcatgatcaagctcgccgtggccagctcgattcaggttagctcgagtccctctgctgcttgttctagcatccttaggtaccccgcaaacccctcgacccctttaattgaaccggaccgccagggatcaccgggaacgcgtaccattgtcctcatcgttcgcggttcacgtggacagagcttgatagcttaccaatcgtgaaattaagttaggggaatcgttcggggagggtttaatccggtgtacgccgctcgggagcaccggtcgttgcataaatccaccggcacaacctcaccagagttcatcctccgcgctgccgtcgtcgtggaccttcccctgcgaagaa

SEQ ID NO: 22994 - DNA, 1189 bp, Zea Mays
cgaaatgacaatggcaggggaaaataactcccccatccaagaagagtagtatcagcgccagcgccagtgctaggcgcatatcctcgctcgcaagaacgctcttcggcagtagtaagaggagctcgtaagctcaattaagtttacgatgacatcgagcaaaaatgccatgaggccgaatggaccgagtgaaaaaggtttacgatcaacttgccaagtgcaacgacggagcgcaatacttcctcaaccccaggcaaaacatggcggtggtagccatgattccttggtccatccccgagcccgatgaaccataggtggggatgatgtacaaaaacctatccaacctagtggagaaagctgcggtacagtaggctgagatagatcggcaggctcccaccggcacggatagctacgacacgcgcatgacatcgtccctgtggagaacattattggggagatccgcgatgcccaacacctccttaacaaccggcactaggagaaggaggaggtggagtagccatgcaagtagaggcacgagcaaagtcccagcccacctgggccagggccacgcgccatcgggcacgccatccacaaggcgcaattccctacgaaggtaagggcactagcaaacatctccaagtacaactgatcctcaaatctaggtgtatggctagaagaatacctccatgcatgctgcatggcggggatcaaggatgaccacctcatcatccagttcttccccatccacctcgcagaaagagcgagggcctggctcaaacatctgccagccagcaccatccacaactgggtcaacctccaaaaggccttcgtcgggaacttctagggcacctacaagggccttgtgagctcctcgaacctcaagaggtgcaccatagaagtggggttagcctctgtgattacatctggaggttttcccaaaaaaggaactaatttcctgacgccaccgtggtaagtgccttcacctatgacacaaccaacgaggcactcgtccaagaacttgggcgagggagaccaagaacaactaccgacctcctcgacatagcgaccaagtttgtcgatagggaggacacaataggggcaattttcggcaagggaaagagctcgtacgacgctgatgaaccaagcggcaagaagagggagcatcgggagcaccctgacaggcgccagggga

SEQ ID NO: 22995 - DNA, 698 bp, Zea Mays
gacaacgaaagtgaagaagaagaagaagaggagaacatcaaggaggaagccaacggtaaacaacaggatcacttcatggggatatggcctatcaccgaacattatacatcaatgttcgagatggggcacttccctaacctgctgcaggatgttctacatgcgttgggaacctactccgacccctgtatgagaccaggcgagtgtgcgagccccctcgggcttgctactacatcactcgcattcatgtcagggtgatggatgcaggtgatagagggttcaggactctatcagctcatgagtctctgacgccgctattcacctacgctccttcggtcagcgatgctgctaggcgaactttgtggtccctcatccacacctactggcagaaactgcacaacatgaagtacaagcatcttcctttgcgtcttcgtggagaaagccagaccaacattgttctaggtggagctgaagaagatcgcctcaacaccctagttggtgtggtggtaggtattaacaccgacctagacagtgctaccctggacctctccagggtacacttggagctagaggatgcacacacaaggattgcagccttggaagctcaactagaaggaagggatccccctgaagcccaagaccctaccatggcattgtcccctccccgcaagaggatccgctatgaagaaccaggatccatc

SEQ ID NO: 22996 - DNA, 382 bp, Zea Mays
ggcggtgcacagggtcccaacggcggagccatggcggagcgattctccggcgagaaatgaacagcccagccaccgtctaatctccacggctcaccacacatcaacggcgcagggcgcgtcttcaacccttgacccgaaccaggcggccagcagcggcgccagagcgccacccggcggtactgcgatggcgtttcccacggctaaccataattgacgctccaaaccatagggagaaatcgatagagaactacgcagggaggtgtgttttaccgtggctttgcacaagaacgagcagcctcgcaccatcgtcgtccagttcggtcttcaacacacgacgagggagcccagtcctcccgacgacgagtccgcgatggaaaactcc

SEQ ID NO: 22997 - DNA, 621 bp, Zea Mays
cgcgatggtatagtaactgaacaagattgtagatacagcgtatctcgccgccggtgattcacggtggcactgcgattcgcgcccagtaatgcatggataacgacccctggtgaaaagatctcgccgtggatgaactcggagcattgtggccgctctgtcgcccatccacatgccggcgatgtggctgagcggccgtcgccgggatgtacaccattcactgcgattgtgccacgccgtgaccatttcaccacgtcattaccagccgtaatagctcaccagtgaccgccatagctccttagcctgtgactgccacgatagttcacgtcagggaccttctcctttcttcggccgccagcgcaccttctccaaattggacgccaccgccattgagctatataaattgaagccctagtgagctccgccaggttgtcacgaggctagagcaccagcccttacctccgattagccaccatagcgccccaattcctttcttcccccaaatctgtttaacgcgccatcgtgaacgcctcgccgtggccaaccttctacaggtcagttcaagcttctttgcttgatgttctagcctcccttaagtcccctgctactcgtagaccgtttaat

SEQ ID NO: 22998 - DNA, 648 bp, Zea Mays
cgctgacgttgtcacagtagactagtgtgctgttggtgaggaggctatgaagctcctggagaagctggcgcaaccagctcgcctcagccaccccatttgcaacagctcgccccaatcgcagcactagagcgggataccacaggctgacactttgaggaccaagacatgaggttggccacaggaaacaccacatagccagaagcagaccgccagatgttcgagtacctggttcagtcgatgtctgtgtagatgataagctcatgggtggagtgccaagattgagcctgtagtcgatagtatcctctaggtactgaaggatccgcttgaccgcgctcaagtgcagctcacgaggatcatgcatgtagagacagacctactgaacaacatacgtgatctcgggtctggtaaaagtgaggtaccgaagagcgttggcaagactgtggtaggcagtggggttgctaacagggacactgtcaccggagatcttggcatgcgtgtccactgcggtcacatggcttgcagtcctgtatgctatcgcactcgaggatatccatggtgtaccgtcgctgctaaagaaacaggtcatctgggcggcactcaacgacaatcctcggaaagtggtcatacaccgtcggcttgggcgggaac

SEQ ID NO: 22999 - DNA, 385 bp, Zea Mays
ccagatccaaatcgcgcaggagcaggcatcccagcggttaggcatcggtgagtcccctccatctccttccttccctacgctcctccccttcgttcctggcgatcggcaacctgcagcccctccccgcgctcctcaccccttccctgcgcggcaagcagacctcaagccagcatccaagcctagccgacgagtagccacccactcaccggtgagtcgtgtcgtcgtgctgcctcgcagagcgctgctacgctgtcagcttccggccatggctgtgggctctgctacgcggttgcctcgcccggctagcgagctccaccgccattgttctgcctcacctgcgaccaagccatcttgccccatggcgtggcgtggccgacaactttcc

SEQ ID NO: 23000 - DNA, 1120 bp, Zea Mays
cgcttcggcctgcaaaggccgaaggtggaaattgatgacgctgtcgaaacgtgtcagagggccttcagcactgtttgctccttcattggcacaagagatttgattcaagaacatatagccttcagggtgtggccgcttgtggaaagctgggaaatgccgaaggagaccaccattgattctagtgatggtggtctggtccgactgaaatataccttcagatttagggagaagtttgatgagccaaacgacgattggctgaagtgtattgaagctaccagcgatgagctgcttggagcttactccaaggccaaagataatgctctgtccacagccttcggaggtcgggggaagaaaagactgaacagggtttttgatgcgattggcttcatataccctgattatcggtacccgctgcgagggcaagagaagaagaggaaggttgctgcttcggtcgtcccagctgatcctatgccgaagagcaaaaaggtgaaggttttgacccaccggccgcgctatattgaaccggccgtagtgcctgaattcggcgcagggtcctcctcagcagccggagcaacagaaactgctccgattgcacagagcactgaagaggcgaccgtaatgccgaaggtactcatagccgagccagtcgaggctaaggttgatagggctgaagagtcaaagactgaagaaataatgaaagtgccaaaaattctgagtcctccaacagagacaaaagtgtcgcagacgcaaaaggcttctgctgcaactcccaagaggaggagaatggccaatgtgctggatgttgtgctggaaactacgaaggttttaagccctgttgctacaaagaaagttgttgaaactacaaaaacgcaggccgaagccaaaactgggcaagcagaaaccgaagctgcgaaaactcaaactgaagccgaagctgggccttcagtgcccacgaagatggagcctgctgagcctaaggaaaaaacgacagagcggattgcatctgaaaagatcgaagctcctgctcccgaagcttcgaacaaaagcactgactacatcattcgtcatgcttcgggaaaagaactatcccaagaagaaatgctagaagcacgacactacg

SEQ ID NO: 23001 - DNA, 333 bp, Zea Mays
ccgaccattccaagaatagaaagaaaaaataataatataagccactggaatgccagagcctatgtaattaatctaccagtgtacccttggagaaacaaaatagatcctcaaaaatggcttgaatttactgaacactcagcatacctctgttatcatagttgcaataccaatcccaatggttcatgtgaaatgtgtataggaaaacggtaaccaattcacatgatttgcttataacgtaagattctgcaacaactgacattaccattatgggagggtaaatgggaacacaaaatgccaaatactttaccagtgtcacatgggacacatgctagt

SEQ ID NO: 23002 - DNA, 1171 bp, Zea Mays
tcgtttgtttttatggagtatagttgttttctaatatggaatgtgaggggtctcaatgatcgtgccaagagggattcggttaaaactctggttcttgatatcaaaccttccattgtctccaggagatcaaattatgttccatctctgattttgatattctgtctattcttagggctggatttagtaattttgtttatagctcatctcaggggactagaggaggggtgttaattgcttggtgtgatgggtcttttgtctctgtggattctgttgtgaagaacttctctgtctcagtccagtttcaggaggagtctggttcttgctggtggttcacatgtgtttatggacctcatcaggacaaccttaaacaagcttttctccatgaattaagattggtcagggaggagtgtgcggggccatggatcttgtgtggtgattttaacctgatttacagagaggaggataagaatatttccaacataaacaggacaatgttgggtaatttcagaggtcttgttaattccttggagctaaaggagattcctttgattggtagaaggtttacttgatcgaatcagagggatgagcctacccttgtgaaattggatcatgttttctgcactacaggttgggaagattcttttcctgattgttctcttcacagtaacgctacctcagtttcatatcactgtcccagtgtcccctaactcttaaagtcagagaggtgtgcttgggtaagcgacggtttcatttcgagagttttgggcctaagatccctgggtttttggatgtggtggctgcatcgtggaatcagccattacaggattcttgccctatggagaagatatcattgaagttaaaaagattagctaagtgtttgcaatcctgggggcataaagaagtgggcaatgtgaatgtccagttgggtcgtgctcgtgaggtactgcattagattggagatggcgcaagatagcagaattttgtccagggaggaaatttggttattgagacagctaaaacaacattgcttggtcctggcttctttgcaaaggacagttgcatgtctaaggtcacgtattcaatttttaaaagaaggtcatgccaatactcaattcttccaccgacaggcttgttaccgtaagaagcggaattttatttcaaagctagagga

SEQ ID NO: 23003 - DNA, 342 bp, Zea Mays
ttgctcggtaaccgtcgtgttgtgtgtagaatctggttgtttgtcgacgagaacctctaccgcagtgaagagagaaaggttgttttaggcattgttgtgtgatgtaatagcatatttataagtttattttgtgtgctatatattttagttagatgcttttttgacagcactgtttagtgaagaaggtttgttatgttagtgaggcatgcatggtttattccgtgtgcatatatgattacacagtatcgtacgagtaatctagtgtatgataaatggtttattgtgtcagtgaactaggcatggatggttaagcaacgagtagatcgagcaaggttatatgtt

SEQ ID NO: 23004 - DNA, 567 bp, Zea Mays
tgactaaatttttgctctctctttaaatagaggaggcggtcggactagtttcaaaagcaagtatcctagaggactttgtatccatgttttgagtggcttagtgccctcgaactcacaagtgattgatagtgttcacgctctataatgagtgagcatttctagtgcagtgcattgagtgagttgcttgagtggcactagatggagtgttgcaagtcgatggtgcttgttgctcttggaagttaccaccaattagaatgcttggtatcttgttgtcggtgtttggactcgtggtcctaaccaaccagtgaaatagcgtcgcgtgccccagaccaagatggtgatgcgaattgacacaagtgatttatcctagtttaggccacgaaggtccctacttccagcagaagggggatgaggcttatattacttgcaccaaagtgctcatagtgggggttacaagcatggtgggagaggggaggaccccaagtccctgggagtgattaaggcaagtgccaataccgtatgagggataatactactcagtgtttgccatctccccttgtggagccg

SEQ ID NO: 23005 - DNA, 564 bp, Zea Mays
tggcaacacgacgtagtatttgtgtcgtacgaacttggtcatgtgattgctatgttgcactctcgtttaatcggactactcccgttgagtcggaccgccatcaccgggtcgcgtatttttcgcatgccctgtaggcactgtctgtctgtcgtgatcatcaaaccacaattgtgcctgttgcgcacgttgcgtggacttatcgtataccccgattatcgagccataattgtgcatgttgcgcttattacgaaggtttgatgtgttgtcgttgccctgatggccgcacacgcgttgacgccatatacgctagagcttgtactcgtgtggattgtggtgggttgttcaagcccctgaagtcacattatgcgcaaccttcgtaaacaattttatttggctttatattttatttgactgtgttgtgtggcatcgtatttatatatcgccaagtggccataacaactataccaagctcaatagtgcatggaaatctgggaaattaaattgaaatacaattaaacacagataagttaattttctgctctctcctcatgcataaagttttac

SEQ ID NO: 23006 - DNA, 663 bp, Zea Mays
agtacaaacaaattagaaaaaaggtgacatggtcgcaactagaggaatgagcatgtacaaaatcaggcaatccttttccatgtccgcacgttacaaagtcaggggagaagatctcactctgtgaaagtcaaaacatctgaatgatcaaggagcccaatggaccaagtcctctaaggacacagaacccgtgactccacaagccgcctcatcatatctttgaatcaagcttgcgaaagccaccgatgacgcgccttggggaagatccatcagagcgcaaaggtcggtcttagggtggagttgggtgactacaaaggcgatggtggcactacaatggatgtcgtgctctatgacattccagacacaactcaggatgtcgagcaggcgctgcacccgagttgccccacaagcacatatacagtgagtcacttcatctatctatcgatgaaactctcttagcttcacctcccgccctatcaagataatgagagcacctaaaggggggtgtataggtgatcctgtaaaattcaacactaaattccaacaaccttgattataaaaatattagtgcgggttaatcaagttaatgagacgagctcttgcgaacacaaacaatcaaagagggaacaatcacaagagacacgcgattttatcccatggtttggc

SEQ ID NO: 23007 - DNA, 273 bp, Zea Mays
agtcatcctgcggcgtcgccctcctcctttcccactcccaccggtacgtattcgcggagtggcggtccttctggaccggatcgatttcgtagcttgctccggcggcggattgttctgccaaatctgatgcttaacattaagttagctggggatttgtttcttgcccggtaacctgttactcgtaatataatttgaatcttcaatcggtgcttcgactaggttcttcttgacctctcgagatcattctgcccaaggtgctcgatccccagacca

SEQ ID NO: 23008 - DNA, 544 bp, Zea Mays
agccgccacgtgtccagagaaggtgatatactccaaggcgtcaacagtaagtccagacccccatgggagagcgtcggccccctggatatgcaatccggacctccaaggttggtttaggaccgccacgtgtgcaagctagacccttgggatgggatccaggccctcccatatggggtcggggccacccacaatagggtcccaaggtcccaggacagaacatacacaggccttgaacagcacccaggcgggggtctggtatcgacacgtgtctagacctagtctggcgcggacctgtccgcatacacttctgtccccgcctaggcggagacccgatgctgccacgtggcctactgcacgtgacgtaagccaacgggcggagcctgacgtaaggcctccgggttatgcggcctctacatttattgaggataaggcgcgccgcctgtctattctactggcaggcggtgtgccgcctctgcatttattgagacgtgtccattccactggcaagcggcgacctatccattccgctggcaggcggcacgac

SEQ ID NO: 23009 - DNA, 648 bp, Zea Mays
tcatgcgggtagcacaacgaagggcaccttcgtcactatcatcctccgccacctcaaacggtgggaacaccacatagcagtgggagcacatcacggccgccaggagtcctgggaggtcttcgacttcgcctcccgccacataaaaccaataatcataccagttgccccacttgttgcgggcgcagggaactagctccacaacttccgccgatgtcttcccagtcctcagcgtaaaggtgcatgatccaaactgtgcaatcttgcttccaacttttcacttctgccagtgcaaacaataattcttggcgaagacctctacggagggctgaccgccatacgaagtcactgcccagacatacttcgctagggccaccacggcattaggtgtcaattgatggatctgcacgtcatacctctgcaacacctccgccacaaaacgatgcacaggtaaccgaaggccggcagtaaagaatgcctcaaacacaactatctcaccctccagctcaggaatctcttctgcccccagaactcgtccaactccattcccaaaataccccaactgctgcatgtcttgcacacgaaccgaggagatcctcgaaatgccgaattccaccgtgtggcccgggtgtacctccaccgccgccaaat

SEQ ID NO: 23010 - DNA, 886 bp, Zea Mays
acacagttgtggaggcctgcggggccggtgactgactgaccgaggtcgaggccgccacgccggaggtgcaccttgcctggcacacacccatggagaccgacaaggctggcgaccgaggccgaggccgccgcgccggaggtacgcctggcccggcaaacacccgcggaggactccacgacgaagctggcaaacgacgcgacgagatcgttgaacgcctccttgagtagctcgaccttctcgggcgggaggtcggcaatcgactctgcgccgtccagaaggccctccacctacggcaggtccagcacgacaacgcggaggcacgcgggtagctccggcgagatggcactcaacctgagaacgttcctcagcgtggacacgaaggtgatggcgtagctatggaccattgcagctctctcagatatgcgccctccaccgcccccgacccacatctagctttgcccccaccatcgccttggctgtagggagctcatcctcttcctgctcgtgtccaactcctccaccgaccgcgacgcacggttcgatcggatctggcggggtggtggtggcctggtggattggatgcgtcgtggctttcatggtgggggaatcatatgagggctggcgcaggcgagaggttgcgagcgaggcagatggacctaggcgaagcgctagagtcggcggcggttgttgcgggctgggtgacggctgcagaatgtggtggcgtgggggagtggagagaggagcatttgcgatcgggtgtcgacatatgcaagcgacggaatcgcagaaggagaagccggggcgcgatgactttggtgctggggctggtaggagggatcgaggcacgatgacatcacgattagagctagcgggcgggatccaacgg

SEQ ID NO: 23011 - DNA, 375 bp, Zea Mays
tagtgctgtctcctccaaccctcacaatagacatgtcacgaaagtatcttcccctcatagcgtcaacatgactttgcttaatagtcgactttccgaagatggtatggcttggtcgccagggccggtcctcagaatcttcatctccactttccacatcaaagtcatcactgtcattagaatcttcagataaatccgccattatctcttttgtggttttctctgtatttgtttttgccatggattcgtaaaacccagcaataaaagggtccacaaccttcttctcctcatacatcttctcctcctcggatatcttcttctcctcagacatcttctcttcagacatggaacaaacacttgtctttaagacgaagctcg

SEQ ID NO: 23012 - DNA, 485 bp, Zea Mays
tccggtgcgtcgatctctaaggcgacttcctcatttgaagcatgcgctgttactatgccaccataatgtggtggagaagacccgacgtggacatccatggaggtatgagaaggggagcccgcattgcccatcggagccagatcgccaccggcaacaccctcgggggttgggttgcagcttgcgctacccacccgagctggatcattaccggcaacaccctcgggggctgggcaaccgctggcaccatccttgaggactgagttctccgcaacagccacctctaaggctgaaggactctcagtcacctccatgggaatcgaacaaccttgaccaacctcttggcttcgaagaccgccttccaaggtcgacgaggcacgagacgctgcccgggatacctctaatcccacatctggaatgtcagagcagacgtccatcatatcaccatcagttggctcggacagctgatcttcaggaacaacatcctc

SEQ ID NO: 23013 - DNA, 369 bp, Zea Mays
ggagtattggacgcagcatatgccgaagccgccatcgtctgaatctacgccgagcgcccattcagccgagcgtgccgcccgtcccctccccgccattaactgccatagacggcctctccccttcatctccccacttgaatccggccatttcttctccccttgctggtgtgcgcgtatggtgcttaagcgccatcaatggtgattcaactcctccctgctcgtgctccattcaatccattaatgacgactgtttcttctccattactcccatcacagcgtccgttactcctccctgctcgtgctccatttaaacggccgtttctaccactgtagtgacgccaataatgactgacgctactgctcctcgac

SEQ ID NO: 23014 - DNA, 605 bp, Zea Mays
ggatttctagggtggggggataaggtttacacgattctggattggggtgcatacctactccgtacttccataagctatcttatctcaaacgaattcagcctgagctgatgattgcttctcggcacaaacaaatttttttttgaaaaaatatattctcaagccagtgtcccggccggctctgcgtcatgtaccgttaagcaaccgtgcgcgttaaccacaggctgaaatgtacgtgacgacacttgcatcagctacgtactcagctgtcgttcgttgagatatttttcttcggatgtcatccatgttcctaccagcataagtggatgatccacacgtgtgccgacgtgcggtgtgcgagctctgctgtcctttggcgtccgtcagccatccattctcatcagtagtgcctagagagaccgaatcgaatcgaacccaccgacaccaaccggcctcttccggccaaaccttcgccgctccaatgattccaatccagccacgaggtcgtcgtctacacgaacatgatcgcatctcccggtcgtgttgcccttgccattctcactcaggtcgatcacccaccgcggacatcttgtatagccctgtccccc

SEQ ID NO: 23015 - DNA, 320 bp, Zea Mays
tgccacgagagaggtagataacgtcgaggcagggtgaaaatatcagaggaggggtgaatccggtcgctggccggaccggccgtcgtgtcccgccgcggtcagtcgcgctggcatcaccggagctcaccgttctccggccgtgccacgtgcttaggaatgttaccacgtcgcagtgaaccataatagggagtctgtccatcgtcggaggctttgcctcagtgaaagccacgatagcgctcgcgctagtgacttcctcttctctccggccgccagcgcttcccttccaaattcggagccaccgctcaaagcctctataaatt

SEQ ID NO: 23016 - DNA, 683 bp, Zea Mays
cttgcgcgggtgctccaacgagaactagggaagagtgccggctcttcgatacctcgggaaaaattagaggagtcttctaaactttgctttacatttcacatttaattcaaggattttaccttgtgcatttgtttagcaagtagttgaatcattgtcttagtattgttgtatttctagtagtattctcttattgctagttgttgtgtgaagtttggatcttgcttagggtttaattattgttgatttttagaaaaggccaattcatccccctcttgggcatcgtgatcctttcacacaaaaagtgtgtgcgcccgatccaccctggcacgattggcagactctgtcttctcgcggtaggcatgcatgctcttcacctcgagctcaagctcggcagcacgcttgcgggaagcttgggcctaagcacaggtgctctcggcctccgtctttgcctcggtagcgacttcttttttcgtcgttgagccgacgactaagatattaattctctttctcaagcattgtcaccttatcaagaaggttttggctcttattcttggccgctgacttatcctgatagcttaggtatgttgcatctgaaggcgctcaattttgccctcgagccatttcctctcataacgtagctgtgaggttgtaacgtccaccagcgccccggacgcaacatggtc

SEQ ID NO: 23017 - DNA, 523 bp, Zea Mays
cccctgctcacactagggtccttctcgctccgggaccctgctggagttcggacttacccgaaggctccggactcgtatataggggtccggtgtccttctgtgggggtccggccttactggggtgtggtgtctttccctgccacgtggcgccctttggcctgcccatccggtggggtcatgcgcggtcctccgcgtggctaagggacgtcgcatgggtgcggtgtcttcatgctgtaggagagggtacccctgaatttgggtaccgacagtggccccctgtcccgcctcaggggaggatgcgagcttgcaggtgggaccagagtctgattggcggttggtccgctgcttccgtgtgcccgttgctgcaatcactgccggcccgcctatgaccatgccaactgtcgtgcctattcccacggctgactgaaccgtgaccgtcgtacttaacgacactattgggccatgcgcggggctgcctcgaattgctccactggttctaataaatttaccttttcagaatccg

SEQ ID NO: 23018 - DNA, 506 bp, Zea Mays
tgctggtagactcgggcagttccaccagttttgtcagtcagagaattgtggacaaactgactttgcagacagagcctgcttcacctgtcagggttaaggtggctaatggggagttcatgttgagctcgaggagggtggcagcattagagtggtgggctgatggacatacctatatcagtgacatgagagtattggatttagaagcttatgacgccatcttgggatatgattggttgaagggtcatagtcccatgcaatgtgattgggataacaaggttttggtgttcaaggatagaggtgtggaggtgcaattgaagggagatagcatggagaacaaggaggtgctgcaagtgtctgctgctcagctgcagaggtggatgaaagggaatgaggtatgggttctggtgctgttagagtcaatgcaggaagaagaggttgaaaagcatcaagaaccattgcagctcatactcaaggagtttgaggatgtttttgctgtgccaaccggg

SEQ ID NO: 23019 - DNA, 437 bp, Zea Mays
tgtcaattcctttctactctcggtgtctcgtttacacttattctaacacgttatcagtattttgcctaccgccgaagtctaatcggccattgcgttgaagaagggcgagcgcccacttactgcagatgtcccccgatgaagaatcaatacaagatgatccattggatagggtaacaatattctgattctaccttccatggatcttgattcattttgcatacttcctggacttctccatgcaaccgctgcatgaccgccgtggtgattgccgcatgatgtgacatgctctcacgttggacatgcataccacgagtggatctttgggtgattggcgacatcgcagggagcatcatagcgactaaccgcaccaagatctggatcccacgccgaggccgcctgccgtcgagccaaggctgcggtcgcgcccgcgctcgcgc

SEQ ID NO: 23020 - DNA, 863 bp, Zea Mays
ggctgagatggtactgcatgttggggcactcaggcagcagcgacctctcttgtttgcttgcttccctttgcctcgataacacgcgagctacagtggaggtgatgatgatagcagtgcaagaggaaaggggagtcaatggtcttgcctcggtatcgcgtgggctacagtgggcgtatgatgatagcaccccaaagcggcaaagggaggcaatggtcttgcctctgtaatgcgcaagttactatgtggcccatgtactgcaaacacaccgcctgccactggggcaggcaggtatccgtcttgtccgtagttaatgcagaggcacttcacactgagaggttgacgtcaggctctccccgttggcttacgtcacgtgtcgtagaacacgtggtagcactggacctctccttgtgtggggagtactgactatgaccgcccttccttgtgatagctccggaccacccctggctagggatccagatggtgttcaggggaggtcatgtttcctccagtgttggccagcacgtggcagcaccgaaaccccttaggccagaggtccgagtggcccaccatgagggtttggggctgtttctaggggtccggcccctagacataggtgccaagagcccttgcctctaaggcacatggcaaacccgaaccccctccactagggttccatagcgctgatcataggtgctagccttcacttgagcccagtggccttactgtgcatacctagcctctaggctaggacggaccgccattagcctggtgagtaagggtactcccggagggtccgccttgacccaacaatagtgggtactccaatcttgaggtacagatagtggcccccaggcccacctcgg

SEQ ID NO: 23021 - DNA, 710 bp, Zea Mays
ctactctcgttataaatgaaccgagcgagggggggcagtcagccttcgccccaacacttgccccccgaggggccagttcagctaagtgagctggtcctgaagtctttttcgggagatggccgagacgctgctctcgcttagtcgaagtggtctcgcggggtttttgaaatgtgaccgttgaaaggtgacgttttactgtgggactgttgggttcccaaggcatttttcttggcctataaaaggccacgcgctcaacgctgtgggattttttcccatctccttgcggaaaaaacctagccctgttgctttctgcgcgtcggtttctttctctctcgccatcggtgatctggcccgcatcaagcagacagctcgtcgccaccgacggtacgtgatgctgtcgtcttcttcttcgtcgttgtccgtcgtgaccacgtcctcgaacgtgccgtcatcggagaagacgattagtgatccggcagcggttgtccatctgcagcccggccatgctgtggagttcgggacatcgaggatttactcgagccacgtgcacaagatgcagcgtttggggtaaatggggttgtgtgggcgccgggggctgaagatgtccctgagccaggggtgagttggttgtgtttgagacattttttactgctggacttcgcttgccgccacaccgatttatagtggaggtgctgtgtgttggtcacttc

SEQ ID NO: 23022 - DNA, 916 bp, Zea Mays
gtgtgtgtgagtctctctcttagaggggcagcagcgtcattttaccagcacggccagcggtggccggactgacggcagacggcagtacatgccgacaaacatgcccttgcagtcctgcctgcccagcccaacgcagagaaagaagccaccagagagagagagagagagagaggttggctcgttgccacacgcgcagcagaaagcatcggctcggcctcggcggccggtgccgagtcgcgagagcccggacacagctttcaccggagtggcaactgtttgaccacgaagcacggctcgctgccattatggcaccacggattcgggcggcttcggagattctccttttgcttcgggttcggggaacaccaacgccacaggtgatggccacaggccatgctgcagcccatgcatgctagtactaccagttccacgatgaggccagggagcaggaagcaggaaagtgggtggggagtgggacacacacattgcctagctagtaccctacttgtagctagacagctgctgcgcggcctgccatcagacgtcctcctatcagtagcacacaacacaacacaggcaaggcaggcagtacagatccaactacagagtacagacacgctgcacaaccacgagtacacacacagactactacgagtacacatgcatcgaccctactaggctaccgtccaaagtccccccagcctacccctcctcctcctcgtcggacgggtagaagagaggtctagaggaaggggaaggcatacttgacggacttgagactctcagatcaccgcccggcccgacgacgccaccaccaatgcaacaacgtccgaagcactcttcctactccgccgcatgcccgcgtccatcgtatgcatgcttgcatgcatgcatcgtttgactccccccatgcatc

SEQ ID NO: 23023 - DNA, 740 bp, Zea Mays
ggtgctccgcttggagatcttcaagggccttcctggtggcctccaccgcctggagacccggcgccgcctgtgccacgttgaactggcggatctgctcctccagcttcctctctttctcctccgcctcaagctcgtgctcggccagcaactcacctcaccgggtgagcatttcttccctaaaggcgagatccgtctctcgcctggcgaggtccatctcccgcctgtccaaggactgttccttcgccttcagattttcctcggcgagggcggcatcgctggccttgccctcgagctcttactcccacttttgcagcctctccacagccttgatctgctgggcccactaggcttctagagtctggtccagggcactcagcttggcctagtactctgttgtgagggcctccctctaggccacggcctcctccctcctagccaccttcttctccctccggtgcgcctccagctccctggcatacaccttctggaggtccttcttgtactccttgcggtcccgctcgagttgggaccgctcggaggtgaattgttgggacgtcgacttggtgcgctcttccagttgtgtgcgccagtcgctgaggcgctagtgctcagcctctagcgcctcccactcccgcaaaattgctgccccagtgtcactaaggacttggtgggtgcgggacagcatgcgggggagggggattggcacagcttcttgctcggcacccgaccggagccgtcgc

SEQ ID NO: 23024 - DNA, 518 bp, Zea Mays
agggagctgttggagagggatggggctcatcgagtcgtcctcatagtcggtctctctggtatcgggaagtcatgcctcgcacgacaaattgcttctgatccgccacttagtttcgtggatggtgcgattgagattggttttgggaggtggtgcagcacggcagcatgtaatgggagcagaaacgaataccataagcgccttgctaggaagatctgcacgttccttgtgcagatcggctccataactctcaaggaggatactggaatagatcttgatgatgtctgttgcttgctccagacggcattggtcggaagaagcatgctgatcctacttgatgatgtttgggagcaagacattgttgatcgcttcacaagactttatgataatgattaccggtatctcgtgacaacatgggatgaagctatctacgagatagcagaagctgaaaaggtagaaatatgtaaagacgacatcaaggagatcagcacggaaattcttctctatcacagccttctcag

SEQ ID NO: 23025 - DNA, 419 bp, Zea Mays
tgatagtaagaaagtaaccccaaaaagatttcagaaaagccccaaaaagttcaccaaaggtttgaacacaaaagaaaaatcagaaaatgcctaagtccaaaactaacctttggacaaagatcacacatgttcaccctcatccaaaattcaaaacacttcgacccaattgacaaaggggcgccaaattaaccgtagaaggccctggaaaaagtagacacctacccttagacgtttgacacgacttggcaccatttttgtctcagtttgaacatgtctgacacagccgacttcccacccccatatctctctaacccgaccacatctacccttggaactcacatgaactaggtagctctaggtgcagggaagagatctcccacaggctctagggcaagattcatacgttttggccgctcagc

SEQ ID NO: 23026 - DNA, 341 bp, Zea Mays
atgttctccgtggtggtctggagccatgtaaccgcttagcctagtctagcaccctaagtccttacactccatcctaggatggttgttctggaacctggggctggcccctaaaggcttatgcctcatcttgaccgaggtgcaggtcttgagaccttgctcgctgaggttcagaaacaaaatccagaagattgaaagtgttaggaacaacgacccgtagatacactattgagcaccataacgaggccatgtgtagggacccctttttgcagatcaccaggtgaggaggcagaaaggagatgtcataaggaagagcggtgcctcaccaggcgaagcccgacgct

SEQ ID NO: 23027 - DNA, 531 bp, Zea Mays
cgagccagatcattactggcaacaccctcgggggctgggtaaccgctggcgccatccttagggactggattctccgtagcagccacctctaaggatgaaggattctcagtcatctccatgggaatagagcaacctagaccagcttcttgactccgaagaccgcactctaaggtcgacgaggcacgagacgctgctcgggataactctaatcccacatctggattatcagagcaaacgtccatcataccaccatctgttggctcggacaacagatcttcaggtaccacatcctcgagagcctgatcaaagttagctatggacaattcctgcagaccaacaagagcagacaaagctggagaaggaatatcgctacactccccactaactatgtaacaccgactgttcttccgaattaaggagatttcatcctcttcttcctcatcttcgtcaacaatacgaacaacacacccattggggtcagctctggccggatcacacccattgggatcagcatcatcaaggtcacaccca

SEQ ID NO: 23028 - DNA, 1228 bp, Zea Mays
ggcggctgccggagccgcctggcgcatagcatcgtggacttggttatggaggagctccgctcccgccggcgcgtccgggtctcggcgaagtaattctccctgcacacctacaactttatgtatatcgccggtaccattttttggagccagtgcattgcttgagctgcatgtacggttgaaccctgaatttctgtcaggacatctgaccttttgccattgtgagtggctggctgcacactcaacctcttgattccccccctccgttggtgcatggggaacaggaactgctgtcaactatttcaccataatgtgcctactcttgtgtttacttcaaaaattcatttctataattttgtctatggcgagaattccagaaagcatataacaatgtatgtcggtagatgggcataaaatgaggtaatttaggcacatctcaatgaaagttctatccgagttccatcttcatttaataggttgctatataagcatttctaatgacatgacagcatttccaagaagtgagagaagatttgagtttaatataaataaactctcttggcttgatcaccaactctaatagagtcatggaattagatgtacatacgaaacaatagaataaagccatgcattgagagtgatcgtttcatctatatttcattgcattttagctggtgtggcattcatggaaacaacgttatgaaactctccattaggatggctttcaacaagctaatccaatatcacagccatttatgtgggtaatatacgatgatgctccccattacatggtgttttctcctcttcttactttcattttgaaagatttttatcgtaatttctgaaatggttcatatggctattaaaattggttatcactatttcatttcttctaacaataaaactcactgaaatttactgttggaatttcttattctacttcaggataggattgcagggcacgaaggaattgcctgacaataagatagtcaagagaacattacagaaaggattgctgcttgaatttcagaaagatcctgagagatctttgcttgctgtagttgaaaggcctgatggaaagaaaaactggatggtgactgatcaggtcgtttttgaacggatagctattgcttgtccagttgactatccagtttagttaatttatacctgaacatacatatattgttgttatgggttctctggtgacatgacttttacttttgtatagaat

SEQ ID NO: 23029 - DNA, 597 bp, Zea Mays
accaaagctaagcaaggagaaacatctttaccagagatcatcgcgggtggatcctcagccatggtggtgagcagtagtggtgcgtcgacgaagaattccggccgctccgaacaccgggcgaccctggtgagagcaccacgagcattgttgtggtccagcaaaagcatccgggcaatcttccagggagagttgcaatgtggagagaccccaggtgtggcggctccccgcgtcttccctagcgcgaataacctggtgctggtgctcatggctgaaggtgaggagctctgctatttatagaagagcaggcgcggattctaaggagggcaggaggtaaacgaatccctccattgcaggagcggttgttgcgctagcaaagcacaggtagcgatggctacggcgagatctccgttccatggttctgttgtagccatcagggagaagaagggctccaggcgacatggtccacaagtcagccaccagtgcgggcggggccatgtgttagcgataataggcgcacaatcacgtggagtcacaggtcgagccgtgacatgaagttgacatgggtcgcgcggatgtaacgccctgaatttgggggta

SEQ ID NO: 23030 - DNA, 529 bp, Zea Mays
tcggccgccacgcggccactgatccttccggtcgtgcctggtcaccggcgccgctcctctccgttcatccacgccatcaccgatttgaccgcattactatcgcggcgggacatggcaaactcataggaaagggcagcgcccgacgtcgtcgttggtcgccagcaaagtccggtgatggttgtcaccatggtcgtcgcagtagctcgctgggcctataaattcaccgcgctctcacccctgtcatccaaatcaaccgagcatagctcttcgtcccttagttgtgaagctaacgactcactagccaccctgttctgtccaccaccctaagagatcatcggatttccctggaatcggtctcttccgccgccgtgaaggacccctctgtggccagcactcctcgggtcagtacctaccaaattgcttcctgttctagcttgtctttggccttctattgctctcggagtcggccaattgaactttaccaaagcccacacttcggaacacccagtcgtcccgtagaacggcgccg

SEQ ID NO: 23031 - DNA, 493 bp, Zea Mays
tttgctgccaaatttttagtcatagccgaagcttgatcattgcgctcatacaaaatctgcttcggcgcaagtgtaagagcttcggaaaagacaaaaaagccaattcaaaaaatttcaagtaagtcataatcaaatggccagagtctgctctactacaagagtcgatcgcgagggagacgaaaccgaagctgtggaaactgttcctatcttggaagcaatgaagcgatctaggttgatgacaccggaagacgtccctgctgctgaagcatagcaagcagatattgaagagaccgattctgaagatgattacaacatcgcagtgccgagcaagcctagccacctggacttcggaaagtcgaccatctccaaagctgattttcctaagatggtgaagtcgggctactttagcgaagataaaaaagagctgattcgcttcggtggagaagaaactactccaaaaccacagaaagatgaaatagtgattttcaagagt

SEQ ID NO: 23032 - DNA, 341 bp, Zea Mays
cggttatttacccgtcgggtacggatatggtggattttcatatccgcgggtacgggtatggatactatatagtatccacggttaataatttcgcgggtatggatatatgctatccatatccgtcacccgttgagcatatgacatgtgggtatattttccaggtgctcttgtctgcttcgagtgcgagtccgtgaccacgacccgccatccgccagccattgcagttgctgtctgcgcctccgctgtccgcccaggaagttgctggcttgctgtcgtccgccaggcacactacttctacggccagcggtccagtccagggactccgggccatttccgttgcc

SEQ ID NO: 23033 - DNA, 738 bp, Zea Mays
gctcttttggaagcaaaactccaatctccacaagatggagaacgtcagattcagagataatagacatgtggttaccagcaaatggaagctggctattggggtcgatgggcggggtgattgcagcaacggtgctctgcctcttccgcttgggagccatcacaatctttcgggcgggacgagcgggcttggaattttagggaaccagaggaacggctaaagggaaaaagtgaagttagggctcggaaataaaaaaggcacgtcggcgcgagtataaatggggtttcttgggtcgggcattatctctaaagtgctagatcactattcgaaaaagcaaaatcctcagacatcactcggcagttacctctaaaatgccagcactgtcaagcacatggacaaactttcaaacgcgcaaatggaagtcaacaaaacagtagtcatttgaagcaaccaaattcttgattcataaaggagggggtaacacaaactcgaagccgactcgttatgagtcaacttctttcaccctggttactacattacattatactaccatactacttacactacactatactacactactaactaccactacattattctactgctactactactgctgctgctaactgtctataccaatatttaaactagtggcgctatgccactggccttgctgccgctgccgccctcgccgccgttgctgccaccaccaccgacacccttgttgtcgcagttgtt

SEQ ID NO: 23034 - DNA, 458 bp, Zea Mays
tgggcggttgactgcaaacgttcaaggaaggagaaagcgaaagaaccacagaagtcggaggccaatctggccgtcggcagtgttgaggatcatggtgccctgatgttgtccatgtgcgatgttgcgcataactcatcttatgatgttcatttgacagagaagataataccaatgactgtccctgatggtgtgtgggtgctcgacactggagcaagcaaccacatgactggaaacatgtcgatgctgacacaacttgatcaaaaggttcaaggaacagtgaagtttggggacggatctcgcgtcaagatcagaggtatgggctctgttgtgatccaagaccgtaagagtggtcataaggttttgactgatgtttattacattcctgagttgaagtgtaatatagtaagtttgggtcaactggaagaaaaaggttttctttttgagggcaaaaatgggaa

SEQ ID NO: 23035 - DNA, 674 bp, Zea Mays
catccacaaactaaaatgcacccatgtgcattttagtgccaccgtatatatatatatactactccttatgtctttagtgtaggtgtccatagtttttctgttctgcaatcgcgcgctccgcttccctccccgcgcccgcagtccccacgccagctacgcccgcagaatccgccgcgccagcaacgcccgcgattcccctcccgcgcccgcagtccatccaagcgtagcatgccgtgatccacgccggatgcggcattcttgcccctctcgctggaaggaatcctagccccctcgtgctagaaggaaggctcattcgtgctcccaaaatccacgcgcattcgatgggatccacaactgtcgccgctgcccttcaatccttagcgcacccttccaacaacgacgccccacatcgatacctgtgcatcgtcggcgatccacaagtggagcaccttcgtcggtgatccccttccatgctcgtcccccttctatccccttccatagtcagtgaaccacatgggagattgatttgttctgttcctcagtctccacctccgctccgaccaccgatcccacccgccccgatccagatcaggtaaccccacgccgatggtggagtgggattaggagcattcggtgattctggatgaggaggatggaaacattgaggacgtccc

SEQ ID NO: 23036 - DNA, 448 bp, Zea Mays
aaaagaatgtgtcggggaagtaggatgggccggggtggagagatcaaacaatggtgcatgaggtttaggattcaatgaacaatatgggtgtgaggaagaagaaaataaggtacttgctacttagctctgatgtgaggtttaggtacttgatgttgtacaatatcatatttgtgacaaatcttaataagcatacatatctagataagtacttgatagatcatattaggtgatcattagcactaaagcaaaccagcaacaatagccgcaagaaaaccaccgacactgaccgacatttgttctcctttgctcatgggcttccaaagttgtgtagtatatcgaaagcgtctttatttggcatacggtgcacctacaatgacactgccaaataaatttagcagaaatcgatagcaaagagagacacggccgtcggctggccctgacaaacaag

SEQ ID NO: 23037 - DNA, 609 bp, Zea Mays
cgaatgcatcccaagatctcttcatcgaccccaccgaagaacatgaaccccggttggtaaccacaagacacagcgaattccttcagctctattccatcctcctcagaaagttcctgaccacccaggtgccgaaggtcaaaatctttctctcccgaaggactatcaacaactttcttccctttatcaggcactacgaccatgctttccttcgcagccacacctgtcccctccgcaaccacatctgatataagcttgtcaatttctgacattgtggttgcgagttcttcagcttcggctctgcccgcatcttcagtatctgcaggaattgttgctttcaccgccgaagctgaaggtggcgtttgctcaattgcttgcattacgttcacaatccgctgtttcttttgccctccaaccttctccttgtagctgaaggcaccttcatcttctgtaaaaggttggtcagttccgacctcagaggacttatcaacttgaatggtggggattcagtcattaccttcaaaatttccgccacctcgacagcagtgggcgacgaagggctcaaggtttctttcggcgcttcatctaccttcggatcggcagaaggaattt

SEQ ID NO: 23038 - DNA, 492 bp, Zea Mays
ccaacttttttccacaaccagcttattctcacgaccatattaaaaaaaagccgaaccaaacgtgacctatgattgctgctcactaagtgttacccaaatcgtcagagtgagggggaggcggagggtgaatgtgaacttccggatgtctccaattgcttctgatcctgtccactccattaccaagaatagcactccatgtatcttggagtagagggaggaggagggagctcagccagtcatctatggattggtgccccaaacaacaagaccggccgagagggaagagcggaggccggaggggtcagctcttgcacttgtcaggggaggctagtctaggctaggggatctctgattgcctcctatcctctcctagccctgccctgccgcagcgcaacgactccgaaatctgaatcgccgcctccctccgccattcgcgtcagtgacatctattccttcaattcattcagtcaggtaacatcctcgacgccccca

SEQ ID NO: 23039 - DNA, 331 bp, Zea Mays
ttgatgcagatggaatcgttcctccaggcattcttcccaaacatcctcaagaagacaaacaacgcgcagcaggacacgtactgcatctttaaaaaccaggtgctcaccttgttcgtttcctcgttatatctcgcagccatcctctccaatctggtatccggccactcgacgaggacgatgggccggaggaactccatgatgataggcggcatgtttttcttggccggcgccatcctcaacacctccgccgtccacatcagcatgctcatcatcggccgcatcctgcttggcttcgccgtcggcttcaccagcctggtgatcactgctcagc

SEQ ID NO: 23040 - DNA, 1194 bp, Zea Mays
agccaatcaactcagagtctgaatttttactgatagtgacttgggatgaactttgggagctcttttgagaatgatccagtgagtatctgagtgtggttactatagcaagatcgaagttgaattatagatcaacaactttgtcacaggatgataaacaagttatcacataaaaaattgagatctgggccctgaaacttgctctgttagacgctctgatggtgatcaccatggtacagtgactgaataagatcacatattcagctcccctcgccaccgatgaccctcgcgtcgtgatccacgtcgtcgccacgattcatgctctctggtgaggagattatcacggcagggtaaaaatcttggcaccggataggttcggacccggtcgacggtgagctcgccgtacccacttgggctgcggtcggggaaaatggtcctcgtcggagtttggccgcctactgaccgtgcaccacgtgccttaggccgtttccacatcgtagtaaactactaaagcgtgtccggtcatcgccggtgaccttgccacggtgaaagccacgaatcctttgcgccagtgctctcccctctctccggccgccagcgtgccattccaaattcaagagccaccgcccttgggaactataaattaagcgtgccatcagctctgctaggtaatcacacacccaatgcaccagcccgtgcctcagattgtccaccagagcgctccaatttgggatttcccccaaatttgttaagaacaccgctatgtgtgagctcgccgtggccagctctccaaaggtccgatcatgccctcctcgttcttgttttagctctcttatgtgctcttgatgcttctcgacccggccaattgaattagaccgcgttagatcgccgcgaacacctcaggttatcctcagtttgcgccatcaccgtggacagcgtgattcagagttagaactctgcaattgatggaggggaaatggtcgttaagggtagaattaggtgttgagcaacggagaagcatagccgttgcattttccggccggtacgggctcgccggggccgttgctccactgtccatggtcaggggtctcgatgtgtgaagaaatagagaagggaaggggctatctacaaacgtcagtgacacacaggaatagtgcgcaagagtctttacgagttatttaaaagagcagggtcctc

SEQ ID NO: 23041 - DNA, 524 bp, Zea Mays
ccctagggcccgatcggcgccgaataactgtctcgacctaatattgaggatagggtttcatggccctacctttgcgtttgattttgcaatgcccgtagagctatgcgattctataaatgctgaatatctgtgatcgagatggtttcttgctgagtaggctgtgcgatttacaatgcaatgattttgagttgaacagaggggagcccagaaataaccatgtgtgcattaatgaagtgcgatacagtaactagcaatggcatgacgatgcacattgcatggtttctgcacaaatttctgcttacatgttattatagccattgaaattgtgtgcactatttgcttattttcaagttcacacaagaggagcacactattaattattatgttcggttaggggtggattgaaggggattggaggtagggatggtagtgggtaaggtacccaatgggcacaccgcacacaaagccatacccgtacccactagagaaaaatgcctcatacccgctacccatcatgggtacaa

SEQ ID NO: 23042 - DNA, 360 bp, Zea Mays
atttgatcggtgacatattggacgtctggctagttgaggcagatggctctcagctggacatcaccctgctctgtgcctcaatgcttctgttggttagacttgcgcttcagtagccacatttggacttccttccatctcaaccgatctcctccttttgtcgtggtatattcattgcgtatattttatggatatcacctgggcgacacacccatttgcctgagtagttgacttaggtccaaccagtgtcgtgttacgcaaagcggcgcctgttgcctgactcattttcaggcggcttgaattgcttattgaattcttgcgactgttcgacgaatgaggtaggaagtggttggtcaccccagc

SEQ ID NO: 23043 - DNA, 373 bp, Zea Mays
caagagttcaaataagaaggatagagttccccgctgatctaatagttatgggtaaccaggatgcgactatagatgtcatcctagggatgaattggctaaccaagtatcaagacagtcttagctgtgacaaaagaacagtgaagttagtgtccttgtcaagataagaagtgttagtggagttggtcttgtctggaccaaggaaaggaagctgtcaccaagtcaccgcccatattgaggagattaaaccatcagaggctatcaaggtagtatcagaattcccagatgtgtttcccgaggagttactaggtatgccacctaaaaggaaggttgaatttgccatagatcttataccaggcaccacccctatttccag

SEQ ID NO: 23044 - DNA, 720 bp, Zea Mays
gtttggcaccatgtgtcaggacccaacatttggcgcccaccattttcgcttcgaagacgaaacccatgatggctcctaggaaaccaaacactagggccaactcctccctaggatgaagtcgtaaaggcagtcctcgtcgctaacaccaagaaagctaaggtcgcaatcaccaatgaagtcttgccaccctagaaaaaactgccccctccattgtcaatgaactagaaggtgacaccaatcatttccactgcaaagagcaactcactccataggtaagtgtccacacctgtagcttagagaccccaagtcatgcccctttcaacccataaagccacccttaccatgccaaacttgcctgacctaacaagaaacatgccttctaccccttggcttcgcactcctagagcacaaccaacacccctcgatgaatatacccccaaatgaggaagacaaagacatttttcgagacaatgaagcctcgatgtcaacaccaaagaccaactactcctcaagagtctctgcatgtgcaacaaaaacctgcaaacacaagaagagaccttagcagccaagagaaagcatagcaaaatccaagccaagatacaccacctcataggaggaaagagaacgatccagagcccttgaacaagaaattgcacacctgcaaagtcaacaatttgcccccatccttctcatcatacagttatattgaatgcctttgac

SEQ ID NO: 23045 - DNA, 349 bp, Zea Mays
ggctctggcatggtgcggagcaagaatggtgccactgcgagacattgactcgctcggttgaggatggagggctcggcggcatcaacgtcttccttgatgcaacactgtacatctcgcgccttcgcccgcgtgcctccatcgagggctttaccagcagcctccccctccagagcttgtagcagctgctgcaggcattgctgctcctccccgagcttgttgtgtaactctcggagttgctcgaggtgagccacgtggctccctggaggagtctgggccccatctgggttacatggtggaggctggtcatcttcccgtggcatgccgaggtgatctccttcctcggggatct

SEQ ID NO: 23046 - DNA, 401 bp, Zea Mays
gatacagggaggctaccacacacattcagctctggctccttggtgccctggtctctcactctgagtttgacgtcgtggatttcctcatttgtgagatcgaggacactgtattggatggtctgcgtgctcgacgccagctgccgtatgctcactacttgtgccacatttttgcgcagctgattcagcctccatagtttcagggcacacttgaggcctcccgccttgtttttggatcctaccgtcctgcgcctgaggctcctgtgccagcttctgctctagtttgtgactctcaggccgaaaatgctgctcttcatcaattcgaggctcatgatgcagcagttgttgttgttgatgatgatgatgatgatgatgattttgggattcctccgcctccgcctccg

SEQ ID NO: 23047 - DNA, 1315 bp, Zea Mays
ggcccaaccccaatttgtctcccagccggcccatttctccacaccctactcggcccatctacctcttgccccctcccaccaccgtgcagcccaagtaactcacccgcgcgccttagcatcactgacgagtgggcccacttggtcgacacacaccgcgtgcgcccgtgctggctttctcgtcactaacagaggaacccacgtagccagcgctctaacgtctgcgaccctcgctgacgggccgagcccgttcgccaacggatctcactgcgtcactgccatgtgggtccatattgtcgggtaattttcttctacctggggcgctctccgtaacaagcgccggagatcccgaaatcgcctgcatcgatctcgctcgcccaattgaaccctcacccgccgccatgaaccgcagacttggccccgtgcaatcttggagctctgggatatataagtgcagggcgccgcaaacaccagctcgagctgggaggcaaacgaagagggagaaacccgccgtcagattagtgcacaccgaatcaacaacttgaccgtcgtggggcatagaggcaatcccgagtgactaccgaagctaaccatggccttccagggcggagcaaaccaccaggccatcgcgaattcttcgccggagtcatctcgccgttgtgaatccgccctgggccgtggtcggggaattccgtgctgtaattgccagtccgcttctctctcacagattcacattctcgtatggtacgcatagcatcattctggttggaggattgggccccggagtacgggatctgcgcgctccggccatggcgccgccaccagcttggggcgccgccaccgcatctcggcctatgtttggggtgacgtaggagaagccacatggcctgttggatcttattcaacggctaggattaggatgcttttacccgttcggtttatttgaatctgggccatcaatagtcgatcgggcgatgctagtgtagctcgcgcttcggaccgtggatctaagatccaacgggtactattgtgtaccgattgggatattatggtgatctaatcgggaccatctaatgcggatcagactattcatggtggccgataccccttcggccggggtaaaattcaaatgagccccccgatttttctctaaacaacctgcggtcctaatcaattttaagaccattgcaacggggtcctatttttatcactttagtccctgaactttttaaatatacccctggaaacctttacagagttaaaataaataattaggaaacctagaaacttgtttatggcataacttactcgttttaaa

SEQ ID NO: 23048 - DNA, 483 bp, Zea Mays
gggaggcactccttcagtcatagctagacagttgccctcgggtcgaagtattcccgttaccttgaagggtccttcccagctgggggagtgttgcggagccctaatctggtttggtacttccgtaagattaggtctcgaccccgggtttccatctacatttgatgaaggagcccccgtctttggctgcgatcattcctggatgaacctgtcagaagtctagacccgtggggaatacagaagggtttccggaggaaggcaggctttagctccgtaggccaggggacatggggtcccaccggtggtccgtctagtcgtcgccatcggagtgggagtccctagtgaagacgtcctttaggtccccttcgggtgactgatacccgaggtctcgctcagccgcggctacctcgccatcgtcgaccttttccttgccagggcggcgacgaggtggggagccgtccttggaagactgctcacgccgctcgc

SEQ ID NO: 23049 - DNA, 782 bp, Zea Mays
ctccctacgtccactgcattctctttcccctcggcgaccgcgatggggcgctgggagaacggcaccggaatccaaagcagcaagaagagatggccgtgtggggaagctagtgaaggtgcacggtgtgaccctctggagtcttcgacgatgatccgctcctgcaacctcgaaactaggcgcttgcggtgggatatccggtcgtagttggccgggtcggcgctggccttggtgagccttttcttttctctctctatgtctctgcggtattacagaagctatcaaggattccattgccggacagcaggggcagggttgggcgtgcgctttggatctagacagcgttggcagattcttgcggggtccgatcgccggtaaaacttacctgctcaagttcatcgttgtagtagttttgtgtagcactttttagtttgggtaaatgattatcgaatcgccgggatggatgtctctggcgaggccctcgccgtggtgtgtgaacggcatcgccggggctcctggctgtgaaaggagatgaaaggggaatcacgcctcaccattggatatggagcaagtggtgagattagaggaagagtaccgcttcggccagattcgttatgggccgttgatggcgtgataatgcaatcgcagattagatcaaggcgtggggcggtgctgaccgttgatcttttctcggacgactacaattatgttagggcaatacctattcgtggatgcgtctgttccgtccgatttgggcgtggcgtgtgttgggccgtcgatcgtcg

SEQ ID NO: 23050 - DNA, 698 bp, Zea Mays
gctgtacaaaaattggataaaaatgagcctgaagttggactgtcagtcaccactgaagactgaaacttagctgacagtgagttctgatgaactttggagtcgattcaagcttgatcgagtgagcaaatgaccaaggttcctatggtcgaattggagctggtatataggagattaactttgttacaaacgaattagggagttgccacataaaaatttgtgaaaaacacccctgaagatgctttgtcagacaagctgatgaaggtcctgatggtacagtagcctgacaaagattgtcagatacatcgcacctcaccgccggtgatccccgcgcctagattcgcgctggccctcatgatttgtgctcggcgcaaagtggataaccgcgggggagtaaatgatctggtggggagatggattgggccacaggtagtagcttatctgatgggcttgagggctgtgcgacgtggccgcacgaccgtggttgtcagaggtcaccggtgaactcgactgcgccacgccgtggtcctttaccacgtagttgtaaccgtggcatgctcaaaattactatccctgtgtttgtaggccgtcgagcgccacggcgtgctcgccagtgcaatgtcttgtcaccgctgccctccaaatccattccaaattcggagtaaccatggccaacctctataaattgagcacctcccttg

SEQ ID NO: 23051 - DNA, 556 bp, Zea Mays
cagcttcttggttctccaaattggatttgttaccaaattccatcaaattcttcttcgaccgggggaggaatataaaattgcattccaaactcactgcaattagtacgacttcaaggttatggccttcggattgacgagcactccgggtacttttcaatcggcgatcaatgctactctggcaccctgccttcgtcagtttgacatgttattcttcaacatcttattttacaactcatcttatgccgacgacctcaagcacctatggacagtccttcagttgttagcctaggatcattgatttgtcaagctatctaaatgctcctttgcccaaccggagatcaggtacttggggcatgtgatcagtgagcacggtgtgtctactgacccttctaaggtgtgtgctattgcatcatggtcgtgccctcactcggctaaatatcttcacaatcttttgggcttagcagggtattactgaagtttattcaccatttcgacattatgtccaagtcccttacatatctcctcaagaaatatacattgttcatctgggcatcag

SEQ ID NO: 23052 - DNA, 2151 bp, Zea Mays
ctggctgttggaaggaggtgccttggaggtaggtgccgagggaatcttggggccattcaccgagttggagtaggtcggtccgggtgccttcaactgagggcagttattcttgaagtgactggggtctccgcagtgccaacatgcatttgctggcggttggttgcttgaaacggagggtgcctgaagggagctctgactctgctgactgtagcacgatggagtgggtccagatggtttattgaagcttggtcccctgggtgggagcccaaagggtcgagctctctggtgacgttcttgctgttgagctcggagaacttggaatttcctcttgaggtgccctttttcttcctcttttgccctttccacttggatagctttgttagagaggtgagagaagttgaggaagtcttggctggcgaggatggtcttaagctcgggtcttagtcctttcagaaaacgggccatcttcctggactcggtgctgacatcgtcaggcgcgtaacgggccaactatgtgaacttgtgcacatactcactgactgttctcccgccttgagttagctcccggaattcatcctccttgagttgaattatcctctggggtacatggtgctcacggaaggctgtttcgaattctgcccaggtagcatctctgacagcctcactaaaggtgtcccaccatgctaaagccattcctgaaagctgatgagctgccagttggacacggtggttttcggggcacccgatggcttccagcttcctcttgatcgtgcgaagccagtcatctacatcgaggggattgctggaccctgcgaacgtgggaggcttgagtctcaaaaattctcccatcctgtcctgtggccttccaccacctgggcgctggttttccagacttctagtgaggacttcaatgagtcgggtttgattggctagaacttgggctaggtctagtggtagatttggaggtgcggggaggtgggtctcactcccttctccgccagcttcttcctcggctctcagagggcaacctgctccaattccggaggcggtaggcgtggttttattcgaagccatctgccatgggaagagagtcactatcatgcacatgccattttttaactagttattttattcattacatcaagccattacataatacagcacaccgctaccataagctcatcacacacgagtgctatctagggtactcccgaactccttctctaaagtgtccccaaattccttgagaagatcatcaaggctggctagggacatctcctcggtgtcggacgagttccttaacccggcagggggtagggttggaggggtttcttccttctgctcagtctgacatccttggtttttggtcttcttgcgtatttttcttgcgggggcgagcttcttcagtttcttgtcatagtccatcttcagggtgcggtaagcctcacaggtattggtctcctcgccttcagctattgcgaggctctcttgaagggatgccttttcccctgaaagttccctgactttttgctccagactttccacccgggaggttaggtaggtgcagtggagggtgaggtcatcatattggttatcaagggtgtgaagatatccagccatgtagacgatggtgggatcatcctcaataggatctcctcctgacagggcctgaagtcttttcctccaggtgggggtattcttgttgctgggtggaaagtagcgaaggggggtttcaaagatcaccttgttgtagttctggcatagttgtcggagggctgttcgggcaacattctggcaagtatctggaaagcggtatccggtaaaagtgacttggaaggaaggatggttcggatagtttcggctttctcccaggtagactgccatagagcatttctccattccgccttcaagatactccttccatacgtattccgacttcttgcggattcccatgcgaagcgcacaacttcgcaaaagatgtggaaacccttccacctctgagcagtaggatgtcctaatggccagagagtcttccatatggaataggaaaagaagggtctgttaaaattggggggaaggagagaagatttttcttggggaaaggggtattttctttttagggcacattttagggtcagggctgcgacctac

SEQ ID NO: 23053 - DNA, 2096 bp, Zea Mays
gcctttgccctagttgtgtacataactactattcacactcttatgctcctcaccattcaattgaagtaaagaatgtacataaccactatccactctcttatgcccactgcctctctgttgaagtaaagaatgcctttcttagtgatgagaattcataagggtgctctttatgcaacaacaataactctttccataggatggtggactacctatcaaaggattttagtgcctcattggcattgtatgttcttgtatgattgatctattgcatacgaaggatcctcatgattgtcatgttggtgaaagttgcttttcgaagaatctagggcaccctttctttcaatatatggaccacttctttattggtcatgattggatgcaatgacttggatattgtctctaccttagagacaacttagtgttgtagcgctctaaactcaaatgacttgttgacccagttgtggaggtgtcctaccacgtttcccaaagcatcgttgaagcaggtgtcatagcttcttcatgaagtcaaccatcctctcttgaaggttactatcatcgtctacaatatcattgtgctatttacatgtttgccaacctaaacacaatttcatcgaaatagaaccatatgcaacaagatttcttttgtttggcatgcccttacgttgtctcaattcgtcaatatcttttttagaggacaacgattgccactctcgacttctttggcaatcacttttttgatcttgttgatgcgactgcatgccatgacaatcaatatgtagacgttgtgatgcgactgcacgtaagcattaatgtatccttacacaaccaaacatgccaatgcatgtcctatgcgtgcacctaattccttggagatcaaaatctcttcgtatcgtaacatgcccagtatatctcttgtgaatgtaaagttatttatgtgattgtacctagctttacactatatgggagatcaaagaaacacaaccttgtgttggcttcactatatgggagatcaagaatgcaacatgtgttggtttctcatgcacttcaactagcttccttttcatctattgcaacacctatatgatttgcttgttgcgaacttgccaactgtctatttgttgtagttggtgaagctagtgagctagtgaataaacacattgtttatatgtttgagcaaatgagcagaattcatgttcatatgtaaattgaggacattgaagcttgatgtctctatacgttagccttgtgatggatatctctacttgaacacttgcgcgtttagccttgtatatcaaaacatggaactcaacttaataaaccatcatggttcaattttgtttgagtctagctaagtgcctaagggggtcaaatctctgacccaccttgataccgcccataagacatcttttcctgcccttaggccaccatgtgctccgtcaccttgccgattgttgtgccaccccacatggtaggtggccctaacacggtgatcctactaggcacaacctcttgtggagagcggctcgaggaggcagagcctatccctggccggtggactccagtaatatacaaatcctgcattcttcctactcttgcacgccttctcaccctcttgatctccatggtcaactttgacaaaagaaacacgttccttgcctctaccattgcactttttgctccttgctatcgcctgtcggcgtctcggcgacctatttgacctcatatagagaacaaaatccatcacatgacaagaccattgtgactgtgaaagctccaaggctaccatgggcgctcccttgtatgactcacactgattcaacttatttttttgtggattgctcatggatccggtggtcaacatctttggcttcaaattgctcatgccatcgtcgttggccaaggagagggaggttgatagggagaggggtggcgtttccatggaaaagactagcccaactaacgcatccgggacattgtgtcgttgtgcttcattgagagatctaacatcgatgaattgctagtaatttgcctttaagggcataatgttaattaacaaccaacctaaaaaactcaaaccacatagtgttgacacccct

SEQ ID NO: 23054 - DNA, 596 bp, Zea Mays
gttggggtcgatgggaggaatgattgccgcagcagagctctatttcttccgcttgggcgccatcacaatcttgccagcggatcgaacaggggcaaaatcttagggaaacagaagagtagttcgaggcagaaatgtgaagttagggctcagaaatcaaaagcgcacgtcgacatgagtataaatgggggttttcctgggttgggcaccatttctaaaaagcgccaagtcatcactcgggaaagcgagacttcagacataactcgactgttacctctaaaaatgccgacgggatcaagcataacttggttgttacctctaaaacgtcgacagtgtcaggcaccaatcgactgttacctctaaaacgccgacaagatcaagcaccactcggccgttacctctaaaacaccgtcagtgtcagtcataactcggctgttacctctaaaacaccgacgggatcaagcataacttggttgttacctctaaaacgccaacagtgtcaggcaccaatcgactgttacctctaaaacgccgacaacatcaagcaccactcggtcgttacctctaaaacgccgtcagtgtcagtcataactcggccg

SEQ ID NO: 23055 - DNA, 481 bp, Zea Mays
gcgcccagaaaaagaggggaaggcaccgggaccgttgactccttgatctacggtggagattgattcggggtaccgcttcaggatgtggtgatccttgccgttgatcgaccgatggagggatcagggccgatcgtggtatggcttgtcatggaccgtgggatctcggatgtgtggccaagatggggagtgggcaatgtagatcatgactgttggatcgcttatgtataatgtggattagatcctagtgtaacccttcatcccttttaatctgcgccatcgaatctgtatcgtgcggtcctgattagaagccacgtagtgtttcctcctctgttgatctcggccgtagatctagcatcgggtggctgatactgaataacggttcatttaagggcccaaacagatccgtgccatccggatctaatctaacgaccagaacggatcgataccccttcgccatgccattttgctaaatagaccctac

SEQ ID NO: 23056 - DNA, 402 bp, Zea Mays
cgagtttgagaccgtgaaactgcatcgaagatgaagtccccaccgctggcgaccatccatatgaactccaagttgtttgaggtggggagatggccgcggtccactagtgcagcaatcaccgccagggcgtggcacagctgaggtgcgaaggcgtcgggttgttgttagagccactgtagtagaacgtcacttctgcgtcgtataatgtcgagagctccgcgtaggacgtgaaaaaatctgatagatcgtcatatgagggatttggtcccatatggatcgtgatccgtcgtcttatttcgtcagccttgaaaggtggggccggcctgtgcctctcgtgtcgtccacatggggcgaggctgagcccacctagggcttccaataccgcatcggggttctcaagcg

SEQ ID NO: 23057 - DNA, 497 bp, Zea Mays
gcaacagccattgtttcagcaggaaccgagtcagaagaatccctagccaacatgtccagcatagcgcttatctctgcatcacccggactcataggcatctcaaagtgaacttgcctctcatcgttgggaagatctccaagtgaagcaaccagaacctcaacttcttcaagagagggtcgcactctaagacccaaaccactgtcactagcaggaggatttgacacaaaatcgaaaaaggacttggaaggcggcagattccaagcaaaatatgcaacaagagcaccaatgttcgataccttgcctctaaggatcatttccagtcgactcaccaaatccacagcaggaatcctcttgttggtaacccgggttgaatcggtgacaccactatacaaataagctgggtatgccctatccttcagtggttgaatattcttaaaaacaaagtctgcaaccacagcttcagcggtcagacctctctccttcaacaagcaaatttc

SEQ ID NO: 23058 - DNA, 937 bp, Zea Mays
acttttccccgaagcaattcggctgaggtttcgggggcaaaagatttacctttttctggcaagttctgccccggagtttgtttttcagctttatcctcaggcgtggcaggcttcgtctcaatgggtcctgaaggcctagtttcgacttcggcctgaactgtggtagcttcagcaatttcctttagaggggcaggagtcaaggcttttgtggtttccaaaacagcgtcaagtacgcttgccattctcctcctcttgggagtggtggcgggagccttcactaccttcgacacctctgcctttgctggtgggctcagaatttttggtattatcactgacttttccaatcttggctctttcgtcgtatcagctttggcttcggttggcccggttgtaggcaccttcggcactacaatagacccttcagtgctccgagcgacgggagcgacttgttctgcttcggtaatggaagaggtcccctcaccaaattctggcacttcggccgtttcaatatatcgaggctggtgcgtcaaaaccttcattttcttgcccttcggcatagtggtggtggccgaagcgacagttttcctcttttttcctttcctcaaggggtagcagtaattagggtacatgaagccaatcgcatcaaaaaccatatttaatcttttcttgccccgacccccgaaggctgaggacaagacatcatcttcggccttggaatatgctctaagcagctcatcgctggtagcttcaatgcatttcaaccagtcatcatttggttcgtcaaacttctctctgtatctgaaggtatacttcaatcgaaccaggccaccttcgttggattcagcagtagtctccttcggcatttcccagttattcacaagtggccgcaccctataggctatgtgctcttgaattaaatctctcgtgccaataaaag

SEQ ID NO: 23059 - DNA, 573 bp, Zea Mays
ccaaaacttcgcctcgcccagaccaggtgtcagacacttcatccgaccatgtgtgtctaaggttcatgggatcataccgcctcagccactacgaacgttgatatgtatgagtcaagttctgacacggtcgtgtgatccgaactatggtatgagggttggtgtgtcatgatgtaggtgtcacttgtcacgacatggcgtctgaaacaagttcaaccaccatatcatagagaactcaataatggacactagataaatttctgtgggtcaagacggtgcatacgacaacctttgggatagcaatggtgtcgctatagtaccctgatggaataaataagaggacatccatggagtccttcggccagcgagaacctagaggacaagaaaatacatgatagtaccttacccctactcattctgtctgaccgttggaacttatgtaatggttccttctcctgtatcggcctataaaggggagggaaggaccatgaagcaggacataggcaatcgcttacactcgtagccagcatgagtcaacacaacacacttgtaatcacatagagcactcgtcatctc

SEQ ID NO: 23060 - DNA, 660 bp, Zea Mays
gacgagtgacttttttttttagcatggctgaccattccacttgtctgatgtctgacgggacgggagtagtagcggcggcggcggcggatactcttgcaggtgcagatgtcccacgccacgatagttcttggtgcggtgcggttcgagtaggcaggcatacccagcaccagcagcgggcaatggcacggcagttctcaggtccgttttggctgggttcactactgctgccgtggcggaaaagcggcgagagcacacacggaacctttttttgttaattattattccgccatgggtggcgaagaacgaacggatttggggtggagggcagttccattcacctcaccccgagatgcttcatgctcgtcgtcaaatggagtggagccgtatgcttcccggcttaatcctgtcctcggaattttgaccgcattaaccccatctatctacttgtgcggttgtgctcctccacgtacgccggccccgatgccatcagtcgttttgtgcctttacctgtgcatgctgtgtgcactccagcaccagacgcatccaagcccatcatcatccatcgccgatgaagaaccattgctgcgttgttgctccgactccgagcaattccctcacgtggttccagccgctggcttcccgatcacgagagcatcggag

SEQ ID NO: 23061 - DNA, 468 bp, Zea Mays
ttgttcccaaggaccctgaactcagaaagaagatactagatgaagctcacctttccaaattctccatgcaccccggtagcaacaagatgtaccatgatctcaggtctttatattggtggaccagaatgaagagggaaattgccaagtatatatctgagtgtgacacctgccagagaatcaaagccagtcatttgagggcagcaggccctttgcaacctcttcccataccatcttggaaatgggaggacatttgcatggactttattgtaggattgcccactacctctaggcaccatgattccatttgggttattgtggacaggctgaccaagactgcccatttcttgccagtacataccacccacaagacagagaagtatgcggagatttatgttgatcaaatagtgcggttacatggtattccaaagaccattgtatctgacagaggagccttgtttgtggcacgct

SEQ ID NO: 23062 - DNA, 474 bp, Zea Mays
acaacttataaaacccccatgacttgaccgttagaccaacccaagtccccttgtgcacttgttgtgtcaaaaaaaaattgttgttggtgtctagttgcgcaaaccctatcaaggccatgtttctttccataaatccttgcccctaaaacttcatagcattcctgttgatcatccagctgatcttgttgcctacctctcctttcgcatggacctggtgatctctttccttgtgaatcatgttgtggctttatcatccgaatctctggatcccttaatgattctgccccgtcacctggttatctgctataacctgttctcaagtatcgaatgttgatctgcctaaatctctcaattctaataatgctcatactcgttctccaaggatcacgacgcttgttttatcaacttatctctaaatggcatatccatttggttcaatggatttgattcttgtctttagttctctcatgtctc

SEQ ID NO: 23063 - DNA, 433 bp, Zea Mays
gttcatactagttctgggattttaattcaccgccggatcataaaaccctgacaaggtacgtacttaacatctgaataatggccaaggttaacagagagagaaacatgcatactatactacaacagattgatcatatcaaggttgaaggaaggaaggaagcatgctatagtgctactaattcaccgcgacagctagctagatagatgccaaacggtccatttgacatacgctttaacctcttgtggtaacacagcttgtgcattggaagacatgacgtagaactcttcaaacctccggtccaggccagctccatgcagctccaaatactaaaacaccatgggcatatctcacagttgcaccgaattaagacagaggagaggagaggagaggaggcagctgatcgatatgataccacggcaaggccggatccccc

SEQ ID NO: 23064 - DNA, 955 bp, Zea Mays
tgtcgccctcctaattcttgcaatcaccgcgtgtgctgctgactcctccacgaccatagtgcacccagattgttgtgtctcatccccctcactctgcgcctcgtcttgattcccatctagtcctttttttatagttgggcgacctctttttcttggagttcaacctacagttttggcacttctctttttgtccttgttctcggccgctctgcttctgtttgggttctgagggcatgttgtgctatagtgccccctaacatggcaggtttggcactctcttatgccctgacccccacaatatgtgctgtatggattagcaggttccacactatttttagcacatttagccccactcgcagacttcctacccttcgtgcgcgacactggcggttcagtcaatgttagatcagcgaggcagtttgcagaacctggattgaggcccgattctggtggtggtgtaggtccagtgggcatcacaacaggttccatattgttgtcagaactttgttgtgttggtgcaatgggaccaatattctgccgtccatctgcatcttgctgcaactcagtatttgttgcttcatccggaccaatctccgctgttcgtagaagctcaatcccaggagttatcatgtcgatgtgcctgatagtttcagtgtatgctctgtcagatttgcttcccgctcttcccaggcgcattaactttggcagcagcttcgacaaccttgactgctctgtctcattttgaccaccaacactcacatcgtgccggttccacggaaccacagatcttgcattacgtgtatatcgcttcataatgtactttttaggtatgttttggacttggaggtgggtgaatgcctttattatgtgcatgcagaacagacctgcattttttgttgccatttggacgtaaatatgcagggacatcaatgtttaatttttttaatgtaacgag

SEQ ID NO: 23065 - DNA, 868 bp, Zea Mays
cagggacagctcacgtcgcggctctgttccgcccgcctttcacagatgggtcgcgacgttcaccagcagactttactacagcagcgaaatacttatatgagctcatcagacggactcttctgccgaggatgggatacagggaggctaccactcatattcagctttggctccttggtgccctggtctcccactctgagtttgatgttgtggacttcctgatttgtgagatcgaggacaccgttctagatgggattcgtgctcgtcggcagttaccttatgctcactacttgtgccacatctttgcgcagctgatttagccccctcgatttcagagcacccttgaggcctctcgccttgtttttggatcctatcgtcctgctcctgagattcctgtgccagctactgcttctgtgtttgactctcaggccgaggatgcagctcttcgacagtttgacactcagggtacagcggctgatgatgatgatgatgatgattttggggttcctcctccgcctccgcctcctatgcctccacgatcacatgatcatgaggctgggagttctcgtgctgcccctgctcctcctccggctatggaccctgctcttgcgacgattctggccaacctggcagccgagcaggcccggttatccgagacgatgctctcgatgtttcagagcatgcaggacaggcaggatgcacttcagcagcagctacttcaggatcgggctgagagtagggcattcatggcccttatgcttcagcattctggtatctcagcacctccagttcagtctgctccacctcctccgcttcatgctccagtggtgccatcgattttgtcaggaccccctgttggtccctctccgct

SEQ ID NO: 23066 - DNA, 324 bp, Zea Mays
gatcagtatgttgatgacgttattggcgttgtcgtagcaccatatttggagttagaaagatatgcgacgttctaatctatggccatatttgaacctctagagctactcacccagacagcctatgttgtgctcggtttgagatatggagtggttcatcatttttctcactcaagagtttgttagattctccaccaatcctcctccctcatccctcaagctaataattagttagtacaagcatgagaatggggtgattcattggattcgtgaaatgaactcatgatgcaccgcctcatctaggatgagttgatcctcaaaccaaac

SEQ ID NO: 23067 - DNA, 738 bp, Zea Mays
gtcatgtcatgccttagtctgtgcttgatacttgtttagggcctgcacggcgagcacacagtctccatcgataagatctttggaagttgattcgtcgatgtcagggatggctaattggtttgttcgtggggatccgtgctttaactcttgtggtgtcattgcctcagatccgtacatcagacggaagggtgtgaacccagttgctctggactctgttgtgttcaacgcccatatgacttcgggtagttggtcttcccatttgccctttttgtcgtcgaggagccttttcttgatagcgctgaagatcttgtcgttagctcgttcgacgacaccgttgtactgtgggtggtagacagagacgaacactaccttggtgccgatggagctgtagaattctcggaagtccttgttgtcaaactgcttgccgttgtcgactgtcagctcggatgggactccgaaccaatagacgatgttctgccagaagaatttctgcgcggtctttgctgttattgtggagactgcttagccctcgatccatttggtaaagtattcgatgatgacgaaggtgaattttaggttcccttgtgccgtaggcagtggtccgacgatgtctagcccccatcgcagaagcggacaggtgtgggcgatgagcttggtaaattgcaaagaggcgcctgattgaggagagaatttctggcatgcttcgcatgatctggtgactcggttggttgattattg

SEQ ID NO: 23068 - DNA, 436 bp, Zea Mays
atagcgtggatggatcccacaaaacttggttacggtgtaatagaaagcgatatatatttggtcagtcaacgttatgtattaacactagctggagagtggtaacgaaaagatatagctaaatcgttatgaaccggcccaaccaaacacaaaagaaagggaatagatgccactgtaaatggaccacagacaaaaacatctaactagacatcctctaaacgtcaacccattggcattggcaaaccgatacagacgaggaaaacgagtcgagacaaaacgcgagtagacaagttgcttcctccgtgcacagatagcgagcgacatctaaagtgctttctagtagactcatcgaaagagctttgattaagctatctgcaacctaatcttcaatgggtacaaaatcaatcttaagaagcttctttatagccctctctctcac

SEQ ID NO: 23069 - DNA, 629 bp, Zea Mays
gttttacagagtacatcgtcgtcccgatagcttttgaaatacggctaaggataaaacttcctgaggtgttctatattccaggagttcccaatttctgtaccgtccatttgagtgagacgatatgatcccggctgagtgacttctgctactatgaatggtccttcccataaggacgataacttgtgccgtccctcccccgttagaattcggcggaggacgagatctcctactgaaaaggatcgttgtcgcatgaccttgtcgtgatagcgtctcagagtctgctggtaccgtgccgcttgaattactacgttcagccgctcttcttcgagtacatcgacatcttccagcctggtcgtttcggcctctgctatgctttcaaagatcaaccttggcgccccaaacttgagatcagcaggcagtactgcctctgacccgtagaccatgaagaaaggagtgtttccatgcagggctcgactaggttgagttcttaggctccaaacgacgtaaggcaattcccttatccactttcctgcaaactcatttttatcgaagaccttttttctgagtgcctccaatatcatcccgttagctcgttcaacctgcccgttggctctcgggtgtgctaccga

SEQ ID NO: 23070 - DNA, 582 bp, Zea Mays
caacaaacagcctgatgccctcaaatgaatataacagccatatgaactggcattgtcaactatgcactgtcaccacaaacatccatatgccctaagctatttttcacaaaaaagaccaagtgtagtatacagttcaatattttcaaagaaaacatcatagggcaaagcaactatatcacctcatatgtatcacaagcctcaaaacagcactcaggttattataattccatcacaaggctgctacaaaccacatggcgcagatatctcaagcattggctcagtaaaagtttcagaatacaaacctgatagtatttggccaatgtctcctgagcacaaacgacggctgcactcgcctgttgataagaacacatagcacttttttccgcctccacagcggattcaagaacatcaagcgtagaatccacatggttacctactgatgctgtggcgcagagatcaccagcaaccacacaggtggcagcagaagcactcaatgtgtcacgggctgcatcaacggtcgcggagaacttctgggcacatagctcagcggcagattccatgccggaatccatatctgcaaac

SEQ ID NO: 23071 - DNA, 811 bp, Zea Mays
cggctggtaagtttttaggatttgtcatccatgaacatggtatagagatagaccctgaccgaatcaagtctattcagaatgtgggacctccgacctgtaaggtcgaagtgcagaagtttctcggcaaggtaaattatttacgaaggtttatttctaacctagccgggaagattgatgccttcacccctatccttcggcttaagaatgatgccgaattcgcttgggggcagagcagcaggaagcatttgatctcattaaaaaatacttgtcttcggctcccgtattaaaagcaccacaagcaggagtaccatttcgattatacattgcagctgaagataaggtcattggggctgttctgacacaagaaactgaaggaaaggagcatgtgatgacatatttaagtcggaggttggtggatgctgaaacaaggtacacttttattgagaagttatgcttatacttgttttatgcatgcaccaagtgtagatgttatttactgtctagtcattgcactgtttctggtcaagccgatgtgatcaagtacatgttgcataacacaattatgagtggtagaattggtaagtgggcttatgcactcatagaatatgacttggcctatgaaccattgaaatctttgagaggccgggtcgtagcggattttattgtagaacatcggattaatgatactcataaactagacatgtcatacctcacttttactccttggactttatattttgatggatcggtttgcaatgaagggcaaggaatcggcatagtacttgtttcaccaagtgatgtctccttcgac
